United States Patent Application Publication US 2015/0240253 A1 - sequence listing, part 15

SEQ ID NO: 68552 - DNA, 2020 bp, Zea Mays
gtatcatttcccccctcccccaaaaacaggtcgtccgcgacctggacaccaggaaaacggcgacgaaagtcctccagctgaacccaagttgcatcagctgctgattgtcccagccattgcacgagcagtcccacacgcctcagttcttgcgtgccttagtaaccttctcaggctgaggtaggactctgccatgtaatattgggggtagaggaactattgcagccgggggagccccagtatatttctttagtaaagagacatgaaacacattatggatgcgggcgtgagatggcagggcaagcctgtaagatactgtcccaatttcctccagaacctgatagggaccatagaagcgaggcccaagcttagagtaggcggctggtgtgattcctaaagttgtacgctgttgcagtcgaacccacacccaatccccggtagtgaactgcacttcccttcgagacttatcctggaattgtttcattgtgagctgagcctgtatgaggcgttccttgatctgagctaaaaattcatcccgatcttgtaactgagtgtcaatagcagctacaggggaaagtcccggttggtaagagataatagctggagggtctcgtccatacacaactcgaaatggtgaacaacgaagggctgtttgaaatgaagtgttataacagtactccgcctaggacaaccactgtaaccatgtgtggggtcgatccccagctaagcatcgcaagtacatcaagatgatccggttagtaacttcagattggccatcagactgtgggtggaacgctgaactcatctgcaacttgacccctgtcctggtgaacagctcagtccaaaatgtactagtgaaaactggatcacgatcactgacgatggagcaaggaataccatggtgacgagcaatatgatcaaagaaagccttagctaccgaagatgctgtatagggatggctgagaggcacgaaatgagcatactttgagaagcggtccaccacggtaagaataactgatttgcctccaacctttggaaacccctccacgaaatccatggctatatcgctccaaacccctgaaggaaccggaagtggttgtaacaaacctgccggatgaaggtgttcggacttattacgttgacagactgaacagcccttgacaaaatctcttatgcggctggcagcaaggggactatggaaggaagccctccagcggttgagggacttttcgatgccctcgtggccttcttcatgaactgaagctaacaacaggggccacatggatgaggcatctggcacaaaaaattttcccttgaacagtaagagaccatcaacctcggaccacccttccttcgcagttccagccaccaactgttgcctgagcgccaccgcgatcccatctcagcccgtagagtgtcaaacagagcaaatgtgggggtggaaatactgtgtaggttctgcaggacttcatctctgcgagacaacgcatcagcagctccattgagtttgcctggcttgtactcaactgtcatgtcatacccaaataatttgctgacccatgtatgttgagggatggtggataacgttggtctaggatgaatttcaagctgtagtgatcagtctgaactgtgaacggtcgccccagagatatggacgccaatacctgacagctttaaccaagccaatcaattcccgttcatatgctggcagcttttgatgatgaggggctactggcctactgaagaaagctatggcgccctcaccttgatgtaagacagccccaaacccaactccagaagcatcactatcaacaataaagtgacgagtgaagtctggcatctgcacaaatggtgttgtgatgagggtttgtttgagcaatgtaaaagcctcggctgcttccggtgtccaatggaaagactcccttttcaataaggcggtgagaggtgctgctattgttccatatccagcaataaacttctgataatatccggttagtcccaaaaatcctctgagagctcgcaa

SEQ ID NO: 68553 - DNA, 552 bp, Zea Mays
gttataagtgggcgagagagggctaccaagtctcttatacgtggtgaggcctaagaactacgaatctggtgttctctaccgagctgagccttagacgtcgcggttgtatgctccttggcttcggccccttttataggctaaggtggtggtcggttaccggctccttcacaggggaaggagctactgtgtgtggtaaaataggtcgttctacctaggtaactcgtgcttgtcggcatgtgtctcgatcgtctaagcttctctggtcgtgctctttattatcggctgcgcatgggcggcgaggagctccaacatcatcattactgtctttcactgcgcccacccatggccttcgtagcctaggtctcggcacgacttgttgtgttgcgagtcctgtagatgaccagcacacttaggcctaggtctgataggttatgagtggacctcatgcctaggggctcgtaggtcatgagtggaggaggaccgacttctcctgctacgactctatgccatgcatagttaatacgatcaatcatttatggcgggccagtcctg

SEQ ID NO: 68554 - DNA, 439 bp, Zea Mays
tagccaccatttgttttctttctcatttacttcaaaagatgtttttcctgtgcacaccggttcaacagggtcctatgccaattcaatcggaattcatcaaggttttctctagaaattttaggttcaaccggaatttcaatttctagttgaaccaggaatttacagagagttcctaatgaaataccagttcaaccgagattagtgtcagttcaatcgggaattgcacagccgcaaaaaaatcagctagatctgatttgtgtgggctataaaaacctttcctccccacttttaaaccctaagactctcgaacctacaccctatgacggttgctctcctccgtttcaaagtgtgtcgacttcgatctcacgcttcaagtcctcccccttcgattggtgggaagattcttcggtgtgagataaattatcaattccaacgtgca

SEQ ID NO: 68555 - DNA, 606 bp, Zea Mays
caaaggtttaggtccgaggggagaggaacgcattctcagtggtggtccgaagccgtgtaacctcttagcctagtctagcaccctaagctcgcacaatccatcatcctaggttggctgttccagaacctagagctagcccctaaaggcttaggccttatcctgacacagggaaaggtcccgagaaactaatcgatgaggatcagaaacaaaatacagaagattgaaagcgttcggaacaaggacccatatatatgtcgttaagcaccataacgaggtcgtgtgcatggatgccttttttgcacatcaccaggtgagaaggcagaaaggaactgtcacaaggaagggcgatgccgactactgctcccctcatcagacaaagtccggcactgtcgtgtgtccagcgatacataccatggaccaccgaggaaactcagtctcgacctccagagtataatgtgccccagcattaactatggacaagacatatacctgtccactccagcggtggacgctacgaccaaaatacacgaaccgcacagtggctcgctcgttacaaggcaagaccattgactctctgcaccacgtgggctgctgcaatcatggccc

SEQ ID NO: 68556 - DNA, 2133 bp, Zea Mays
aatgtttttcgaggtttattcggtggcggagaatctgaagacccggttcgcggcgctcaactttattggtcctgcagcgacttggcgccagacgttggagcgtcgtgggcgtatcctgaattgggaagtgttgtgcagggaagtgtttcaacgttttgacaaggatcaatattcagtgcacttaagacagttggactctcttcggcaacggggttcagtgacggattacgtgcacacatttgaacagttggcacatgggattttgctttacaatagcaactacgatgatacatattttgtcacacgattcttgggagggctcaaagaggaaattcgtgcgtcgattgcgttgcatcgtccgagagatgtagcaacagcaagtgcgttagcactgctacaagaagaggaacttaatctggtgaagactcgggcaatgactaaggagtacaatagaggtcattatcgcacaggcaaggaaaatgacaaaccaaaggatggcagtatggaggtgaacaaaattaaagttgaccgaacggagagaagtgacaagttagaagcattgcgaaattacagaaggaaaaatggattgtgtttcaagtgtggagagaaatggggtcaacagcataagtgccctacccagatctcgttacatgtattagaagaaatcttggatgccattgaattggactatgaacaattcaatagggaagagaatgaaacggtggtggaagaacaagtgttagcagtccaagaaacgatatctgggagtaagaaaagaagtacactgcgattactgggcatcattggcacgcaacaagtcttgatcttggtagactcggggagtattggcacttttgtcagtaagggattagtggatcgtttgatgttaccaacacagagttgtgcccagacacagtttcgggctgctgatggaggaattatgagctgtactgaatgggtgccaaggctgcaatggtttattcagggctattcgtttgtttctcaggccaaggtgttaccattacaatgttatgacatgatattaggcgaagattggcttgaggaagtaagtccattgtgggtggattacaagtcaaagcaactcaggtttacctatcaaggtactagagtgtccttgcaaggggttcaagataacatcacgagctgtcagagtatctcaggacataagttccagggattacttaatcatggagctgtctatcattgcatacagttgcttctgataaatcaggacaatgatttgcctacacaaggtcctgcctctcgagtatgtgagattcagaatattgagcaacagccaatacctctcagaattcagcagctcattgattcttttgctcacctcttcagttcacccacaggacttccaccacatcgcttagctgatcatcgaattcctctaatgcctggtgctcaaccggtgaaagtgagatcttaccgatactctcctgctcaaaaatctgaaatcgagaagcaattgaaggaaatgttgactcaagggataattcgtccgagcactagcccctttgcttctccggtaattttggtcaaaaagaaagatgggagttggcgattttgtgttgattatcgacacttaaatgcaatcacaatcaagaataaacatcccatgccaatagtggatgagctgctagatgagttggccggagcttgttggtttactaaattggattttagcgctggataccatcaggtctgcatggctattggagaggagtacaagacagcatttagaactcataatggcctgtatgaattcatggttatgccttttggccttacaaatgctcctgcaacatttcaaggacttatgaatcacatttttgctgatttactaaggcatggagtgctggtattcatggatgacattttgatttacagccacacattacatgagcatgagctgttgttgcaacaggtgtttcagactttgaatcaacacaagttcttgattaaaagaactaaatgctcttttgctcaaccatccatagaatacttaggccatgtgatttcagcccaaggagtatctactgaaccctccaaagtggccgcagtcaagaactggcctattcccaagaatgtgaagcaactccg

SEQ ID NO: 68557 - DNA, 694 bp, Zea Mays
gacacggttcaaggtatcaagaatcttgataggatattctgtataagtcagatcatcttgaacactaagatccttcataggtagctgctcttcgggtaccctgaggcacttcttcaattgtgatacatggaatacatcgtgtacatccgcaagatgatcgggtagttccagttgataggcaacttctcccactcgctttaggatcaagaagggtccaataaagcgaggggacaactttcctttgactttaaatcttctcatgcctcggattggtgacaccttcaaatatacgtgatcacaatccttaaactctaataatcttctctgggtatcagcataacttttctgccttgactacgcagttctcaaattctcccttatctgccggatttgttcttctgcctcttgtataatccctggtccaaagaactgcctttcaccagtttgatcccaatacagtggagtcctgcattttctgccatataaagcctcaaacggtgacatcttcaaactggcctggtaattgttattgtaagagaattccgcatacggtaaactcttatgccaactaccaccatgtttaagggcacaagctcttaacatatcttctagtacttggttggtcctctcggtctgcccatcagtttgaggatggtaagccaaactaaaattcaatcttgtatctaagcactcg

SEQ ID NO: 68558 - DNA, 529 bp, Zea Mays
acaaaatactgctctccttagtggataggctgaaaaccagcgaagccaagcttaacgcacaagccgaagctcacaaagccgaggttgaagatttaaagaaaaaacttgctgaaataaatgaaaatttcgaagttgcgaaggctaagcaagaaataagtgaaatggaaagagctagggtgcagaagaacattgaagaacttcgagattccaaggaaaaatgctacgaagtatccatggaatgcacgaagaaactgaaaaatagctttgaaaggtggtagcatactcataagagcaaaaatttatccgtggtgattctaaagggattatccagtggatcggcgaagaggtcgaagcttttgaagaaatactcagcgatcgtggggacttttctgccttcgccggtgcatgaggggttgcaacaattttggagaaaacaggttgtgaacatgttaaggctgcagcccaggcagaagccatcttctcaacagacgatacgaatgaaccttcggtcgatgcttctttgatgggc

SEQ ID NO: 68559 - DNA, 969 bp, Zea Mays
gttgcattcagaaacaggaggtttgggctgcctgaggagctggaagaagcacatgaaagcagtgctgagcgaggctctactaaagtactttcccaaacaaatagcctcaagtaagattaggagaagcacgtaacaatttttcatttgcacattactagttttattgtggttgcattgccttgtcgctggtatttcctatcagcataaactatttattattccgtgcatctcgccagattcctcgataaggcttgcattaaccatggcaaagaaggagcctggtcactttgcagtgtgacaaaggtggaggagacgaaggctgtgctccgtatgcttcctgtgtttgtcagctccatgatcggatatatatcaaaccctgtcatcttcacattcactgtgcagcaaggtggcatgacaaacacaaggctgggcaagatccatgtttcccccgcgacactcttcgtcatccccatcaccttccaaatggcaatgcttgccatctatgaccggttcattgtgccgttcttgcgcaggcgcacaggctatgccagtggcatcactcacttgcagcgcatcggcatgggtttcgcctccatgatacttgcgtcggtcatcgcagcagtagttgagagaaagagaaaagaagccgcagtgcagatgtccctgttctggcttgcgcctcagttcttcctgctgggcgtgtcggacgtgacctcgtttcctgggctcctcgagttcttcaacagcgaggcgccacggggcatgaagtccattgccacagccttgttctggtgtgagatagggcttgcttcattgctggccaccttcctggtgcaagcagtgaacagcgtcacgaggcatgggcaccaaggagggtggctcgagggttccagcttggacagcagccatcttgacctcttctactgggttgtcactgttgtcggtttgattggtttccttaactacttg

SEQ ID NO: 68560 - DNA, 1043 bp, Zea Mays
ccggtgaatatgatgaagatcatgatgtctgggttcttgacatgggcgccagtaatcacatgacggggcgtcgtgaggcactggtgtcgctggacagatcagttggcggcacggtgaggttcggcgacggatcactcgtccagatcgaaggcattggctcggtaatgcttcaagccaaacagaaggggcacaaggtactcacagaagtttattacatacctaaattaaagagtaacatcattagtttaggtcaactagaggagggtggatgcaaagttgtgatcgaagatggtttttgcaatgtgtttgatgtcgagcgctcactgctggccaaagcacctcgagtcaagaatagactgtatttgctaaaaactagtcttgcagcacctgtctgtctagtagcaaaggttgatgatgtggcttggatgtggcatgggagatatggccatcttaattttcaggccctcagagatcttagtgtcaagaaaatggtagaaggcatgccattgattgatagggtggaagagttctgtgatggatgtgctcttggcaagcaacaacgacagctgtttcctcaagtggcaaattacagagcagacaagaatttggacctgtttcacacagatctctgtggacagattaggcccaagacaccaggaggtaagagttatttcatgcttatagtggatgatcatagtagatatatgtggatacaacttctggcaacaaaagatgaagctttcagttgtttcaagaaggtgaaggcgctagctgaaactgagtcaggtggcagactcagggcatttcgcagtgacagaggtggtgagtttaattctattgacttcaaggagtactgtgatgagcatggcattaagcatttcactaccacgccatatacgccacagcagaacggcgttgtcgagagaagaaaccgcactgtggtggaaatggcgaggtgtttactgaaaagcaagaatgttccaggggagttttggggcgaagcagtcacaactgctgtgtatctgctgaatcgagctccaacg

SEQ ID NO: 68561 - DNA, 648 bp, Zea Mays
gctcagaatttttggcatttttattatttcttcaacctttggctcttcctccttatcaaccttatcttcgattggctcgaccgtatgcgccttcggcactacggtcggctcttcagcgctttgtgcaatcagagcagtttgtgttgcttcggttgctgaagagcaccctgcgctaaattcaggcaccacaaccggttcaatataacgcaaccggtgggtcagaaccttcacctttttgctcttcggcacatgctcagctggggtgaccgaagcagcaatcttcctctttttctcttgccctcgcagcggatagtggtaatcagggtatacaaagccaatagcatcaaataccttgtttaatcttttcttgccccaacctccaaaagttgaggacagagcattatcttcggccttggagtatgctccaagtagctcatcactggtagcttcgatgcacttcagccagtcgtcgtttggctcatcaaacttctccctgaatttgaatgtatactttagtcggaccagaccaccttcactagaatcgacggtggtatccttcggcatatcccagctttccacaagtggccataccctgaaggatatatgctcttgaatcagatcccttgtgccaatgaaggcacacacggt

SEQ ID NO: 68562 - DNA, 468 bp, Zea Mays
ccacttcatggttggtccatttcttgctctggtatttgtggatcttattgatcattgcctttagccggttgtacattttttgtggactctcccttgatcatggcaaaccttcaaagtcccccttcaagaagctccatcttggcaatcttggtgatcttgttaccttcacgtgtgatcccgagggtgtcccaaatttccttcacgctctccaatccattcgccttgttatactcctccctacataaagaagcaagtactaccatagcggtttgataattgtgatggatcatttgttccacctccaccagattgtagtccccattgttgctatccggtatctccatccctacttcaacaacacgtcaaatgcttgggtggagtgagtatagatgcccgctcatactatggttccactaagaatagtctctagcagcaaaatatggtggttttccaagtgaaaccaaaagt

SEQ ID NO: 68563 - DNA, 491 bp, Zea Mays
gtaaactttaaatatttatcatgaagagctttgcatagtcaaggaacaatggagcacttaataagagaaactggagtgtggccaatatttataggatgagagacaactaatgcacagtctgccagttacttttagcatattaaaaccacattgaaataaatcggcagcattcgtacaatttattatgttttgctcgagaatgttaggacagctatccgattactcctaatgctgaaatccagcttgcaataatgtcaaaaatagagcacttaataagggacagtctgtaagttactttcagcatattaaaaccacatttaaataaatcggtcgcattccttcagttcattcatgtagggcgactatgttaattcactaaacttgcttgtagtcagtgttgcagtcctaagaggactggagatctatgcagccagcatgatgagacttcaagcaagactcagttagtaaataggttagtaagtgcatattgg

SEQ ID NO: 68564 - DNA, 326 bp, Zea Mays
gttctgcgaccggcgttgaacccttgtcgcaccctttttctcggtaagctctaccgcaccaccagtagatcgagacacccctctgttcgcccctaacccctctagtttgtccagttcgcattcaccggagccttccccatgcagtcgaaatccgccgtggtcgacctgaggctccaccgcatccccgtcgttccccaagcactccgaagctcgcactcgaggtgagcaacctacccatacctttattgcatcaactaccgcccagtgcccgcgaaattctttgccggagttgacccgcaccaccgtaggctacctcgccgtgttct

SEQ ID NO: 68565 - DNA, 821 bp, Zea Mays
atttgtttgtctaaagcaaggtggcgactctatgatgcagtaccttactaagttcaaccatctctctcaatatgccatagaacaagtcaatacaaacttaaagaagaagaactgtttcatgagaggtctgaatgataggctgcagtggaaaatggccacctgtttagatctcactttcaacaggcccatgagtacaacaatctcagtggaggcaaagaactcgggggcaagtgaagacaaaaaggtttggacgtgaaggaggtgagggatcctctcagggatccgaaaagcgatcaagtctagtgattcgttccttcaatccaaatcgttcttttttctcgcccatcctcctatccttttaagcagccgatcttcattcatccaactgtcgcccctactcaaaccattcagccgggtgcccctggtactcgttttccagccttacccagctcatctaacatttgcttcaactgtggaaagcctagacatttcatcaaagattgtccttaccctaagcaaaacaagccaaactttcaaatgacttctgggaatgcttctcaaagcaagggtaatatgacaaatgatcaggcaggtaagggtgaaaagagaactggacgggtttactatactcaaatggctactacaccggacggagagcccatattgatgggtacgttttctattgccaatcatcccaccatcattcttttttattttggtgcatcacatacttttatgagcaaatcttttgttgagaagcattgcatacccagcgttgaatcagagaagggtcttattattcaatcacctagggtccaaat

SEQ ID NO: 68566 - DNA, 1043 bp, Zea Mays
tgaatagcctacaaaaattttctacacaactaacaattgtaactaaagctaatataaataatatactgacgggataacttgctctagatttaatcaaggctatttccctaggcaaactaatggcttattaatgatatgtatgaatatgacaagctatgtgctaaacaaaagtaatgaaataatagatacacaataaatgaactagcaatgcgtatgtaatagtgaggatagtttgtagtgcaaaccatacaaggcaagagatgacataatatttattccctaaggtttggttgcttgttggcaactgtcgaggatacgatcccggtccctggggcccatcggccagcgagcacactagggaaagggccctggcatctggggcccatcggtcagttggaggagatagataacatctaccctggaagaacccgcccctagacaaacaccgcgatactgaacctagggtcatgcgtggcggaatctaacagggggccgggcgtgtcgaagggaaagcactcgagtggatctcgcgtctggcctgagagcaacccatcataagtaaccagccacattaattgcgtccgtctgccactcatgacctatgagccccttgggctgcagagcactcatgacctgttagaccatcggactgcgacacatttatggcatgctcatccctcggccagcgtcacactcatgacctaccgggactaggcctgagtgcataggccgctggcagggcgcaatacgacgaaccgcaccgagccctaggctatgaagactagggtcgacatagcccaaatgatggcaattggggctcgcactgcccgcaccatccgccataaagaatacgagacaaccaggcgaccctggggcccacaagtacgtgtggctttaccccatgtagaacacttggttttacccttgcctattggttctctttagacaggtgcacccacatggtagaccccagacgagaagacacccagaaggaccgacgaacaggaggacccagagactggagccccaccgccaagccaaga

SEQ ID NO: 68567 - DNA, 667 bp, Zea Mays
cggcgacgcagcagggctgcgcctcgtcggcgggcttgtggaggagcttggacgtggggtccacaggcgacaggaacgatgtcgaggaacgcagcgtgagagccatggctttgcctctgggtcagagaggagctgaccaaccaattaacaaatccgcaagacgaacgcgcagaagattgtgcttggcaagcgagcgagagagaggaggggacgatttgaacaaggtgatttcaactcgtttgcaaaaggctgagcaaatatgactatatgagtggggaattgagagagtctcgctgtgcgctgggagctgtatttatagagagttgccggtggagccggggagcgacggcgatggatggcacgggcgcttatccctaatcaaattattaacgactaggattaggactataatcaaatggacgcgatctagttggagactgatcattgcgtcagcttatctacccgtctgtccgttccgttgcccgctgcggctgacagacgccgctggtgatcttatccaaatcattttatttaatttgtcccatcaggctgcagctgattgtccctgcctgacacctgtcctgcatcactatccatgcacacattggcatgcatactacggaaaataatgctaccatattagtagggatgacaacggacagaaacc

SEQ ID NO: 68568 - DNA, 1003 bp, Zea Mays
tgccaacttaagccgattgctccgttagcagggtatagtggtcaccctaagtcaagtcaatgtgagcatgtcgcaccgacttaagtcatcgtcgacttaagctgattgctccgttagtagggtatagtggtcaccctaagccgagtaagcgtgagcatgtcgcaccgtcttaagtcgtcgccgacttaagccgattgctccgttattagggtatagtggtcaccctaagccgagtaagcgtgagcatgttgcaccgtcttaagtcgtcgctgacttaagctgattgctccgttaatagggtatagtggtcaccctaagccgagtaagcgtgagcatgtcgctctgtcttaagtcgtcgccgacttaagtcgattgctccgttaatagggtatagtggtcaccctaagtcgagtaagcgtgctgatttcaagtccaatcaaatcgaagtcagctgaaagtcaagagtctaaatgtctttgaaaacgaaaactttattgatgatgaagtcccccgattacagagtacaatgttgcttcgagaatttttgaggcctcgctagggataaaactttctaagatgctctatgttccatgagttcccacttccgtgccatccatttgagtgagccggtatgatcctggccaagtgagctttgatacaatgaatgacccttcccatagtggtgacaacttgtgtcatccttctcccgttagaatttggcgaaggaccaagtctcccactgtaaaggactggtgtcgcatgactttatcatgttagcgcctcaaagtctgctgatacctagccaactgaattactgtgttcaatcgttcttcctccagcacatcaatatcctctagcctggtagcttctgctttagctatgttttcaaaagccaacctcggcgccccgaatattaggtcggcgggcagcattgcctctgaccaataaaccatgaagaacggggtgtttccatgcagagctcgactgagttgagttctcaagc

SEQ ID NO: 68569 - DNA, 491 bp, Zea Mays
agaggtttggaaccataaaaattgagctcatatatttctttgattcgtccaaaataatcgacatcgtcaaggctgggcgtaaagactccagaacacgttgttttccgattgggccgacttttgtcgtagtttgttgtgcgaaaacggtatccattgacgtcatacccagaatatttcttgaccctataagcaaagtcgttggctacttgtctcaactcggcactcatagacggatctctttggccctgcaagtattcgcaagttaaaagacgctaaattgagttcatagacggatctctttgacaaactaagcacgtaccttacgtttgaaccaggaaatgaaatcgggccacccatttctcacaccctttctaagaagagtgtcatattcctatggagtggggtcccttgatcgacgccagaattcatgaagaaattgttccatgtatggcatcacctctttaaggttggtcaatacatatagcatgata

SEQ ID NO: 68570 - DNA, 297 bp, Zea Mays
attggatccagtccgcaccatgcggaatggagtgtcactactgctgggcacagattcaaagacacctgccaagtcgtcgctcgcaaggcattgagggccctgtgtcagatctatgaagaagaagtggccgacaccccgctcagattcattccgccctttcagagagaccgtccagtttggatggccaggatgcgtgcattggaagagcagcagctgcttgaggacgaccccacagtcgtgtacctcactgcatacctgctcacccttgatgcacagtatgatttcttggcttggcac

SEQ ID NO: 68571 - DNA, 565 bp, Zea Mays
tgccgtcttcggaatgtctaaaggtcgaatcctgagctggtgataacctgacctcagctctatctttgagaacacgttggctcctctcagctggtcgaacagatcttctattctggtcaaggggtacttgttcttgattgtgacctcatttagagctcaataatcgatgcacatcctcctagtgccatctttcttctccacgaacaggacaggggcggcccaaggcgaggtgcttggcctaatgtaacctttctctgatagctcatcgatctgcttcttgagttcaaccaactctggtccagataccttgtaagctcttttagaaatgggggcgttgccaggaagaagctctatggcaaactcaactttccgctcaggtggcatacttggtaaatctttcgggaacacatatgaaaactctgacacaaccttgatagtctcgagtggatgtgcctcactgctatcaatagccatctgatgacaactccctttccttggctcgggcgggactaactcggtcaccacttcctctcctagtggggacatcaatttaattgtcctctta

SEQ ID NO: 68572 - DNA, 274 bp, Zea Mays
aacaaagagctcaaagatagaggatcatccaaaactgtaaagtcctccaaccacgacggggttgccaaagttatcaattggtgtagcaataactcctaggaaagggaggagaatgactagtgttctggatgctgttctaaaatcttcaaaggtgccaactcctgtttctgctaagacttctgaagacaaaattgaggagtttggaggagccattattgtaagtgcttctcccacctacgcttaagccgaaccctcaggaattaaggcaacagag

SEQ ID NO: 68573 - DNA, 325 bp, Zea Mays
ataaaaactaaacctcttaatagatgcactaaaactgtaacttttgagaataacagtattttgcatgggggttttacctgttaggaccaaggggccaaactgatatacacggattgtaatctcgaacactaactcctttcctacaatgacaaagaaataaacatgttatgtaatctcaaaggaagtggtatatagatgacaatggcaatattgcttctttttttggcatttaatgttggcatatataatcgcacaatataagtggattcgtagatacactaaaattggagtacttgaaaacgacagatcagaaagggcatcatag

SEQ ID NO: 68574 - DNA, 717 bp, Zea Mays
aagcttcttagaaacaggatgtgcaacaagtgcggcagaggaagcactggacgacatgatgagggttttggtagatggtttaggctctgattaccatgtgaaaatcagagggcaataggttaaagcgtgctacctcgttggagggccgccctacatgtttatataggcataaacaacatgcgcagaatttacaggatcgtaacaaactagagaagcttcaggaattctagttacaacagaatatccctatctttatcttcccagagatgcttactcttgtttgttacagatatttgtttacaatctaatcttatcttctaacaatcaaatcaaatcagattttgtagtttttctagtgacaggctgatattgtgggcagaaagcacgttgaatcaagttcttaaaattttggctctcacccacacaaacaatagatttggctatttcatcacgcgctacctgtgggttgtaaacccatgtacttattgtaccatcagcactaaagttaagattggtttgcgtacctcctcgagtttttcctagctttgtcaaacaaactttgtagtgccgattcaaatgtcccgtgccagcaactgaacctgcactcaattcacttttgcaatagttacatacaacaacaaaatatactacaccatcctcaatgacttccttcttcaccatatgtttccaacagtctgccctcgagctatactttgc

SEQ ID NO: 68575 - DNA, 689 bp, Zea Mays
aaagcaaggtacactaaaccctcgaagtcagaatcgctgaagaagggaagactggaaataacaaagcaaggtgtaccgcaatgaaccaaaaaaccaaagcaacataacaaaccgaggaccggtggaacgattacctcaaatcgctgaagaagggacgactggacgatttcctgaccggtggttgttcgccaggtatccaatgcggcagatctacacgagcagcatgaacgatgagcacatgaatccggtgccgaaacggaaatcaatcgaaacaaaagaaacagggatcccaagaagaggaacggacggcggcgacggagtcgacgagaagaaaggagcggttgcagttaggggggaaaggaatacaacacagcagaggggcttcatataagagattgggagaaagcagcggcatgggcgctgcggtggaaggacagggcacagtgagtcgacgctgttacggatacggagtacgctgagagggacggcaagtcgcggatttatcggagtttgaaatccggtgaacaacatcacatggcggtatgggcacgcgaaacggaccgcaacggagagaactgaggagagaggagatgggcactgaccagagaagcagcgacgcgccggccgcccgcgctggccgccaccaacgagctcggcccgggccgagccgtagcaacgcccaggcggag

SEQ ID NO: 68576 - DNA, 622 bp, Zea Mays
gttgaaggggaggttaacgtccgcgacgtcgaatacgacgttctccatgcagaagttctcctcggtcccgaatgtaaccgggagtgcgatgctcccaaggggatacaccggttgtgggcccactccagagaatggacgagagggtcccaaccaggaccctgggatctgcagctgcttgaatgcaacatgactgatgacgttgaggctggccccttcgtcaatcagaacatggtgcaactgcatgttggcgatgacaggagcggtgatgagcggtagtacaccggcccctgccatgttttcggggcagtcggatgccccgaaggagacattggtgctcctccatcgctaatgtggagcagcctttgggacccccgggaccgccgaaaggacctctcgacgcagggacttgatgttcctgcgggaggtgagctcccagctctcgccgtacatcacgtacagcttcttgcgacagtcgtcgtcaccggagtcggagtctccagtgaagacgtccttgaggtccccctcgagtgactgatacccaagctctcgttcccctgcggctattttgccgtcgtcgaccctctctttgccaggccggcgatggggtggggagccatccttg

SEQ ID NO: 68577 - DNA, 477 bp, Zea Mays
ctcttctctgaatcaagctgggcattcaaggaagagttcatggctcgagcaccatccaagaatgcagaaactcaattcagatcggtttaactctgaacacacctctcctcagcgttggaacaccatcaaatcagagctgggagggcaagagaaaaggatatagggggtaaacgaaggagcaacgaacaccaaagaaagttagcaacccactaaccgatgttcgaagctttcaggttgtctatctgtttctgaaccaggagagtgttccactgcaacaaagatagaacctgattagggacaggggcaccacatgccctcagctgagctgacacagagctcagaacattctgcaaatacaagaacttgcaagggaatcatctatcgatgaagataaaacatggtaaggatcaactcacctgaaggttagaaaggaacaaaggaaatcccaaaggcagaggtgttgggctgccatcaaac

SEQ ID NO: 68578 - DNA, 1130 bp, Zea Mays
aaagatcctctgtgagaccaactgaatgacctcgcgatggtacagtgcactgaaatatcctagggttcagtccccctcaccgccggtgatccaagcgttcggatttgtgtcgatcgtcgtgattcgtgccgggcacgcagtggatatctacggggaggtaaaagatcttgcggggaagcggatgcggtcgcatgggaagcttatcaccgtgcttgtagccgttgcgacatggccggaccgccggtgtcatcgtggacactccggcgatctcaattattccacgtcgtgactcttcactacgcggtagtaaccgtggcacacttaggcttaccctctctgaaccactgcaccagtgaacgccatgattgcgccaccagtgatcttcttcctctccgaccgccagcgtgccattccaaaattgaagggcaccgctcttgaacactataaattaagcacaccgctagctccgttaggtaatcacgaagccagagcacccgctcctgcatccgattagccaccatagctctctaatttctctttctccccaaatctgttttccgcaaccgtgaaagaaccctcgccgtggctagcttgttccaggtctgttcgtgctctctattctcccgtttcagtgttcctttggttctcctaatgctcctcgacccattacattgagctagactgccctagatcaccaggaacacttctgttcatccattgtctgtgttgtctccatggactgtactatttagagctccgctagtgaggggaaacacttgttaggtgttgaattaggtctcagccaaattagagcaccggtcattaagtatcgtggccggtatgagttcgccggagctctattctctgttgttccccatcgtggacctcgggtgtgaaggaatagaagcgcgggggtttatttgcaagtgttagtgacccattaaagaccagccgaggactccttctcagatgtttgaaccgacagggacttttgcgtaaagttcaccgcacggtcgcgggcgcgcccccgtattccgattagagttgggccggttgggccagttttggcccaatactgttagaagtttttcattttctttttccgagaagctttagaaatccataagaaa

SEQ ID NO: 68579 - DNA, 274 bp, Zea Mays
agaatatcctggtgtaagaaagtttagagtgagaaagaactccttgttgggtggtaatgcatgtgaagatcgtgttttacctctctccttccttgacgaggttggtcttctttggccttcatccttggtgttgccatccgcattaaggacatatggttaagatagttgtcagtgcttgggataggtaggcccaacaaggtttactttgcttttggagtaggtgaatttaggtaacttatcaggtaggttaagtaggtttgcatggccgagttgg

SEQ ID NO: 68580 - DNA, 469 bp, Zea Mays
ggagccactagttattttggctctggcttctccccaaaaagtggctccaacacctaagtgctcttcattggaagttgttttttggcatcgtttgggaggccgctgtaggagctcgatccggtttaggagccctcccaaacaggctctaagtgcagggctcccatcttggctttcttcccacgctttcttttctcgctcgtttgctcatgaagtcggaatcaataggagacgagccttggggaaaaaggcccaatgattccatagccttgtcgtataaggtcgtgtctctcttcttgtcctcctcaccaacctcctccctacacactagttctccatactatcactgatatcctcctcactacgcccatcctccacaccgctctcggccatcgatctcctctttctccctatgctctatctccacaaaatattgttggccactttctctcaacatttctcacactaccac

SEQ ID NO: 68581 - DNA, 695 bp, Zea Mays
aactgtacaagctggtcgcataagattattgttgtcatctaaagtatagcaactccctctccaccgtgctgctgcccctagaaggtaatctgctgccgccccagttgaaggaatctctcccgcgatcaggaccaatctttccaagatcctattctcccgtcttggttctttttttacaaggacggacccacgcagcagacatagagaacatccatccatccgttgccaaaaaaaaaacatcattgatcttgaccgtgatgtgcagataagaaccgtaccggccttgcgaggccaaacgagaacagttggatttttttttaatgcaaaggatagggaactttcttcacataccgcctactcttaaaaagggtccatatggaagttacatattgcaaacagaacgaagaaaaatgggcagcaccacctaaaacaggacgataaaagaagaaagaagactgcactgttcacggaggctgctgcactgtttagctagcagaggctgaatgtgcagccgaagatgaaatctgcttttgcctgttgtgcgacgagccgacgacgaccaaagaacatgaagtcttgtcatgcatggtgcatctgtctgcagaactccaactccaacccaagacccaacaacaacaacacggcagcttgcaagcttggggattgaatcgatcggaccgaataagtgcagtgca

SEQ ID NO: 68582 - DNA, 718 bp, Zea Mays
tcaaaattggtgagctctggtgagtaattggaggcacggcttggtggattgggtgcttgactaccttacgaacccgacgacacactcaatttataggcttcgggggcggtggcgcgtgaatttgggttggcgcggtggtggacggagaagaaaggggtcactggcgcacaagattagtggttttaaccgtggcggctctccggcgatcaccggatatagatgacccgagctattgcgacgtggttaaaggcctaaggcgtggcgcaatcacggtgaacaacacggattccggtgacggccgtaaggccacgtcgccggcgcaaatgaccgagggacagcgcggccacagtgtcccggaccaatccgcggtgtgatcttttcaccggcgagctcaatccacagacctaaagcacgaatcatggcgagcagcaccaatcacgacgaagggtcaccggcggcgagatactctgaacctgctgatatttgtgtgcactataccatcgtgactgttcatcagaacgactgacagagcaggtttggggtcaatttgctcgatattttatgtggtgacccaaccatcaccatgtaccaaagttgaagcttaataaaccagctttaactttgttacattgtgcacccacaaaaagtcacaggatcttactcaaaatcgagccctaagttcatccaatctcactgtcactgaaagttcagacttaag

SEQ ID NO: 68583 - DNA, 537 bp, Zea Mays
cgctgcattcacgccgatgggaacatctactggcacatgtgcaactccagccgcttgctccaggtggatccttgcacgatggaattcttgtaggtataacaactcccttgtaccagatggcatcgagcatgagacacttttttcacttgatatttcagttattctaatttgtgtttgcttttaatataacagtgaaaattgacaggagaacaaaggatcgggtttgaacaagttagccattaaaaatactattttctttaataagcacataaggtaaggctaaaaatggttccataaattatttctatccacatatttgagaagcctgccttgcctgcacgatgctcccgaccaagcttgctcggtcataaattatttttatccacatttggtatatcaggaaagattgaggacaaatggttattattccttggttgttgatccagagtaaggattgcttggaaaaggttgccaaacttttgtcaaaaaggtgcaatacacaaatttgaacatttgcagagcatttatataataaca

SEQ ID NO: 68584 - DNA, 510 bp, Zea Mays
gatttaacaggacgctgctggcattccattggtcaggatgggcggcatttctcattggccggctgcagccagtggcgcaggatttggtggccagccactggccaggggctgatagtggcagactggcgctgtcggctggagaagaagacaaggagatgatggccgctggttgattatttaaagagaaaaagagatgattgtttaggagctaattattttttttatttgatttctctgagacaagagctcccgtatgagttgtttatcaagacggtgacaattatttgtcggagaggagtggtcatctgttagccgattcgcgcagcgctcactcgttggctgagacagacgcagggaatggagcgaactgacgcacggatgaacgagaggccacagaataaaataaaccgagacattttatttgggtgttgcttggaaattaaattctcgtgcacaagtagaataaaatgaatcgagatcgataggcttcggattcgttatcgaaataaa

SEQ ID NO: 68585 - DNA, 705 bp, Zea Mays
tggttttgagtacctagactatgaagatcccactattaacactgaaactggggagaaaaggaaaagggttgctaagggtgaggggaaaacttcgaagaaaactattgaagctgacatagagaatgatgagttagagggcgacgaagaaccaccttcgggcaccaaaaataacaatgcgaagacttcaaaaaatctgccgccgggcaagaccaatggaaagggagtgctacaaccacctcttctttgggttgtacatggattctcgagttaatgacattcccctctaagtcccttaggaccgacactgactcgatttatgccaactatgaagggaactgacgaaggataccatccctcgaagatcaaagaaatttcatctgaggaagaagtagagagcccacaaaatttgggtcttggaggcgctgcctttggaggctcaacgtccttcgaagaagacgagaagaagaccaccaaaggaggctgttctttagggcatgaaaaggcgaaaatagagttgaaagagtcgaaccctattcttgaaaatgatgctgccgaagctactcagactacgagtgaagatgtagacaatcttgtttttttcatgaggcatctcagtggggctgaacttgacgacaaagaagcttcaaaaatacaaagtacaggtgaagctatagggtatgggcatgtggctttgctcttcgggag

SEQ ID NO: 68586 - DNA, 820 bp, Zea Mays
cgcgaaagaagggagaaattggcaaggctagtcctcggataagaaaaggtacgaaaataaccgcctcgtgcgtatcctatgtggggacagaaactccccgctagatccaccaggaacatagttccttaggcggtacaacaccaatttcaacaagatgtaagagatcatcttcataaacaacagagacatgattatcagagaaagggagttggctatcaggatcaatcggggggatgactggcgtggtagcattctgtttcctcttcctgggcgccatcacgatccttcaagcagcgtggctcaagaacaaaacgcaaaaagatgtgggagctcaggaagctagaaagcgacggaggaaaaataagaactagggttcaacggccaagaaaacattgacaagaatttaggttggcacactgagtcgggcatagaattacaggttgtgtggctcggacgagttttaagcatagcaaagtaaaggggctcggtcagtatctctagaaagctaagactcgtcaaccaggtgctttgggatcaaactgtcaggtaaaaggacagagtgcacaacaacgaaatggcatcgaacaagcttcattcatttataggttgggaatcattacaaaaggaagaagaccaactcattatgggccgaccaattacctccttgattcaacactacattactagtactaatctacattactactaataaactacattactattactaaactacattactacaactactaaactactactaccactacaattatgtactactacttaagccggtggcacattgccaccaacgtcaccg

SEQ ID NO: 68587 - DNA, 576 bp, Zea Mays
ggaaagtatgtcttggagacttaaagcattggtttggatcatgtgaaggcaaaggtgtaacataggttttgcttttgccggtcaccaggtgttttacagaagaaattgaccggattggtaggctagatagtcgtactataaagaggggtcaatgactttcgtcagtgtaaaacttagtgcctcatagagcatctagtagttgcatttacataaggactaatgacgcttccaattttgagagttaaaatcctttcaaaagcgtgtttggaaagtggtaatgttctatggtcgacggaccgtccgagccaggaggccggaccgtccgcgtcccactcagagaggtccgaagaatgtccatgttataggggttcagaatatttgtactgcagaccatccaggccttgggccagagcatccgcaatcctgactagagagggtccgaggttacacaagtccttgtgtgcttgtgcggaccattcggccgaggtcggtggagcgtccactggtgctaaaatagatttgggcagggactgtgtgtttttggtcgaatgtactacggactctctggtgtttgag

SEQ ID NO: 68588 - DNA, 575 bp, Zea Mays
gttttaggtatatcttcagtccgaatcttcaactgatgatagcctgatcttagatctatctttgagaatattgtagctcctctcatctgatcaaatagatcttcaatctgaggtaacgggtacttattcttaatcgttacttcgttcaaacttctatagtccacacacattctccttgaaccatctttcttgttcacgaatagaactggggctccccttggtgatgaactagggcgaataaaacttttttcttgtaattcttctatttgtttcttcagttcaattagatctttgacatccattcggtaagctctttccgaaattggtgtggttccgggtaatagttcaatagaaaattctatatcacgatcaggtggcatacctggtaattcctccagaaatatgtctaggtactcgcacactatcctgatgtgctccaaagatttctcttccaactgatttaccattgtctctgttgttgttggcatactgacattgacttcaattctttctcttgtggactggtttatataaccatcctcttagcacaagatatcactccatcatacttggtc

SEQ ID NO: 68589 - DNA, 645 bp, Zea Mays
acaaatgggtacaaaaattaagcagtacattcgcaatacatggacacattataatgatttagacataaagttgaagctgctaagtgctaactgcatgtagcacacattatttttgtactcattgtttctaaggatacacaatgcagtgagccagggaataaagatataaagttgaagctgctaagtgcatgtgctaactgcgggtgtaagctccataagtccatataccttgctattgattgagagggagggcgatgatgtgctatattgatgcgttgagttggcaagtcacagagaatgacgagtcgctgcattaagatggccgagatgccgagacatagagaatgacgagtcgaaagagctacgttgggtcaccggtgaccggtaacgctgtccgctctccgctctccgctgtggccaggatccgacagcagcctcacggacgactgactacgcggcttaagaaatttataccaaatttaaaattggtcgacaacatatcaaaaccattgaaactatactatgacaatgagtcgacaacattttactcctataatagtcaaagtgttgttatcaaacgcaatgacattaaatattatattgtaaaggagtttctaggatcaaacaattgatcttgagcatata

SEQ ID NO: 68590 - DNA, 418 bp, Zea Mays
aattctgcgagatgttcccaaaattctgatagggtactccgaataagtcaaatcctccttaacattgagttcttccataggtaattgttcttccggtactcttaagcatttcttaagttgtgacacatgaaatacatcatgcacatccgacaaactatcgggtagctctaactagtatgctacttcaccttttctttccaaaatcttgaacgggccaatgtagcgaggagatagtttacccttaaccttaaatcttttcatgcctctcatcggtgaaactttaaggtatacaaagtctcctactttgaatatcaactctcttcgtctaatgtcagcatagcttttctgtctcgactgtgctgttttcaaattctctctgataatttgtacttacttttctgcttcttggagaatttct

SEQ ID NO: 68591 - DNA, 464 bp, Zea Mays
tagggtatagcagtcaccctgaacaatcgtgaaagcaagtgtgccatgctggttttaaggcgtttccgacttaagccgatcgcctggctggtatggcatagtggtctccctaagacgtgagcatgtcacatcgtattaaatcattgccgacttaagtcgattgctccgttagtagggtatagtggtcaccctaagtcaagttagcgtgagcatgtcgcaccgacttaagtcatcgccgacttaagtcgattgctccgttagtagggtatagtggtcaccctaagtcgagtaagcgtgagcatgccgcaccgtcttaagtcgttgccgacttaagccaattgctccgttagtagggtatagtggtcaccctaagtcgagtaagcgtgagcatgttgcaccgtcttaagtcgtcgccgacttaagctgattgctctgttagtagggtatagtggtcaccctaagtc

SEQ ID NO: 68592 - DNA, 317 bp, Zea Mays
gccgaagatcggctatggagaccgagtcatgttgtttttggaaagtccagtgttaaacaaggacatattgaagggatgaaaggaaaatattttcacgatatatccattgtgagggctaggggagaaagtatcgtttctcttcccgaagcagatgaagtagtggttttaaaaatcttcatgaaggctgggcttcgttttccattgcacaagatgttggttgaagtactgaagacatttgaaatataccttcctcaacttactcctgaagatttgattaatgtgggggtttttatttgggctataaggagccaagggct

SEQ ID NO: 68593 - DNA, 564 bp, Zea Mays
agggaaaagatcttgcctttaaagctaggatgcactcatcgagttccggttcgttgggggctaccctcataagcttggtctactaacgtacatcgcatgactcatgtatactaacatatgaaagaattgtttttgctcccatatttgtctttgcagcggcgacagagtgtcaccaggaaggccacagggcatggatgtcgtaggcgcagagctaatgcataggatcaacatgtctagagaaaggcgtcggaatggccccacctgcggcttcgccacctcacccaaggtgggcttgggggcctctgtcagtaccctaaatatggggtacctactcctgctgggtcaggctggctccaacaagagccgctaaatgctcctgtccgctaaacgtaggggtctatcaggtcccctacagctccaacaatgtcctctaaagcgtcccctaaactatagcgtacgtgccagagaccataaatgtggaggctccccaccatgcgctatccgcgcgacggatcgaccactcgccgcgcagaaacttccgcctcctcccttcgcgcactgacg

SEQ ID NO: 68594 - DNA, 587 bp, Zea Mays
aaaagcacttagagaaataaggactaaactcccaaggggtgacagtcgagccacctataaaaagccgagatacccccctgagggtttcccaccttgagcagggctccacctcgcccgaagtcgacatcactcactctgcctcgcccgaggttgcctcagcctagtccgtcttgcctgagccggcctcgagcagataggacaagggcgctcgaaaataggcagggataggtgcatttaatgcgtgtgccaacccgcgctgtggcagcagagcacagtggtggacaagacagcgatcacgtctagcgcagcggtatgattacgcttgtgccgaactgtgcgcgcatgacgcctggcacccttcgacaggacgcctaatatgacaagtcgtgcggacgagtcttcgagcgcaacctctccgcctcgctcgacccaagtcatccctcgggaaagttctctgcctcgcccgagctcggccttagccaccgactacgccgtgaatcccgcagacagccactccgcccgactgtagcgcatgtcgagagatggctcggctagcacctcgggaagatctctgcatcaaccaagca

SEQ ID NO: 68595 - DNA, 322 bp, Zea Mays
attgcactgtcctagaacccttgtttagcctttgcaatttcgttttcagtttggctttgttcagtttgtgtccgtggtcgagtcgtgttgctggtttagggtgtatcttcgtcatagatcaactgccctcgctagccaccgccgcgctagatacttcgctatcccatccattgcagatacgccgctatccattacaagtcgatccattgcagatacgccgctatcccatccaccattacacagatcacaagtcgatccaccccattaatcgctgtgattgcagatagggaatttttgccctaaccaccattttctagtcgtg

SEQ ID NO: 68596 - DNA, 405 bp, Zea Mays
cttgtggagagctgggatatgccgaaggagaccaccgccgattctagtgatggtggtctggttcgtctgaagtataccttcagatttagggagaagtttgatgagccagacgacgactggctgaagtgtatcgaagctaccagtgacgagctacttggagcttactccaaggccgaagataatgctttgtccgcagctttcgggggtcggggcaagaaaagattgaacagggtatttgatgctattggcttcgtataccctgattaccattacccgctatgagggcaagataaaaagagaaagactgtcgcttcagccactgcagctgagccgaagagcaaaaagatgaaggttctgacccatcggccacgttacattgaaccgaccgtggtgcctaaatttggc

SEQ ID NO: 68597 - DNA, 850 bp, Zea Mays
gcgcggacttcgccccaccttcgactatttaaggttgggtcgcggaccaccacattgaaccctaaaccacgcgcttgaacctcaccagcaaatgaggaatttagggtgaagcgaattgaagttggtgccgccgccgtacgccttcaccctcggtgtcgatcggtgaccgggatcatttcaaagctgtgcgcaacacctaggggaaacgtgctcctgtgggtaatcgcgcacagggttaaccgaataggagtaattgctcatcggagcagatgggaatagccatttcgccgtccgccgttgtcaaggtactacgtgacttaattgccggtaataatacctcctcaacattcgcaatgttatgcacttcgtattgagcctgtcaattttagttatcaaacctcagtgagcgaagtgcggcatgtgctgacagtgctccatcgtggatttgggtggcaccgccgcgttattacctgggaagggggtgagaagtgggcaggagcgggggaccattgatctgatccgttggatccaggctgggcgagggagattagtctataatgtggccaaatctcgaccatatatctgggatccaagggccctaatggcgtaccggttcaggtgaggttgatttaatttgggccgtccgcgtgggatcggatggccacagtttcatactgtttcacttaagatcagatctaatccgtgcagtcggctgttgatccaatggccctggatgcatgatacctcttcgccgagccatctttacataagagccctcgggtttcagtaaaatcaaccaaccatctagtgcggggggaaactgaggcttaagaaattttatgagttagac

SEQ ID NO: 68598 - DNA, 320 bp, Zea Mays
cggaaacggaactcgcggtcggggccggggacacgcgcagcagccgcgcagattttactgcctgtttcacggcgaagattgcgcccaccctacaagagactgcccagaaacgaaggcaaccagagacaggatggcacgagcacaaccggccgacaaccctagagttgtcgcgcacacataccagcaaccccttcagccatacaaccacggcctcgctccgcacccaccgcaccatgcataccaacatcaccaggatgtacaaatcgtacctcccccacccccaccccaacagcaaaacgtccaccaccacaaccaccccc

SEQ ID NO: 68599 - DNA, 455 bp, Zea Mays
gagcataatggtgaatttcgaagctataaacaaacaacgagacaaaaaagatgctttaaaaggatacatataatcattgcgtgttcaacagcttcttcagcttgttttgcctcttctcaggcgtcgtgagattctttttcactcttttttatggcttcatcggccatctcccgaccgcccttcatccaaacatcagaatagaacttctcgcctatcaaagaagcatcagccaaaggttccttcgtgtcgtctactgagaagatggtttttgcctaagttacagccttaacatgttcacagccggttttctccaaaattgttgcaacccctcgtgcaccgacgaaggcacaaaagtccccgcgatcgctgagtatttcttcaaaagcttcgacctcttcgccgatccactggataacccctttgggatcaccacggataaatttttgctttaatga

SEQ ID NO: 68600 - DNA, 489 bp, Zea Mays
ctcatctgcgcaccgacaattcctcacctcgctcctccttctgccgcgggccgcatgacgccgtggccagcacggtctgcacccacactaccagtaagatcaccgtcccacgatttgcttcactattctcttcgagtagagcctcccgtggttgataacaatgcactagggcgtcgggtcagtgggcatcggcgaggttgccaccgcggaggaaagatctcagccgtgctgaccatcgtgaggtagaagaacgcctcgggaccgctgatccagccttggacggtagagattagtttgggcatatcccctcgttgtattaaatcagagccgttagttttagatccgaccaccgtgggcacataccgattcatcgcggcttaggtctaatctgcagtgtccatctgcgatcgtgaggctcagattaaaagacaccccttcagcctgtctgtttcgcaaaagagtccatgttctttatttaaatcaacccgc

SEQ ID NO: 68601 - DNA, 413 bp, Zea Mays
tggatgggtgtaacaaaggcttttcttgagcacgctttcaaagatagaacaagtcgtctagtgaagtgtccttgcaatcactgcgagaacaagtggcctcagaagatagaagaaatggagaaacacctttgcaaaagtgggtttatgccgaactaccttgtatggtaccgacatggagagtctattagacatgttgacgcggaggtggaacttgatgacgatcatgataggatggacgacatgttgcatgatcttggtagggatgttgaaatgaacgctgaggagctggggcagcttccacgcgatgctcaggaattcttccggctactcgccgcgggagaagagagactgcacgagcacactcaggtgtcagttcttgggactctcacaagactaatggcaataaagtcaaa

SEQ ID NO: 68602 - DNA, 441 bp, Zea Mays
agacatcacgaagaagctgagggattgaaaagaaaaagggttgtaagtgtgttgacaaggcaagcgcagaggtctgttgaaggaggcaagaagaaaaggttgacaaaggacccccttcggtaccaaagaaaagaaaggttatatcatctgaccgcggagaagacgagagaccttctctgccaaaggatttagaaaagaccctgtcggtaccctgaatcaggggtaccctcttctacaacatgaagacgcggcacccatgcgacacctccaggccacacggaggacggcacccgaccccaccacatgggcaggtctaaaggcaccacgtggcaaggaaaggtaatacatacaaggatgtattaatgggtccggacctccacagtaggacactggacccctgtgcgtacaagtccgaagctcctaagaaggcatgatgggtcc

SEQ ID NO: 68603 - DNA, 1007 bp, Zea Mays
agtcaataatggaccttgcaggtcgcgagtgcgtgcattgccatgcacgtagcagccaagagcccaggagccaacgccgcatcgacacgcgagcagaggtcgtcccatcccatccttgattatccttgctgttgcgctgccgggtggtcgcctggtggtgggctgccgctggtgtcacggcgcacctcagatgaccggatccgagtcgtctccgctccgtgtcgccctccactctgtcagcagtccaggcaccaacgaagaagacgacgggagcgctggcaaggaaaaagcgccaaccatccggagacgccagccaaataggcgtgtgattgggccagaatgggccaaatgaagatatacatgtaagagtgggctgaatgccgtgagctaggtttacgtgagggtataaatactcaaacaatgtaataagctggtaactttgcagaagagaaatatacgccgccactccgtctggccttcgtctctcttcctcctcttgcattccttgcttgctccccacgcacagcagtatatcccctctctaacatctggtattcggagatagttcatcctggattccacaacccaaattccgcgccgtccccgatctactgctatggccaactccgattcggctgtagcgaagatgctcgaggaattgcagcacatggagaaccgcctgacgggagtcattgaaggtcgctgcctcggcatggagcgtgacttcgacgatcgctgcaccaacctcggcaaacacttcgagcaacgctgcgacgacatcgcacatcaactcaccgaggcggaacaacgcgcaaacgcgcgtctgatttccgtcgaaatgtcgcaagcggagttcgagcactggacaccgtccatggagaaacgcgtcgccgatctgtcgttggaaatgacgcggacgacgaagtttttggagcgagagtaccgtgcgcctgccttcggtcagccgggtctcttcggctcgcacgtgtcagcgcccgagcgcccac

SEQ ID NO: 68604 - DNA, 377 bp, Zea Mays
gacgcctttgccctcaaaggaggacggaaagaagagcgccatcgcgccggctcctttctacccctacgttctcttcatcaggggagattggagtcatcacccatcttcgacgacgagcctaccatgcaaggggaagaacctccccagcgtgaagcacagaatgtgcggcgacatcacgaagctagggaacaggatctggtgcagcccgtatcccgggatgatgcctcagaagtaggagagactcccaacgagcgagtacaccaagaatggcgaaactctcgccgccgtgatcgccgacaagatcaggaccaagaacgagagcaagccgagcaaggtgcaaggctatgccgggagaatcctctctttgctcggaacct

SEQ ID NO: 68605 - DNA, 774 bp, Zea Mays
acgcacccattgggtgattgacaattagaaatatttaaataaaagcaccacaataacaaggaaaacacgtataactatttagaagcacaccacataaccatttagaagcacatattacaatatcgattcacattttaaagaagtgaagatgagtagatggccagagtttcattgggtcggaccaaaattatgtgtgaacaaggagtcaaaagtagtattctacggtctattggacaccatgggtgaaaagtaacacccaaacctaatccactattttacaaggcgggtcgtctgtagacccatgggtaaaatctaacacccagacccattgtgtgttctagtatttacctaatgcgcatagattgaggtgtattggggtgtaagttaaactaaattacataacttatactctaatacacctcaatccatgtgtattaagggtaaccaaacaaaacctaatggatgtgaaactctgtgcacccgcgtacgtaggtgcgactgtcatccctactctagatgccataagtcataataccacccttggatccaagaatgctaatcgttcctcctgctaccaaacgtgtatttttaagaagaaaaaaaaatgctaaaaaacggtgggcagaatcacctcagcagaggccacagtgtcggcgcggcgcgggctctcccattccctgctcatcctgtgacgctattcactgctcggcgggaccagaataccgcctaggcccacgtggcagcgagggccgggtacgtacgcgctagtttaag

SEQ ID NO: 68606 - DNA, 273 bp, Zea Mays
aaagtgtgtcgcttgattaaatccttgtatggtcttaaccaagctcccaaacaatggcatgagaagtttaataacacttggaccacaactgggttttgtgtaaatgaagccgacaagtgtgtgtattgtcgcttatctgggggcaaaggtgtcatcttgtgtttatacgttgatgacatattgatatttgggaccgacttggaggctatcatggagacaaaagcattcatctccatgaactttgatatgaaggacttgggtgaagttgatgta

SEQ ID NO: 68607 - DNA, 379 bp, Zea Mays
tggagcccttgggaggaacaccgatgggagcatcgtaggaggagcggcatcccgtggaggtgcaggtggagccagaggcagccaccatggcggaggctgcggtgatcttctcgtcattggcgagacgcaactctttaagggagagcatctcacgggccctggagaaggatggcaggacaacagaatttgcgatgtcgtcggcagtgccgctgaagcgtgggttgaggccgcagaggaggctgaggacgagtcgggcgtcttcgatggtttcgccgacgtcccgtagggcagcagccttgatcttgagtcgctggcagtactcatcgatcgtcgagtcgccctgcttcaaggagtgaaactcctcaagcaggaagacaac

SEQ ID NO: 68608 - DNA, 568 bp, Zea Mays
tgcggagcagctgcacaactggagcaggcaaggacaactcaatagaacgcagctgggctaatgcaggttccgttaccgtaaccggccagatctccagtatagtgcatgcaggaaccaatggctggcaaccttgtaacaccactgtggaacctgaatgtggtaatgatagccatttatgtttccagtcaactgtcattgggctaaacatctccagccaatccatgcctaatatgacgtcataatatggtagagggataactttgaaggaatagcagaattccagaccatggatataccagctagcttgtggcagctccactgtacattgcacaacttcaccattagccatggtaacggataagggagtgtccagacgtgccaacccagacaaggcagaagtatgattagcactcaggaagcaatgagagctaccagagtctaataaaattaccacatcaatgccttgaagttgaccgcgaagtcgaaatgatttagaggtagtctttgtagaagctgcttccgtggatagcaatatcatgaattgttcagcagaatctacaaattcggc

SEQ ID NO: 68609 - DNA, 1032 bp, Zea Mays
ctactttactagcgaggactgcagagggtatctaaggcctggcgcatcggtggcacaccggacctcttttctagagaggtctgcagatgaagcttggagtaccttggtacatcggactagtccggtgtgcattggaccagtcgggtccaacaacaaatttcaaggttcaaaagtcaattcaacggctagctgacatgacaggacacgtggtggagtctggtggtgtaccgaactggtccggtgagtccacggaaggcagagtcaaaagcaatcccgtcgattgaggttaccgttggaggtccggtggtgcaccggactggtctgatcccccgagggaagagcagcttttgcagatttctaacaatgactatttgggggtttgggggctataaatactattgtgcaacattccaatacacttgtgcaacacatccacgccattccgagagatcgaagcacccaatctgagctaagatagtgattctgtagagtgtgcttgagcaatcttcttacttgggtgttgttgtcgtgtatcttttgctcttgttttggtgatactttgttgtaaaatctaacaagaggctccagatcttgtggagtgccttgcgcagactctatctctatacttagtggatttgagggctcaaggttgatcggtggatcacttgagagagtggagagagactccatcctttggaacaccacaatggggacgtaggttcttcggaactgaacctcgataaaacaaatttgcatgtctattgtgttgtttacttttcattgtaatttgttcttgttcctctcccctctctagattttcttgattggactttgattcataacacttgagttgctctctaagtcaaattatatatttataagagcaacaagtccaagcggatttccctctcatttctcccatcaatctaatcactaatttgggatttaatttgttttaagtgttgaattttcaggtgctctaatccctctcatttgttttattccattttaatcattaaattgctaaatacg

SEQ ID NO: 68610 - DNA, 929 bp, Zea Mays
aacggatcggagatgcagacgtttgatctgctgtcacgagagagaagaacatctggccaagagatgctgggccccgacgatccagaaggaagtgagaacagtggtggacgtagaatttcaaagctgaaatgttaaagaagtatctgtttgtgttggtccatcatctttatttccactcattttctgcctctttttctatacattataaaatagagtggcttgatcgatcacgactttatctctcgggagctaataatagagtggcttggcggaggttatgttgactaatatggctaagatgcccttatgatttatgacaacactaataagtttctagggtacaatagcgacgaatctatgcatatgaaggggttggcgtgctagaagagagaggcatatcctatcccaccgccgcttctcttcctacgtttgtgtacgcacaaactgtcgacgttgtgtgcgtgatgctaccacatcagtgtcgcaaggtgtttcacctctgcacgtgtggataacgcggatacagtaccgcggtgttgatcaacaacaaacgtaaggatcaacaacaaatgtgagggacatggggttaatgtgttgttgctcttagtacgcgaggtcgtcgtacgactacttctactactcggtcatactcttctttcgctgtctgtatcttatcttagttgaatatgatagatatgctagtgcatagggtacctgtttattacggtggtaacgaaattgttcatgtgtaattttttgatctaaatggtttacatataagtgatatgcctagtagacatgatctactttttcttttgctgtggcaccaactaggaaaaataaggtagttgttggtataaacgcaacctatttgccccgatagcgaagcactcaacttaagtcaggggactgacttaagtcggcatggc

SEQ ID NO: 68611 - DNA, 430 bp, Zea Mays
ataagtttaagaagtattgaacagatgtacatgggcttatggaagtagccattgttttagatcctaggtacaaattgaagttcatggaagctttttatagcaccatttatggggaagaaagtacaattacaaatgatgaagtgggtagagtcaaaattttgttgtatgagttggtgttagaatatcaagaatttatggagggcatggcaacaacagatgttgcaggtgcagctagtaggggctatagggcccccaacgaaggatatgacttgatgtttggaatctttgataaattcttgtcggaagaacctgattgttcatattttgtgcgcactgagttggatttatatttggaggagccaacactgccaagaactcaagagctagacttaattaattggtggcaatatgaaggtattaagtaccccac

SEQ ID NO: 68612 - DNA, 383 bp, Zea Mays
cggggagggcctgccatcgcggctgggtgttcgggtggggaagaagggccatcggccgttgatttgttggtggacggctaggattagtccccgtgtaacctttcgcgttgattcaatctggtccattgatctagtttcaacggacaggattggatctagggtaataaaatccgagccgtagatataggatccagcggctgatgatgcataccgcttcggttgatgtagcgatctaatctgagccctcggctggtgatccaacggccgagaatcgcccgtagcccttcagccgagtcaatcttgctaaagaacccctaggatttacaggaatcaacccacagtccgtagcacagtggtctgtgtctcggcatatttagcgctag

SEQ ID NO: 68613 - DNA, 716 bp, Zea Mays
atcaacttcaagcctagattcaagcatgatccaatgggtttttgtggcagcatcatatggcaatattgtagatggtatgttgctttacaactttgatgcagattttgagttgagttgtcattcaaaattaagagaaaaccatgcttcaaaaggctctgtcaggctgtctgacgaacactagccatggtacagtgacctaatgtggatcagaccgccagcgtcaaaaatctcaccgccgacgacctcttcgccggatttcgtgccgcgggcgtggggtgttcgctcaccatgaaaagatctagtcacggatgtgtatgaactattgtggcctcgctgttccctgcccttcgcaccggcgacgtggccgtatggccgtcatcggagttgccgtgcttcaccgcggttgtgccacgctccaagtttctcaccacgtcgtcactagccgcaccagctcaccgatagccgccgtagctcctcaaccggtgatcaccggaggaagcgccacggtgaaagccacccatcccttgctccagtgtccatgttccctccggccgccagcacgaccttgcaaaattggacaccaccgtcgatgggaactataaattgagcccccctcggtttcgccatgtattctaccagctattgcacctacctgtatccccaaacccccaccagtaagcactaattttgtattcttcccaaatccaccaagaaca

SEQ ID NO: 68614 - DNA, 1142 bp, Zea Mays
aaagtatatgcactcttttaatattatgtagtactttgagttgtaatgttgactctatttcaatagtcatgctactccagttgttgtgatgtgcagtccgtataactactccaagtgttcgaacttgtcatcaccaccatgttatcattcatgtgtttaaccctgtgattggtttgtgtgttcaatggtttgcacgtgctcaagcacggaaccatccaaccgccataccaatgctcaaccagaggaacaccccctaactattgtaccccaagcaatgcaacaccactttggcctccgcaatatatgcaacaacaactagtagactcaagctatgtgggtaacattcctttttccaaaccaccacctaccaaacacaatgtgggcacctgtgcacttagagagtactccaacccaatccttcatgtatcggaatccatacataggcatggtgaataatccttatggttgtcctcctgcaaccatgtttgttaggtacacaaccttcgagcacaaatacaccccttcagggttccaatagccatgttgagctacctatcaatttggagtctaatgttgagcatagtgtccaagagatcagtatcccctccaaaaaccctacctctattggcaaaggaatgaatccaaggaacaaaattttataacaagggaggacaatttgccttgcaaaactgggctacagatcaatagtgaccccattgtgcacataggtcaaagcaggagggaatttgggcccgagtagagaagaggtacaatgagcaaagggggtttacccatgcagaattaatagagccctaagtagtaggtgggacacaataagggcatagtgtggaaggtttgtaggctattacacaagagtactaagtgagaaccaaaatggacttactaaccgtaataaggtacatattgtattgtggctttagaattgtttagtattgtgaaaactatgccattattttgggctaataatttgcatgctcttgtttcaaactgtcaaagctacaatagtttatgcacatgaagaaaacaaaccattctagttaatgcattgttggaatattctaaaaaatgagccaaagtgggagtcaattgttcaaggtaattcttttagaggcctatatgca

SEQ ID NO: 68615 - DNA, 463 bp, Zea Mays
ccggattctccaagattttctgaaacagtgatacctgtaacatataaacaatgaatatactgcgacaaaggggaggaccgactgaaatgggaggaagtccaaatgcagttaccaaagcacaagtccaatcagcagagacattaaagtacacggccgagtggcgtttagccaagggctccctgttttgactggctggactccaacttgtcactgatcaaattgattccagaccaaacaagatatagacagatgtcgtcacccggctatcccgaaaaatcattttgaaaaaagcttaagataaagacctttgaattgattatttcaaaatcaactcaaagctcggaggctacacccattgggtgcaccacaatacttcgaagctgagtgccgatttctaaaccataagatgaagacctttgaattgattatctcaaaatcaattcaaggctcgggggctacaccc

SEQ ID NO: 68616 - DNA, 998 bp, Zea Mays
aaagcttttatacccgaagaccaacttctcctatcctttgttttgtacctactccgtctgaagattaacttcatccaccccatcaccatatacttgaaacacacttgttcatgttgaagtaaatgtaattttgaggaccttcagcaaaggtaggcccccaacatggtcgattcaccatttcatagcctatagtatctttgcttgaaggagttgtcatgtgtttgggagaaggctttgagaaaggtcctcaaatagcaaaacttgttttaggtttgtttcaagtaagtcatctaggcttttagtgcctgctttggaccggcgaaggaagaaacgaagctttgccaatctcattagaatactgcttcggaaaaagaaagagcgagtgaggcttcatctgtcccgagtgttgcagaaacgaaggggtccaaaggagatgtgcacaccacatcttgtgaacaaaaagacaataacacccttcaatggttttatagattatgtatataggggttgtggcaataatgtaattttcatatgaagatgtaccatgtcatgcacctttaaatatgtgaacagtgcccgtgcatatgacacctttgaaatgggagttcacatgcttatatcgtcttggaaggtctctgtctttaaagtcctcacaatgtattccctctggccactctgtacatgttccaaacataccttgtaatcaaagttgtataaatattctaatacttgtaatgatattgtaaaaaggaattcaataagaggaataaaaggattacaaatatgttatctcttggtttattctcccatgtattattactacacatcatttcttttcattgttttgacccttcccatcttgtcttttatgtacaatagcaacaggataaggtagcatcattttaattgtgttgcactattatggttccttgtaggagctttaacaggtaaccaacatttggtgcccacctccagtgaactcacagaccactacaatc

SEQ ID NO: 68617 - DNA, 415 bp, Zea Mays
agccctttgcgctgacttgtatcctggtcccccggcgcatgcggtggccacgaccatcgccgcacaaactcatggcatgcttagtctccaccgacgcacacacttgatggggttgagtcccaaatcccttggcgtgccagtggcgaccagctattaatgggttgtaccttcggcaacctcatcaagcatgaggtggccagccaagacgaggagggcccatggaagatctccacgcaagacggtgttccctagacccgacccatcgaccataacctccatggcgttcggggtagcagccaacagcctttatcaggcagtgcttaccccctcgaaatcagatgtatggcagagctcagacggtttaggtcggtcccgaaccttacattcggaaggtagcatgagaacggacacttcc

SEQ ID NO: 68618 - DNA, 502 bp, Zea Mays
attagtcacatagtcataagtatatgaaatgtgaataaatacatacacagagtgttatggcatataaatcgagagatatggcgatcgagaggtcaaacgatgcaaaaacggcgtttggacgtgaaatagtgccaaggaggtttgaaattgaaaatgagacatgaaatgatttggaatggagctgatacttcacgaataggtttatatgggtaaatatgagtgaagtgtgcgcttggtttgattttaggcgaagaaaagggaattagggcactcggctcggaaacgatttctagaaatggggatttgtgtaaaattaaaaccttggatatcggattggcgtgaaatttggcgaatatgttactggaggtattgtgaaggtgcctaaaaaatttgggttcaatcggagcaattttggctggtttgtgaatttcgccgagcacgtggcgtgcggtgttctagggttttggagaaatggtcaatttaggctgtgaaaccctctcta

SEQ ID NO: 68619 - DNA, 600 bp, Zea Mays
aatagatctaatgattcatctttcagttctcaaacttcaggtcaaaacatgctgcaggagagtattgatgagtcatccttaagtggtttcaatcatttgtcgtcaggggcatctggttcatccaaagatcttcttgatgccgctgaagaaacaattgaagaacttcttatcgaggcacaaatgtgggagagccattatcaaaaattgaaaattgatctagagaaattacagaaggagtctgatgaaaaatccaagaatcagactgagatattgctagaactttctgcttcacaagccgaacaagagtcgttgagacaagaaattgaagaattgaaattgtctttgaaggtggctactgaacgacaaacagttggtggaatttccaaatctggtgatgcaatagatgtccaatttgagctaaaagatgaggtacactttttgagggaatcaaatgaaaacttaacaatgcaactgaagaagagtcaagatgcaaatatagagcttgtttctattcttcaggaactggaagaaacaatagaggcacaaagaacaacaatctccaatttcactcaaatgagtaatatgattgatcaagatata

SEQ ID NO: 68620 - DNA, 1846 bp, Zea Mays
ctttggtctgcattgatgatggatttattcagggctaaccagttcattcctagaatcacatctatatcttgtccctttataacaatcatgtttgtagggaactcacgcccgaccaaggttacgggtatgtggaagactacttccttagtaaatatctggcccctcagatgagtggacgacaaatccctcccttgattcagtgctacgtatgcaatgcttatccacaaaagtcttgctcataaaggtatgtgatgcaccggaatcagaaaggatagctgctgggtggttggcaatgagaaacgtacccatcatcactggttcgccttctggtgtagtagccacctgggtataatacactcatctagttttcttcatatttctgcccgctggagggttggccatgtttccctttccttgatttgcgttcccaaaagtctgttgaaagtttgatttgttctactttgggtaggggcagtctttgattaaatgtccggacttgccacaattgaagcagccactcgaggaactgggaagggcaaagaaacgagcaccgggggcactcggctaattgttctggacaggggcaggagtgggacgaatgaacacgagttgtttgaagggatatgtgggtggacgaggagaagaacgatttgaattgaaaggtcggttaccaaccttgtcctctttttaggtccttgagttgatctttcacccgcatatccttttgactttccttgtcccgcatttttggcttcaactaacagtgttgtgctgatagccctgctatatgtgaggtccagacacgtagccattttgcgttggagtatttcatttagtcccctcatgaagcaatttttctttttcaagtctgtgtccacttgatcgatggtgtattgggagaggtgattaaatttgttgagatactgcatcacagaatctcccgctgcttcagacgtatgaattctcctagcttcatctgtagcacgccttccggaacataatgttccctaaatgccagtttgaactcttcccacatgacctggtgtcccacaggttgaatggcggaaaggtttgccgaccagatgctggcagggcctctcaacagctgtgcggcaaataggggcttttgggtctcagtgcatcggatcagcctgaacttttgttccatcacccgcacccactcatcagcttccaggggttcctccgccttgacaaagagtggtgggcgggtctcggagaactctagatatgtggtgtctcatggtccctgaggttgacctcttcctccgtgttgctgaaattgatttcccgccatttcacgcaagaagcgtgtgttgtcagcggtagcgttgaccaaggcagcgatagcctcatctagtgtaggaggtacaggtggcgagttgggagtgtcctcctcgccgcgggaagttcccgcccaatcatgagcacgagttcgcgatggcatctgaagaagaaaaacatcctagattattacatgccaaaaaaacaccatctttattacattgctagactgtaataattatacatactcagtattacaactcgaatttcttatttattttacatgagcacattacttaaactatactactctaattctcttcgttcgtagctgctccactgcccgcttcaggagaccgttcatctgcaagattcatggaaggaggggctccaaaaaggtccaaccccccatcagatcctccatttgttgttccagatggtccagctcccattgctgcaacttctggtggcacgtgccggtcatacaacacgtgcacctcttcatgcagggtgttgcagtatgcttgcagattttccagggatg

SEQ ID NO: 68621 - DNA, 338 bp, Zea Mays
ataaccgaaagactacaattgtcgacactgatatcgtctctatgatcgctgttgcgattactgaggaacctgaaccaaagtccatggcagagtgccagaagcggtcagactaggtcaaatggaaagatgcaatagagacagaattgctctcactttcaaagaggcaagtatttgggcatgtcgcccgcacgccccccaatattaccctagtcgggttcaaatgagtgttcgtccgaaagagggatgcgaacaatgaggtggtgagatacaaagcgagacttgtagcacaagggttcacgcagatacctacaatcgattacgatgaaacttactccccg

SEQ ID NO: 68622 - DNA, 712 bp, Zea Mays
cacgcgtcagccccagccaggaggcttcatcaatatgcatgcaccaacaattataccgggataaacagattgagtaatgtgcataaatcatgcaaaaagaatctgctgacgcgcaaatcacgtgggacgactttaccagtttgttcagcgtttacgactgcataagaacatgaaacgtaacatcataaaccatgcaatatcgagacgtcagaccatatatgctattgtatatacgtgaccggtgtatgcgtaaatccgtgttggtttgatattaggaaagtagtgttgtacaatcgcgataaatgtgggacagttaccgctttattctcaacgttacggtttgaggagcattaaaataaggaaccaaatattcttttgagacttcggcgtaactttgtagtagcctttcttgtacgatagtagaaggaccatattcttgtgctcttgacggtggttagtggcggcaggaggacatacagaggacatagatcaaccaggtacatctactgccatggacatcgtagttgtacctgatgctgtgaccggagacgcagacggtgtagctgttactccaccggcggcgttgagggcacctgaaaatattgatgacaacacaagatcgacggagatggtaggagcatatcaacgcatccccatgagacatattgggtgcatgatcaggacacaccacacattctgcaaagccatgtaa

SEQ ID NO: 68623 - DNA, 510 bp, Zea Mays
ggaaatttgtctactaattagacttgccaaaaactggtggcctgtccattacctaccactatcattatacccttaactatatatgtctactcttcaacaagtcattgcacacaggggaattcttgttcttcttaagggcatgtttggttggaaagggattgaaggagatcagatgagattaaattccttcctagtcaaaattgaataaaaaaggatataaatccacctcaatcccctccaatccccgtgcaaccgaacaaggcctaagatgtgatatactcctacaagtatttcttctgaatagtttcctacaaaagttgagtaccattgtcatctttcgacgaccatttgcaaagcagggcaacattgatcctttgatccctaaaacccccttttcattggggttagtgatattggcccacttaagtaaatgatgcttcttcatacttccctcctgctagcaaaacctttttctagttgtatccatcttctttatcatttacaaaggca

SEQ ID NO: 68624 - DNA, 467 bp, Zea Mays
aaggcccagcttcggcatcggaccggctcgttgtagctttggcttcggtcggctttgtctcagtttcaatctgcattttcgaagccttggcaactttctctggggtagagcttgaagtttttattgtctccaacacatctagaacattaatcatcctttttcttttgggggtcgctgctagacctttttgagtcttcggcacctcaactcctgccgaagggcttagaacttctaatgtttttgtctcttcggctctcagttcttcaattttgtcaacctttggcattgcagccgcatcttcaatcttctgcgtaagagcaggtcttttggcttcaatagtcaaagaggtctcaccgccaaattcgggcactatggccggttcaatgtagcgcggtcggtgagtaaggaccttcacctttttcctctttggcgcaggctcgcttggagcagctgaagcatcatccttc

SEQ ID NO: 68625 - DNA, 879 bp, Zea Mays
tttgtctccaggaccatattgttgatagtacgggtttcagatccctcccttatgtctctttgctacaaatcttgccttgggaacttgggttgaccagtaggcacttggtcatagggaggtggtcctgggacaaataaagaagatggtgaccacgcactcattactggattacttgaggcatttgaggctaaatgtaaacttaaccgtgactcctgtaactgaggctggacatagtatgggatataaggtgaacattatgaggatgtactacacacttcttttgactgggagggttgagtggctgatgaagccaattccttctacttgttgatagtatgatggcatgttgttgtggtgtggcctttgtcctcgccacaaaacaagcataatggtttccttggaggtgcattgaatctaccaccaaaacttcagcctcctcttccgcctctctgagaatgtgaatgaaatgtgctgtgccaaggttgctgttgagagcttgcttgctattgacccgactgaccctgaaactgggccatcttttcctcaccctgcactggcttgtggatgcttcagacatgccttggatggaaccttcctctaatgcccctgatgactttggtgtatctgtgtaactcttcccttctttagcgaaaatcattgtcagcccttatgtactcgtccatcttttgcagtaatttttcaagggaatggtgaggtttcctggcaaaatactgaggtgctggtcctggcctaagccccttgaccatggctttgatgacaatctcttcctgaactgatggtgcctggacccaaagccgaagaaatctttggacaaatgtctggagatactcatctgggtccaaggtacactgaaacaaa

SEQ ID NO: 68626 - DNA, 1155 bp, Zea Mays
tctaacccagatggtaaataccaggatcacgggaggaatctatcaaccagctcaactacgtccaggaagggcaagaattaattcagaaccccaaatgagtcaaaatcgaccacctgcggggatggaggcattcttcgttgcccaaacacagttactttagaacatggccaataatgtggtagacatgtatgtttagatcattaataacaatagtcaacaacacccacatcagccacctcttatagacaaacaccgggaattcatgagtcacaagcctcaaatattctccaacttcctagatccactttaggtagatgattgtctaaaatccattaaaacgatgctcaacatagcccaatgcaatgatcgggagaaggtcatctatgcattgggtcatctcaatggcttagatgttgactggtgggatgcttactgtgcagcccacatggtagctgacaccatcacatgggttgaattcgccaccaatttcagaagctatcacattccggtagggctgatgaaaatcaagaagaagtaatttctctcccttaaatagggaggaatgtctgttatcgaataccaggacaagttcattcaactatcttgttatgcactagaagaagttgcagatgatgaacataaatatgagttgttttagaagggtttgcaggaccactccaatactaattaatgacccacgcctttccctcttaccgaacgttattggattgggctatcacgctagaacataagtgtgatcaacttggagagataattaggaaggctaccaaccaaggacatgttatagtagcaaatatcctcgttatgcttcatcacaaggcacaccaattcatggcagttctgggaaaccgtcttcctaacccccaaatcaacaaaaccaacccatagaagcacacatgtcgagtcctcactaggaaagcacccaagtgggaccagttgcccctgacacttcaatatgcaaaacatgtttcaaatgtggagaagttggacattatgccaataattgccctaacagggatgcctataccacccagttcaaacaaagcagagttagccctcgggaaataaaatccaggctctatgcatcggtcaaggatattaaaacttcttgcatggcaagaataaccatgtgga

SEQ ID NO: 68627 - DNA, 499 bp, Zea Mays
ggcagcagacgcgttatcgaaactaggatccagtcagacccaggttccacctagagtttttgtccaagaggtgccatgcccaaacatttcctcagatcaagcagaagagtgcaatgttttaagccagccagagtcagactctaatgactggagggagcccatcataagatatataaagaatgaagaggaaccggatgacaaagccgcagcagaacgcatcgcaaggcagtcagcccactacaccctcattggggatgcactgtacagaaggggtgcaacaggagtcctcatgaagtacattcctttggttactgggaagcaattgttagatgagatccatgacggatagtgcgggatacactcagcatccaggactctggttgagaaggtcttcaggtctggtttctactggccgacagcaaagagtgacgtagccaagttagtccagaggtgtgaagcttgccaattcttatcaaagcagcagcatttaccagcacat

SEQ ID NO: 68628 - DNA, 486 bp, Zea Mays
atccaactccgtatccgtcccagctagactccccatctcaccatacgacacaccagcaccataatatatctaccaataccatgagagtgagtacattccggcccccagaagaccagaaaggaatggccagtcctatgagcctcatagggcatgcattaacgcactgcaaaatccaaactaatggggaagaaaacaacataccaacattcaaacaaactcacccatattggaccaaagagccagtgatctcccaccggctgccatcgatatagtaagagaggaaatagctggggcgttccgagataagctcggagttagtatagtccctgggaggcagtcatatcaaagaccttatgatagccagtttgaccatctcccatactcacaggggaccagaatactcgaatttgcaaagttttcgggtgaccaaggaaaaaacacgcgcgaacacataggccagttcttagcacaattaggagaattggc

SEQ ID NO: 68629 - DNA, 475 bp, Zea Mays
cgtgacctcattcaaagctcgataatcgatacacattctcttggtgccatctttcttttccacaaacaagacaggagcggcccaaggtgcttggccgaatgtaacctttctctgacagctcatcaatttgcttcttaagctcaaccaactctggtccagatattctgtaagctctcttaaagataggagaggttccaggaagaagctctatggcaaactcaactttccgctctggtggcatacccggtaagtcctttggaaacacatctgggaattcggacacaaccttgatactctcaattgggtctgcttcactgctatcgacagctatctgataacaacttcctttctttggctcaggcgggactaactcggtcaccacttcctctcctagtggggacaccaacttgattgtcctcttatcacaactgataattgcctgatacttatctagccaattcatccctaggatgac

SEQ ID NO: 68630 - DNA, 383 bp, Zea Mays
atccaagtacggtgcgatgaggcaaggcaaaaaaaggtagacggggtagtcacagcagtagtagcagacacaagcggcataccattcgcgagaagacgtggttcggtgatctcgtgaaaaaggacacaagatctgggacatgttcgacaagagaaagaaatatataattattatagagtttgcaaaattttatagttttcgcaattaccacattttaggtatttaatttaatattagaaaaactaaaattcatatttaatactcgaagaaacatttcgagggttctcgaaagttttctagaaacgtaaacaagataatccgataaagtttgaaaacctttgcacttataaatactatgcaacgacatgaatgcaacaatcaaa

SEQ ID NO: 68631 - DNA, 671 bp, Zea Mays
tgttttcttcacaaaacatgtagtataacttcttcagctaggtattgttgttgaaccttccatcgaagctatgcctcctctgcctccacttggtgttggtggatggaagttgccatgcgaagactactgggatcctgctacttgggatgaatcctgctgatggttctccaatgcttgagatttatctttgttctgtcttgggttgtgtacactttggacatgcttggagtgaaatcttcctccgaagcccctaacggtttttcataactttgtgcttcttcattgcgttggcgaaaaccattatccaccccgatatattcatccattttttgcaacagcttctccagggattgaggaggtttcctagcaaagtattgacccattggactcggacgaagccctttgatcattgctttagtgacgatttcattggtatagtaggtgcttgagccttgagccgaaggaatctttgaacataagcctaaagatattcgtcttgctcttgtgtacaccggaacagagcttgtgcagtaatgggctttgtctagaaaccctgaaaagttatgaggagcatatctttaatcttctgccatgatgagacggtgcctggccgaagagaagaataccatgtttgagccacactaccatgacaaatgaatttgccatcactg

SEQ ID NO: 68632 - DNA, 510 bp, Zea Mays
gctcgaatgtcttgtcaaaatcaggaagttgcagcagtggtgcttgtgtgagcttcgacttgagggcatcaaaggcttgttgttgtgatggtccccaacgaaacgacactccatccttcgtcaactcgtggagaggtgctgcaatggtgctgaaatcccgcacaaatcgcctgtagaatcctgcaagaccaagaaaacttcgaacctgcgtgatcgtggttggaagtggccagctcatgatggcaaaaaattttgcctcatccatctcaatgccctgtgatgtcacaacatatccaagaaaagacacacgatcggtgctaaaggtgcacttctcaaggttaccaaataaacgtgcatcacgcaaaacatcaaaaacaacacgtaaatgttcaatatgatcatcatgagacttactatagataagaatatcatcaaaatataccaccacaaatttaccaatgaaagcacgtaaaacctcgttcatcaatctcatgaaagtgctaggcgcat

SEQ ID NO: 68633 - DNA, 1523 bp, Zea Mays
aaagtgcaaaaaccaagttaaataagtatcttaagtcacatggttcacatttgggaagatttacaagccaaaccctgagatttggacttaagtgcaaaagagccacacttttctcaaatgcttaagtctgattttcagtgatattggctcaactttggaactctacatcttccaaattattgagaatttgccctaggtcaccacatcaactatgtagatctatcttaggtgaacaactttgcttaagagtgtgagcatagttgctgtgaaaaatctagagataatcatgctcaaactttggctgtcaggctgattaggtctgaattttcagactaacagtgaactaccaccaacttcaagcccaatttcagacatgattcaatgactttttgtgacaacaccttatagcaaagttgtagttggtatagtgctctacaagtttgctacagagctttggatgagttgccaagtaaaatttagagaaaatcgagcctcaaatctctctgtcagttcatctgaaaggaactcgccatggtacagtagccgatcggatcagaacaccagctcagctccccgccgacgaccttcgccgcgattcgtgctgccgtcgtccggattcgcgctcgcgacttgtggataacctctcggggtaaaagatctccgccgccgtcaagctggaagccaccccggtcagccacggtactcctcccctggctcaccgctcgcgggtaaagttgctcaccgtcgtcgtgccattgtcgttgtccaccgcgtgtcctaaccacgccaccgcatcgctgtgactccctctaaactccccgtcgaccaccggagttactgccacgacgatgaacacgtgttcactgcactagcgttcttcctcacttccgaccgccgcacatcaacgccaaaattcacgatcaccgccgaagagccctataaattgagtccggactccgctgcttcatcacatcccgcacctcaacaactgagcactcgaatcgagtacgccgcagaactaacgcagtccccaaatctccctctcctctgttcttgctccgccgtgaagaactccttcgtggccagcgttcctctggtcagtaattatcaaattactccctgttttagttagtctttgatctcctattgctcctagttgcggcaatttggagtttggccgaagcccaacaccggaacgcacccgtgcgctgtcaaacaccgtcgtgacccccctcatcgtcgacccgctcttcgggtattgttctgcccaaaccaaagtatgtccatggaccttggtgaacccgtgaacctttacccagcctcaatttggccatccccgtcgctgtttgatcggaacatattcatcctcctgtccatccgctcggtcaccgtgaactgattgattcagtgtcccctaggtgaaattgatggaggggaaatggtcggggtggatctaattgtgtccctgtcgcttgggagctccagccgtggcgtcatctggccggaataggctcgccggagtg

SEQ ID NO: 68634 - DNA, 387 bp, Zea Mays
aagggtaggagcattgtgttaacttggttctagcaagatttcatgataaagtaataagtaattgctgataaaacagaagaatggtcctttggttgtgttttctcctataaaaaagatctacctgttttatagtaactaaatgacaaggtaccactgaaggttttcatacaggcagagccaggtgaagaaaaataacatatagttttttgcaatcataatgaaatcacaaatgagaaaaggcacattgttgtacttttttggtgtttctttcaaacaaacacaactggacatgatgtgaactgaaaacatcgaaaaacaccttgcctaccagctaccacacacaacataaaaaggatccaaagctacctaaccccaaaccaaacaaat

SEQ ID NO: 68635 - DNA, 1178 bp, Zea Mays
cgagtcaaagtatcaaggatcttgacaggatactccgtataagtcaaatcatcttgaacactgagatcctccataggtagttgctccttaggtaccctgagacacttcttcgattaggacacatggaagacatcatgtacatctgcaagatgatcgggtagttctagttgataggcaacttctccaactcgctttaggatcaagaagagtccaataaagcgaggggacaacttccctttgactttaaatctcctcataccccggatcggtgacaccttcagatacacatgatcaccttccttgaatctagcaatcttctccgggtatccgaataacttttctgccttgactgtgcagttctcaagttctcccgtatctgctggacttgttcttctgcctcttgtataatttctggaacaaagaactgtcattcaccagtttgatcccaatatagaggagtcctgcattttctgccatatagagcctcaaacggggacatcttcaaactggcccggtagctgttattgtaagagaattctgcatagggaagactcttatcccaactgccaccatgtttaagagcacaagctcttaacatatcctctagtacttggttggtacttttggtctgcccgtcggtttgaggatgatagtccgagctgaaattcagtcttgtatccaagcactcatgcaacttctaccaaaaccgagaagttaactgtgatcgccggtccgacacgatcttcttggacacaccatgtagacatactattcgtgccatgtacaactctgctagcctggctcctgaatacgtggtctttactaggataaagtgggctactttagttagcctgtccacaatcacccatataggcactgattggtttggtgcacagactgaagctggctcacgcaagtctggcccgttaaatacagcaaacctgagcttctccacgcatgcagctaaagggtcttttttaagcctgttctgcacccgcggatgcaatccacgccctccgtattcacgctaccaaacacaagctggtgcttggtcaaatgcgcatagacaacctagctaagcacccgcggacaaccaaacatgccaagatgtgtggggtagacccacaatgaagtctatgccaatctcttcccacttccactcaggtatcttaagcggg

SEQ ID NO: 68636 - DNA, 387 bp, Zea Mays
attgatgagatagtcgaagcgtgtcaaagggctttcagagtatggccgcttgtggaaagctgggaaatgccgaaagagaccaccactgactctagagaaggtggtctggtccgactgaagtataccttcagattcagggagaagtttgatgagccaaacgacgactggctgaagtgtatcgaagctacaagtgatgaactgcttggagcatattccaaggcagaagataatgctctgtccgcatccttcagaggtcggggaaagaaacgactgaacagagtttttgatgccatcggcttcgtataccccgattaccgctacccgctgtggggacaggggaaaaagaggaaaactgttgcttcggccaccccagttgagcctgtgccg

SEQ ID NO: 68637 - DNA, 614 bp, Zea Mays
cacctggaggcaatgccattgaaaatgaaaagggggccgctccaaccatggccaacaccgaggatttggcgtcgatagggcaggatccaagatggggcatgactttatccactggaggggctagagcttctaccatgacgcaaggtggcgccggaccttcaatcaacagaaggggcaatgactgtgggcctaacagtacggagctatcgttagggtaggatcgaagccatgggatgagagggacaatgagtcctcaccaccatgattcctcgacgtcggcagggcaggatccatgccagcatgatggcaggagatgacctccacacctgtggctcagtagagaactcagggaggatgagtactcagggaagggaagaagataggagccgacactcactcttgagtactccgaaggaggagcaaactgagcaaccattcatctatgtgagggagtattttttttgatgatgtagtaaaatataataaaatatagatagcgagaattgtagatgaatggttggaaataatattaggctgtcttcaaacagctatcatattttatctcctattccaccttttattttaaacttactctgttaaccgcagtattctac

SEQ ID NO: 68638 - DNA, 349 bp, Zea Mays
ggaagtatctgtgcctgaatttactgacgctgaccccaatgggtgtgatccatctgtcgctgatcccaatgggtgtgctccatctgatgctgatcccaatgggggtgttgtctgtgttgctgatgaaaacgacggggaggaagaagatgaggtccctttgacttggaagaacaatcggcaatatgttgccagtggggaaagtagtggagttccttctcctgctctgtctgccctcattggtctacaagaattgtccctggcgaactttgatcagactcttgaagatatggttccagaggatctgttatcagagccagcggatgatggtgcgacggatgtttgtgctgat

SEQ ID NO: 68639 - DNA, 1208 bp, Zea Mays
atagtgaccttgaaggtataaggtgatgggtggccgccagtctttggtcattatcagatttacgatttggcgcccgtcgaggtcttgtgtaatctgcaggccttcggggcttcttacggctagtgtgtagatcgtgtggaaaaacacgtcgaatggcaagggttcgcctttcgctgctgctttggctaacatgtcagcttcttcattcttgttccactctacatgttgcaaggtgaatcctttgaattgtgtctctagacttcgtacggcagagagataatgcatgaggactggctctttagcggagtactacttttcgatttggccgacgactaccttagaatctgtcttgactatgcacgttgtcaccccaagggcccgtagtttgcgaaggcctaggatgatggtttcgttttctgcgatattatttgtgcatttatctgattccaatatgaaacgaagacgcgcgacatatctgtatttgagtcctgtgggcgatgtaatgattgttgcagtgccagtgcatgcatgacaccatgcctcgtcgtagtggatggtctagatagtctctgcgcgaaactgctatggctccgaaggccctgtccagtctactatgaagtttgccaaaacctaggatttgattaccgttattggcttgaaggtgatgttgtaaccggagagtttagctacccatttagcaattctggcggatgcctccttatttctgaatatgtctcttagaccccgatctgaagtgactcaaactttgtgtgcctcaaaatagtgccttatcttgcgcgaatccatgacgatggtatacgttatcttttctaactcagtcatgttgcatttggaggtggtgagcactttagagacaaaatatactaggcattggtgggtcttgccctctgcacctttttttgtactagggttgcgctgactgcgctgggtgatgatgtgatgtagagtagtaggggtaaaactgggtctgggctggttaatgtcactaggtcagataaatattgtttcaaggacttgaaggccgcggcttgctctgggccccaggtaaaatctttggcaccctgcaacgttttcaggaaaggaaggcttcactcagcagatcgtgagatgaatttgtttagtgcagctagtcttcttgtcagccattggatgtcttttgttgactatggcggggccatgtccttgat

SEQ ID NO: 68640 - DNA, 289 bp, Zea Mays
gcctgatgatattgtcgccgatgtcaaggatgcgcctgatgcttcgagtcgtccttcttattccgttgctcctgcaaaagacattgctggcaaagacgtttcgatgtagtgatgttctgcaaaacacttgatgtaatgtgaattctgtgtgcgtgttatggttgtgttagaactcaaatattttgtggatagggcaccagaacatgcccctactgccaacaagtataacgttcttttttcctggagtgctaattgttttgtcgtttaaggtatagtggtcaccatgaat

SEQ ID NO: 68641 - DNA, 495 bp, Zea Mays
gccttggtcccaaccaaggggacgaagctctcatcagggaggcaaggaaccagaagaggaaggccattagcccagaaccacgagacgaggagcttgatcatgagatcaacaaccttgaaacaatccatcaacaagtagagaagcgcaaagagaaagtgcttcgtctctctgagctccaaaagaagatcgatgaagcgactgaaaaaatgcgtaacattgaagcacatgataacccgtacaacttcaaggaccttcatcacgagggtcacaaccatgacaacctttgttaggacgcatacaatttccaagacttcatgtatgatgaagcttcaccgctgatactagaattgcaggccacactatggccactactatgcagacctcccacattgctagtgtatgatggtgtaacaccccactgatcccacacaatggatgataccaaaaaaaacctttctacaaaacttatgcaacacatagagaaagaaagtattg

SEQ ID NO: 68642 - DNA, 811 bp, Zea Mays
ttgacagtattttgttgagccttacatcattttttctgttgcttcaccaatgtctcctttccaatttggttttttgtttcatttatgtggaggccagagactcacaccttccaccttcctttcggagagatgacaatcaccctcgaggatgtacagaaaatactaggattgcttgtctctggcaacctagtaactagctcatgcgagtcgagtggttggagggataaagttcaggccttccttggtagggacctgcctaatgaagatggtgaagaccatattgccggggtacgtattagttggttgagacaacccttcaaaagtgtgtccacaatatgctgacaaagacatagttcagcaaatctgtcgagcctggatcctccacttgtttgcctgcgtcctattcccaaacgcaactggggactacacgtcgtggatgcacattccttgcctcaccgactgggatacaactggtcagtttagttggggctcaatggtgctgtctcttctctaccactagctctgtgaggcgtgtcggtggacctcctcctcgtcctctgttggaggttgcgtttacctcctccagctctggatgtggtttcggatacccgttggacgtccacaggtgtttcctcctcgcccgtggttccatggtgtcccacctcatcgacggcctacatacacatacatttgggaccaggtagccattccatatggcagagcaaagtggacatacttggagtatgtcaacgagctagacacactctcggcatccagcgtaagtgtttaacaattctaaagcatactaaca

SEQ ID NO: 68643 - DNA, 631 bp, Zea Mays
ataaatttgaaataggaatctgaaaatgtgaaggaaactaagaaattgaaaatagaaaaaaagaaaaagaaaagagaagagcaatcctgcgcttgggccagatcacctcccacccagcccaaggtattccgtagcccacatctcttcttttcttttatttaatcctcttgccgcacatgaggtcagcatgacacaagtgtgacatcaagcaagcaacacatgcagtcgtatttccatgcacacgtccacttctacgtagtcgccgacatgtggacgatagaatcacgtacgaagctctgcacgggtaactggtttataggatctgatgtcaaccgcgtcttcctccctgtaacaaacccatgcatgccgtaaccacctctccgtaacagccggcccaggtggcttcctcctatagctattctcccgccgaggaccgctccagccgaataaagaatagtttcctgcgtgggtgacgtcggctgggcgtcataggtgacctcatccgtatacctttcaccgtcactgacggctgggccaccatgcattggtgttcgcttgcttcctggtcttgggcgttgatcggaacggcttgccgtaatcccggcactagcgccctgctcgccctataaac

SEQ ID NO: 68644 - DNA, 610 bp, Zea Mays
ccatgaaaaatgcgatggacatcagttgtctcaaagactgggcaatctaaagaggctgcgtattttttggcccgcaagagaagtatcgcaaattaggatgggtaccggccatcgcatgcataaacaaagcagcgaacttgtgaggactaacactgtgcaattgcattgttccttgggcgcttcgcttcgtggcatctcgcaacacgcacacatggagaatcaggcatagctctatatatcgcatagtatggaagaacgtcacataacactggtgaataaatcggctcgtaacaaacaacacattataaaacagatcaggcgtataggcacacaaactcaccgacgatcgaaaacgcaaaatggcgagcggtctccgccaagctgcgacaaaattcccccaagcagcaagtacccagatcactggaaaaaaacagcacataaaaattagccaaccagtaaggaaatatctctgtacataggtagaggctagtgcctcttttagagactggtatgtcaaatatcaattccaaagaatctagatcctagtaaaaattgctaagctctaaacaggctgggcagcaggcaggaaacctagatcagagggtaccac

SEQ ID NO: 68645 - DNA, 517 bp, Zea Mays
gagaaggagactagaaccagggacagatctcagggggtaggaacagtggctaggcaggcggacgtcgtcaccgcggctggcagctggccgagccacgttgaccgagatagtcccgcccactatagggagactttattcctcgatgatgcttaatacaaactacgggtctgcctttatagtatgaggcgacctctttaaaaggaactaaataactgaatctggaagtaaactaatgcatatcttttattctggaaataaactaatgcatatctccctacaataaaagcttgcctactaacccgattgctagccacttttttgatcactttccttgcttgcttctgctgctccttttgctggatcctggcgcctttgcctctggtactggcagcctacaaatgcatcagtaacatttctcccctccacaagaaacagctcgtccgcgagcttaaaaagaggatacttctgtgtgaagtcttccaattgttcccaagaggcatctgatgctggtcgaccc

SEQ ID NO: 68646 - DNA, 669 bp, Zea Mays
ccgaatgctggaggaagaagcgggaaggagtgtcgcctccacggacatcccgcggaggtagacaatgatggccgcctaaaagatgaagcaggacgccatgggtggagatcggaagccaagcccctccagcagctgcacgaagaaagatgggatcggcagagccaacccgctgaggaatttgagaacacagactcttcggcggagaggtcgctgagaggagggacaccagcacaagtcctcccggcaaataccgggacatcccattcaagcaggcggtataccatttcgagcacttactcagtcccagctcgctcgggatgaagtcacaaggccatggtaaactatggcgacacaaagcagaaaccttgaaggcaaaggggcgcagaaagctcgaaggcaaaagggcaccacgagtgggagagaagcaagacatggctgctatctgaggggtgaacccctttttaaaggcagatttcccggctcgcgccccaaagcgtcacgggcaaggtctcccccgatgcgcaccagggttcccatcctatgacatgggggccaggccccacatgtcatacaagctggcccgaagcgcgaagaaggcgaatcgtcgcacagggagcgtgcaaccgccccacggttatacgcccttccatctttgccgcaaccaacggt

SEQ ID NO: 68647 - DNA, 896 bp, Zea Mays
taccttcagatacagagaccggtttgacgaaccaaatgacgatgggctaaaatgtattgaggctactagcgacgagttacttggggcatataccagagccgaagatgatgctttatcctcagccttcggggtcggggcaagaaaagattgaatagggttttcgatgcaattggtttcatataccctgattactgctacccctcgcgaaggcagggaaaaaagaggaaaactgccgcttcggccatctctgctgcgctgaagggcaaaaagatcaaggttctgacgcatcggacgaggtacattgagacgaccacagtgccaaaatttggtgaagagacatcttccgctgccgaagcggaacaagctgctcccaccgctcagagcgctgaggaatcaactatagtgccgaaggtgcctatagttgagctagtcgaagccgaagatggggcggccaagaagccagagttagaaaaaacaatagtgctaccagaaattctgagcctgccggtagaagcagaattgctgaaggttgcgaaagctcccgccacaactcccaagaggagaagaatggccagcgtgttagacgctgtcatggagacaagagcattgactcctgctcctataaaaaaggttgtcgaagctgctatgactcgtactgaaaccgaagctgggccttcggtgcctgatgagacgaagcccgctgtaactgaggaaagggctgaacaagaatctccagatattggcatagctatggagaaggaagtagccgaagaagctaaatctcctgctcccgaagcagtgcccgaaaatcttgattttattattcgacatgcttcgggaaaaaggctatctgaagaagagattgcagaagccaaacactatgcccgaaaactgaa

SEQ ID NO: 68648 - DNA, 435 bp, Zea Mays
aagtcaaccaagccaaaaactctatagcaacacaccattcttcatggtgtatgggttgaaagcagtgctacctgcagacttagcatttagggcaccaaggttgatgttcaaggacatagcagaagcaaaggcaactcgactcgaagagatttactaactggaagaagaacgactaaacactatgatccagtcagctcgatattagtagacttcgcggtgctataacaatagagcagttcgcttcagagctttttcattaggagacctggtgcatcgtagggttctatcaggagaagggtgacacaagctatcccccttggtaagggccatacatcgtcatagaagtcactcgtctaggatcttataggttgccccaaatcgatggaactctagtcgggaactcgtggaacattgagcatcttcattagttttaac

SEQ ID NO: 68649 - DNA, 536 bp, Zea Mays
gcaatctgtacaactttggggcgacttggcacgagctttccctggtgttagcaagggactaacaagttgtatgattcccgtgtatggcatctagcaaggcagcaacgacgtcgtcgggcgtggcaaactgcaaatggaggtataggcgagtgtcaagtacttgcggtgctgcgacgggtatgtgtgagcatcggtattcaccaaacgccagatcgaaaacgccaacaacaaaatcgtcgatttctcatagttgtttgcgccgattgacatgcacaaacatgcgacgttctgttctggctcggcacggaagtatagaatccagcccaaaccacgggaattccagcccactgtagcccatgtggtgttgggctccattttcccaggaggcaagcttagagcaagagtaatggtttacgatgtgtttggttgcaacgatgagatatgatagatgagatggtgtcttagataaagttgtttgctttagagctaggggttagaatagtcgtcatcagcttccgttagaattggatggacag

SEQ ID NO: 68650 - DNA, 543 bp, Zea Mays
caagaacccaagaaaatactcctcgatctttattttgttctcagacatattaacacaacgaactatcatggtcatttgttcttggtgactcacatctagggtacaatcaaggatgatagagaaatatttgactcttttaacaacttctataatagaatttgtaatgctagtagccaaaagagaaatcaactcattttgaattttatggctgagataatgataatgaatttctttgttccggatacgtctaaggtgctcttgcaatactgggtcaaattctacaatcatttcaacacaagctaaaatattaccattcgactcattgtagatcttttcgcttgatcctctaaaagccaaactccgcttgctaagaaacttcacaatggctactaatctgaatagaacttgtttcatgttatctttctccttttttagttgcccttgcaattctttatcaattgtttcttgtttgctcaatctgatctttaattcattctaagaggtcatgctcattttgtgctcaatagtgccttcatgtttttt

SEQ ID NO: 68651 - DNA, 546 bp, Zea Mays
tcagcggtgaggcatatcttgtacctgcacagagtggtttgattggtagacatcactaaacatggaatctgtagacagtgaaagccttagttcaatgtagatctagattttggcccagacactaaatatctcctctagttgccatagtctgctttcacaaggtttcttttagctatatcacaaaaagaagcacactatgcacaaactgacataggcttatccgaccactgttatggtatgttaatactttgcgcactaaagtacactaaagtcgaggtactctaactgcagaggccatatactggctagcctccatcatagcaactcttgtggcagtagctgcaactcaagcagccatatctactatttactcaattggtaagcaagccttgcactgggatgtttcccatgtttcaatgttgtgcatacctcaaacaaatttctagggcgtatttacatccttgacatcatctgggtatctatgaatctttgcattgtcaaaactgatgggttcaagaatcaaagacagataggaaatgtgtacgg

SEQ ID NO: 68652 - DNA, 427 bp, Zea Mays
agagattaagctttggttacataagaaattgggagataattagacccaaagatgggctgtcagactgtttggagtctgaattcagactgacagtggcctagaaccaggtttgagagccatttcgaccatgatccagtgagaatccatctagggatgctatagcaaagatgaatatggattatagacctacaactttgctaaagagagattaacaaggcatcacatgaaaaatcgagattcaggcactataaaacggtctgtcaggagaactgatagtgccgcgccatggtacagtgaaccgggggatcaagttcagtacctcgccgccgacgaccgatctgcgccgtgatttgcatcggggtcgggctgagctattggcgagcatctcctcgcgacgatattcttgaaacgggtaagatcgccgcgg

SEQ ID NO: 68653 - DNA, 441 bp, Zea Mays
gaagaatcaaatcatagagtaatgatcaacacaaatgaacatgacaatttgtttcctaaggttcgatttcgtagaacttactcctagttgaggaggccacgaaggctgggtctcaaacggtcattgagaccggttgagcttgcttcactatctcggggacaccaagtcccgcaagggcctccacacaaagaattggagcctcttgcctcactttacaatcaagagaataagagcgagagagaagagaacaatcaaagctcaaatgatcgtaagaccttgcaacactcaaatgttgctcaaacttgagtaatttgattttgctcaaacttggtaatttgattttgctcaaacttgctccaaaatgttgactttgtaaacttgagctttccaacctccttagatgagataaaaaggtccctaggggtatatgcaacttgtcca

SEQ ID NO: 68654 - DNA, 593 bp, Zea Mays
agtgctcctgcttcctcttgatcttcatcaattcagctggaatgtgatagtttctgaattgagttgtgaattctgcccaattaatagtgtcagcacatcatgggcagcaacataagaattccactagtcagtagcaggacctgtcagacgaccagaagcataaagaactttctcccggtcaaagcattgggcgatgttgagcatcttctcaattgacttcaaccaatcatctgcatctagtgggtctggtgaattggcgaaggtaggtggcttgtgactcataaagtcctgaggtggaactggaggaggtggtggaggcagtggtgcttgttgcggttgcggttgttgttgctgttgttgttgctgttggtgctgcgcccttctctcctggcgtatcgcttctcactcttggcatagctcccgacgtatatcctctctctcctggcgttcctgccgcatctgcgcgtgcatatccgccatggtatctgccatctgttgcatcatcctcatctgagctacaactgttgagtcaactccgattggtggaggcggtggtggaggatccatctctgctggttgtggctggggttgtc

SEQ ID NO: 68655 - DNA, 1140 bp, Zea Mays
caaccaactccaaattaacttcataagttcatattattgaacacatcatagtgtaggaattttagatacaaattacttgccatatagccaaacttgttatcatatctcttaaataaatcaggcaattcatccctcacaactgttaagtatgcagtataatcagtactgatgagttgagattacaaatcaagcacattgttgaaacctctcatcttagctctatgatccaacataaaaagcaaatgcatagaggaatggaatatctttctagtactttaaaagttttgttttcactggaacaacaagatccctaagcaggtcatcattctgatacatgttcaattgtctagcaataagcagaatgtggtgcaacattaaaggggatgttggataataaacacctaacatgacaataatagtatcataaaaacctttggaggaaccctaatatcttttcaccaacataccagtgtgcttcagttaatagtggaccatcttctttagtgttggcctagcctgatccacatgtcgtgcttcagttgaacacacccaacatgaccaaattggctgctctgtgaggcccacgaggccattgtcacacaaaaccacggtggtcgcccgtccctcgccccctcctgcttctaacaatcaaccaatccctaaccctaacccctcctttgggactcatatacaaattagtacatactcgattccatcataaacttggtaaccgacttagtgcctaccatgtaaccattatccttccttgcaatataaaaggatgcgaagaggaaccccctaaaggttagcccattagatcagaatatacaataatagacccaccatgaatgtagggtattaccttacattgagagcttgaacttgtataaaccctcatgcctcatgtgccttttccttcagcttttgatctcgtgacataccctatatatttactatcgaacaatatccaacagttggcacactaggtaaggggcgtcttgaagatcaagcaaagttgatgacatccattaagtttgcattgggagacgagttcatacttggcaccctaagattcatctccgacatggttagtaatcttgtcacctataatgaagggcttgtcctagaccttttggtaat

SEQ ID NO: 68656 - DNA, 493 bp, Zea Mays
gtttgagcgagttggatatttggctacggctcacaagatttgctccactctcaagagattccatgagggcaacgatcaagtaaatactagactgtttgatatgtactggagagagtacgagaactttatgcaggtggctagagaggccattgatatgatgttttctcagttccaggtgattttgaacaagatgcgtgccaacaaggcacaacttatatatgatgatcatgagagagcgctgaagttgttacatgctctggatccgagggtttggggagtgaagatctcggtaatcatcaagtcatccaactattagacactcattgtggatgagcttttcagcaagcccaagtccattgagattgaccaccagacctgggctaagatagagaaccctggccaaccgaccatggtcctaatctctggaggcagttcttcctctaacccctcacctgctatgtttactttgtcttctttgttgaccattacaaag

SEQ ID NO: 68657 - DNA, 444 bp, Zea Mays
ctcactcatgccctcagactaagattgaaattagaggcctaagctttctagtagagctgataatcctggaatcaagtggaatcgatgtgatacttggaatagactacttgaccaagtatgatggagtaatatcctgtgccaaaaggatggttacattaaccagtccgcaaggagaaagaattgaagtcaatgtcagtatgccagcaaaagcagaggcaatggtaaattagttggaagagaaatctttggagtacatcataatagtgtgtgaatacccagacgtatttccggaagaattaccatgtatgccacctgatcgtgatatagagttttctattgaactattacccggaaccgcaccaatttcaaaaagagcttaccgaatggatgtcaaagatttaattgaacttaagaaacaaatagaaaaattactagaaaaagttt

SEQ ID NO: 68658 - DNA, 633 bp, Zea Mays
tgcattccatgatattttttttgccgaccactgcaatttttatacattccatttgaggattttatgatgatgaatatgacgtctattatgtggctttggggtttctacgagattaacattacggtatatctgccattattttatgcgcaaacttgatttttatcaacatctctcactttggctctgtttttatggtcaaatctgaggatttttacgctcataactgaagatttttacgctcaaacctggactgcgcgcacccgtgaaacacatgccatatttttcgtgtgcggataaaaaggaatcatgtgacttatggtgtccataattgtcataaaaaacaaatctcctaatcaactcacctagttaaatcctctaatcaacttttttaatcaaaacccttgatttatggtggatgcatggacgtgggggttgttacttggtagtgaatcaacatttatgctatatctaacactattttatgctcaaacttgaggatttttacaatcaacgcatcagagttatcaacgtctctcatgttggctagctatttatgctcaaacctgaagtctcgcatgcacaataaaagggaatctcatgatttatgatatccataactatcataaaaatcat

SEQ ID NO: 68659 - DNA, 590 bp, Zea Mays
cgaaaggactagaaattaaaggagtaaaaatttaatctaacccacctccttcatcgtaacctttacatctgatccgctttcgcagatgacctcacccaccccaccaatggaggagacgctcatttcagttccgatttcctttctcacgagggtttcccttccatcttgtgggaggtgctcaactccgccggttaccctacacccctttgtatacggtgcagctgtacgaggagcatcgggttgcacgttgccgagtctggctgactttggaggctcacccccttcagccaggttggcgtttgcttgactccgagactgttggattcagggcggacgacaccactgaggaggcatctatgaagaccctggcgactttctacggctaccatcccctggagttgggatgcacccactaggactcttccccactgagaagagggatgaccccatgtggtgcaaccgtgtgagccatgtgaaagacgtacgggctatgtattccaacctagttgggaggatcactgtttagtgtatgagtgcactataccgcctacaggccctacagagcgatgccatggcacaccttgctaacc

SEQ ID NO: 68660 - DNA, 660 bp, Zea Mays
ctttctcaaggccctcattctgaagtgatataacttctgaacggagatttccgaaggctatctgggtgccttcgtcttcagcatctttttgagccttgaaagccttgctaagaataagaacctgataaaccaaaaacatacaaatataaaataataagcatcaccacaaatcgattaccacaaaccttcctaacataaattaacaaatacaaaaaataaaaaaaagcaaaccttcaagctattgtaagtaaggctatctgcaagttgatcattaggcattgcagataaaccatgttcaagctttagataacccatattatccattatttcctggcaaacatctatctctttgttgtccgacagacagtaaaggtaatcatcttcgttatttcctccatatactaaggatcctcggggatattttaggtcctttgcatagtattgcacttcggcaatttgctgttttgataattgtttccctgaagcatggtgaacaatgtatccaaagtcgccatgagaagacgcttcgggtatcggcaatgttagcttctctgtaagattttcctttacttgctccactggcttagtctttgaaggtccggcttcagcgcaggcaggagaaatgcttgcagcagcaacttctcccaattcttcaatctt

SEQ ID NO: 68661 - DNA, 587 bp, Zea Mays
tatttttagaatattagaaactacatcaacccaaagtttccatggcatgacttgttttcttactaataatatagtttacaatgccgtattcaaaaactgtttctacaatatttttagggctggccaaaactatgtagtatcggaacaattatcaagtatagtacaataaaaccctaattttaagaaatattgttgtcaaacaaattttagatagctagcatttgcaatggtgacaagtgacaacgtcaggagggccacacaaagacaaacaagagacgccctttgaccatagggaaaacccacccgccgctttctctcctgcttttatgcccccttgtctcttcttctctcgtgtcccagtcccactcgccaccagtatattctctctccgctctgcactgcccactgctcgtctccttgcttgcgcttcctccgtccccctagccgctgcaggtcctagttgccccacccctcacgccaatgcagcttccccctgttttgttgctttgaccgccttaaacacctcagggcctgcagatgtcgcaccgaatcacatccccttcacgcctcctgctcgaattcctaac

SEQ ID NO: 68662 - DNA, 290 bp, Zea Mays
caggaatagggcacgtgagcaggacagtcgtcgtatagcggaattgtcagccgaagtcagctgcttgcagtacgagatctcagaacgggatacgaccattgattgggccatcaactcgtgttcgtttgcttgggactgcgaagcgaaagctctagcttgtgtggcagagcttagtgcgtccctcgaaagcctgcaagtgtactgtaatactttacatgaagaagtacatgtattgtatgctcgactgcacccggacgtgccttcagacgttgctacaatgggagccggac

SEQ ID NO: 68663 - DNA, 601 bp, Zea Mays
tgtctgaaacttcaactgatacaaagtagcggtagtcgttggcacttgtctagtagttactactgttgaaagtgttgttgactaatcattctctttcatggagctttgacaaggaaaaagtacatcaatggctgttcagtcagcttgaagaaggttcagaggtgcatgttgctgctgcgcttgtatagttgcaggttgtgtgaataacttggctctgccaatcttcccaacacttataaaatcttaccgatgaactaagttgatggcatatgccgtatgtaaggaccacagaccgatctagtattaagtgttgagggatcggtacgttgccacagtttttcactttaggtttttgacctgatgatagggttaaagctgttgcctgtttccattgaaaccatcttgggacttgagacccttatctggagacaaaattactgccttttttcagtgtagttgctgccactgcttcagcactatccatatgcgccaactcccaagcacgtacttgatgctttgtcttgtgtacgcagaatcagattgggcatctccacagcagcatccaggccagcaacaaacatgtaccaccccttctgcagat

SEQ ID NO: 68664 - DNA, 311 bp, Zea Mays
cctggccaaagaagcacattaagtcctactcaaactttatgctaaaatggagagtgaaggcaccaaaatttttagaatcatggctaagataagcattaaccataacaaggaagaaaaccctatgctccatacaatgttcacccacaaacaagattctaaaaccctaattccttcttaagcccttaaaccctaaccatgggattaaaggggaaagagtgggaaaatgatcaaaacataaaaaggaacctttactaaagatgaagagtattagtaaagctacaaattttagtaagagaaatattgcaaaaagg

SEQ ID NO: 68665 - DNA, 1087 bp, Zea Mays
aagatgacatatgacttgtacagttcgatgcataaaccaaacagacacatgaaaacaataaatttgtcaatagcacttaaatacttgttggcaggtacatgtttttgtacataaagcatgaacattattaacatatttaaacgtaagggaagtgtatggcactgaactacaaaggaaactagtacatgcagatacaaatgatacaagtattgttatgagtgaaacacatgttcagtcttcaacattacatatgtttgtcggtcaaacacatgttcaggcagacacatgatcaggcagataatcatattaaaaattaaatgaacatgtcatgaattgtactgaacaataaacaacatacatgtattccatggaaccacaatgaattgtgacatactcaggttgtgaatggaatgccatatattggtgaacactacaatgctacgaaagggtcacattcctcagaaacgccagaaatacaatttgttcagttaattaatatctgcttcagtcgaatgaacatcactgggaaaatggagtagactggcatggctaaggttaggctacgagattgaaaaccttggttgcattggcaactacgggttcactcataaaatgtaggggtcgtctgcatctcctaggaacatgacgcccaaatgaagggttccaagttgttcggaatgcgcggaactacttagtgttggtgtgccatcccatgtggtggtagagacaaaggttgttcttacgggggctaaatcggaggatgaacaacgtaacaagttcacagctcaaactacaagtgcggatctggtaaaatcgtatggggtgggcaaaaaaacttggattttttaacaaaaccagtgctgttctaaatcattagtgaatcaagtattcatttgacggggtagaagatgctaatacctcaagaagggaagatctcgcccgcaacacggcgaatcgaagaaaaaaacaagtgctgttctaaatcaatcgtgaatcaagtatttatttgacgcggttgaagatggtattacctcaagaagggaagatctcgcccgcaacacgccgaatcgaagcgtctccgtgtgga

SEQ ID NO: 68666 - DNA, 540 bp, Zea Mays
ccattgcataaggactgctccaacacccactgcactagtatatgtctcaatgaaaaatggcatagtgaagtctggcaaggctaaaaccggtgcagtcattagtgatttttgctgggtttcaaatgccagatcatggtccttggtccacataaatacaactgttttcttgagtagtgctgtcataggttgagcaataagggcaaagtgtcgaataaatttcctgtagtatccaacaagtcccaaaaaactacataattctttcaaggaagtgggcactggtcaggagacgatagcttgtaccttggctagatctgtagccaccccagtcgaattcaccacaagacccaagtatgacacctgacgttgggcaaatgagcacttagaaagcttcaccttccactgatcacggtacaataatatgaaaatacttgttgtaagtgagatatgtggtcatccagggaattgctatatacaaatatatcatcaaagaagataagtacacatttcctcaataacgtggatagtgtatggttcatagcc

SEQ ID NO: 68667 - DNA, 641 bp, Zea Mays
gtgcttgcaacatctttgtagatgacccctgaccatagcctttagtcttttgggattctttcctcttccattattaaattgttaccatttgaccatctctattctcttggtattgacatgctcgtacccctagattcttcaatactcttgtttcaaatacttacctctgaaaattcagttgtctatttaaacattccagtttatatgtccataaccttcttgtcttttgatatcccttcctatttcgttgttaagtcattatcttttggctttctttctattcccttgtcttggtatgttcaagacatttcagataacatgtccttgaccacccttgtttcttaataatccatgagcgatcattttatctcgcacatccatggagatctcgtttcttccttataactttccttggtaaggaatctttacttcaacccttctattggaaccttacctatcttacccttgattgttttctccacttcgccacttcgcgagacttgccttaactctatccttggttatgctttcacgattatcatctctactcttgtcacctctatatcttaccttgatgcttatattatacatgtcctttaaaaccttctctcttccatctcaattttatagttgtattttac

SEQ ID NO: 68668 - DNA, 1072 bp, Zea Mays
ggaaattctattcgtagttcttcttctctctcccaagtagcttcagcttcactgtgttgactccattgcactttgcacatcttaaccactttattcctcataacacaagtcaagttatcaaggatcttgatagggcactcagtataagtcagatcatcctgaacactaagttcctccatgggcagttactcttctggcaccctgagacacttctttaactgggatacatggaagacatcatgtacatccgcatgatggtccggtaattctagttgataggaaacttcctccactcgctttagcatcttgaagggtccaataaagagaggggacaacttccctttaactttaaacctcttcataccccggaattgtgacaccttcagatacacgtgatcaccctccttgaactataactgccttctccgggtatctgcatagcttttctgccttgattgtgcagttctcaagttctcccttatcaaccagacttattcttctacttcttgtataatttctggcccaaagaactgcctttcaccagtttgatcccaatatagaggagtcctgcactttctgccatatagagcctcaaacggggacatcttcaactggcctggtaacggttattgtaagagaactccgcatagggcaaatcttatcccaactgccaccatgttcaagagcacaagctcttaacatatcttctagtacttggttggttctatcagtctgcccatcggtttaaggatggtaggccaagctaaaattcaactttgtgtccaagcactcgtgtaacttttgccaaaaccgagaagtgaactgggatccccggtctgacacgatcttcttaggcactccatgtagacaaactatatgtgccatgtacaactctgccagcctcgtgcccgaatatgtggtcttcactgggataaagtgggctactttagttagcctatccacaatcacccaaatagagtcatacccagtagatgtgcagggtagacttacaatttcttcccacttccattagggtatcttaagtgggtgtagtaaactggcaggtctctaa

SEQ ID NO: 68669 - DNA, 287 bp, Zea Mays
tggggatctaacagttgtcgttgggtaccacttcaggttaacgcccgatttaatctgcatcgtcagccgatgatcggacggtcagatatcatcgataccccttcggcgtgctagttttgcaaaagagtccctagattttattagaatcaacccgcagtcctattgaagtgcagaagtaattacagagcagttcatcttcttttagataacaccctgactttcatgaaaatagtagctgtcgtccattaatgttatttagttacaaaaattaagtcagaaatttgttt

SEQ ID NO: 68670 - DNA, 552 bp, Zea Mays
ctgtactgtacatgaagacggagtgcatcacccattgctatacctttttggctttcgctttcacactgatgtgtcgtgaatgacagtatgattgttttgtttgcataagaaggaccaaatggctgagaacggtataagaattgctatttatgtatttttcatgcgtcgtactatatgtttttgtacaaacaaagtcagcttgaatgacgatgatgatgatgctgcaaggttctttcctatgacctttcaattgcagtggactaacaatggcagatgaagaaacaatatatccgcgtgcgctgtccccaactcttgccgagcattccctatgttgccgagcattcccttatgtactgctgctaaacatctagctgatcatgatccaatgtgagcgaccagtatcggtgtcacattcaccatcgccctgtgtgaattcagataatccggcctaagtagcacgcagagacgtccgagtgtccacccactctacgctacagctgcattaaccatgatgcgtacggcaccagaccagtgtccgattgtgacactggc

SEQ ID NO: 68671 - DNA, 576 bp, Zea Mays
tctggactgggcacatgataaccagagaacacaggggcaatggcgcaagtattcctaagacacagagttacagccgcattgatggcgggttgaatgtatgaaatcctagggtctcttttagaaagtgcacgcggcgaaggggtatcgtctattcctggccgtgcgatcggatatggacgacacagattaaatcgatcaacttcctaaaccggtatgcactgagcaccgctgatccccagatctggggccagattttatgaaacccaattaacccacaaccgccagattcaaaatctatggcccccgctgcccggtatccaacccccaatccacaccgttgattaaccccatcaacggccatgacgttcccttcttccctgagccagaccgagcggcggcgcacatgactacaccactaccgaaagtcaccggcgagcgaccgatccgaccctgggcgcaccataccccaatccggccacgcaacacaatggggaaacggacacgagtcgtttggtggggttcttaccattgagggttgcgtagagatccccgcccacggagatgtgccgtcctccg

SEQ ID NO: 68672 - DNA, 594 bp, Zea Mays
tttgaataatgggaaacgggaaagtaaagttgtgtatgtaatttacaatttgacagggaacatttaaaatatttctttctttaaagtgcatacaaactgaaaaaagagactttcagattgtgcatagtttctttcgttaaaatatatctgttgttgcattagtagttgtcggttgtgcattagtagctatacccgtttgtacttgcagatagaattactaaattgttattctttggttgtctgcgaactgttgcgagatgaagaggtttggtaattgatggtttatcgtgcatagcaaaaggctcttgtgagaaactaatctttatctacactactccttaagacattactgacctaaactctaccgtcccttcctaatcctgatttagctggaactcaatatctttagttggaactcaatatctttagctggaactcaagcatcggtaagggggtggtgtttatgctgtcagagtttgtgaacttgagaaagttcagataagtaatgtttgcactgaagaaatgaattgggcaaaagaatccaaaagttcaccttcttgcactaattgtaagtctttctgtgattatgtgcac

SEQ ID NO: 68673 - DNA, 375 bp, Zea Mays
aaatacgtcatgcacatccgataaactatcgggtagctctaactggtacgctacttcaccttttctttccaaaatcttgaatgggccaatgtagcgaggagataattttcccttaaccttaaatcttttcattcctctcatcgttgaaactttaaggtatacgaagtctcctacttcgaatatcaactctcttcttctattatcagcatagcttttctgtcttgacagtgctgtcttcaaattctctctgataatctgcacttgcttttctgcttcttggagaatttctggaccaaatacttgactttcttcggtctaattccaataaagcggtgttctacacttttgtccataaagtgcttcaaatggtgccat

SEQ ID NO: 68674 - DNA, 865 bp, Zea Mays
actgataaacgaatctcacgtgtatgttcaggtgccgtagatgtggtgataaagttagctaatagtgtgtcacatgtgtccccatccctatatgaattcctattagttagaaccaaagatatcttaaaaagttcaaattttgctaaatttacttaactaagctataattaagaaagtttacttccaccatgaccaaatttgagcgaagatgctataatgatccaatttagtttgattgctaacctgcacatgtggagaaaatgttggaggttctcctagtggtgacattggcggcagtcatagcataatggcaatgttgtgtccctgctgtgggcgaaggcctatgattagaaactgttagcacatacacaggactaaatgatataaatgcttggtaatgatatttcttacttgcaacgtcgcctgcatctgtgcattataagaagctagatagtcttgttgtcccttggcaaaattttcatggtgctttaactgttcttgtaaccttgcgatctctatgtccttctaagtggtgcggcgaaaactactagatgaggactacgaggaagactttttcaaaggtcgtgcctctctcgtgtcaatcgggctgttgaataagggataccttcaagaacagtataggttaaaaataatgcattgtagccccacattcacaaaattaaagaacatataacatctcaccatccatgggcctttccgcctgtgcttgcatacacatccacctcgtcaatgtgtccatgctaccaattgtagtcttcaccataagtcttgaccattactataacgtactagtattaaatgttcttacatatagcctaccggtttatttatcggtcgattgtct

SEQ ID NO: 68675 - DNA, 524 bp, Zea Mays
gaagtggtagtgttcaaaagcttctttaaagcaggattaaggtttcctttgaatgggatgattgctgatgttttgaagaagtttgggatttatcttcatcaactaactcctaacgccatcgttaggcttagtgtctacatttgggccctccgaagccaaggggtagaaccgtttgccgaaggcttctgccgaatacacgagcttaattatcaaacaaaagctagagaagatgggttgcatgaaaacttcagctgctacaactttgcttatcgcaaaaatacaaagtttccagttatcagctatcgtaccaagtggccagctggctggaagatcaaatggttttacgttaaagttgatgaagaaaatcagaaaccggtccaaagtccactggaattaatcttcggagaaaccaggccccagtgcaacaagacaccgcagagtccaagccaaattgcaccgggcgaatttcgagttattgcggagcatattggcactagggatctggtgcaagaattcttggcttt

SEQ ID NO: 68676 - DNA, 489 bp, Zea Mays
tctattgttttgattcaacacccacaagacctcgatactgcctatgtgctctctcaattgcaggaagaggtggctgaggcgaccaagcagcaggattttaagggatccagtcgaacattcactaaagctcctcacactaacggccaaccaactgtgatagtgtccaagcctcctgctacggatgacaaacttgctgccctttatgcctacaggaaagcaaaaggtctctgttataagtgtggcttagcttattcccggggtcacaaatgtgctgatactgttcaactacacttggtcgatgagatttggcaattccttcaacttcctgacgaagaggagtcacccacattcgaacctgtagaagaattacgcatactgtcattatctctagccaccacatctgtgaaagatactcctaaaaccatcccgtttttgggtcacattggagatattgaaattctggttttattggattcaggcagctcggcg

SEQ ID NO: 68677 - DNA, 303 bp, Zea Mays
ttgtgaaaagtatagcttctaaacaatcaattcttagctcatgcatttttaggacaagctacatacacaagtaaactacaacttttatatagcacatatctacagaaaacacactttactttactagattactcacacaaccaaaactgtacacccataaatttcagtttgctcgcacaagagcacttaactaaatcaccaaacaaactcatagagagatactatcactaatttatcaaattcaaatcattatgacctagttgtaaagtttcaatttatatcaaggtacttaagtatttcaag

SEQ ID NO: 68678 - DNA, 765 bp, Zea Mays
atgacaacgtttgtgaactatgccttctatttgagtgtgtgaagggaagttggtatagttcgcaagaaggcttaggcattgacatggatctgattgttagcatcttgaaagctcaaatcaagcataaaaaggtcatggctaaagcaaggtttggcaaggaaggaccatgcgtaatgcaatatagaagcgcaagctagagactcgggacacaatgtcccattcaggcggtgaatagcaagcagagggcttggagccagtgcactaaggcaatggtgaggagaaagctagaggctcaagacatgatagaccatcaaggccatgaagtgtgagtagagagtttggagttgagtgaccaaggcaacggagaagagtaggcgaggttaaggttgatggacttgaaggctatgtgatggtttgagtaatccacgacatctatgtagatcaagcaaacgattcaatgaacatatcaagtgacttaatgatgaggacatcacaccttcaagcacaagataactaaactaagaaaatcaatatcggtgtccaactcatccatatcatgacggaggcccatctcgactcattggagcccattttagattccaggagcagtcccatgtaaaattgacacccatggagcatatggattctatttttaacgatccacatataaatataatttgataacctaacaatggctttagctgacttagaaaagaggacaaccagctcaaagaagctgatcagtgcgaccaacatgggtcgatt

SEQ ID NO: 68679 - DNA, 607 bp, Zea Mays
cacaggggctcggaacaatatttcctaaggcacagtactatctacgctggactgcgagttgattcactaaaagcccgaggactcttttgcagttttacagggtcgaaggggtatcagtcgttcagggccgtcggatctaaaactgacgcaccagattttatcgtcgcgttataaaacgggtaactagcccccaccgtccgatccgaaatcaatggatgaagggtgatcccaccctgatctaacctaaaccgtctgttaccgcatcaacgctccagatcccacagagcgaattggtacgtcgtgatctaatccagccgcccgtcatgaatcctacggccacgatctaatcacgcgaagggtatcctatcatctgatcgcaatcgccaatgtcggatccaacagccaaaaggccatcgtcttccttcgggtcgtggcgcggaaaaaaacccagaccccacggcggcgctcgccggtgagcaccaaccaaactccttcccagtgcccaaactaataaccgaacgtggataattaaagggacatgctagacgagtggtttgtggggtttcttaccggctaccgtggagtaatggaagccgaccacgagtgg

SEQ ID NO: 68680 - DNA, 469 bp, Zea Mays
tgccggcgagtccacattcgtggcgggccgcgcgccgccgttcctggtcacttgacaggggaagagatagtcgatgccgtcagatattggagggatggctcggattagatgggtgggcatcggttcagtggtgaatccgtgctgttgattgaacagcgtgcggtctggaccagatctcagcgtaacggttcactagggttgatctagagcgttggcggttgatcggacgaactagaatagatcgggacgggatccccctccatccattgatcgccgatataacggcctcgggagcccactgagccacttaaacctagatctagtccagcgcgtctgtcttcgatcggacggcctcgattcaccgataccccttcgtttggcttatttgctaaagagaccctgacagacacttgaatcaacccgccgtccatcagtactgttctctgagtctgagaagtcttgcacagag

SEQ ID NO: 68681 - DNA, 748 bp, Zea Mays
ggctggtgttgtaccagaactcagctgcacttaaccagagtgcccaattcgatggacaagcgtggacaaaacaacgcaagtaagtttccaagcactaattcaccctttcaatctggtcgtctgattgagggtgataagaactgctcatatgaaggttgaaacctgcctgcttaaatagttccttccagaagttgctggttaaaattttgtcgcggtcggaaactatggcagcaggaagcccatgaagcttatagatatgttggaagaatacttctgcaattgtgacaactgtgaagggatgtgtcaacggcacaaaatgagcatacttagtgaagaggtccactattactagaatgcaatcaaagcgcttggatttgggcagtccatcgatgaaatacatagagattgtattccaagcaacagttagtatggccagtggctggagaagacctagagcacgggttcggtccggcttggcttgttggcacacttgacaagaatgaatccagttttgaacaaaagatttcataccgcgccaggcgaagacctgcttcagtttctagtaagtaactggaatacccgaatggcctcccaatggactttggtgaaaaacctcaaccaactgacatttgatagtattgttgtcaccaatccatatgcgctgcttatacctcaaaagtccattctggagctgaaaatgtggcatagaggaaccatccagagacaacttggccaacaactccttggc

SEQ ID NO: 68682 - DNA, 782 bp, Zea Mays
ctcgacagtcgaaactccgcctcacccaagctcatcctcgggcgaagacaacactcgggaaaattctcgtctcgtccgaggtcccctcttcacggagtgacagttttcgcctcacccgagcacgtctcggacaggtggacagccccgagcctagcctcagtcaaaggttacgggaaccgtggagacgtgcacatttaatgcgacgattcagtatctaccccacgtgacgccgcagataagcagggagcgatgggaccgcggtcccatccgctttcaccaaccatgatgacacacacccgaagacggcctcaaccttaggagaagactgcgcctcgcccgagatcggcttcgaccaactgccctggcaacaactccccacgaatcctgcaagaggccacttcgacaactgtactaacccctccctacacaactgcatggcccgaggccggctcgaccaaggcctcgggaggaacctctgtctcgcccgagcatggcctcggcctagataacatcgacgaaaggacgccaccaactcctccaggaagactgtttgcaacgagatggctacagaaagatgcaggaccgacgtcaagtctgctttataccatacgggggtggattacgatgcatttttcaccatacttatcactgtttcaacaactacgaccataccatcaggcaggatcaggtatgcgtccgagctcccggtcgtggcatcagctctctgctcggtcaagatgcaagatacaggggctggacgttctcccctggttcaaatcaac

SEQ ID NO: 68683 - DNA, 319 bp, Zea Mays
tgcaactaccttacccatcatattgttgcataacccctctgttttaacctaacagagattctgacctacctacaccatataatccatcctacccttatatatcttaaccatgtcactaacccggatagaaacaccaagcctcaagaagaaagacatcaacgtcgacaaggcaagaagggaggcaaaccagatctctaaatgagacaagaccaatcattcgtgataaaaagctttccttaccataatctttcttatcccaaactattcttgccctaacctacccatcttttatcctacataattaggtggctatacagat

SEQ ID NO: 68684 - DNA, 1206 bp, Zea Mays
tagccaagtgggcctgcgagctgggagctcacgacatcgagcttcggcctcgcactgcaataaagactcaagcactagttgatttcgtatcagagtggaccgagaaacaagtgccagataacccgaagactgtagaagtatggcagatgtatttcgatggctcgttgaagctgcagggggcaggcgcagggatcctctttattgcacctagaggtgaacaactcaaatatgctcttcagttgttattctcagcatccaataatgcagtagaatatgaagctctgattcacggattgaacattgccatatcactgggcattaagagattgatggtatatggagattcactagtggtcataagtcagataataaagaatgggattgctcgaatgactctatgggcaagtactgcacagccgtccgaaagctagaagacagatttgaagggctgaaatttcatcatgtggagagagatcgtagcgtggcagcagacgcgttgtcgaaactaggatccagtcggacccaggtcccgcctggggttttcgtccaagaagtaccacacccgagtatttcctaggtcgggtagaagaatgcaatgttctgagccagccagagtcagactctaatgaatggagggagccaatcatcagatatataaagaatgaagaggaaccggatgacaaagctgcaacaaaacgcatcgcaaggcagtcagctcactacaccctcattggggaggcactatacagaaggggcgcaacaggagtcctcatgaagtgcattctttcggctactgggaagcaactgctagatgagatccacgccagacagtgcgggatacacacaacatccaggactctggttgggaaggtcttcaggtctggtttctactggccgacagcaaagagtgatgcagccgagttagtccagaggtgtgaagattgccaatacttatcaaagcagcagcatttaccagcacaacaactgcaaaccatacccgtaacatggccatttgcatgctggggactggacatgattggacccttcaagaaagctcagggaggatacactcacgtgctggttgccattgacaaattcactaaatggatagagtacaaacccatcgcttctctgacttcagctaaggcagtggaattcatacaagatataatattcaggttcggaataccaaatagcattataact

SEQ ID NO: 68685 - DNA, 723 bp, Zea Mays
ccttaagagggaggcgaccattgtgtccgtttaaggaagaggttggatttggtgagctgatgaagctgagcttttcccaccagaggcagggtcctaacccaaaatatggaatatggattgccctgctgcttaccattattccgcttgcttctggccctgcgaggcagatcaatcaatttggcattgcaacctttgcctgcagtgcttctcttcatccgattgaggtccagaggatgattctggctcaaatgacgtccacagagtgacagttctgttgcaattccagaaggctgtgtgttcatcatcattatacaaaaccaaatggtgactggtgtcagatatcaaagagctagaagcatctcaagaaaagaatctcacaaaagaaaggtaccatcccttggctaggtcgtttgttcatcttctctgttctactaaattgggcgttcttttctgtaccattcaccatatttttgagctggtggctagcataagcctaccaccaaaaacgaaatgaacaagcaagcaaagagagagtaagaactggaattcctttccgccccctatatatgcccaacaagttggccacaccatgatctccagttacaggaaaaagggcaaagagttggtttcactttttcccgaggtctgattggtggcactcgcagattctcattttcagcgtcagctgttatattattgttatatcatgtatcgtatacctaa

SEQ ID NO: 68686 - DNA, 1170 bp, Zea Mays
gcgctcttctgagggcactgagagatccacttcgtcgagagtgcctttaggagagaaccccttccacaggatgtcatggttacgggtcctctcgaaagagtcgatgaggtcggcttcgaagagagccttgatttgatcatactttgcttggtgctctagaggcaactcttcatacgtgacatatctgtcttgcactggtctacacgcatttgtctgagtgttcgctatctggacagctcatgttgaagatgttgacatagatggtcccaccggatgtgccaaaatgtgtttccacctgaaacccaccagcgagagacgacaaccaacatgaggagacatgaggcttttgggacggctggtgagcctcagtcccttggtcaacgactcaaatcctggcgtacgacctagcttcgaggtttgcctagcgtgccacctgacctaaacccgatcaggagggtgtcgacgtgctccgagttggtttcttgcgtacacaaacacatgcaaacgtcagtccgagtcgttttcggctcgacgggtcatatcaactgtgagaagccgatcgtttccccaggcttgcattggatccacgcatcagcgacgcacagagctgatggctcttgagaccccgctctgttcacaccaggtggatccaaaccactatggttaaggtttcaccgcacagtcagatcatccctcacatagtttggcctagcaagcatgatggacatctaagcgctgaccatatcataggcctaaaaactagcgcaagccgattcccgaaacaatcccaattagagccgacgcgaagtgtctggcacgttactggaacatccaacttgtatgcatggcaactatgcatatattagacagatctttgacgaatcaaagactaacgtgatagatcatatctaccaggtgagacaaagctaggaaccgccctcgcactcgagaactcacgtggggctgcgaagcattcataattggcaaacatcatgcacacatgacgaacccggcgtaactttcttgtaaatgctacgataactagtgcttcttgccataaaaacgcttcggtacgagagaacacaaagatttaacaaaaaacggcaccactctgaccgtgagacgcaattagggtggcattgcacttacctgtggaaaaccctgagaata

SEQ ID NO: 68687 - DNA, 338 bp, Zea Mays
agggaacatatttttagaagtaggaaaggctagacactccaaaaagtttcaaggaacaacattggatattagaacaaaatttcaagagagttgtgacttatgattatcttgaagcaataaaatttcccttatccaaaacaaagaacaaatgtctcaattaccaactgaagaatcattggtagactcatgtgtagatgttcccaagttgaaagattatcaccagtccatgttgcagcataacgctggcttcctataaaaccagctcgtgtaagaacaaatggccttttagctgcattggccatttccattcctttataagtagatcttgtcattagcat

SEQ ID NO: 68688 - DNA, 1033 bp, Zea Mays
aaggcgtggccctcgtcgacatcgcagcctttctggctgggttcgttcatcgcgttgtcggggtgggattgctgactgcatcagctcgaatggaaaattcagagcttccacccccttcaggcgccatgagatggggatgccacactcaaagcgttgggttcctaaattaaaagctaaagctgtttctttcgctgttccgctgatttctgctgtgtggcctttcgtgggcgaagagggggcggctggtgctgacaggctcttgctgaatggtggcactgaagctggcatgctggaggcgcttggcttccatgccggagggggatcaccaacaaagctgattgcacccaaggtaattgctggtgcaggtttctctgcaggtgctcttcgcactgatgggtcgtcccctggagccgttgttgagatggtcgctgacgaaagccccgcccaagatgcagccaattcattcgacatccagaacgacctcgccatggaaactgctacatcttccaaggtaatatcgaagctctcttcagatactgcaatagccccacttcctagtaagcctgttcccagccctatctcaaacctccataattctctggatcctaagatttcaaatgtggacgtgcatcagcagtcgcagcaggggtttcaagttgtcgagccccaagtagaatcaaatgatagctatgccgagcaagtctgtaatgtgactgctgctcaagatagtcaggaggcttgtagtttaccaccagattctcaaccaaacagcactaacagcttgcagttacaaaacttcatcgcaaatataactatgccaccagtactccctctgattcaaacccctccacacaacaagtcagccaacatagcaaatgctctaggggttttgtcccagcagcatactaagatgcctaatcaggtccccacctccggcaagcgctatagtgtcagattggctgcaaagaaaaaattatcgttggggcgttctagagattcaatagccaaagctcaagatattctaattgctaaa

SEQ ID NO: 68689 - DNA, 544 bp, Zea Mays
ttaatgagttcacgcagaaactgaaccttagagccaatccctaacccctgacaattccaaatgaggcctatcatcaaactgggtcaggggggaggtaactcttctcagtttcccttttcctattaggtgtatacctaattttgggggaaacttttctatttctctggttctttcgatgtttaatttttcttccttttctcaggaccataacatccaagagatcataatccatttctttctcagattcagcatggacactgctatccacatcattaatatcatccacaatgagttcctcatcttttttatttccacaagattgaatagccagaatttttctggacatttctaactctcttatcaaatcaagattagctataacattggactcagaagcccccaaacaaaccccaagcttattagagatatcatataaatcctcattattcgcattaagtaaggagaagggattgttagacatacctttgttgaggaaggcgtccttagcttcggccctggaaatagccttctctgccacactaat

SEQ ID NO: 68690 - DNA, 493 bp, Zea Mays
caagaaagaagatgacagcgatgacgagaaaaaggaaaagagattcttcaagaggaaggatggaaagcacaagaggctccacaaaaagaaaaatggaaaggcatacattgttggtgactggctcactgacattgagtcatcaagtgggtcttcttcaagtgaagaagaaaatgatgaaaagttgccgccatcgctggggacttcttttcaccaccaccatcaccctcatcgacttctcacctatgcctcatggctagaggtgaacagaaggtacaaaatgataatgatattattgatgatagtgatagtgatagtgatgatgaatttgcttcaccttcctatgatgaactagctgacttgcttaaggaaaacactcaaatcattaggaagtcaaaagctaaatgtgataagttgaaagatgaaaatgaatttttaaatgccaaatatgacatagttatgaaagctagtgatgaaatgaaagaagaaaacaaaa

SEQ ID NO: 68691 - DNA, 470 bp, Zea Mays
gtttggactgatagcaaagagtgtgccacatgtgctctagcttgaactttgtttctctagtcttgttacggaaactttccttggttcaagaaccgtagcaccttcttcttcacccagttgggccatatataagcggttgtaaatgctattagggtgatcttctagttgctcattgatcatcgatccttcagctgcatagggttacagtggcgatgagtttttgtggagttgtatgtgttggctatttgcctctagattgttgatctcttctttactatttccattaactaggtccactgagtgaaaactaagggcctaaaacgtgtggactttaaaaaaaatatatgtgtacttatcagcctttcgtcctccatcttcgtctagttacttcaccgctaaaattgtggagcatcgaagcaaatagactagttcaaagcaacatcaatgtcgttgtttggagacaatatcat

SEQ ID NO: 68692 - DNA, 548 bp, Zea Mays
gtcccagtcgaggctacctcctgggggccggtacaccaactctttcttaggtatgctggtatctagcctcgacgcgtcgagcctacatcccaggggggccgagtaccaggaggggagttgataaaaccacacacagcaagaacaagcaccatacagataagagctgtttaattgatagttccaaaaagtatcttacaaaaacaaaagttattacatctgccttcaagcggagccctagcctcatttctacagttatgagctactcgacaccagtagggtcacgctggaagcacaaggccgctgtctccacgacatcttgtacgacctcccgggcggcgtctttagtatcggcaaccggaccaacggtcaccattggaggcgacgtcgaggccattaaagccaaagagatggaggcgtgaaagatggagccgcagctcagctcgcttcccacctaatggagttggagctagaccagttcatggaggtgtaccatgggatgctggtgaagctcacgcgaaagatggagccgcagctcagctcgctttcca

SEQ ID NO: 68693 - DNA, 583 bp, Zea Mays
tttaaaaaacttttcctctgctcgcgcccgaggccagccacttcttctctgtctctggcttctctctgcctctctggcgattcctctccctcgccggcgacgtcctctcaccggcgaccaccgtgctccggcgatcttctgtgcttgcgcctgctctttctctggtgagcagccctgtttccccctgcatctcttcttctcctctctgtctgtctctgcagtaagcactcctttccacccctttgtgcccaactcaatttcctatccaattctgtgaatccatgtggtgtgaaatgttgctctgtgcccattgtgtatccctgcaggtttctagctccttagggagggtttcacagcctctaatagccatttcaccgaaaccctagaactccgcacgtcacgtgttcggtgaaatgcccaaaccagccaaaaatgctccatttgaacccaaatttttcaggcaccttcacaatacctccagtaacatattcaccaaatttcacgccaatccgatattccaggctttaatttcaccaaattccccgtttcgagcgatcgtttccgagccgagtgccctaatttc

SEQ ID NO: 68694 - DNA, 435 bp, Zea Mays
ttggtggggtcgctggaccccgagaagaccaggggaaagatcgtggtgtgcctgagagggaacatcccaagggtggacaagggcgctgccgtccgccacgccggtggcgccgccatgatcctcgtcaacgacgaggccaacgggaacgtcctccaggccgacccgcacgtgatcccggccgtgcacatctcctacgccgacgggctcaggctctcggcgtacatcaagaacaccaagtaggccaatagctagcctccttacaaacatgaaacgtgttccccttttttcctgcaggaaaatggtctgcacaaatgacaaattcgtgtgtaatgtttgtgttaaagggttccgtccgggttcgtcgtcaaggggaggacgatcttgggcacgaggccggcgccggtcatggcggctttctcatctcaggggccgaac

SEQ ID NO: 68695 - DNA, 501 bp, Zea Mays
gaatcatttactaaaagctcccttttgtatacatccaaagacaggtaaaactcaagatgtgttaaattcctgtattagtttgtaatgtgataataaggtggcaggctcttatgctcaggagcgggtggcatgtccttttgaacatctagattcaataacagatgcagtcccttaaaatccttgacattgttgatttagtttattctaacagctgcaggaataatgtttgtcacacaatgttccctattgctcacaactgactcttcttccaggccgtgtttgtgttccgattgaccccagtaactgtgatgattttgatcctgcggctgttccgactctatcacaggtatggtccatagagcctagcatgagaagcactaacatttcatatccttctcccaagcatcatggtgcaatgctgatatgctaaaacaagtgcactcatacagcttttaggagagctgaatgctactggttttcagacagatcctgaaaatagta

SEQ ID NO: 68696 - DNA, 408 bp, Zea Mays
agcggatgctcacctgcacagccggagtaacatacccaccgactaggggacaccagagcaaagttggcacaatacttgagcagatcgagggacgtggagacaaacagaccgagatggagagaggggagcgacatagtgagcgagggagagtcgtagaggatcaacttccatcgatgtcggattgggaggcgaggccacgaggcaaaggcggcggcgatggagatatggtggcaccgaggtggcgtacacgagggaggagtgactaggcgaggtcgtgagggagggctagggttgtggaggagcggcttacacgaggcaccggggtgagatatttcagcgttattggggcgatgctaggctagcacaggcacaatagcgagcgtgtcgggccgacccgttatggacatg

SEQ ID NO: 68697 - DNA, 820 bp, Zea Mays
acgacttcccccattggtgatcgccatttgtgattggttcctagccaccaacctcatcctcctctgtctctaattccgtggtggcgtcctccttccatcccgttatgtgtgtccgcgcctgccttctccacccacacgatgcgtgccaccgccaaatgcactggccttctccttgtgtgcgatgcacgcgtaggtgctcgttttgtcgcaaccggatccacgggcccttcccccaagtagcactagtgtcaacgcccttcccgtcgccatcgcttgcgcttgctctctccaccagcgcggtgctcgcgtcgttgtagcacctgccaccactgaacatctttgccttcatttagaacgttgtgtcaacatccctcctttctgcgcccgctgcagcctactgcgcaatatggctagagtttagggaaaatggtggcatcgtgggcagtggagttggttttatagtgggctaagcggcccaggggctgggtccacgcctgattgtggtggttcggctgaaccgaaatgtatcattggccaaggtttcccctaattatctatttgttgcctagggtgaagcttcacccggaccagtctcgccccatcgtcctgcacgcacctgaccaagtcgtccaccacaagcatgcccgcatgcaagccccacatctctcgggcgcacctttttttcctttttttgttcgtacaccccgcatgcacattaattcttttccttttttgaggcatcaaataactccatgcactttattcttttttcatgcattcactttgtcagttgtttagatctatcagtaataacccaacg

SEQ ID NO: 68698 - DNA, 610 bp, Zea Mays
caagaaccagttccacggcagggctcgagtgaatcacgttgacgcccacgaagctcagcaagcccctggagtagtactcggtgagttcctagtcgaatttacccccgctgatgtgccttttgattctggagcatctcattccttcatcgccactagttttgtggaaaagcatggcatccccactgcattattagaaatccctttggtcacccgaaccctagggtcagaccttctatgccacctcaaatgctcccaagtcagaattcttttaagtggggtagtattcttagcggatctagccgtactaccatcccacgggattgatgtgatcctaggaatggattggttgacccaggacaatggcatcataagctacacagataagactattcttctcaccgaccaccaaggaaaatcagtttcgtgtaaagctcgaccgccaacccaagatccaatgatgttcagcctagctgcagaaggcatatctgtggtagaagaattcatggatgtatttcctgaagatttgccaggaatgcctccgggaagagaggtagaattctacatagatctcctcccaggcaccgcaccaatcgtaaagagaccgtatcgc

SEQ ID NO: 68699 - DNA, 710 bp, Zea Mays
ctgagtctgtgctatcctcatgttctcccggatcatacgcacttgttcttctacctcttgaataatttcaggcccaaagaactgtctttcactagtctgatcccaatatagagggattctacactttctgccatataaagcttcaaatggagacatcttcagactggcctgataactattattgtaagagaactctacatatggtagattcttgtcccaactgcctccatgcttaagggcacaagctcttaacatatcctcaagtacctggttagttctcttagtctggccatcagttcgggggtgataggccaagctgaagttcaactttgtatccatgttctcatgaagactcttccaaaatcttgaggtaaactgatatcctcgatcagaaataatcttcttaggtactccatgtaagcacacaattctagccatatataatgggtaaagcgaggcaacctggcaatgaagtccatactaatttcttcccacttccactcgggcacttttaacgggtgtagcagtctagctggcctctgatgtttagatttgtaacactcaaaatcttaacttgagacttaagaaaatcctttagaaaaaaataataaataaagtcatcacaataagttcccttgataaatgattgaactttagaattcaccatttataaagtagatgctcataatagaataatattagctaaatca

SEQ ID NO: 68700 - DNA, 291 bp, Zea Mays
cttaacacaaggtgtagtgttgcattatatttagccatagtttttaagttggtgtatctgaggtgaacctagtattgctatgcttggggcaagactgtgtacttcaacctctcaaactgcttttgcaatgcagtccccagaggttgcttgccttctcttctatgtactcattcttgagggttggcgagaggtgacgccgcagaatgtgcaatgcttggtatttacgacaacactagactattatgactaatgtatattttgtagagtcgaaataagttaggtcacgataat

SEQ ID NO: 68701 - DNA, 382 bp, Zea Mays
ctaagttgtaaatctcaatgaaattgtctaaccatggattctcacatcaacaccttgtgcgacgtgttgagcaagttaaacatggaagtgatttctccgggaactctggattatatcccaatcaagattagatcatcttggcacaacttggggacaatggagtttgaatcatcaaggagatgctcaccgaaaaagtggaaaagtacaaatgtttccgtcaggatagcaaaggaatattgtggttcgaggaccgacttgttgttctgatggatcaagccctaaggaagaagattttgggtgaggcttatctttacaaattttccatgcaccctagaagcaacaagatgtatcacgacctccgttccctatattggtggactag

SEQ ID NO: 68702 - DNA, 327 bp, Zea Mays
cggcgtacccgtactgcacgcagatgcagcaacccgacccgggtgcaagtgcaagctgctacgactatgactactactatggcagcaacacgttcacgatcaccggcgacttcttcgtgccggaggagcaggtggcggaccccagcttcatgctcgatctgaacctcgacttcgagtaccaccaggaaggcgagggcatcggccacggcggcggcggtaacggtgaaacggcgccggtgtgcaagaggaggcagctggaggatcagaagaagggcgagaacaccacgtgcaccgtcgttccaaagaagaaatcgcgatccaccgcag

SEQ ID NO: 68703 - DNA, 848 bp, Zea Mays
ttctaagcctataagctgttaactttatgtagcattgaattaggttcaaagtggtagaactgcttgcacatttccatttgcaggcacaatacattttaaacagaaagttaaacaagctttctgttgtagattcaatcttgttagtcaaaaaatcaaatattatggcaattaaaacattttttctcgaacgcgcaagagagctgtgcatctttcatatattagattagaaaaggaggtcttacaaaccaagagaaaagaaaaaggaaatgcaaaaaccttgccaaggcaagggacgaccaacagagaactctattacatgttaaacgctaggggacgtcctagcaaccaactcttgaagatgtttggtcccagccaacatcgagcagggcaattcatccttgaagaactgtggcaccttcatgagactcggtcgctcaacctcgaacacaaccttgttcctttgtaaccaaagacaccatgctcctaaaatgatagcgctattaagtcctctctttctgtccttcagaacttgattagagactatcctccaccactcggcaaaggagagatcatcaccatcaggagtccattgaccgagccctagtggttccagaaaactgaaccaaaattggtgggctaaaacacagctgatcaaaaggtgttgcacagattctctcactcaatcacagagtggacaaacatctggatgaggcaatcgtctcttttctaacctgtttgtagtccagcacttattccggatggggagccaaaggaacacttaacactttacacttgggaggagcccatgacttccaaagactcttccaaggctcaaaaacaatggaacc

SEQ ID NO: 68704 - DNA, 646 bp, Zea Mays
taaccctagattgggcttaaaggggtaaccaaagcctaaacaagagaaaacttcaaaacttgataataatgatcataaaataccaccattaatgaagttaacggatatccaaactctaaagagaaccctataaaaccctggactgaaaccctagggggctaagtgcaaaattagtgcacttttggactaaagtgcaaaaaccatgaaagtaaggcaccttaagtcatatggttcacaagtatgtggatttgcaagttaaaccttgagatttgggcttatttgcaaaaagtcctatttgaactctattggctaagtcttaatttcaatgggattggctcaactttggagccctatatctcccaagttataaagtttttgccctaggtcaccacatcaactttgtagatctatgaaaggagaataactttactatagagatcatgccttggtaccatgaagaattctgagataaatgtgccccaagttgggctatcagtctgtctgaaacctgaaattggatattcactgacatgggatgaactttaggggccattttgaagatgatccagtgggaatttgactaggaatgctatagaaaaagtgaagatggtttgtagggctacaactttgctgcagagcattggtt

SEQ ID NO: 68705 - DNA, 598 bp, Zea Mays
agccctgacagaggggtcccacacggcagccaaggccaggcgcgcacggtgggtgaagaggctacgacgtgcgcgtggagccgggctgaggaaggccacaagagtgggccgacccgggtaattcagcccaggtaagtatttcttctctttttttttgttttttcctaattctagtttatttccaaattcaagattcaaactaagtttaaatttctggtttgaactttccaaattcctaagtatcaaatatgatccaattatgaatataaatgctactatttttggtattagtatttttttcttcaaataaatgcttctagaggtaatatcagtgaaagaaacatttgttaaattaaaaataggcaaactccctattatttatttttctgagatttgtgattataatctaaatgttataagtccaataaaatctgggtcattatccctaatattatttttatttgtttaatcatttggaaggataaatcatatactagcgtcagtccaattataattcctcaaagagagcaaagatttccaactttctcaaaatgtatttttagggtttacaagtcctaccccccttaacagaaatctc

SEQ ID NO: 68706 - DNA, 466 bp, Zea Mays
ttttggactatttccaaagccgtggccatcatcatcacaaggaattgattttactaatatgctacaaaaattcaaacttctagggaatcttgtagtgagagcggttctggatggaaggattctggatattccactttctaaagcattttacaaaatcatgcttgagcaggtaattattgtatttctcattctgaattccctctctcttgttctaattattgtatttttggttttaggaactcgatatgtatgacatcctatcatttgatcctgagctgggccggacagtaattgagtttcaagcacttgttagcaggaagaattttttggaaacctcttcagaggaatctaaccctacggcggctgacttgtcctataaaaacgtgaaattggaggatttgtgccttgacttcactcttcctggaaatcctgaatatgaacttgttcctggaggctcagagaagat

SEQ ID NO: 68707 - DNA, 865 bp, Zea Mays
actaatcaaaggatctagttggggataaagttttaatctacaggcttcgcctattcacccccctctaggcgactttcaaacacaaaaggtcggtctagtagcgtggcagccctcctgagggtggagagaagctatagaatggtagagctcgttgcagtaaaaaagaacagggttcatgacctaatcaaaggccacaaacatgccatgtagaagctagtcgtcgtgaagggagacatgcacttggtaggtaggtacatgaaccacaacatggcgatggatgggcgtcaagggagtaggcatgggaacaaacaggccgcttccagttaggtgcttgacgtgtgggccgaggtagggtcaccgtcgcgaaggtggggatgaaggttggcattggtggtgggatcctagcaagggtagtagtggagagcatggtaggagcaaagggtcgtgcttggtgccttgggcgctaagtggggcagcatagcctccaagggcctaatcggcgcgggttgtaaggagagggccatggtgagggagtgggctgccaacacttgttgggcagtgcaaaagcggtgagggaagccagtatggtggggttgagagctgctagcacacggctaggtggtgtgagggccaaggatgtcgccatgggaagtagggtgtcgatgacagacatggtcgcgaggcctataggatgggaggcgccagcacaatagaagatgacaacgtggtggcgagatctggccttggcacaccatgggccggcaacggcgtgagtgcacaaggtgcgaggagaggggctacaccgagggctcctgtgtcagtggcgactatggcgaccagtggtgctggaggagctagagtggcg

SEQ ID NO: 68708 - DNA, 397 bp, Zea Mays
aggaatcacttggtgatgtcgacatgggtaaagctaggcgctgtggcgatgaatggaaatgtggaaatgtgcctgttttttctgagttgcgatgaatggaaatgtggctgatgaccatttaaatacattcaaattgagaactgaatcgacgtttacttgaacttcgaggagcaaagaggagtcaaaagtcgccgcttcatgttcgacgattgtcgtttcaattctacagggacagggatagttgaaaagacacaactgttcaacatgaaacggtctccacacgcggctgagttaaggctacagggacagttgaaaagacacaactgttcaacatgaaacggtatccacaggcggctgagttaaggtgccaccagtggaaagaaggtttccactggcg

SEQ ID NO: 68709 - DNA, 478 bp, Zea Mays
gacattgctagttgatatagtcgtactggttgtaatagtgcagtgttgttgctgtgtcgactcaatcacaacaaaaaacactaggaagaagcgaaggaagtaaggagttgtgtcgctgatatttccctagaacacgattgtcgtccttcatctaagtagatattcattttggaggcctgctctcatagaactcgtgtacgtaagtgctgtaatggagtactcatctgacagttgagttgtgacacagaagtattctagagcaaatgataggatggtgtttatattggcgagtcaagagacttaaatagtcagggtgagtctagagaacgagagagctaaaagggcatgtgagatcaatggtcaggtaactctgtgtcatcaagatataacttcttaattaagttaaattgtgaaaattctagtgttgcattcaaaaactcatgcactctaactacaacaatagtttacctatctatcc

SEQ ID NO: 68710 - DNA, 943 bp, Zea Mays
gcgtggagtgaaatgatgggtgctggatcctctagattggattcatcctcgattcctatatcttcctcaaaatctgtgacctccagatagaacagacgcgggcaccgatgaccacgaacgtattgttcgtcacagttgtaacacatgccctgtttgcggcgctcagccatctcgccgggagtgagcttcttaaatggacgttgtgcccccgtgctggttggtgctgctactgttatagtggactgttgtgctggaataggaaatgacggtcgctggggaggcctcgacgacttgctggtagttgatgtctgttggacgtcgagtgcctgagcccttcgttcatatgctcttgccaaacataatgcatgattgagatcccgaggagccataagttcgacatcgatcttgatacgctctggaagacctgccgtgaagagttgtaccttctattccggagtgagtggcgtggtgtgggccagtaaatcccagaacctatcccgataatcctccactgttgtccggaatggaagccttgccaattccccgagtgggttgctacgaagcggtggtccaaattggagttggcatagctgcttgaaacgcccccatgacaggggtggttcatcacgcaggagctagttgtaccaagtccgtgcggcgccgagcatgtgatatgaagccaacctgactttctcctcttacaacgtgcgctgtccctgaaagaattgttcacatcgagtcaaccagtgcattggattttccttgccatcaaaggctgcaaattccaagcggtggaagcgaggaacagcaacagatggcggtggagagaaagcactgggtatggtgtgcggtagtgggggaaattggtgtgggtgaagtggtgtgtgggaatggtggtaatgatgaaatgggagatggtgaatgtggtaacggtagcaggtgc

SEQ ID NO: 68711 - DNA, 628 bp, Zea Mays
ccttcttcctatgcgtcgtggctctcctgacgtgacagctccagaaacctcaatgtgtcgccacgcctacctctttgccttcatccagcacaaccttgttgctagcgtcgctgtctcatcctcaccgctctgataaccgtgagctgcaacgacactcccgtcatattgtaccacaaccgttgtggaggtcttctctgatggtccctttcagacgctgacacttggttggggcctctacctagtatgtgtggtactagcaaacaccaacatatgcattcgtgtacgacacatttctaggcgtggcaaacatggggcatgcctcgtccatggcggtttgacaacatcgtcctcaatgtcagcttcttccactacaactgcatagtcgtcttcgtctatggtgccctccttctgcgccatcgtcaccctgacgcctcttggtgcgttgcgggccttcccgcatgctgcgcctgtgccgcgacttatcggcttgtcttctttgacatcctcaatagctccatcgaccacaactccctacacacagcactgacacaacgctctatgcccttgcactcggtacctcgacattatcggcacaaagggctatcatttgcatgggctactctagtcg

SEQ ID NO: 68712 - DNA, 289 bp, Zea Mays
cggttaagtcctggccgcccaatcaagtacgagcggcgctgattagatcagcgaggttatgaatcagggcgcgctttcaaccatccgatcccaaatgggtggttcggatcaatcagccgaggtggcgaagcggtacgcaagaccgaccgttcgatccgagattagcgttctagatttaatgatatccggatccagcgctgatcgtcgatccaccgaccgacggccacgatccgatcatgcgaaggggggtacgctcactctagtcctggccgcacactaaggatctaaa

SEQ ID NO: 68713 - DNA, 851 bp, Zea Mays
cacatagagcgagaatagtcatcaacgagcagtaagaagtagtgattgccacttagagtggttggcatgatagtcccacacatgtccctatggatgagttccagggacctcgttgcatgccactgtgcttgatggggaaatggcgcacgccgatgtttgccggtgaggcaagcttctcagagttgatcaatgtgttcaagttcgagtagtccatgcaccaatgtctccttgcccatcttccatagcaatccaaggatgaaattttttaatcgggcatgccaacgccaagcatattctcctacgtgtgtaaccatgcacaccagttgcatgattttgatctcgaggtagacaaccgggactgcaacacaccttgtccactagtcgatgttgtcatcgctaatccacatcaagccatgcctcacatgttcatcatactcctcttcatccagccaactagtgttgatgatgtttgtggtgagatgaggtaggtagtagacattattgagcgcatagtggtcgtcgttcttgcattcaaagagaatggtaccacacctagcaatgggtgttacagagccatcccaaacttcatagtccccatcgttctcatgttgatgctggcaaacatagccctggaccccgtcatatgttttgaagccctagtgtcaagcacccaatgtcagggcatcttgcttgtccttgctatcgagcgcaacatgtatcttgtcctcaatgaaggcgatctcactattcccacattcatcagaaagttgccattggggcctctcgtataggtgccagaattgtgcctagcatgttctcttcatatgtactgattgatctgggcgactggc

SEQ ID NO: 68714 - DNA, 349 bp, Zea Mays
cagatacttgccagaatgttgcccgaacagccctccgacaactatgccagaactacaacaaggtgatctttgaaaccccacttcgctactttccacctagcaacaagaatacccccacctggaggaaaagacttcaggccctgtcaggaggagatcctattgaggatgatcccaccatcgtctacatggctggatacctgcacacccttgataaccaatatgatgacctcaccctccactgcacccacctaacctcccgggtggaaagcctggagcaaaaagtcagggaactttcaagggaaaaggcgtcccttcaagagagcctcgcaatagcagaaggcgaggaaac

SEQ ID NO: 68715 - DNA, 334 bp, Zea Mays
aattgatctacctgccaacccattcaacccgagggtgcttagacaacagtaagcagaaatggaccctcctaatcctccaccggctgggactgatgcagtggttgcagctcagatgcagatgctgcaacagatggggaatatgatgcaagatatgcaggcacagatgcaataggagcgtcaggagatgcgccaagaaagacaagagatgagggaggagatgcgtcaagaaagattggtgcgatagcaacaagcaccatggcctccatcaccaccaccagttccaccctgggaaaagtaccaagatttcatgagccacaatccaccgatgttcgcc

SEQ ID NO: 68716 - DNA, 293 bp, Zea Mays
taaaaatagacatatgactatgttccacgaatgtatgaataaagtcaaatcttggcttaatcatgtttttgcctaatcccaagggtccaggcttttatttttgttaggttcagttgcttttcatctagtttcagctcatgaatttcctattttggcatatcaatagctcaaggaataataaagtgcacgcaatagtagtctgcgtatggaacattaggttgctatcttactatggctgttcttcctaatgtcctttgacatataagtgtttgcttgttaatggtctctacaat

SEQ ID NO: 68717 - DNA, 597 bp, Zea Mays
attagatttaacgtattgctctcacatagtatcatctcgctaggtaaagtaagacaaacaatcgaaatagttataaaaaaaggtgtcgaactcatttttaatccataacttactagcgcgtatgtgtacaaattagctcaaggaaaacggaactatgtaattcgccaaggatttatttttggatatataatataaataggctgacggcttgtttcgtgacaacctgtttccggtacagagttagcagcccacacctggtttgttccatcccactactattccaatcgtgtcgtccagtggttgagaggacggcacaaatggaaccctagctaatacggagtagtatcttattagtccgtttcagactggagctgctatatatataacgagctcgccacttgcggtctcggcctcgaatccaaggtcaccacctcgcgatttgcgatccctttccaacaagatcaccggcaccaccacttgcattggaatcgtgtgagccacatggacatggaggaacagttgctgcacctggagcacttcatgcccagcagcccgggcttctttgacgtcggcagtggccacgaccccgcccacttc

SEQ ID NO: 68718 - DNA, 618 bp, Zea Mays
gtggtgtcaaaattcccagatatattcaccaaggaactacctagaatgtcgacatagcgagagatcgagttctcgatcaaagtatttcctagaacggtgcctatcaccaagggagcctagaatgcatctgcaatagaaatggaagaggtcaagaaatagattaacaagttgttggagaaatggttcatctgacctagcacttcaaaatgggtagccccaacaatatttatggagtagaaggacgttacgctacgaatgtgtatagactattgagcgctcaatgcggtaactatcaagaacaagtactcattgccatggaccgatgatctatttggccagatgagagtataatgtgtcttctccaagatagatttatttcgatataccatcaactaaggattataacatccgatatacccaagatcgccttcatcttgaggtatggtctctgtgagtatatggtcatgtcctttgggctcaacaattctccaacgttctttatgtacctgatgaagggtaaaaaatggttgaaagctcaagctcctgaagtgaagaagagtaatatgaagaagataaagatgatgatgatgaagatgatgatgaatatgatcaaccatc

SEQ ID NO: 68719 - DNA, 298 bp, Zea Mays
gaaaaataggaactcgcgctcgtcgccttcctctaggcaaatgtcgacgtgttcgcatgggagccgtcgcagatgcctgggatccctagggaggtgattgagcaccatctgaagatcaaccctaacgtcaggccggtgagtcagaagcctcgtagacagtccgtcgagcggtaggacttcatccgaaaggaggtccggaagctgctagatgccggcttcatcgaagaggtccatcacccagtgtggctggcaaacccagtcattgtccccaaggtgaatgggaagcttcggatgtgca

SEQ ID NO: 68720 - DNA, 313 bp, Zea Mays
aattattgtggcccaaggcggataaataccatcaacaaggtagtatcccatgtcatattcgttactgttaacaataaactttacttgtgggccaactccaccgtctagatcatcaaacactggcgacaaatgcaagaccttaatgtcattcaacgacctaggtagcccaaagaacatgtgccatatccatagatcaaagatgggatctacttctaatattagggtagacatcttgtagtgacccctatacatctcgtgacacaccattggacatttctcccattcccaatgcatgcagtctatgctaccaatc

SEQ ID NO: 68721 - DNA, 796 bp, Zea Mays
gaagggtattaccttgtaacgagagctgaacatgtctaaattctcatgcctccttacacatttacctttagttctcggtcttgcgccctacccagtaagttcactactaaaataatcatcgacagttggtggttggtgcgccaggtaggggtcattgcattgatcatagtagatctgatggcaaccatgtgttctacgccaggatatgcatcaaatgtagctttcgtcaccgatccatgagatgatgttggacccacccttgatctttttatgtcatcaacgctccatagtgaacatagccatgacttagaagacttaatctatgttatggtgaatctatattagcctagacacgcaatactgactcaaacatgaacttcatttcgacgtcgactccaacttggtacaagggcgatctagaccacatatttaacttggactatgactccaactctaatccagactcgggcgatgatgacaattacgtggaagaattgggtgagccagatagagcgattaacaacccaacccaaatagtggatggctattacctgcaatcatcacttcaacttagcctttacatcaaaatcgatacgtgcgtcgatatgcttttagctccatgacaaccctctcttttggagcatgaacaatctagcccattaggcaaacctaaggccaatatatagtattaccctatgtcgagcctcaacattgattcagacatagaaaaggaagatatgaattaagagcaaagcacgttcatgattaacttgatgggaaaaataccatgataggg

SEQ ID NO: 68722 - DNA, 953 bp, Zea Mays
gccctagcttgtgagatatgtgggcgccaagtcttgtgtgtctgcactgttcaccagcaacaaaactgatgccaaaccatgtcaaatgaccatggtttgatttcaaattttgcaggtggatgccttgtgtaatttggccactttttgctatttagtccaagtggttttggcgccagcacaagggtgaacacatttgatctttgggctatggttggttttggggacttagaaaattttgaatggctctagtgtgctccccacttggtgaatggttttggggtttttgttggccctttttgcaatacctctcttaatacattttgtagatttactaatatacttcatctttggtaaaggttcccttttgtgatttggccatttgcccactctttcccctttaatctcatgcttagggttttaatcgcttaagaggggaattagggttttagaaccttgttcatgggtgaaaattatatgaaggctagggttcctttcttttgatgatcaatacttggcttaaccatgcttctaagcttttagtgcctttactttccaatctagcatatagggtgagtaggacacaagtgtgctcctttagccagggctttgggtaacacctggggtgttacactaagcactgaatttcaggtttcagattactgttccaagtctgaaatttaggaatctattagcctcactttggatgtattttgcactagatttcatacggttctagggcttggtcacttaatcaaatttgtactactatggtagctctacaactttgttgtgatgacccataacaaaatcctcacagatcaggagataacaaggcttgaacttggcctgttaacactatattcagagttagccatatgggtgcttttggtatcttttgaaatttactccaatttgctccacaaaacttggaaatccccaaacatgaaagttgc

SEQ ID NO: 68723 - DNA, 554 bp, Zea Mays
acaacctccactaacagcctggccctaggccgatcgaggtgacatgaagcacgacgtctctcgcccccaggaccatcatcaagaccatcgccgagaggatcggggaacgtgtggtgtctcgacccttaccacctggctccgagggattcaatggtcgccaaacttcaaggtttccatcatcgacaagtacgaacccaagctgcttgggcaacagaggatgttatgacagcatacttacccattgtcctagggcaagacattgtaacatcccaaaatttcaacccaaggtttggaaccctaatctcctaaccccccttatttttatctctccctaaactccaccccttaggtcatctcatcatgtgcatacactttgattgttagaagcacctcacatagattatttttagcacctaagattatttagctaattgttgttcaaaagaaaaggagataaaaagaaatagaaatagaaattagaaatgagaaatagaaaatagaaaaaggaaaaaaagaaaaactctcccccctcggctgggccgctttcggcccaa

SEQ ID NO: 68724 - DNA, 1363 bp, Zea Mays
cgcggatctgacaatgtcatgccatgtggtgaggcctctaggtctcatggacctcgcggacgaacggctaggaacccctccggtcggtctcgtcccgcgacgaatccacaggcctgggaggctactagtgatgacgaaggaggaaaggatgatgatgttaatctccctcctgctcatgctcccattatccaggggttagtgcttcacaaagcgcaggcccgtcgttccgccaatgaataggttattgatttcagtgccaacggagggtctgcccttcttcaagatatgcgcttccaaaatcctacatttcgtgttcgtcatgtcaggattgatggtaatcgcttctggactctcattcatgtcgatttctataattcagttatccttccaaagaagcaccagcctatcctccatcagcgttttattaactggagcgggtgcgaagctattggagatcctgaaatgacatagacattgagggcctatgagcaaaagaggatgaagactatcatgacattccaatatgattggaatgatgaaatcattgctcagttttattctactctgtggattaaacatgttgatgaggaaattccatacaactttccttatctcaaattttcattgaaggaagctggtataaagtgagctacaggaggtttgctcacattttgggatttactgatgaggatatctctggagacaaaatcaagatccatgactttcgccttcccaccagggctgaagccaaggatcttcacatctctgagtctgatgaatattggaaatcaacaaatctgcacaagtactacaggtacatcaactctctctgcaggatgactctcatcccaaaggtggaaatcagatgaatatcctgggagaaagtaaagtcctgctttccttcatgaaagccaaacagtactgaaagcttaaatgtttttgacatgatttggcaagagatcatccatgcatcctgctttcccctcaagggatgtctacatgcccccttcatcatgaaaatgattgaagtggtgacacaatttcgatatgaaaagggtacaagacatcgctcatatacccccttctagattgacccaaataatccagcagggcggttgaggaatgcccctgccagctctcgtgagcaagttgctactggtacctcgtgttcttctcctggtcgtgggtctcccacaccacgtggtcgaggtcgaggtcgaggtcgcggcatgggagcacgattggctcatgggatcacaaccttcttttcaatgtgcaggaatatctcttctgatgttcacgagctggctaggcgacagcgggagactgacgacaatctccatcgtcaggctacatctttggg

SEQ ID NO: 68725 - DNA, 408 bp, Zea Mays
tgcttcgggaaaacaactatcatcagagcaagttgccaaaaccaaacattatgcgaaagagctgaagtacccccagggatccttagtatacggaggagataacgatgatgatttcttctactgtctacctgacggtaaggagatcaatgtttgccatgaaatgatggataacatggggtatccgaagcttgaactcgacttgtctgtgatgtccaaggattagcttgcagatagccttgcctacaatagcatgaaggtgtgtaaactttggtttgtcattttgcaatttgtgttacgataaactatttttttggtaattcttatcgtcattacatgttaactcttcattttccaaggtttgattctaagcaaggctctaaaagcccagaaagatgtagaagatgagag

SEQ ID NO: 68726 - DNA, 363 bp, Zea Mays
aagggaaatagatgggttctatggttaatggcttgaggggtcagagtggcacatatttatataagcaggaaggtggacggttatttgatagatttaatgtgttaacctaaccatgtgataatccaactgtacttatccatcataatcctatcctatttgtttggaaggagggattaaatatcttgttgtgatatcctaaattaaattggtacatacaagttactaacaaaggtacaacacatgcgacataagaaatatatattttagaagttttaggatagttctagtttgggtcaaagatttacccgcacaatctcatgggaaggttttaatttactccttgtgtcaatattcatattgtca

SEQ ID NO: 68727 - DNA, 954 bp, Zea Mays
attgaatgcaatgcaatgatggcaacaaggaccaagctaagcaagcttatcattagcctgctcctcctctgtatctcgatctttttatctcgtttgcaatgatggcaaggaccaagttaagcatgcatcacgcagtggccagctcgatgatccggataattcagaattgcttgctgcgtggaaatttaatgcgactctgtgctagtacgcagccaagtcagatcgtcgaggccggcctgagacaagggggcagctgagctgggtactcatcacctagccccatatatgcatgcaatatactgctagctacctcaaatgcagttaaactgatgaagaggacaggacagatgatctgccacataactgtaagctatatatagctaccgcgtatatatagtacggcacaggagattttcactggatctcacatactagcctgcagagagagagagaaagcagaaaaaggttttatagttcaagtcacacctagcagtacgtagtggtaatcaatcccccaacctattagcttgatttcgttggtgagtctgtggccgtgatggattttaattggaagaagaaactgaaagtcaaggccacactcgatgctgttgctgtcgatgcatatatatgctaccttacctggatcagaattcagatgcatgcagatggattaatggagaaattcattgcaaccaccgagccatcgagaatactccctcctaccaccacttgtctcgctcgctttccctccctctgtctctgtcgtcctccctgaactgatcagcaagcagcagggccgttcctgaggggttgccgagggtgcggccgcaccggacccccaaaaatagagggccactagacgctagcattttttcctgttaaatctatctatcctagacacaaatacgcaaaaagcgattgcgctattgaccagtctcgtttagattattaaac

SEQ ID NO: 68728 - DNA, 1223 bp, Zea Mays
ctatacctacaggctcaaagataggggatggactaggcgaagtctcatcaaaggtcacctcacaagtctccatgatttggttagtctcaaggttaagaacacgataaacattagagtgtaatgcataaccaagaaaaacaccatcagaagaccatgagtcaaactagtccaaaattccctgttgccagaatgctgcctagaaagccctcctccaactatgccaaaactacagcaaggaagtcttcgagacacccctctgctactttgcacccagcaacaaaaataaccctgcatggaggaaaagactctaggccttgtcatggagagagcataatgaagatgaccctaccataatctacatggtcggatatctccacacccttgacaaccactttgatgaccttttctcccactgcacccacctaaactcccgggtggaaaacctagagcggcaaatcaaggaattgaaggaagaaaaggctgctcttcaagacagtctcgagatggcagaaggcgaggaagccaacacccatgaggcatactagaccctgaagatggactacgctagaaggttgaagaggctcgcccccgtcaagaagattcggaagtgtttcaaaagccaaggatgccagactgacccgaaggaagaagccccgccatcactaccttccctagggatagagaacctttctgacgtcgaggaggtgcccctagctagccttgatgatcttctcagggagtttggggacacagtagtaggaaacgctcatgcgtagtgtaatccctaggggttgttatgcttgtaatgaactggattgctgaataaaataacatgtttgcaaaaaaatgacatatgcatagtagtaatactttctcccctttggcagatggcctcggatagaaccacgcatactgcctcagggattggagcaaggattcccctaggtatcgaaggagaggacggaggggaagggagtgagacccacctccccgcacctccggagatgccactagttctagcccaagttttggccaactagactcgactcattgaggtcctcactagaagcctcaagaaccagcgcccgattggaggaagacctcaggacagaatgggagagttcctaaggcttaagcctcccacgttcgctggatctagcaacccgctcaatgctgatgattggctacgcacagtgaagaggaagttagaagccattggatgc

SEQ ID NO: 68729 - DNA, 666 bp, Zea Mays
cgaggaggaaaggtaaaatagcattaccaagcatttacaaaatatttacaactatttcttcatagttaattacaatttttttgtcaaataatacatctcttcccaaaaagtatttctatagatactagcaaacgaggcttccgaagtttcctctaatgcttcagctattgcttcggtctgctagcttttggtatcatcatcctgaagaatgacaaaggcaggtactgaggaatgtggtaagctaaagtataaaataaaagtgcaaaggtaaaaagattttttataccttactaagcagatttcgagcttcatctccagccagttcttagccgcccttcgcccagatctaggtaataaatctgttaccaatgcttcgtgcttcggctagaatgtcaataaggtcaggtggagataggccagagtttggtctgttaacgacccttgcatggttgcacccagcttttatgaaggcagcagtcgtaccacgagaagctactagcgcacagaagtcaccgtggccagctatgacttcatcgaggacgtcaacttctttctcgacgcattcaagtcctccggggatatcttcggcagagagactagcttctttggatgcagctccgactgaattgaatatactcttcaattgagtagtacattgggttgcaa

SEQ ID NO: 68730 - DNA, 849 bp, Zea Mays
gggcggtctagttcaatcaaaggagtcgtgaagcttgaggaggacctaaggacactagaacaatcgaccagagcgcttgaacgaacctggggcaagctggccacgacgagggcaaaccgtgcggtgttcttgagtggattgggggaaatgcgaaattgaagctctctggtggaggatttgaggtgcggacgggtgcgctagctgcttgaatacataacgaagtcgatggtgcactcgatttatagactccgggggcggtggctctcaatttgatcacgacgtgctggcagccggagatagggaagaacacggtggttgtaaccgtggcgttcacaggtgcaatggcgcaaggataatactcctaagggtgccacgattactaccgcatggtaacaagatagggcgtggcgcaatcgaggtcaccggcgcttccacggctacaccggtagtccggccacgttgccatggctaaaagcacggtgataatctccaatccgtgatcttatccattcccctccgtgagatctttaccttctcgtagaaatcttctacgcgcaaagcacgaatcccggcgaccagcacaaatctggtcgcgcggatcgccggcggtgagctgaccgagctagcagtctgatccagtcactgtaccatggaattcatcttcagtgcgccagacctagcgagtttgagcgagatttactctcaaatttcgtatgacaatataatcacttacctgtatcaaagctttggagctataccccaactgcaattcgactataggaactaaactcaatcgagcactagatcctttataatcttgatcccaaagtttggtcaataacactggcg

SEQ ID NO: 68731 - DNA, 480 bp, Zea Mays
ctcagaagtcagatggaggttcattgccaaaccagcttttgccagaatgaagatggtttccccaagttgctgagagcatgcacagttcgtctcggaatcaggagccaaccagagtatgatggtcgtgaattcgtcgagcatggcacaaagaagtgtgtcgtgactgtatacattggatccagtccgcaccatgtggaatggagtgtcactgctgctaggcacagattcagagacacctgccaagtcatcgctcacaaggcattgcgggccctatgtcagatttatgaagaggaagtggccgacacaccgctcagattctttccgccctttcagagagaccgtccagtttggatggccaggatgcgtgcattggaagggaagcagctgcatggggatgaccccatagtcgtgtacctcactgcctacctgctcaccctagatgcacagtatgatttcttggctcagcaccaccgtcagatg

SEQ ID NO: 68732 - DNA, 667 bp, Zea Mays
gttttaggccaataatacatgaactttaaaaatataagagcactaaatattggtgaagtccaactcatagcctacctaatatataaggatgatacaagtatcgatcattgtttgaaaagcactataggcttcttttcattatttttcaaacaccttccattaattgctcttggggcaccttgttgtttgatactcgtagtagagattacaagcggacgagaaagagaagatttcttaagtctctatgggtcgcgttgctaagggttctatgtatcaggtgctcgctgccggctaagttgttgagtatcgtttctctgtttgtgtggtcttgtcctcccttcggttctcggtctcccccttttgtagaataaggagcggtggttacaagaggattatcaaggaaggagatatcgtgtcatggtagaatgacgtgtttccacctttcgtagagacttgtctgttagtatttgtcctggtcgtttaagctccctggtcaagctctttaagtcatgtgtgggcggcaggagactcaggcgtcatcattactcctctacatcacgctgactcctgtcctttgtagcctgagccttggcgtccctcatcgtgttgcgggtcttgtagatcgtcaagggactcatgcctaggctgggtagaccgtgagtgagcc

SEQ ID NO: 68733 - DNA, 420 bp, Zea Mays
ctggggaatgcccaagaaaaaggatgggagcaaaaaacacgaacttgttcggctcccatactggttcaagtttgagaaagagttcaagaaaccatgccaagtgtggctggaaatgattgaaactatgcaatgaaatccttggcaactacaccaagaaggaggaccaactaatgactgctgccttcagcacctggccaaaatgaaggctaaatcatgtgatggacgcgctaaattttgaatatccagactatgaaagatttgataagggtgccaaagatttgaagaggaaaaggattgttagtattttaaagagacaggctgatagactggtaaaagaggatgagaagatttcgaagaaggcaaaaactgctcgtgagccgaaggcagcagtctccaaaaagaggaagcctgaagtagttg

SEQ ID NO: 68734 - DNA, 665 bp, Zea Mays
gtcgggttagagagatatgggggtgggaagttgtctctgtcctagctgtccaaaccgagacaaaacttgtgccaagtcgtgtcaaatgatttagggttgggttcaaacttctccagagtgttctagaggtattttggcgccactttgtcaatggggccaaatggttttaagtttgggatcaaggtgaacatgtttgatctttggaaaaggggtggttttggacttagaagaattctgatttttcttttgtgcttaacccctttggtgaaccttttgaagtttttctaaattctttttggggtcactttcttactatcatttgtggggtatcaagtgtactacatcttttataattgacccaagtcatgatcatgtggttttcatacccttttgttcatgcttacttctagtgctccacttgtccaacacgggtttgaattagggcttgggtaattctacccattatatgtgcataacaagccaaagtatgacttttaaggtgggttgcacttacttaggatcttgagctccaactttggtgtacttttcccaacttaagttacatgggatgatgggcttacttgtgaagtcttgagtgaaaaccctaagtaacacctggggtgttacagtgcggttcttcctcaagcgagaggactagggagaat

SEQ ID NO: 68735 - DNA, 398 bp, Zea Mays
gtggacattaccgtggcaagatcttgggagaccaatgggctatgtattgtgattaactgcgacatggtgagatggccgacggtgtgtcatgaccgcgaggaacggcggtatgacgacgagggtcatgcggccacgtcgccggtaaccggataagcgacagagcgttcactgtgcttcaagttcatccacggcgagacctttttacccggggattgttatctgcatttaacggagcgtgaatcgcggtgctggcgcgaatccaaacgcaagatcaccggcggcgaggtgctctgcaccagagatatttctggcactgtaccatcagggagccattcagagcatctgacagcacaatttgcagtaccctaatctcagatttttgtgtgagaatgtgttaa

SEQ ID NO: 68736 - DNA, 586 bp, Zea Mays
cggtcttggggtatcgcatgtgataccagcgtgtggtggaggtgattcacggcgtgatgtttccccggtagcgcgtcaattgctcaccgcagatgggcgtgtgggcagatccgcaccacgtcgtggctagacatcgtcgcgccatcatcgccggtgagtcctcgtccatcatgctcgcttcgttcttctctgcgggaaacgctagccgcatcgggtagggtgcatgggaccgccatgaacgtgagtcaccggtgcttccgccatgggggtgtggcggcgccacctgtgttgaccgggaaagaagaagggtccctcaccctcgatctatggatggacggatatcattgatcctgggcataccgtttctagaccgttgatccagagataaacgcttacgattagatcctgagtatccctcacttgagtcgatctggtccattgatatcaggatgagcggatgctgttagatcgcgcgttaataaaaccccgaccgtggatctcggatcctacggtggacagaacgtaccgattcgtgttataggcgatctaatctgggcccttggttcttgatcaagcggccccatgc

SEQ ID NO: 68737 - DNA, 1185 bp, Zea Mays
cggaatccaacctcacccgccggctgccgctcggctgccctccggcctccgggcatcgccatcggagtgtgcaggaaccaggaggaggccggtagagtccgtgcacccgggtcccactcccctgaggccgtccgtggctccgtgcaagatggggattgcgcaagggtgcgaggtcaccatccccgcgcctggtcatcagtgtgagttgagattctgcgtctcctcgctcgatttacttgcagccacatgcttgcgagttgcggtacccagcttagctttttcgagtccttgctaatcttggtggggacgacggagacctgatgctatgcttccttccctccctgtgctgttgagttccgcttccacagctcgtgtatggccgacacggtaatcgctgcgaaacgaggtcatgcgcgtcttccttgtgctttcggatgcaccgaggcttgccatccaaaattcgctgcaatgcttagctagatcgaaggcctacttacgctcagaggtgtcagcttggggatccccatcttttatctcttgtcgtggttaaaacagcggcctgatatgtcaggtgtttgttccgcaaaagggttggacttcccacgttttgggatgagagtttgttcggaatagcatgctcaaagtcatggaatttggtcgcagggagtgatcaagtaggtactaggacagtcctctccctttggtggtgctgttgattccttgcaagacctgtacctctgtgctcagataatccagcatgtgctgcattcagatgggagattgaatgaaagtgtgtaataccagtagcttcctcaaatactgcagattgaatgcacgacaggaacattccaactttgttgtcggtatccattcttcatgaagacgtcagtatagccggctccactgaattcttcaaatggaataccttgttaattatctgcaaaattttgtaaccaataatggagcacttggaggctcatagaagctacatttactagctggatttttaaattggtttctctttggagaagtaggtgcaatcttttttgtaagcatagtcaaatttttaccctttcagaaagttcttgtgccgaaagcttgtggaatgtggtactgaggaccacttaattcaaaactaaagtggctaggtgatcatatttcaaggcctaaatatttagaatgcct

SEQ ID NO: 68738 - DNA, 312 bp, Zea Mays
agcaacagcggacagagacccgcgagagcgattgaacatggcaaaggaatgagcagaggcaaggagggaagggttcggagccgtccatttatatactcggggataggaagtcgggaggttgcaggtgcagaagcagagagaagccattaatggcagctatgaatgggagcgcaagtggggagaggagaagaggcatcacgacgttactagacgggaaggcgaagagctatggcggcggcatgcactgcacagagaagacgagttgtggtgacgacctgcgagctccacaacgcgagtcgtgcaacagtcagt

SEQ ID NO: 68739 - DNA, 1252 bp, Zea Mays
atcatttactcccttgaattggcaaggtaatgtgtgttcattgaacttatgtggggatatggctttgtttgtgggtggccatgttgagtttggtgagctttggatagtgcggacttgttgtctattggttttggtgtggtttgaggctaattggtgtgacaacgatgtggtggtgttgaatatttggttgggtttgcatagttattgatttggatgattggtgggattattagttggtgtaggagggtttggcaatattaaagttattgcttaactttaaatgcttcctggaggtgtcgtctaatcttaggttgacagtgaaggctacgaccaacttgtcctatttgtattgtgctctttataggttagctttgacttgctaaagcacctactctaatgttgggtgaagaattggtcagtctccttcaagtgttggttggccaatcatatgtgttccccctcttcaacctctgctacttcttgtgtgtcagcagggttggtatacattctatcaacattgatctagggtctttcccttgcaggggtctttctatatgatggtattctagatttgtatgtagcctagcaaggtgtgtgataatgtttccaagaaagaagtcctggtagtatgagggattgtgtggtagctctctttatgatgtttgaaggctcccctatgggggagggctcaagcaactagtatcacgattactgagaaaaaaattatagggagttgagccaggaaagtgatccatcttcattggaattcgagtaccccattttctaggtatggttacatacttttgcttgtatatttttaccatttgctagttggggcatatccctagatattccatcattacaacacaagacatcaagggcatttaggaccttccctcgttagaaccacttgtagtcttaggcctttctcgagcttgtggtaagggcacattaaagaactacttcactaaaggtcacctacacttagtgaaggtgtcaacttggtacctttagttagcaccaccaaagtttcttcctagccttagtctttgtttaactaagcagacatttggatgcttagatggggtcacttttatattcaaatatttgctaaaggtcatttcttggtaccgcccttcatagcccaacttttgagacaactatactcttgagtgcaactaaacatacattaatgaaaacttaagcgtccttgttaggtttgttcaaagaatcattaggtccaagccttcgc

SEQ ID NO: 68740 - DNA, 498 bp, Zea Mays
gcagagttcaagcaagcgttcacggaacactacattccagatggtgctctacagatgaaattggaagagtttgttcgcataaagcaaggaggagactcggtgatgcaatacctcgccaaattcaaccatctctcccagtgtgctatagagcaagttgacatggacctaaaaagaagaattgcttcatgagaggtctgaatgatcgactgcaacagaagatggccacttgcctagatctcacttacagcaggggcatgagcacaacgcttttggtggaagccaagaattcagggtagggaaagacaaaaagatttgggcgtgaaggggtgaaggatcctcccaaggatccgacaagtggtcgaggttggtaattcgtccttttacccaaatcgctcttttcctcgtccacccgcctatcctttcagcaaccagttttcatccgtcccactcctgccctactcaaaaaatcagccaagtgcccctggtactcatttcctc

SEQ ID NO: 68741 - DNA, 331 bp, Zea Mays
gggtcaacaaatccatatcttcctcatttacaacacttctttgatggcatacacattggattctagatagctcaaaatgggagaaaatgagatgggatgtgtagggttagggttgtagttgaccccctttcaacaccattctcttcatttctgaagtgttcaaagcattggattcttggtcaagttgaaaggagggagtgtggttggttggagtggcattgtaggggtggttcaatgtctcatcgtgttccacttattacctcatcttccatgcttcgtgactcggctctaaacacaataaaatgcaaatgtggtagttgttggatgagac

SEQ ID NO: 68742 - DNA, 633 bp, Zea Mays
gggcgagtcggtcctccttccactcatgacctacgagtccctaggcctacggcccactcatgacctatcgagcctaggtatgagtgtactcaccgtctacaggacccgcaacacgacgaaccgcaccgagacctaggctatggagaccaggggacggtaatggcacaacgatgataatgatggtgtcggagctgttcaccgcccacacatccaattttaaataacatggccagagaagcctagacgaccgaagcgcatgcctacaagcatgactttgctgaggtagaacgtcctctttatcatggcgcggtagctcctaccttgagaagctaccggtaactgaccccacctcagcctataaaaggaggagggtcgggggggggcacgaggacacggagagacgaacgagatacatacagagacatagagacgaactcatggcgggagacggatagacgactacacgccggaggactacggaggccgagaccaaggagctcgccaccacgacgcctaaggcttagctaggttgagagcaccagatttgtagtccttaggcatacgagacttgggagcatcctccctctctcgcccgcttgtaacccctactacgagcgttgagcaacaaagatg

SEQ ID NO: 68743 - DNA, 625 bp, Zea Mays
gggagtgctgcaaatcggattctttgcagccaaattagtgaccttattgtttgtaggacctgaatgcaagcacagcggttctgattgaccttttctccaagctagctttatagtatatatctcaagccgtagaagcacgggtccttgattgacgtctgtaatccatatagacaaaatattatagaaccagtataattcggtacaaattaaaatcaagtgaatacaatagttgtgatcactccggccggtagtgaatgggcattgtcttaatccaattccacgagggaaaatacattatggcacataatgagtgtgtgtgtgtgtgtgtttttcatgtctatatatgatgatccactgatggaccggcagctttgaatactgcatcccccacttgttcctggaggcgcaactgtggaagccccaccaccgatgggccgccgggcaccatggtcgcttgtttgcgagctcgatcgggaggccgtgatcgatgtttcagatcagatcaatgggcccgaaaattagcttgccacagtacccaaacgggtaataatgacgcgagtagctgctccttatatatcatcaattcatcatcatcatcattattgttgtagttttttaataatat

SEQ ID NO: 68744 - DNA, 3189 bp, Zea Mays
tgccgctcggtctccctcccacatggtcacggaaattgcctcgctgctcattccctccggcgctcatcccctccggctgctcccccgccggctgctcccctccctgctcccccgccggtgagttctcctcccccgtcggctgctcccctccctgctcatcttggatatgctctgctcgacttggatatgctctgtagttcgcatctcctctgcagctctgtttccctcctcttctgtttctttccccgtctttcctctgcttgtgctttgttatatagatgctgactggaagtgcttgagttctttgtttttacagctgatagcacaatggtatgttatactcttcactcgaattccaatatgttggtgcagtggttagacggggggttcccaggtcaaaatctggttggtagtatatagtagttatatagtcatatatagtagttatatatatagtatatatagttatatacataatatatatatataatttatggctatattgccaaaacgcctagaaaagcgcctagaagcgcctaagaccgagtactcccgactaggcgctaggcaatgggtcaccgcctagattccgcctagcgcctagctgaaccttgacagacgccaatatggtactgacagaaattagaaaaccataacttcaaatacagtaaaggtcaaaaacagccaaatgaaatcacttttatggaaacgatttccagtaaacgggtttatcacatagactagtgaccagcacagaagtataaatttgaatagataacagataaggtttttcaaataaaagaactcagaaaagagccactaactaactttcaggcatattacaaatgtaaagaaagggaccataacacattgagaaaaagaatgtcagaaaaaatgctaaatgattactaagatggcaagctattgttgttattctaaaaaaatagcactaaccatgtccaaaattatgacacgcaataaaatgatgtcaaacaaaaaaaataccggttcgtttcctgatagttttcccacacgagattgttcattcgccagtaggtgaatgatatgctctctttggtttttcacattatccccctgcaaccatgaagaagggctatagcttatttccacaaaactgacaatgtttcaaaatattgtcagataacgcagcatagcaaacataactgcacaaggatatttatttacataattttgaaagagtataaatactgatgtatgagtgaaagccatgtaatgacattggtttcctaccatctgactccatcctatgatgaatgacgaaatatgctcctaagcatgggctcaaattcacaatgaattatgtgtcatttaaaaaaactcgacctgtagagggtaagacaacctcggacattgtatcaagaagacctcacacaggtcaagaaaaaccctgccccacccatacacaggacagacgaggggattctttttacccaagccttgaggagtgctactcataccactaaaccaaacctttcgcactacaagccgttacaacatgtcatttagaaccaagtatcaccgtatttacaggatggatttaaatttttttaatcgaactcatgatgcatacagaaactcgattcatattgttttaccactattagggctgcttcctctactcaatgttcaacttaagaatctggatcaatagcatgtctatgatcacacaaaaggactcagctagctaactggctgatgcctgccaacagttaaaaaatcagccatccattaattatacaattaaaagttcagagaccatactccgcatcatttttaacaccttactttcatattaaaccttagaagcatgacacagattatacagtcaacgttaggacccaaaatagagtcaataagcaaatggacaagatgcattttcttaatatagttttatgtatgccatgaccgataatacctgttttgcaatttgagttgagggagcccaagggggaggccgggggccctgcccacgtccaagcaagagggcagtgttttccttcttaatttttgcttgaatagattggtaaatctcctctccttatatagagaggattacttgaccactaaacaagtgatccttatcgagaaagaattacttctaatgggttaatttatactgcccacctaggccagataggcccatgacatacgcctctaacagcagcaagaactaaaaatgtagcagcaaatatgcagatttacttataaagaagtccgatcatatagttggtcacgaagatcaatctattcaaacattttatcacttagcttggcaactaacatttctcatctattattacaacatgtgcctgttccgctgtgatacaattacagtagttatatcaacctggaacaagcatatgaaatttataagaaagatgcacacaaaaatactaacctgaaaaccaaatacacattgcaaaagatccaggatatctgaattcctagcatcagggactgaaaaggtaccaggaagcctgggcagatcagtatagtactgcagagttgatattgctgccctcacctaattaaaacaatccatatgtataaccacctccagatccagcaaattgccaataaaaaaaactcttatgatgaactattacctctggaaaattcacaattgcattagtggtagaagtcaaggaatctagaggaataatattatatggaacaacatcctccgtccttgctgcatccttttgcatgacccttttcatctgagaaaaacagaataaataaattgataacaaatggtgaaaccctatactagtcatggtgggatttgtcacaagaagatcgtcgacataacatggaagatagacaattattgagcttcccaacaatctacaccctctgaactcagcacagtattctagagggaactattttagacagtgagtgtatcagatgctaccaaccgcaggttacagtgctgtgtgttaccaatcacggtagcatctaaacacatgcacaaaaaagttatgatcaaaagatgaaccaatagacaatgcaatcatctttgcgcatgcaaaatttgaaacagaacaaaaaaatcagcacatcaatagttgcagatcaaaaatgaacaattgccccccacaactatccatgtcattctcttgttggcaaactgctcgccacgag

SEQ ID NO: 68745 - DNA, 681 bp, Zea Mays
caattgtagccgcctaaatggtgaggggtagcgggtagcagacgtcgttacacatggcctcatgtcacctccaacaatccaccctaccgttccctcacctcatatatgatgtactttggaggggggagctgttcgaacggttctcccatagcacacaatagggcatgtttaaaagtggagttttttttaggccgtagtattttagtactatggtatacaatatgctacgatagaatacatagtttcagtaaaattagagtaaaatcaaattatttgttgatacatagcgctatttgatagcacggttttttgcagcacaatttttttattatcactatgtttgacgttcctcttgttgtaaataaaacatgtgcaaaaagggacgtggaagtagtgtgctgatggggacgggtggaagcggcgagcggtttgagatgggagtcgacgacgagggatggggacgggcggtgggcaatgaacgggccacgacggcaaattgacggatgatggggacggacaatgatcagttgaggaaggaaagtcttgctgtagaatgacgaagaaggagagtcatgggaacaatgaaagattgggcgaggggaagataaagccttagcaagatcatcgactccaagcagtcgcgcgtgcattggctctgccatgaaatatttttggtcgcga

SEQ ID NO: 68746 - DNA, 296 bp, Zea Mays
gtattggaagatatgttgagagcttgtgcccttcagcatggaggaagttgggataaaagtctaccatatgctgaattctcatataataatagttatcaggccagtctgaagatgtcaccattcgaagctttatatgggaggaagtgcaagactcctctaatttgggatcagactggagaaagacagttctttggaactgaacttattcaagaggcagaagaacaagtccgtgtaattcgggagaatttgagggtagctcaaaccaggcaaaagagctatgctaataatagaagaag

SEQ ID NO: 68747 - DNA, 377 bp, Zea Mays
gaagaatctgggccattggatgcgttttggacagatcgaattagaactagataccgattcaaccgcgtccaaccatgaccgtagattgacaatccgatgcatgcgaggtgatctcatctagatagaactgtggccgtcgatttcataggtaacgactcagattagaagccagcaaataacccttcgcttgaatagatcctaaccgtagatcctggatccgatggtctacgcagtgtatcatttatttcctatgcgcgatctaatccaagctgttcaattcggatccggtggtccagatctagccataccctttcgctgtgcaaaacttacaaaagagaccctctgtttttatataatcaacccgcagtactgcaaat

SEQ ID NO: 68748 - DNA, 722 bp, Zea Mays
tcaagctagacttttctgtcgtcgacgcagcctcaaaatggaccaagtggatgccatcgcagtgcgtctcaaggcatgtacactagcaaagtggctggcaatggcgtggctcatgcatcgccgccacctcaaggtccagcgccagtcgaggctcaatcatcaagacaacgtacgccatattttcatgtgcgcctgcagagttctctcaaagcgccactgtcaacgtgtcgccgtcgtgggcccatctactcaccaccatgatgtgggctcctcggcttcgacgactgcacatgaggtcgctccgcgcccgtgcatgtggagccggtagcgccagtaatcatcctctccaacgatgaagaaggagagatcgattggacggcactgatggacgacgacggtgagtagaaattacgatatatgttctaatcttagtatgatggatgacgtactatctaagaacttagtatgatggactgcgtattatgtaagaacttagtgtgattttatatctatattgtgttctaatcttctgttccaatctttgtgttcaatttttttgaatctttgttgcaatcttatatatatatagctcaatgagttctgtaaacaaggaccaagggttaatgcccgaccacatgaataagggtgtttctcaagaacattcaagtgatgaatgatatgaaacgcctaccgacccttgtcctagcatagatagggccgct

SEQ ID NO: 68749 - DNA, 431 bp, Zea Mays
gcaatgttctccactgcatgtaggttctttcgggtgggttgttggggctctggtgcgtgatttgcacgagcaccggcgaggttccgccgcgggagctcgcgccaccgttcccggtcggccggattgtgaggagaaccctcggtgctgtccgatcctctttggatggctaggattagaagatgtgtagccgttcgattaattagatcgagtccgttgatcgggtaacggatggacgagagcagatcaacgcatggaggattcacggccgcggatctgtgatccaatggaacacattgcataccggttcagtagagaatggagtctaatcatggtcatccactttagatcgtgcggccaggattaaaggataccccttcggccgctcgttttgtaaaagagtccccgtgaaacagagaaacaaacccgcagtc

SEQ ID NO: 68750 - DNA, 1355 bp, Zea Mays
ttttggatagtgcacgttctttgaattcccccctcaatgctcagcttgactctgaaaggatggcgcatgaggtaaactcccttggttgaccttgccatgctattgttcctttagtactaaatgttgcttcttgttcgtaggaggagaaacgagcactcgtgtcctcttgtgacaatctgaacaggctataccgtgatgctagtaactccttgaccatattggagaggaggcactacttcaccatgtcggacctggatcatcatcgtcacgagctgcaagtatcccaagatgaggttctgtgacttggacaactgttatcaaccaaggattccaccatcagggatctatgtgcttcaaagaagcttgttgcacaggagttagaagccgctcaactggctgtcaaagctttagaggacaactgcgtcgttttgaaggctcagcgtgacaaggctatggacaaagtcgttcgcgctggacggatcttgatgaggaggcccgacgtcgtggtgcctgacgatattgtcgtcgatgtcaaggctgcgcccgatgcttcgagtcgtccttcctcttccctcgctcctgtgaaagacattgctaacaaaggtgttttgatgcagtgatgtcctgcaaaacattcgatgtaatatgaattctatgtgtatgtgatggttatgttagaacttgaatattttgcgagcagggcgccagaacatgctcctagtgccaacaagtaaaatgttattttttcctggagtgctaattgttttgctgttagggtatagcaatcaccttgaacaattgtgaaagcaagtgtgccatgctggttttaaggcgttttccgacttaagccgatcgcctggttggtagggcatagtggtcgctctatgatatgtagtcgtgggcatatcacatcgtattaagtcattgcctacttaaggcgattgctccgttagcagggtatagtggtcaccccaagtcgagtaagcatgagcatgtcgcaccgtcttaagtcatcgccgacttaaggcgattgctccattagcagggtatagtggtcaccccaagtcgagtaagcgtgaacatgtcgcactgtcttaagtcatcgccgacttaagccgattgctccattagcagggtatagtggtcaccccaagtgaagtaagcgtgagcatgacgcaccgatttaagtcatcgccgacttaaggcgattgctccgtcagcagggtatagtggtcactctaagtcgagtaagcgtgagcatgtcgcaccatcttaagtcgtcgccgacttaagccgattgctccattagtagggcatagtggtcaccctaagtcaagtaagcgtgagcatgtcgc

SEQ ID NO: 68751 - DNA, 384 bp, Zea Mays
aagacgaaggcccccaacagtagcccctcgtagtatcagtttgtttccttgtaacaaactcaaactgcgaaggtcctaaaaacaccttctattcgctagaatatcgaaactttctgaactgtggggcaactttgcaatggtattttgtatatatatgagggctgtgacaaaatatttttcgtgctaccgactgatgctggtttgttctgagctattgcaattgcatttgttttctagcatcgactttttgcttaatcaaagttgagatggccaaagatagaaggagcgaagaccctgccttgactgggttttatgaggatatggaaaggaccaacactaagaaaataactagcgaaattcttgctggactgtctgaagactctg

SEQ ID NO: 68752 - DNA, 505 bp, Zea Mays
gtagatctcaatgaatgatctagagactcgacggatatggtctcaacatgattcacaaggaaaaagattactagatgcaggcagaaagagacgtagtcgcatgagatcgattaggatgagtagtagaaaggttatgaagattcgggacgggatctgtggaaagaaacatggccttgatagggtttgtgcaactagacaccaaacaacaatttttttctttcttagacacaacaagtgcacaaggagactaggtttggtttagctgtcaagctatagagatctacaagctgtgcaggtgtaacttcaagggtaaaacacacaagggttagaagataccaactgaagcatgattttttaaaagaggtttcacttgctaaactcaaggttggttggacggggggtcttttcatgaacaaaacaagcaacaatttaaatatttttttgctggttgggggcaaaaaggttgaacaactacaacatttcctagatagcaagacaagaggaa

SEQ ID NO: 68753 - DNA, 672 bp, Zea Mays
caaatctttataatgtattacatatgttgctctataacatttgtgtcttgactggactttgctttatttcacaggaaattttaatggggtctaatacaaatgaatgcaatactaaggatgatcaatgtaatatgccgatattaacattggaacataacactgacattcggctggttgatagtagttctacggatgtagaagctagaaaggtattaccattgctacaatatatgatagaattacgtgaatataaaaactgacttaatatctttgttttgtagaaactggaatttcatatggaaggtgtaaacttagcaagaccagataaggccaagcctaagggaagaacaatcaaaagtagtgagcaacaagtttttaaattgggtgcgaaaggagctaagaagatgagcaggaagtgctagaaatgtggcatagctgatggtcacaatagtcgtacgtgtttaactatcgaggataatagggtttgattggctaacctatctggacgtaagcgaggacggcctcctggttcaaggaacaaaatcatagctgcagccccacaatggaatgagacatcaacgtcgaaaaaacgaacggtggatgtcggagatgatgattcatctggtagagagtagaagaccataagataaaaatatatctggatgtaaatgt

SEQ ID NO: 68754 - DNA, 629 bp, Zea Mays
cgctggaggtaaccaacagactagctatttgttagttttcagctgtcagacagcaagaaagaaacgtagaccagccgccatacaagcagaaacccattgtcagcttcttcagttttctagaggaacctgttggttcagccataaaaagtggcaagcaacagagaaaccaacgaagaatttctggaaacaaagacatcagccaataaaaattaatcttggagatcgtgcgggagcgggaaagcgtgagggagtgggatggcgagagttcgtgcgagagcggcagccggcaaggccggagagagcgagggaaagccatagggcgaggcgatgacgagttgtggccactcggcaaagatgtctagcaaaaggggcacgatagtgaggaagatgaagtagcgaggaaggagaggatgttggaagaagttttgactaagattttcttatttttaccgagcacggtatgtttacacagactgttggagctgctcttaagcgggtgtggggtggctagggaactaataaatatatgggacataactaattattagttgcattttagttgggctgtttggatgcacatagctaatacgaggtcgcgggaattgcgtggaaatagtacaggcagctat

SEQ ID NO: 68755 - DNA, 694 bp, Zea Mays
tgggcagacagagaggactaatcaagtgctggaggatatgttaagagcttgtgctcttaagcatggtggaagttgggataagagcttgccatatgcggagttctcttataataatagctaccaggccagtttgaagatgtcatcgttcgagactctgtatggcaggaaatgcaggactcctctatattgggatcagactggagaaagacagttctttggacctgaacttatacaagaggcagaagaacaagtgcgaatcataagagagaatttgagaattgcgcaatcaaggcagaagagctatgctgatacccggagaagactactacagtttaaggagggtgatcacgtgtatctgaaggtgtcaccgatccggggtatgaggaggtttaaagttaaaggaaaattgtcccctcgcttcattggacctttcttgatcttaaagcgattgggagaagttgcatatcaactgaagttacctgatcatctatcagatgtacatgatgtatttcatgtgtctcagctaaagaagtgcctcagggtacctgaggagcagctaccaatagaggaccttagtgttcaagatgatctgacttatgcagagtatcccatcaagattttggacattttgactcgagttacaagaaataaggtgataaagatgtgcaaagtacaatggagtcaccacggtgaa

SEQ ID NO: 68756 - DNA, 333 bp, Zea Mays
gtttgataatactagatcttttgaatggccctaatctagttgagttgcttcaaagtatagttcaacttctgaacttgaaataattgttcatcgggaaaacttgacagatggagttgggaacatgcaaacgctagagtttctttcacttgtagttgtggactacactacctcaacaaacttattagaagagctagacagcttgaccaaattgagaactcttaggttgtattgacgcatcagtccccttcacagggataaaaaaacatatgagggtaattttgtttcttcacttggcaaactaggtagttcaaaccttcgatacttaacactcgt

SEQ ID NO: 68757 - DNA, 540 bp, Zea Mays
ttggtgaatctgtctatcttaaactgcagccgtatgtgcagtcttcagtggctacacgttccaacaacaaattaacattcagattttttggtccttatctggaacgtgtaggagcagttgcttataggttgcaattaccacatcacagtacagttcacccggtattccatgtctcacaacttaagcgagctctgggttgtgatcgtgatcaactgctggtacctcaactaccacaaggaaatgtatccctttaggtcccttctcaaattcttcagcatcgaaccattgaacgaggtggagaatccgttgaactagtaaagggtcaggaactgatgcgtcgttgtctacttgggaagatgctgcagccctgcgttccaggtttccagcagctccatcttgggggcaagcttctgctcaagtccgggggaatgtgaggatccagaaccagcagggaggaatgacgacgcaagaagatggcggggaacggcgaagcgcacggaagaaatatttgagtagcaaagtgtttgggccgcaatgggc

SEQ ID NO: 68758 - DNA, 830 bp, Zea Mays
ttttaccatcacatatagatgtcatattcttttatacctcatggctcatgccaatctgggccaacgcagggtttgctagatacattttccttttatatgttgtgctgactatcacacttgctacatgcagttatttgttgtttagtgaatggcctagttatgaaattgaactcacatggttctgttgttcggaaggtaatttttctgatgcaccttatttttgtagccagaggaaatgaatatgcatagtttagtaagaaagaaagagctattgatgcatagaatctacactagttgggccatatataacattgtttcagtgagagaaaaaatgcacatttttcattctgatgttgtacatttgacccaatttttcttgtgtgtttattctcaacatatttattagtgtctgtccaaatccataacttgctattaaaaatgcagtcaactgttggtggtcctatttttgctggtgcatatttgtcacccaccctccctcattaggtacttgcttgtgcttgactacattggtaactggatgtgctccatgtttggaggaaactaagcaaatcttccgcactatgccattgacaggtgcttataccttcccgtgatggcaatttgtactcttttgatactgtagtttgacttaattgtaccatttaacttagtgattaatcaatcatgcatgtttaatagtttgcttcgtgttgctagcctatgtttttgataaggtgcctccaaaatttagtttgtggtatatgtattactcctgctttttagatgctaacttggcccttcctggtaatagttttcaaaaacagtcacaa

SEQ ID NO: 68759 - DNA, 776 bp, Zea Mays
agaagatcgtttttgatagaggatcacagtttaccttaagattttggaagagctttcatgagaatatggatacaaagttgagtttcagttcggcctaccatccctaaactgatggccaaactgagagaactaaccaagtgctggaagatttgttgagagcttgtgcccttcagcatggaggcaattgggacaagagtctaccatatgctgagttctcatataataatagttaccaggccagtctgaagatgtcaccatttgaagctttatatggcaggaagtgcaggactcctctatattgggatcagactggagaaagatagttctttaggcctgaacttattcaagaggtagatgaacaagtccgtacattctgagagaacttgagggtagcacagaccaggcaaaagagctatgttgataatcgaagaagaccactggagtttgaggagggtgatcatgtgtaccttaaggtgtcaccacttcatggaatgagaagattcaaagtcaaattatcccctcgctttattggacccttcagaatctttaggcgagttggggagatggcctaccaactcgagttaccagctcatctgtctgatgtacacgatgtgttccacatgtctcaactcaagaagtgtctccgtgtccctgaggaacaactaccaatggaagaactcagtgttcagggtaatctgacttacacggagtatcctatcaagattcttgataccttgactcgagttacaagaaataaagtgataaagatgtgcaaa

SEQ ID NO: 68760 - DNA, 593 bp, Zea Mays
aattcgggcggttccgccacatatattacatggctccatttcgttaaaaacctcacccccgggaggaaaagagtgcgggcctgagtaacattgtttgaagaattacaaaggcgcttgggccttggatcttaaataaagaatttgcggaggttatctatgttccatgaatgctctaagtcttcgccagatggtgttgttagcctgtaagcgtttgggaatgcctttgtcttgactatgtatggcccttcccacttcggctctagcttgccccgggactctgttctggtggtccttatgagtactaagtccccttcgttgaattctcttgggacgacattgttgtcacgccatgccttagtctgggcttgatacttgtttagggcctgcaaggcgaggacacagtctccgtcaatgagatctttggaggttgattcgtcgacgtcagggacggctaattggtttgttcggggggatccgtgctttaactcttgcggtgtcattgcctcggatccgtacatcaggcagaaaggtgtgaacccggttgctcagcattctgtcgtgttcagcgcccatatgacttcgggtaattggtc

SEQ ID NO: 68761 - DNA, 344 bp, Zea Mays
gtttgtattttataaggtttgactacatatcgttctaaacaacatgtttttatgccggaagggagtattagggaacatagtaagtaaagaactaggggttcaggactgagaatacactcaatacatgaactagatggctgacctgatctgatctctaatgaacgagcaccttagagatattttgtatttgaaagttaaagcttcttttcgagattagatgccatagtaatgttttaatgttttcatagcatcgtttgatattttaaattggcagcctcatttcattatttgtgcccaataaaagacaattgaagaacataggcacactcttttaagagttcgtc

SEQ ID NO: 68762 - DNA, 567 bp, Zea Mays
ggcggggggacatggtaaggcagccgcggcacaagtgtgagcgggtgtggcggcgtcaggtggtggatttggtggctaatcctgctccggcctgcgcgctctgctctagcactcgcctcaactactctcagctccgctcactgcgctgccgcggcatccggcatacttgcgttgcgtccatctccatccgccaagggaaggggtcgaggtgactgattagctagctcgttagtgcggtggacaatggtcatggcgatgattaccgtcggtaaaatttaactaattgttgtctcccggcaggggcaggtgcagctgggcaggacaagattgcgctgtcaggcaagcactggcgacgcatgtgccaagaggatcatggttgcttcctgtggatgccaatctgccggcgaaaactaccgactaccagttgatgcagcctcatcggcgtcagattactgtctcgggcagctgtacctggcgttagttccgtgtgcacgccaactttaattcggttttggactgctgacagtggcggcttaggctagctccaccattcatactactgcaaat

SEQ ID NO: 68763 - DNA, 458 bp, Zea Mays
accggtggttctccaccgttgacccggttcctggtggtcgggggatgggttagcatgagcagggggaggcggtcacggtggtggggttaatttcaccggtggtggtttggaagaggccaaccacggcgaggtggcggggctctcacggcggtgagttcgccggtggggcctcaaagtgtgattggggtgggatgcggtgttatgttttcgtggcgatgtggtgaagttagtgagctagtttgatttgatactaggctactggatagaggaggggagagctcaccggagtgaagggaggcggcggcgctagcttgattgagcctaggggagggagagaagtgtggtcgaggctggtgtgtggggtgaaggagcttggggcggcccttttataggcgcccaggggtggggagcagctgaggctggctggcgtcggtgaggccacaacggcaacagtaatg

SEQ ID NO: 68764 - DNA, 776 bp, Zea Mays
attggaaagagaaggatccgataacatttgttcctgaatttgtgcctagaattcaataaacacttaacttagcagctttcattatgatacaatagcaaatagcaaaaacacatattattgtataagcttacatgcttgctggaggactcagaatcaataaaattgtcaccctttgtgtgagtcataaaaaataaggcatccaaagctagtggattattatccttgccgccctagtacaacataatgtaatcataatcgataagtagtatgaaaaactaattaggttgttcagattggttaacaaatccttacattgtcataaatcactttcctgaatggtttgctgccactgtgatgaaggattgtcaaattggatcggtttctagaatttctcttgctctttgcctagaatatcatgaggaattacatgaaatggatactaacaacataatcagaggtaaaaaataaattgttgcactatgcagtaataggataacttacaatgaattccttactgcaaaaatgctctttgaccaaccactcccaatcagcttgtgcaaaatcattcagacaattcttaatggcttgctgcatattctttgtcggcttgacatagtgtcgacttaagtcaccgcgccaattgttccacaaatccctagcatgctccatgatgtcatttttgtagacatcaatttcaatgttttcatccatgttttcaaacttgtcctgaataatcagcaagccgaagcgaacataaatgtactacctttttagga

SEQ ID NO: 68765 - DNA, 360 bp, Zea Mays
taaaaaatgaagatggggaggagtcgattgcgatagcgctgtcttacctgtgaataatcaatgccctggtagacggtggttcgggcggcggtcaggacatcccgacaagaaattccccactaccagctagaatttgtcaacgtcgttgatcttcacacgtcataccgacacgcgtgaacatcctagggcaatccataccccaggggaatggcgcagaggaggtggtcatcgtcaacgcacggttcagcggcggatgcagtgctccaacgagccattgcaacgacacctagccaccacaccgcatggggatgctatgagagtggtcgatataccccgaccatcatccccgagctcccggtg

SEQ ID NO: 68766 - DNA, 642 bp, Zea Mays
tttttgtggaacctttttggggtaactttcttagtatttcttgtaggtattttagtgagctaccacttttacaaatggcccaagtcatcataattttgtttacattaccttcttacttattttcttttggtgctctattttcttgaagtggttggatttagggtttaagcacttatcccctttttacgtgcatgatatgaataaggtaggtatctaagttcattaacacttacttagaacctcggttctcaagtttggtgtctcttgctcaaactaaatcacatgtgataataggtcaagggtgtgaatattgaatagaaaccctaagtaacacttgggatgttacacgacagtgcaatgactcaggggcagtaacttactgcctgccacgaccatagcgacatggtagaaccaactatcgcgtggcacggtagcagtgaacgacgactcctggcgataacaactcgacaggccgcggagcaagtgggtaccatggagccaacgtatggattcatccctcgcacgatcttttcacccctctggtaatatccactccaagctgtgcactaatcttcacgacgagctcgaatcaccgtgcaagatcaccgatggcgaggtgcactgcacccgatcttcatcaat

SEQ ID NO: 68767 - DNA, 520 bp, Zea Mays
catcaataatgggcacatgatatttggatttcatcgtcacagcattcaaatgtctgtaatcaacacaaaagcgccaagtcccatccttctttactagcaacactagggaggagaaatcactgacactgtgttgaatcaacccattgtgcaacatttcagcaacctcagcttctatctcattcttcattgcaggagcaaatcggtatggtctaatagacataggtctagcaccctctatgagtgggatagaatggtcacatgcacgactaggtggcaatgttatggaggttaaaatagatcatcgaaggactgaagtaactgacgaacaacatctcgcaaggacaaatcatccactgaaaacagttggactatgtttgtcaaggtggtatccacctgtcttatttccaaaatagttcccacatgaatctctggttgcactccttttagtaccactgtctaccccaagtaaggaattgatagccacttatgtttctgatccacaaacattggactaaattgc

SEQ ID NO: 68768 - DNA, 686 bp, Zea Mays
catgggtacatgggtatggatagtgcctacccatatatgtacatgtctaccccgatgggtagaggttgtcacccattagcatacctaggggtaaataaatcatcccatacccacctttatatcgggtaaacccaccgagtattcgattttttagtacacaatgccatctctacccacaaatagatccacaaaagagagaggtgaggtttcattatgggtattgtgatatggatgtgcgtttggttgtgttttgctttaggagtaagagagacgagtgacagggttctgagccaagcaggaggaacatgaattgtcgttctcatggtgttcatgagcctcctatttagagacgtcctgctagtcctagaggagctttgcttcatgctgctagatctcaagtagtgagaccacagggtgttcatgcccagcaggatgttggtcgtgtgccatatggccaaggaccccatggcagtggctttggttctcacttcccttgtggaatacagtttccttctcgtgttgaatgttatccccccatgggaccgaggatgtttagtgttttccctaacactttaggggcaaatgttgcagcactggtatccttcacagtttactaaccctagtgttgtgttatttgcttaccccgtaccttattattgatgcaggatatatgtgacaccccagtg

SEQ ID NO: 68769 - DNA, 343 bp, Zea Mays
gtgctggtgagatatgggaagggcaaggatcacctcgggacctactacttccagtcaaggccagacccgatagtgacctatattgcctcccttggcggtgcgaggtgggaaaactggcgaagcgactgggtgatcgccagcgctgaggccagcgactgccttgctcttccaagtgacgggcccaacctcgagcggaaacaatggagggtgaaaccatgcctcgcgctggagtttgggcccatcttggacaggattagggaactggtggttggaggcttgaccttgatgcacgtactcgaggatttcttgaagcgccgagtcatgccgctacaggggaggccgc

SEQ ID NO: 68770 - DNA, 621 bp, Zea Mays
caaaattccaggagtggtctaggtcttcgccggatggcgttgttagcctatatgcgctgggggacgccttcgacttgacaatgaatggaccttcccactttggctccagcttgccccgtgactctgtccgggtggatcagacgagtacgaggtctccttcgttaaattctcttgggacgactgcgtggtcgcgccaggccttcgtttgagcttggtatttgttgagggcctgcggggcgaagacgcggtcttcatcgatgaggtctttggacgttggttcatcgacatcggggacggctgatgcacttgttcgaggtgacccgtgctttatttcttgcggggtcatggcctctgatccatatagtagtcgaaaaggagtgaatccagttgcccggcattcagttgtgttgagtgcccagactacttcaggtagctggtcggcccatttacccttcctatcgtcgagaagcctcttcttgatggcagtgaaaatcttgccattggcgcactcgacgacgctgttagattgcgggtgatatactgaggcgaaggcaagcttggtgtcgatggagaagcagaagtccctaaaatcctggctgtcaaactgtttgccattgtcga

SEQ ID NO: 68771 - DNA, 828 bp, Zea Mays
gtaattcaattccaccttcgttatttacatttttgggcattacaaatcctacccccttaaaaagaatctcgtcctcgagatttagggggactaggcaaaagatggggaaattctattcgaagctcttcttctctctcccaagtagcctcatcttatccatgatggctccattgcaccttgcacatctttatcactttatttcttgtaactcgagtcaaagtatcaagaatcttgatagaatattccatataagtcagatcaccctgaacactgagttcttccattggtagttgttcctcagggacacggagacacttcttgagtttggacacgtggaatacatcatgcacatcagatagatgatcaggtagctcgagctggtaggccatctccccaactcacctaaaaatttggaagggtccaatatagtaaagggataatttgcctttaactttgaatctcttcattccacgaagtggtgacaccttgaggtacacatgatcaccttcctcaaactccagtggtcttcttcgattatcatcatagctcttttgcctggtctgagctaccctcatgttctcccgggttatacaaacttgttcttctgcctcttgaataagttcaggaccaaaggactgtctttctccagtccgatcccaatatagaggagtccagcactttctaccgtataaagctttaaatggtgacatcttcagactggcctggtaactattattatatgagaactcagcatatggtagactcttgtcccaactgcctctatgttgtagggcacaagctctcaacatatcctccagtacttgattg

SEQ ID NO: 68772 - DNA, 769 bp, Zea Mays
gcggcggcggtggcggcgacggctctccggcgttgatctaccctgcgtccgtgttcttataggtctgcttctttctccctaggctattgaatctcgcaatacgctgggtggtccttgcagcacagttggagctttccgttcgcactgttagctccgtccgatgaggtcgctctgttggcctccaacgagggagctttctattcccttgcagagcagcaggtgatgtcactccgtcctattcattgccgtgtgacctgattgcctctcctctcctggctgcctgggcgagatggctagatggcgaaatctttgtcctcttctcaccatgtttatctctgcctctgcgctctgtctgctttatcgtcgccgccgcgagaagcccttccatgtgcatgtcgtcaagcagcaaaaaacattaatgacgagcaagattgaggactgctactaaaattcatcaggtcaccgtatctaaaattttgaatatgatattgattagattaataggcatatctgaataccgccataacatccatccaaagttgcactagtagctccctgtgttatatattttaacatttggttttcttccttaaacgacctgaatcaatgccatctacctatcaatttataaaaacgtctgaaagcatagcccttccctttttattcctttcattaatcacaaatctgtatatggtgtagtagtattctttctttttaatagtaaatctaactttacagtgatttaaggtctcttctcacttgattttct

SEQ ID NO: 68773 - DNA, 471 bp, Zea Mays
aaaaattttgagacatagtgaacaataccccctggacggcgggttaatttctaaatagtccaggggctcttaagaaaagatgccagggcgaaagggtacgcgttgcttttggccgtcagatcggatccgagggccacgattagatcccgcgcatcgctcaacctctcacccccgtgaccacccgatcaacatctaacggtcacgatttaaaagaacccagatctaatctgatgcacacaatacatgatcaacgactcggatcttaaaactcgaaccagtatctgtgttctgatccgagacgttagtttgagatcggacggatcccgatcgatgaccgccctaactctctcgtatctctctcacggccaatgtcggcggccccccgccttgccctacggcggcgccatggccgacacccatcaggtaagtgattccctagtttaaacttcaaaataaaaagtgctatagaaa

SEQ ID NO: 68774 - DNA, 425 bp, Zea Mays
tttgagcgaaagggtgaagagatattgcaaaatactgaagatggtgataatatgaagggtgttgacaataatgttgctctatgtggcactctttcgacactctcagaacaaagtgatgaccccaaatgggcgccaccacaagtaacacatgagttttcttatccttcggacgaggaaatagttcccaaccccaaggcaagttattccaagaggggacttcttcctaatctaggaaaggtctgtaagtggttcagcgggtctaatgatcaagatgatgagagtgatatgaagtcttcaacagcaccatgcctccccgttacataaaaaaattcagcagctagtgggagatcacgaggtaggctatcaccacgtcattacataaatgtggagtcacgtctgccacaagataatccctcattggagat

SEQ ID NO: 68775 - DNA, 1242 bp, Zea Mays
cttgacatgacgcgaaatgacccactcaccatgtcatgcgcaggtggtaggatggtgtcataaatcaccatgtccgttactcatgcctttcccctatgtgctctttactgcttcgttcgaggcagcgcaaaccctgcaaaacgtacagtcttctttgcggctcccacggcgggggataccaatgcggcaggttcacatgcgttgtccgtgggggtccaccttctaggtaccgctttgctaccgtgttcctgtgtatagataggatacgaaggcgtttgaggtcggttatgcttaccatgctttctcgcccgagcatctatggcccttcccctcagagagcttctcccgtcctcgtggtgacctcccttccatgatattcttccctgcccccatgggcaccttttccttgtgctccgctacccaagagcgcctcaatgacctcgataggaagggattcctccctcatgagtcggtctcctgttggcgtctagaggagaagggtggtgctccggcgtcacgcgatggcaaggtcgtggtgatggcctccttctatgagtgcggctttgggcttcccttgcacatccttcgtgcgagggttgttcttttattatgggctagagttgcaaaacattaatccaaacatgatcctccacataacgtgcttcatgacgctatctgaggcctacctcggcatgagccccactggaagctatgggcgcttctgtccagcccgcaggcaactctggccaagccaaccaatcctttgtcggttcgttctacatctagctccggggttctcataaattcttttacctctcgatccctctttcatcctccatccatgattacgaaggtgagtggttctatccccggaaccccagagggagcgtgtctccattcaccaaccggatcccgatgagcaagcccaagtggacttatggcacgaagaagaaactcaagccgaagatcaagctagtgctggatatgattgctctacagtgtagacatggtctttccggcgatagattgatccgcacgttcatagagcgacttcttcaaccgcttgcgacccgctagaggaccatgtgacagtacactgggggcaacgactccgaccgtcattcagccgtgaatctatcgaagggggagctcagggtccacgtccttgctatcacagtaggagtcacatcggatttcctggacgagagtgggccactaccgttcaaccaagtgaggttgtgc

SEQ ID NO: 68776 - DNA, 522 bp, Zea Mays
atctcttaaccgtctcgtcctatatcattttaggttggtccctatctctttttacattatcaccctactctaaaactctctacacattggtgccttaggatgtctcctttggacatgtctaaaccatcttaaaccaatgttgaatcaatttctcctcaattggtaccactctaaccctatcctgaatatcatcgttttagactatcccttttttgtgcgcccacaaaaccaacgtaacatgcacatctctgctacactcagttcttggacatgtcgtcctttttgtcggccaacattcagtaacatataacattgccgcgtgaatcgttgccctataaaacttaccattaagcttttgcggcaccctcttgtcacagaggacgccagaaggatgatgtcatttcaaccaacaatttgaaattctatgcctaacatcttcattaatatcaccatccatttgcagcattgatcgactcatttctagccaccagttgcccatcgagggtaacatttccatcctca

SEQ ID NO: 68777 - DNA, 2141 bp, Zea Mays
acttgattagtttaaaatggaattgaagcagctgttacagttacctgtgtgattaatatctgggattcctgtggcccgagataccttgatacagtttccaagaattttgcacacgacactttcaatgaaattcttcattggcagactctcaatagtttcaatcaggtgtgtgtggcaggtaccatcgacaatactgttcgcattttaagagttataaacgttcatacaatgccagagagaaatatgcaaatataattacatcagataagcaaaatcacctgtagtcaattaatgattcaacataaagcctaatgaatttctcgatgttgtattcactggataatacagaaagtataccagaaaaatccctgaaaaaagtttaccataggaatttaacacttcaacaccaggagaaacagaaaggagcaaatatataatgtgtatgctgggaaaacaacggtaaacctgatgtctttcaaaaccatcagtggcttcttagggaaaacatggacagattgggactgtaaaattagcagacatttatcaatacttctacctcagcatcaccaatattgagttcaatgatttacatagcaagccagaatttcctaaggatatgaatgacaataagttaaatccaaacctgaacaagacttataagagccatcactgaaacacgaagccatggcaagtcaactgactcgaatgcatcatgttgtgcagtccttgcaacgaaaagaatcaaattttgaacaagtttaggcgctagagtcgcacgggttccaagtactccaacaatcataagagcgccagcctggtcataaagatacaacataactgtagttataacattgctaagaaagcaggatgtcaatagttcttcaatgggaagtaaacccatatagcacaataaaagattcataatgttcgaaatagtgtacacacagtatccagttgagggttgcaaagtaaaagggaaagaaaaaatataacaaatatgaccattgaaaaggggccaaaaaaactgcaaatcatttgaggtaaccttatattcctggtctcgcgtcactgcaggattaagagagtcaaacacaaatcccaacaccctctgcactacatctgtgtcaagcttagggacagcacccaaacactcaacaatcacagcagtgcaaaagcagacgactgtcttcgagtgactgaattcctttgttggtgtagcctgaaagtaaaatgaattatcaacaaaaaaatatcaaaaatcatgacagaatcctactgttaaaaggattattaatttcggcgttacatagttgcatagggtctccagcacagccttatcacggatgcactgttgcactagaacactcctgggtggcggtgcacctgaggacttgacaccgccaagaaatgcccagttactattcctgaaagcacatcaaccagcacaagttgatattgaagacaaatggagaaaataagtatctatccagaccagagccacactcaccctaagttgaccaactgcacgatccgaacaaacgcatgtgtatcatggtatggcagtgcgctcagcagcaactcatccgaattgtatacatgcaccctacatgaaggttcccaccagaaacaagagaataagctagagctcgtagggccatcggcaaaattagctgagctaaattcatacaggtatctgcggataaggtattcaagggtcttgagggcagagggaagatgcaaatagccagctagaaggcgaaggtaggtggagatagacttgttgagtttgtcgttctccttgggagtcaactgttcgcggttcacctcaaggctagtctccctgaacagagtgttgctgtattttgcaaatctctcgtctacgctggtaaggtgctccaaccctgaaaagcaatttgattcaggtaccgtagaggaagagaagctcttcgaatgaaatacctcatatgcaaaactaaattggttttgtttttaaaaacttcattcaatttgagctattagtgaagtttcataaaatcgcatgcataattgcacaagcataaacaactaggtgtactatgtagacggatgggatcaacctgcaaatagcagcaaaatccagagggaattccgagaaagctgat

SEQ ID NO: 68778 - DNA, 308 bp, Zea Mays
gtttggtacaaaagctgattgatagattacttctgttgaattgctaacctactaaaatgcaccatgtatgctaatcaaactgatttccttatggtaccttgataaaaagcgtgctaatttttagaaaacaaatgttaacatgttaactggtctgataggtcctaggatgattttaggtgaaaggaactaatcaaaacaccaagagaaataaatgcgtggatggtagctcttgttttaatcttgtaacagtgcttttgctagactcaactatttttgattaggtgtgttccttggcaaaaacaagcttg

SEQ ID NO: 68779 - DNA, 447 bp, Zea Mays
caaaaaaactattaaatcccgaactgttgcagaggctcttgtggagagatcttgggtgatggacatcaggtcgccgctttctcttattgatattcagcaatacctaattttgtgggattttttggaggaggtggcccgaatgatgatgacgataagcatgaacggaggcatgaggcctctggctgtttctcttctgcttcctgctacaagctcttatttataggctccatcacgtttgaaccatggaagagattatgaaaatcgtgggcccctccaaaatgcaagatgtttctttggttggccatgaaggacaaatgttggactgcggatagacagcacaagaatggtctgccgcaccctgaggctcgcactctatgtgatcaagatgatgagacaatacagcacctcttgacttcgtgtgtctttgctcgacagctttggttcagc

SEQ ID NO: 68780 - DNA, 294 bp, Zea Mays
cgatattgataagacaacactaatgaatgaagttctcaagtcattgatctgcaagtgtgtgctggttttcttcgacgacaacctgattttcagcaagtcctgggcagaacatctccagcatgtgaaacaagtattccagctgctacgtgagcacaagctagcactgaaacgctccaaatgctcctttgcagcacattctgtggcatatctcagccatattatttccaatcaaggggtgtccatggatccttccaaggtggatgcagttgaatcttggccgcgtccacaatcgct

SEQ ID NO: 68781 - DNA, 1349 bp, Zea Mays
ctatgcattatattatatggtttagtgcctaatcatagataggtaggctatgttcttatcaggtattaggtggcaggcggtgcttgggtgactgattttctttaagttataacagtttttgtcggttgcttttctatgtaggaatacacttgtgcgttgacttgtacacccaattaaaataataaatactctctccttcctggaatgataagcatatcttgtatgtgaaaatattataaaccttgaccgagaattattcaaattctgtacaagttaaggacagaacctgcatcaatagatttgtatgcaaggcgcctctgaggtgatactgttttttgctcacatgactattataagagaaattaagggtcaaaatgtattttgtgttaatttccccttatcaaaatacgcttatcgttttgggacggagggactatttaaagcccattccatgaagtcatgaacagtcatttcttcctagtctcctctgttactatatttccctaatgcaccttgcagctaagccataaatcattgccatttcttctcaaattgatagtctcctgtccatttgactctccccatcaaattgcacacatatccagatatccttaatcaccttgctgatagcttgattcagttaccgctgcaaccagattggcaaaggtgaaccttgaagcatgtactacgacacattgttgaatctggatgcaccatttctgctcgtttcattcacaacctgaccagttgctgatgctggctcagaggagatgagatgtgtagatgagagaagttgtctgtatacctccaaaggttagtggcgggcagtggccagccatgatggtcaacatgttggattctcccagccaactgaaatggcttagtaagcatgtgagccaattaagatggtgtgttatgagcaaaaccaagtggtactgtgtatgtgtgtgtgtgtgtgggggggggggctgtttgtactggaattttttttattctggaatacatactttcttggatattatgccgtctttggtagtttgaagacatagttcttaaggcggtaagacgagacaaggagttgggccatcgcctggatgcctaggcgacgcctaggcgcttactaaggcgagcaagatgacgccttaccaattaaagaaaagacagaacaacaacatatatgaggaagaaaaagaaaaagggagaaagaaaaaaagaaggaaggggtagaagagatggcccagcccaccaggcaggcagcccatatatcctccggttagggttgctcccatctcactgtcgccgctctgccacaaccatgcatcgctgctcctgctcccccaagctcggcg

SEQ ID NO: 68782 - DNA, 1033 bp, Zea Mays
cctcgggaatcccgaaagaagccaaagcaagactgcggggcgcccccccgctcacagctcgggggaagatggtccctcgcaagccaggactcaggagcccttagaagaaggaagaccaatcagtcggggcttcactaacccgaaggactctgttgtccacctcgcccactaaaggagtggacgcagatcactcggaagaaggaagtaaataaccctcatcggggaaggagaacacattgagccacctttctgatacctccaccctcaaaggaggatgggaagaacaccgccatacccactcctttctaccctgacgtcctcttcatacaggggtggattggagtcagtgcccatctccgacgatgagcctaccatgcaaggggaggaacctccccaacgtgatgctcgatgacgaagaaacaaatgccaaaatgtgcgacgacatcatgaagccggggaatgggatctggcacaacccgtgtcccgggacgaagcctcagaaatagaggaaactcccaatgaatgagtacaccgagaaaggcgcaactcccgccgctgcgatcgccgacaggcttaggagcgagagcgggagctagctgagcaggatgccagacttcggcgagagaaccctcttctcgctcgaaacctgtaccccgatttcgctcgagcgttgaacacgctgagtgaagttggaggagtgctggctcagatagtcgatggccttccgcgagccctagacgcggaaggctaccgacggttgcttacacagacgaccaatcatcttctacccctcgcacatctcgcgaacgacctacgccatgccatcaacagtcgacgatacgcacgaagcaccgtcagtgctccacgtgaccggtggcatgaaaatgagataaggcgtcgggaggagtacggccgagatcatggtgtaccggcacgaagtcatgcaacatgaattgagtcggcgacaacttcgaccaataatccgttccggggacgatcgagacgacctagtaccgactcccctccccgagac

SEQ ID NO: 68783 - DNA, 753 bp, Zea Mays
ggagccgaaaaaacaaaagactaaatagggtttttgacgctattggatttgtgtaccctgactatcggtacccgccgtgggggcagaaaagaaagggtgcaacttctgggaaggatgttgcttcaaccgcttcaagcgagcccgcgctgaagaggaaaaaggtgaaggttcttactcaccgatcgcactacattgaaccggccatagtgcctgaatttggtggtgagacctcttcggctattgaagccaaaggacctgctcttacgcagaggattgaagagccggctgcaatgccgaaggctgacaaaattgaagaaccgagaactgaagggacgaaaacatcagaagttctaaacccttcgacagaagtggaggcgccgaagacacaaaaagatctagcagcaacccccaagagaaaaaaggatggctagtgtattagatgtgatggagacgataaaaacttcaagctctactccaggaaaaattgccaacgcttcgaaaacacagattgaatccgagacaaagctgacagaagccgaagctatactgagccaggctgacgccgaagctgggccttcagtgcccgccaaggagaaatcctcggaaactggagaaaaggcagcagaagaagagggtatagaatagattttgcctgaaaaagctgccactcctgctcctgaagcatcttccgaagtccttgattatattattcgacacgcttcaggaaaaagattatctgaagaagaaattttt

SEQ ID NO: 68784 - DNA, 1009 bp, Zea Mays
ctatatttaacgcaagttttttattattactattttcccggccggtcccccctcccctcatcacctgtgcttccgcgaaacaacgctccgaattcaacagagcctagattaagtgacacaaccctaaactttcatatgactactatatagcatgtgttacacacgatcccgaggagatgaacgatgatggtggtggcgcaaatgaggagaaggggaagggaagggatgagggatgattcaaataaagtagtttatggggaagggagatgagttatccaactatctggaccgttgattttgatagtgtgttaagtttgagtacaatatgtttggtgaatttagtgggataatgagtatggggtgacttggttgtgtgacttttgcaaagtttaaactgatggattatatagtggtaagagcataactcttttcgattatataaatatatgtaactttctatcttcaacatatacaactttatatctaactttctatctttaacgtacataccattctattattaacgcaagttttttattattattattttcccggccggtcccccctcccctcatcacctgtgcttccgcgagacaacgctccgaaatcaacagtgcctaaattaagtgacacaaccctaaactttcatatgactactatatagcatgtgttacacacgatcccgaggagatgatcgatgatggcggtggcgaaagtgtggagagagggaagggaagggattattcaaataaagtagttcatggggaagggagatgagttatccaactatctggaccgttggttttgatagtgtgttaagtttgagtacaatatgtttggtgaatttagtgggataatgagtatggggtgatttggttgtgtgacttttgaaaagtttaaactgatggattatttagtggtaagagcataaatcttttctattatataaatatatgtaactttctatctttaacgtatacaactttatatctaactttctatctttaac

SEQ ID NO: 68785 - DNA, 286 bp, Zea Mays
gcgttttatgagcttctctcaatatatccatcttcacctctgatttctgaggcacacataggcgacccctgaaacgaaccaaatcattctcatcgatggagaactcccggggtttaccatcgccaaccctctttcgagcttcctgcaataaacgatcctgctgctgagccgcacgcactctctccatgagggaagattgaataagcatacgagtctcctcactagcggtgccgacatagcacaaggcgatccccaaacggtccagatcagcaatcaactgcaaggc

SEQ ID NO: 68786 - DNA, 532 bp, Zea Mays
agtcttcttgttttggtgcttgggggtggttggggtggtggatgtttggctgttgtgggtgtggaggcgggagtgggggaggtacgatttgtacctcctagtggtgttggtatgcgtggttaggtggatgcggagcggggccgtggttgtttggttgtgggagttgttgatatgtgtgcgtgacaactcttgggttgtcggctggttgcgcccgagacattctgtctctggtggcctacatttccaggcaatccattgttgggtgcatgcagtctttgtcgtggaacaagcagtaaaatctgcgcggctgctgtgcccgtcctcggccccgaccacgagttccattgtcgcggccctagggggggtaatcttggcggcgaggggcctcaccagcggggtgctggttggcaatgttgtgtacctgctgctgactgcggccgtcccgactgggtctgactgcgaaggtcttgtccacgttcggctggactgcggagggtctttaggtttcctctgggactcgaccttgcgctgg

SEQ ID NO: 68787 - DNA, 503 bp, Zea Mays
cctccactcaccgaaagatcgggcactccagctctatcaggaggtagatctcaaacttctttaaaacctcacctatcatctcataaagagggaaccgaagtcctgccctgaagaagctcttgaataccacaacttcatcttccttcggctctggaattgtttcctgtccagcaaagcgaaccagttcatcatcattttcttcaaaatatcctagtttcttcattagaaatagatcttcaaccttaattgtggacctcccaaattcaacatggctaggcttagttggacatagaatgttatcgtcatcttcactttcattgtcactctcaacttcagtcatgaccagttcagcttcggcattagaggtaccttcatcaatagctccttcctgcacaaccagccctaatcacctcgtcatttctgagatgggggctgtctcagttgtttcagtttcatctccctcatgggatacccttgcagttgatcttaccctggccattttg

SEQ ID NO: 68788 - DNA, 377 bp, Zea Mays
attggcacttgcttcaatcaacctagggacttgggatccttccctctcccaaccaacttgtactccctactgcaagcacttaggtgcaagtaatataagtctcaccccctctgctggaagtagggccctctcttgcccgaaccaagataaaatacttgtgtcacattgcatcacccatctggggtagggcacataatatcatttcactagtcggtaggatcctcgggtcaaaacaccaacacctgtgcctgctcataaaaagggaaggaaaatgcttgaggctgattcttcttacagcattctcgcgttcaagcactcgtacactcctttgcctagaagcctctgaaccttttttcccctgcatctgttgagcccgc

SEQ ID NO: 68789 - DNA, 524 bp, Zea Mays
ctccaggtgagtcatcctttgcttcttattgttcatgatggcaaataagttttctttgctaatttttgaaactgcagaatgtcttcgattctatatctgcccagctgaaatcttgtggcgctcctatcctcgaccaactttcgtccttgatgcagtggaaccctctactgcttcagagacaaatagatgatctgaaggcctcaaaccttggttagtgagtctacagtttcctttttgttgtttattgcttttcttatctcatatcttgtgctcgttttctgctgctttaccagctttaactcagtggtgctccgatgctgaggagaagtatacccagagccaggctgacctgaaccaagtctctgccttcttggatagtgcccacaccttgaattcttctttgaatgatcaacttgactcggagaagatggcttatgaggtacattttcttgactgcttctgcttcgctttctttgcttcgatgctaagtgttgttcttgcttgcaggaggagaggcgaacgct

SEQ ID NO: 68790 - DNA, 332 bp, Zea Mays
gtgggccacccgatcatctatggacggctaggattaggtttcttctacaaacaaaccggtacgcaccagtcctaatctcggccatgcgatggagatccaacgaccgagattttattaagcgtgatgtgatccagttcgcctaaatacgatccaacggctcccgccacttctattcttatccgtttattacgtgatcaacgatcacgggcccgtcttctacccttatacagacccgagtggtgcgtttcccagggacggcggcgcccatcttctttcttaccgcagctaggacggcggcgcgcgcacacccgacggcgagcccaagcgtgcgc

SEQ ID NO: 68791 - DNA, 984 bp, Zea Mays
taggactatgttacatccacttctaatgtgtgaataataaataaggtaaagtagattggtttgattgaaatatgttcggggttctcaatcagtcatacccctttatatttataagggaaggtctagacctgtttctagacgaaatccaacagatttttacggataggttaggataaccacgcgtagaataaatactcccgtccaaattaatgtcctggttatcccgtggagctggactgtccggccgtgccatggtgccaaaccaaatttggtgttgaacaatgtgtaaactaaatttttaaaggttacgtttggatccacgttagccgttgctaaatactccgtaggtagttaccgaccactaattgctaagctagctaattatcaacagacactgggcgggcatctagtagacacgtcatctgagctcccaagtaaggaatactacacaactactctgcacatgcttaaacaatggcaaagtaaataatcaattaaagaaaaccaacctaagccagctgacgcccacacacaagtacacaagacgagagcggcagcgttaatagacgaccagacacctcaaaactggagcagaaaggatcgggcgagcgaaaaccaacccgtgttgcagggaaagatgcctactgccaagcactccaaatcaaggtgcataagggagagaattagcacgaaaccaggaccgatttatgatgagagggagagcagctttgtgagacacagccgagaaacaggggacatactactaaagcacagatagaaaaaaaaggagagaagaagagggtgctgctaaactagtttcaagacatgccagctgcggagccagtgctagtttcaactgatccatgcaatacgaacaacatctacacttgtctctctatgcacagtttattagaaactgttcgatccatgcagaattgcggatgctgactaataaagacccgttctaaaaatactctaatcatt

SEQ ID NO: 68792 - DNA, 582 bp, Zea Mays
tattttcctagaacaatagcagtacacgatatattgttctgaacagtctgtatcattgctattgtctgtgttctacattcatcatcatcacatacgctatcatcgtctgaggcactatcatgtcaaaaatatttgtgaggctagacaataaatcattgtacacaacataatggtacacattatttaaatagttcacattattgaaactgaaatagtacacaagttcacatagcctcatggtttactatatagtccacccaaacaggttacaagcaactcatggtttactatatagtcccacaaatgtgtaaacatgtctactttggtgacatccactcatgcttcattttcagccattcaaatcgttggcgtgtctaaagtcataaacatctccctttcagtttttttggtgaacaaacatgtggcaatgaaatgctcctttgtgccatgccttcaccaatgccatgacctcactgatggaaatatcagagttggtttctctactagccatagccatagactcacaagatatagtggctctctcattcatagccataagctcacccatctgctgttgaaacc

SEQ ID NO: 68793 - DNA, 1108 bp, Zea Mays
tgcttttatgcaccatgacgcgcgcatgctgctggcctttagtgacaggaaaatgtgttaggcagctcattagaatatatatagtatgtagtaagcagacaaaggcgcaaagcagtcccggtgcagtggctggctctctgtcggatgttcagttcaggcatgtagaggagggtgtttaaatcgtgtgttgcgaaaaagtttgtatcaagcttggccgacgacttgcatccacgcaaaagttcgattttttttataattgttgtactacacaagatatcatacgaataaaggatcatggatcattacttctagacgtgcagtgcagtagaaaaagagtgtgtcgttgtagaggaagaagttgtacatcttcatgtactagcagcaacaacatgtttccccatattccttaagttcgttgttgattaacatcatagcagcaacaacaatgtctctatagtatccacatatagagtaataaaatgtctcggcgatggtgtactagcaccgcacgaacgatgagagatggcgataggtttaagcgcccacaatcctaaagagagagacgacgacctctgacacaccataggctttgtatatatagaccatttctaatatgcttttatcctggaggagcgttaacatacttatggatcatgaatgtcttttgggatatgctcaataatcttccacttgcactagagtcaatcatctctacagctatttaaaaccccttaagagtgcaacaagttaggttcatgtgtagaccaccatggacgaaaactattgtcgatcctttagttgatagtgtcacctagcaacacacattgaatcatgtgtatacgtaaagatcatatcagttgaaccttgatatacatatgtcttgatacttttgccacacgattgaactcaaggtgagatttgtactacccttacaatagctctacatttcacgcaattttatagtagactataagttatgactaattctttagtcacatcatggttaactctttaatcatattggtatggccatgcactttcataccacatcaatgaacttagaaatatctctcattatataggaggaacaaattctatcttgatccgc

SEQ ID NO: 68794 - DNA, 469 bp, Zea Mays
tgggaaatgccgaaggagaccatctctggctccggtcagggtaatttagtctgattgaagtataccttcaggtttggggataagtttgatgagccaaatgatgactggctaaagtgcattgaagctactagcgacgagctacatggggcatactccaagaccgaggacaatgccttgtccacagctttcgagggtcggaataagaaaagattgaatagggtatttgatgctattggcttcgtataccctgactattgctaccctctgcgagggcaagggataaagagaaagattgctacttcgggaaaggttgctgctttggccatcacagctgagccgaagggcaagaagatgaaggttctgactcaccggccacgttatattgaaccagccgtgatacctgaatttggtgaaggtatttcttcagctgccaaagcaaaagaaaatgttccaattatgcagagcactg

SEQ ID NO: 68795 - DNA, 500 bp, Zea Mays
cttatttagttcggcgatcacaattctattcaagaactgatttttattgtaccatatagggttcttgtactggctacaatatcaacctatgtggtgcaagagaaagcagttcttccatggaggcgaaagttttgtagttgggactctacctcaaattcaaatctaaacggagatggaattgtgtaaaggtggataaatataagtgaaagaaggtagggcgaatgtgggtgaaggaagagaaggaccccatctatttatagggtgtgagtccagttttttaattttttgtttttttttcaaattcaaatgcttgaaattgaatggaccaataagatacagacacatatgcagacgatgacagatatgtgcccggtccgattcgtccgtagccccaacgcgttggtccgtaccgaccacgtgggcttgaatgcagacggtaccgtccgaaccgatcggtcggtagcccaatcaatcggctacaaatgggtcctcacaaaccc

SEQ ID NO: 68796 - DNA, 779 bp, Zea Mays
ccgctaccctctcgcgcagactccttttccccagaacaaaaatcgccgccaccagagaggtttagcgagggtccacctccagcgagtttcgtgcgtatgctactgttgggtgtacgccatggacctgggtgttcgccttagcactgggagcgtgttcacgaagaaacctggagtggagatcgaccgatgatcgggtaatcgctcgccggacttgcgacaccaccgttgtgccacctccttccgtggtctgacaccttcatgcgcgtaatcgaggtgatgatttctcctttgtgttcgcctggcttcccgggtcgtgtagcactcttcgcgtcaggatgtgtgtagagataggggattaggagttgcgggcggggcaggtccaccatcggtgctcatgcgactgtggctgagtgtcgcgaggaggaagacagggtcgcgaccgtagatctgggtttgggcggtggagatctagcgctgagtcgatgggaaatgtggtccgttgattttctggcgaacgactaggattagaattggtatatcgattcggtgaaatcaatctggggtctagatcttggatcggacggcaggtgttgatcggaacccgcatgagatccaaaccgcagatcagaaatccgatggctatttccgcgagctggtttaggatatcgacaatctaatatgggccctaggattttgatcggatgattccgatcctccggtaccccttcggccatccgatttgcaaaagaactctcggattactaggaaatcaacccgca

SEQ ID NO: 68797 - DNA, 495 bp, Zea Mays
catctcacgcacgattcagaaaacaacactgaaaaaatgggtattcacaaaatagcactggttttgccaagggaatttataaaatgacactatgtttaacactagttccttcttcacacacaattataccaaatttctgatgatgtttctacggcatcattttttcccaactgatgatgcagccctttctttctcagatagaacaaagaggcgtttgattgggtagtggcaatagatggtcctgtaacattacatactcttggtcttcctttaacaaaaaaatccttcttcggagaatacttcctaaaaaaatattatcagcgggtagtgtatttggcctggcaaacgaatgattttttttgaagagatgataaaggatgaggcatgcgtttttctgactgctctcgctgcctgcagtgctatttcgtgaatactcggattcgcagtgttgtttactgaatcacctcacagaccagtgctattttatgaattctc

SEQ ID NO: 68798 - DNA, 519 bp, Zea Mays
gctggagcaacaagtggactttcacatgcactagccaaatatgtttggaacaaatggttcacaacttccatgaagtgactaacttcagcagcatccctctctttataaatcttcaacataaaatattccaccaacttcttatacctaggatcaaggaaggaagccacatcaagagctatgtttgattttttttcaatacttgtcaattgtcatatttctcttgcatggccatagtcatagaagcaatagttatattagcactttcactccattctctaagtgctaacttaatctcacataacttccaccaaaataagtttgttgttggatactgacaaccagaaaacaacacaacaacctcattgaatgttttcaaacatttgcagaatgattctgacatatcccattcatcaccggtaggagcacaataaccatatttatcattgtgcaagcatactagcctatcaaaagtacacctatagtataaagtgtggctcaacatatcatatgtcgaattcc

SEQ ID NO: 68799 - DNA, 555 bp, Zea Mays
catctaggtactaacatcatggcatagccagcgggggtgatcgagaagcgcaggcggccaaggggcacggcaagcgtgggcggccaaggagaggcatggccaacacagccgattgaaaagggacatggctagcacgagcgtgaccagtggaggtggtcgaggagaggtatggccaggacacgaccaagcagaaacgagcatggacacagtcaagaagaggcatagggagggatgtctagggtgcaggcaaccgaggagcgttgaaccaacagaagaggcacacctagggttggtggtggagcacggactcacggtgcaggcagggcgacgacgttgtggagaagaaagccaagcatggtggggaagaagagttaaaagaaagaagcaaactagcgataggtataagcattttttctaacctcattaaactttagctggtgaagcaccacttgtccacttgagtagctccaccaaaacagtaaatctagcctccaaatatatccatttggcctttagcttcaccattttgtgaatctgaatttcgttgatcttgag

SEQ ID NO: 68800 - DNA, 475 bp, Zea Mays
ccgcaagttcctgtctacccagtggtagtcgaggaaatccctatggatctccctcgcattcgggtggagaacggagtcattctggaggacaactcggaggagtttctgcctacacccaccccgttggcagaatcactagccttcgcagctggatcgttagcttcagcaccgccagcaccagcagtccaagcccctgctccccgaggcgacgacccagacgactctggtgacgatgatgaagacgacgaggaagaagaagaagatgaggaaaacctcaacgattaagccaacgaagaacagtaggaccactacatggggttatggcctgtcactaacattacacctcaatgttcgagacaggacacttccctaaccttctgcaggatgttctgcacgcgttgggaacctacatccgatccctgaacgagaccaggcaagtgtacgagcctcctcgggcttgctactacatcactca

SEQ ID NO: 68801 - DNA, 384 bp, Zea Mays
attcactctaaactttagagttctgaagttttgtttggttgagttgtggcttctcaaaaagttgttgtgagtttgattgaatcattttatctaaactttaaatctctaaggccttatttggctaagttgtgtgtcgtaggaagctatgacatggtttaggctgttaaaaatttgaaagtcgttttgctaagcagttgcaggttctgaaaaaactattaaacgaacattacatgtcatctaccttcctcatcactcaaatctttccctctcccacttacaagcggaccacactcgttaactctttcttctaccttccttatacaatgtaggttgtcgactcatcgtgagggttggtcgtgccacgacggagcttgccacactgtc

SEQ ID NO: 68802 - DNA, 719 bp, Zea Mays
aaatgattgataatagcaacctgggatcacgtcgagatcttttgtttgctttctgtcccgttgaattggcctcttacgttcgtggggctgggataaattaaaccacacggaggaagttccatgggcgcaacaactcaatgataagaaaataaaccggccaatcatttggtcatgcatgcaatgcaaagcgccggtaactaacatacacatataattgtgccgcccatatggcccccctctcgagagggacttagggatatgtatacccggccctcttgtgtttgtttgggctggatttgttaggccagaaccaataatatagccagtaaaagaattcgtctcgcaaattaaagcagcgaccgacgacgcatgcatgagccgggaacaagatctcgcaatatattattggggcattatccggtgaaccgatccataagtcaaatggggccggggtgttcatcgcaatgagcagggctctctctagctgctagtcgcccttttaattagaaaggctatgcgtttgactcgagctagcctagcttagctatgacgaggtggatggacatcattaggcgtagctaagctagagggacaggacaggcttctcgttcgtccagtggttaattggcatcagcctgctgggtttattgtatagaaaatcagaagggcgtgagatatatatataggataagtaatctggatatgcgtttagtgtcgcg

SEQ ID NO: 68803 - DNA, 1022 bp, Zea Mays
atcggttgttcgtgttgtgagcaggagagctgttcggtttagaccttttgtttaggagggattgttcaagatattaatgctgccttcactgatcttggtcaagaaatctgaagattagaggagttcctactaaattacagcaaaagcagtcaacttgttgcctgtcgaactgttctgttccccagtgacaaaactcatctgtttctgccctgctcatttttttatggaattgccaagtaggtgggcctaagatgtgacctgatgaataaatataaacagctggactgaaccaaccgaggaacgattgcgtggacgctggatcgtagatcagatcaattgcagtgaacacttctctaatcacgtttaatttacttctgaattgaccaatcaaatcacatgagtgtactgctgagggtatattcgcttttagtgtccatattgttttttagagaaaagggttcccctgcttttagtgttcatatagttaggttgtcattgtcactaattttggaccatgtgtataattttaacagttgtgtaaccattatgaattatatacagtaactggttgctaccttttctgaatttgaagtcgttattcatcaagaaattgtgcggttgagtttttcttttttgaattcagaagtaggctgtttctatgtttctgttgtagcagaaactctccctctttccttccttatcctgcttggctgtcaaaatagtctagccatacttcctcaacctacctttgtgtcagttggcaaatgggaatgatgcaacgcagtcattttgctgtagttgcatcttttgttcttattttaccagcatcttagatctgtaaatctatccacttttccattgcacgtgctcatgttttcggtatatagcagcatgggcttctcaaattacaattggccgacaaatcctgttgctatctgcataccaacttatgtggagatcttttatacacataccaaatattctgaaactcatttatttctgcagctaatatgtaatgtttt

SEQ ID NO: 68804 - DNA, 418 bp, Zea Mays
cctaacttatctatatccctaaattcctcaattgtatacacactagatgaagatgttatcctttgtggggtcgtggaccatccgaccataatggccgggccatctagaagagaggctacaagttctagattcccctgcgggacttcgaaccatttagccataggggccagaccgtttggaagggcagctgtgatttgcagagctctttgtcgtacctcagaccatctgaccataggggtcggatcgttcggaagggttgctgctgtttgtagaggtctctatgggacctcgaaccgttcggctttggggcacagaccgtccgtgctaccagtagtaatatgtttttgttctattgttgaatgcattgtatttcatttttgatttagccaattttacattggctctagtactacagggg

SEQ ID NO: 68805 - DNA, 747 bp, Zea Mays
agaccgtcctcaacctggtaaatattttctttgaatgtatgcatcatttaacctttacttaggacttagctgattctccatcgactctagcattacaggaatgaagcatttcttgtctatgcttatgaactgatagttagaaaaatcaacccctatgagacttgtgggcggtctcagaggtccggagtacaggggcatcacttatagcaatgcaagccgatgcatcagcatgtatcttttctacatcgtcgcctacccattgtaataacatttggtgcaaagtagaaggtatacattgttttgcatggatccattctctgcctaatatcaaactataattcccttctagctcagcgacgaataaagcaacagcgagggtctttgtcccaatggtcaattcaacggatgtgacacccttggccttgatcgggcagtcgctcccaacaccactgagcatcatattagtcctaattagatcatcatactacttacctaattttctgtataatgaataatgcattaaatttatggccgcccaccatctaccaacattctagcaatcgacactccatcaatgtggcccgtggccgcgcacgaagagcgattttaaatggttgaccgaatattttggcttggtgaagacagactcattaggaccaaaatcgaattgagcaactacaggttcatcaccaacgatgataccataattgactggaaatgtaattacattaacatccatacctgctt

SEQ ID NO: 68806 - DNA, 302 bp, Zea Mays
attttcagtggggttatttgtctttggttgttttggtgaagacgagggtccagacctgtgtgacatgtgtggctgtggaggcgttcgagtcttggcaaatctaacttgacagatctttttaggggtagtcatcatcgtcgtttgggtttccaacgagatcaacatcttttttacccgatctatagctcgctttgtgttgctctgaacataggtttgtttcatttgtcgtatggcatcaccagggcgtgcagaggtcattcgggttgttgatatcattgactgaccgagggatctccacagcg

SEQ ID NO: 68807 - DNA, 739 bp, Zea Mays
agactatccgcgcgaaagtcgtctacgagtgcagccggaatagcacaagtgcgcaaaatcgaggtctcctccaaaagactccgcgcaaaatacgcctacaggtgcagccggtctaactcaacaaacgcgcaaaatcgaagatttcctcaaaagcgcccggacacaagccgcctacgggcgcggccagatcaacaaaggcacacaacctcatcacacaaatcatagttacacacacatcgaggcatcacacattacaatggctcaaccttcgggatgatacccatctccctgtagttgtacaacattatcctcaattcctcaccctcaaaaagatttcgcagctcaccctcacctacacttgcctcagccgacgaagacaacaattcccgtctggcagtcccgtccactcgaagacgaccaccctccacctcaccatgacgcctatcacttcgtgacaactcactcactctccgcttcgccaccgcccttcgacgcctacacccagcactcgcacaaggaatatcctcaccggtcacacgcagagaagtttccgctacagccgcatccaatgctgcaaaatagtctaaatcctcatccgaagacccctctgtccacacaatcgaactcccagaatcatcagattcaaaaaacttagacacagaatcgtcagaattgtcttcagcaaccacggtcgaagccacaaagttagcattgtcagtagcggttgcgtgcgcaggcc

SEQ ID NO: 68808 - DNA, 1264 bp, Zea Mays
ttgccctaggtcaatacatcaagtttgtagagctataaaaggggaacaactttgctatagagattaagtcctcgaactatgaaaagttttgagaaaattagacccaaagatgggctaccagactgccatatatctgaattcaggctgacagtgtgcttgagccatatttgagctgcgattcgagcctaatccagtaagaatttaggagtgattgctatagtaagattgaagctggatagtagagcaacaactttcttaaagatggattaggaagtcactacatgaaaaatcaagattcaagccctacaagaaggtttgtcagactaactgatagagctttgcgatggtacagtaaccaaaagatcagtagattcagtgagctggccgccggtgaccctctgccgtgattaacgccgatcgtcgcaattcgtgcgtttggtctgtggattgagttcgccggtgaaaagatctcgtcacggatgggttcaagttactgtggccacgctgtctctcagttcctcgcgctggcgacgtggccttacggacatcaccggaatccacgatattcaccgcggttgcgccacacctccagcctttaaccgcaccgccgtgactcacgttagccatccgatcatcgccggtgagtctgccacggtattctccacgaatcaactgcgccagtacccttctccctctccggccgccagcgcgtcttcgcgaaattgaacaccaccaccttgcactcctataaattgatggcctggcctattgcaccatactatcacgaagccagagcacccattaccgccttcaattagccaccatagccggtgaatttccttcttcccccaattctgtttccgccgccgtggtagaaccctcaccgtggtcagtgaaccccaggtctgttcatgctccctgctgtcttgtttcaacatccgtggatcctcctgatgctcctcgacccggccaattggactaggaccccatagatcaacgggaacgcgcttgattgcctgtagtacccgctgtcatcgtggacagtgcgtgttagagcgccattagtaaaattggttgaggggaaacccttgttaggtcttgaattcggtctctgccaaagtagggcatcagtcatcaagtaaatcggccggtgtaagctcgtcgaagcgtggcccagcgccgttcgccgtcggggactgcaagctatgaagagatagaagtacgagggccttttcgcaaatgtcagtgaccctgttaaatagtg

SEQ ID NO: 68809 - DNA, 399 bp, Zea Mays
gtctgtacttggcatttatctagtaactagtaagtctgcaactattcatcatatgaattagtgagttagtgactactgagtagtaactgatgttcaattgttcatgttctgaaatctgcaatctgaattctgtcttccagtattaatatttgctatgtttggtaattggtattgcttcctatatgctatattgctatatataattgagttagtgattgatgttcatgttctgaaatctgaattgtccagttccagtattcatatttgttatgtacttatgtttggtgttgccttctatatgctacattgctatatatatcaatattatatacataggtcctgcaaatatgcaggagcgctgtagggacgaccaggtcgactaggacccgattagtcgac

SEQ ID NO: 68810 - DNA, 458 bp, Zea Mays
ccccagtcgagcctgcttccactactacgactgacggacccgaccccactccttccaccacttggggtccgctcgagccagctcctgctgatactggaggagttgaagctgctgttgagggggaggccacttcctcaagggaagctccacaacatattcagcgccgtcacccacctcagcagatgatcagggagcttcacgagtgagtcactcgctctaggtcacaacacatttctcattttgctcactcaggttttgttgctacttttgagccccgagatgttggacatgctttatctgatcctaactgggttaatgctatgcatgaggagcttgaaaattttgaaagaaatcaggtttgggttttggtgccacctccttctaactatcatcccatcggtacaaaatgggttttcaaaaacaaacatagtgaggatggtttggtagtgagaaacaag

SEQ ID NO: 68811 - DNA, 481 bp, Zea Mays
gaacaagtacatgctgatgtatcagcctgcatcgctgtggctgatacccctgtactctggacttatgagactgctacatgtctcacaggagtagatttttgtgattatcaattcataagtatagataagaaaggtttcattcctgtaatgttagagccgatggagaatcggctaaatcctaaataaagtttaaatgatgaatacacacaaagttcatgagtctctggtcacggacagttcggcttccaaggccggatggtctgatctttcacaaaagggttcggactttaagaccgaacatatatcacagcaaaaggacaacattacggatgatccggtccccgagaccggagagtccgccgtcacacaaagatcttctaattcctctgtgggaaacatgatagaggaattcagagatcttgataaactaggacaggggtttacatcgaccgatcctttggaggagattgacataggagat

SEQ ID NO: 68812 - DNA, 1079 bp, Zea Mays
gttatccagaccgtccgagagtaatattgtaccagtggccgacctaggtatcgctcaaggtcggtgtatagtagcgcaccctcgggacccttacttctattgtattcaatccattgaatcatgcatctaagtcttgctgaacctggttttgggaccaacccttgaatcagtacgaggtttagacttctaggtacctggtccagaaagtactaagtcaactattctagggtggtggaagatgtaggcttacagtacgggaccaggctaagcgactacctagctccggatcaccgtgagaatgtggacttttcccttagaccaagttcctagtaatccaatcctcattcatcatcaagtcgggtccaaaaccaagtgtaaggctagatacatgactccgatttcatgattgcaacataagtctagacccacagaaggggtagagaaaaacaacatgtgtaaacaggaaaataaatcgatggatgagaacaaattcttcctttataactaaatacatgagatctatgcagtaaatacctatgaccgggtttataagggctgtcctcgctgggctggtccacaaatggtgccagtggctgagcttatgagggtcggaccttaccggttgggccacaaataaatgctatcctattctagaggaacaatacattctcttgcttttttagacagaaggtatgtggctgacctatgatgcatgagcattgcctacccttagacacgaaggggaagcaacaccccgttctgccttggcgatagccgaaggcagtgcttcacggtggtcattagcagctacctcaaacgccatggagctcggtctactggtcgacgcagcaaaccccgaatgccatgggcttgtgccatggccgacgagttgggtctagcgccacgaagtcctgtagtaggttaggtcttggcgctgcccttgaaaacctaccagtgcgcgtggtgggcccctaggcccccacggctggtaggccacctctagcgtgatgaagttgacaaaggcgtagcccttgttggcctgccttctaaaatccattagcaggtagaggaaatcacgg

SEQ ID NO: 68813 - DNA, 573 bp, Zea Mays
attgcgtaggtttttgcgatggggcgcatggtgtggtagagccatcgtggtggaggaggtcgcggagtcgtcggcgcaaatgtcatggagctacaatagcagtttacggaggttgcggaggtcgcttgcggaggttagctatctgacgcaggtgggcgggggtttcgtggagtcagagctctgtgtgcgcggagtcggtgtggatgtcgcggaggtttcgcagaggcaggggcacggagatagtctacaatattgctttaatagatagtagagatagtgtctcctagcaagttaaccctacaaaatatataaactgcacgtgtagctactggtacgacttcattccatcacgtctcgtccgaggctgaatgtcgcgtcggaagtaggtttggctaggctgtcaagcgcctctgcgcagcttacaacgaaaacgttgttggtctagatagttgtttaatctgtgcgtttaatttaagcactctatgtgaaaacgctggtcgagaataaatggtacgtacatgaggtacttactgcaggggagactatccggcctgggacctttcacagctttca

SEQ ID NO: 68814 - DNA, 501 bp, Zea Mays
gactttatctgatagggccactagcctcaagacccgctccccgccggggataggtccggtgctgccacgtgtcctaggggtgaaaacactcagtgactgcaattatgagtctggaccctacatgtgggacctagaccccacatatgtcgtttagacccccataggttggtcccagacctctacgtatatcgttcggacccccatagaagggtcacattcctccatgtatgccatctggacccccgacgaggcgggcttatgacttcgagctagcatgctctcctgttccccgctctccgctcgggtagagatccagtgccaccacgtggcacaagacttcggctagaagcctgcttacctcctcgcatgcgtcgctggcacatggcatgagccaacttttggcaggccgggcataaataatcgcacagtaaaccacacattaccgaggcgatcggtcatgtctcagcgtcgcacgcatgggcggcacagtaagccgtgtgt

SEQ ID NO: 68815 - DNA, 611 bp, Zea Mays
gttttggtcgtggtgaaaagtagtaatgttgatttgatgtctaagttgaaatgcaagttattgtgtgaagagtgcatcgatagacatatataccgagtatagttattttggtgatgcaatggatgaataaatacttcaacgcttagtcgatgggttatgtttagtgatgcttgcgatgattttgtttatgtgttggaatggatgttctacttgttagagcaaatagaatatgatgctttatttagttttgttagctatccactttagtctagaaaagtggttaggaaaatctagttaaattgctcccacctataaattgaagtttttggtgtcctaaaaaggttgagactagttttgttactcttccgatattatgcttagctaaggaacatgtaaggcttatatgtgagttagtgttttcttaatgtaggagctatgatgtgttaaataggagagagcgataaacgtgcttgctaattgtatgtttgtaactctagtgcacaaaatgacttgaatgtaattagtgatttgaattgttggtgcttactagttggtcttcactctaatcaatgataaagtgctagagtattttaagtgtcaagaacatggtc

SEQ ID NO: 68816 - DNA, 1110 bp, Zea Mays
atcggctctcatcctcccctacaacgttatttacgatttcagtcgttgatagagaagatcccacggtgattgaactgagctaccactcccctgcctcctcccttcttttgatctccttatttatcctccaatgtcgctctgcgcgatgtaaagtatatagataatgaatacccaaggagcataaacaatgaagacgatgacaggtgggatcaagtaattcaagttgagtaggagaactcggactagacaacttggattcggctgtgggactcggacttagattttgtggattccacccacatgtcaaaactagatcaacctacatggacatataagggaagatggtgtttcttggtctgtttatggtacttggacatcccgatctataagggaacccatacgtaaaggtagatatagatctagattatagggagaccatttttaggccgatcctactccttatctcgtatgatgccacataagtttcctgtaattgtcccctccttggacaataaaagaagggacgaggcaccccaagaggacagaacattagatcgtaagaaatagccacaaacatacatgacatagggtattatctcgcatggaaagcatgaacctttttaaattatcctgttgctttgtgtttacctttggttctcgatctcgtgatccacccgtataaattcatagctaaaaaatcttcaacagttggcgcaataggcaagggaccattgtgctaatcatatagtagatccgaagacagccaccaccttcgcactgggacatgagatcaattttggtgacctcaagttcattagcgacactacgagaagtctcaagcacacttaggataacacttcggcatgctctacttcatcagcatcttcttcggcatgctctgcttcaccagcgacgcgtagggcaccttaggataacacttgacgtcccaacgacaccatcaccagaaactttgggtcaatcaaatccaatccaaaagacggtgcaaccatcacatccggtcgaactcggactctacaccgactctgatggctgtgaagactcgaactccaaatccatggggtatcagatcatgttcatggcatataatgg

SEQ ID NO: 68817 - DNA, 294 bp, Zea Mays
agcagttggtgaacgatcgacgatgaactggtcagcagagttgctggtgccagtcagaacagcctttgatctcattcacacacatgttaacacgacacagatttcaccccactgtccacagaaggaaaccgcctgcaccaaacgatgcagtcaaactggacgatcggctgacgacgtgagtagttttcagtttgaccatcgagagaggcaatgcagtgcgtgacatgtcactctgatcgagcgacccattcagacttgagagatggtgacccccttcactttgattcattgaaa

SEQ ID NO: 68818 - DNA, 523 bp, Zea Mays
gtgcggtggcgcgctggccacccgcggcggaccatggccgtcgaacgcggtttcgcgctcccatgcccaaaactatgacctgatcgacgacaagtgatgcgggggtgacggcaaacatcaaggtaacgatcttacccgcagtggggttggcgacagagctagccaccacagttcggatccattgccgtgtgcaactccgacgaggaattgaagatgtcccgaggaacacccctttacggcgtagccccggaaacatcccctgcatcatggcgaagctcccaagccaattcatggactccggttatcgacattagtgggggaacgatgtctgcggccaactcacccacctctctctgcttgaatccctcgcctacagtacggagcacacaagctggtccccaagagtcttgggtggattattgagggacgatgaccgactatttatgcataggacaagggggaaacgaccacacgcgcgatttctaatccggcgagaacgacgagtttgttaagctcgacgcgg

SEQ ID NO: 68819 - DNA, 1897 bp, Zea Mays
aaaatgtgaaggaagttttcagatcataaaggagaaactcacaacagcacccgttttgacactaccagatatccatcaggattttgtcgtcttctgcgatgcctcgaggcaaggcttagggtgtgtgctgatgcaaaacgaaaaagtcattgcttatgcatcacgcctacttaagccgcatgagcagaattaacccacccacgatttggaattggcagccatagtgcatgctttaaagatatggaggcattacctaattgggaacaagtgtcacattttcaccgatcacaagagtctgaggtatatcttcactcaaccagatctcaacctccatcagcgaagatggttggagctgatcaaggattatgacctggaaattcattatcaccccgggaaggccaacgtggtagcagacgccctcagtcgaaaaccattcggaataaagggaaccaactttttagaagattggaagaaagaatcagctcaactgaatacatgtctgggaaacagcggcagtctcgaagtcagaccaatgctggaagacctcatatacaaagctcaacgcctagacccagagacaacaagacttgtggaaaaagcccgcaacgaacaactcccggacctcagggcagatgaacaaggagccctttggttcaaaagtcgtctgtgtgtaccaaaaggggaagcatgagaggtcctgctcgaggaagctcacaactcagcctactccatccacccaggaactaccaagatgtaccttgacctcaaaaccagatactggtggagagggatgaagaaagagatagctcattatgtggcccggtgtgacacctgccaacggacgaaggccaagcaccaaaaacctgcaggcctattacaacgcctccccgtgcctgaatggaagtgagaagaaataggcatggattttgtaaccagactaccctggacgcaaaaagggaatgactcaatatgggtaataatagatcgcctcaccaaggtagcccatttcattccagtaaaaactacctttggaggagccacccttgcccaaatttatctcaaagagatagtcggactccatggcattccaagaaagatagtgtcagacaggggaacccagttcacatccaaattctggacaagccttcagaaagctatgggcaccaagctagatttcagcaccgcttatcaccctcagacagacgggcagacagaaagagttaacaaagtcctcgaagatttattaagagcatgtgtgctagcattcgatagaagttgggaatccagtctaccctacgcagagttctcatacaacaacaactatcaggccagcatcaagatgtcaccattcgaagcgttgtatggacgaaaatgccagacacctctcatgtggtccaacgtaggggaaaaagcactagaaggacctgcctttgtcaaagaggcagaagagaaagttgccctgatccgcaggagactacttgaagctcagagtcggcagaagagttatgcggacaataggcggagggagctcagatttgaagaaggagatttcgtttacctcaaggtctccccgatgcgtggtgtcaggaggttccaagtaaaaggaaaactagcaccacgatttgtcggtccctatcccatcattggcagagtgggacccgcagcataccgtcttgaactaccagattccatgtctgacatccacaatgtgtttcacgtatcccagctccgcaaatgcctgcaagcaacagaaagtcacatcaaagaagagtcagtgcagattcagaaagatcttcagtaccgagagaagccagttaagattcttgattcagctgtccgaaagacccgcacctcagaagtgaagctctgtaaagttcagtggagcagagaaggagaa

SEQ ID NO: 68820 - DNA, 392 bp, Zea Mays
gcgatcggcagcgcgatgcagtcgctaggttgggattttccagtatatttgatctgcgaactgatgccttagagagcagatctctcattaggtggttgatggataaattggatccacatgacatgaccatacgcccaggggctggcaaggaactaaagataacaaaagagacagttcgtcttattttgggtttgccatgtgctggagggggcaaggagtttactgattggtatggtgaagtggatgctgttgcaaaacttagacgtgatctcaaagttggtaaagaagaatttgatgttgtcaagcttcaggacaagatagtgcttggcactgatgatgagttatcaatcagatgcttttttctgattctattcaaccgacttctttttcca

SEQ ID NO: 68821 - DNA, 692 bp, Zea Mays
ggcgctccactagggatcaccaattgaacccgaacgccgccctagagctcggtccacgttcacccatggagtttgggagtttcccgacgcgttcccaacgacgcagtgcagtaacatacaaattgggagcacggtaagctttagcaccttaccaggactcaagaacggcaactaggaaggcggtggagggacatgacggtgggtcgacggagggggtgctcacggcggtgcggagaacggatttggggaaaacccgaattagggcgctacggtggatgatcgagagcgagaagtggttcactgggttcataacaagtaggcggaacaggccgaggcaaaaaattatagaggacgaccacgaggagggcgaatttgaatagagaagtgctggcaatgataagggagaagagtcaccggagttcgctaacatggcgttcactggctcacggtctacgacagttattgtcgagtcttcacggcttgcgacgacgtggtgaaacgactgagggcatgtcatacccaagataaactgtggcacgacggcggcggtcgcgcagccacgtctccggtgcaagtgggtatggcgacagggcaaaatagtgccccaagtccatcctcacgtgagatcttttcaccgtcgaccgttatccgcacgccagagcgcacgaatcataacgccggcgaggatcgcg

SEQ ID NO: 68822 - DNA, 497 bp, Zea Mays
attttttttcccactgcgccacgctcggttatgcatcaaccagcagttcaggtttcagaacctggcgtcaccacttccggttactgtgattttcttctcttttttgcttgccagcaagtgagattctttgagagctgggtcctgtgtattttgctgtgggcctggctgaactacattactctacacgtagcttgtactggtactcagttctcctaagatggcgtgaaactgtccaagaatctgtagagcaagcatgggaacgcaatcctgttcctgtgccgcagtcacaacgcccagaatccttatcgcaaccgactcgcaaccatagattcatagtagtactcgtagctcctcggcctcagcgaccaccgccattaacaccgcctgatctccggctaccgagtagcatccataaaactactgcacacacaccaatacgaccacccccaccgcgaatgatccatggagtttgaggagacgccggcggatgaatctag

SEQ ID NO: 68823 - DNA, 446 bp, Zea Mays
tcttcctctatttcaattgtctttggcttcggagccgcagccttcctcttcttcggagcagccaccttcggctcagggctggattttttctttttcagaatttcttcatcttctttcaccattctagcagcttgtctgcttagaacgctaacaatcctctttctcttttggccttcggcacctttgttcaatcgctcatagtcaggatattcaaaattcaatgcatccatcactcgattcaaccttcgcttcggtcgggttccaaaggctgcagtcatcagctgatcttcttttttagtgtaattacccaaaattttgttgcatatggtttctatcatttctaaccactcttggcatggccctttaaactgtttctcaaacttgaaccgataaggcagtcgcacaagttctttcttctcctttgtcccctttagcttcggcatgct

SEQ ID NO: 68824 - DNA, 703 bp, Zea Mays
gcggattacaagggcgaagtggccctgaggagttaaacaaaaaatttgcgaagattatcaatgttccaagaatgttctaagtcttcgtcggatggagttgtgagcctgtacgcgctgggggacgccttcgtcttgacgatgaaagggccctcccacttcggctccaacttgctccaggactctgtccgagctgtccggacgagtacgaggtctccttcgttgaactccctcgggatgactgtgtggtcgcgccatgcttttgtctgagcttggtatttgtttagagcctgtagggcgaagacgcgatctccgtcgatgaggtccttcgaagtcggctcgtctacgtcggggacggccgacacggctgtccgaggtgacccatgttttatttcttgcggagtcatagcctccgatccatatagaaggcggaaaggggtgaacccagtcgccctgcactcagttgtgttcagcgcccagaccacttcgggtaacaggtcgggccatttgccttttttgtcgtcgaggagcattttcttgacggctgtgaaaattttgccgttggcgtgctccacgactccgttggattgggggtggtacaaggaggcgaaggcaagcttggtgccaatggagaagcagaaatctttgaagtcttggttatcgaactacttgccgttgtcgaccgtgagttcagacaggactccga

SEQ ID NO: 68825 - DNA, 871 bp, Zea Mays
agcatatcgcgcatatagtcatgcaaaacattgttttatactgtagactgcactattgatagagcggagtttaaaatagaagatggcgtgggtaagctgctaacgacagtctaaggaaacatacaattaattggctatagttaagtttcttgttgttatttttctaggtgttgtttttgttcaatttgtatatgataagaaatatgaacggatatctttacacaagaaaacaagtacgtggggactggggactccattattctcaagtcaatggtcgtgaaccaatcttttgtcaatagcccttatgatttgaagaactgctcgtgaacctatctttaatcaacatttcttatgatttgaagaactgaaatggtggcactataagctatcattatattatttttatgtactctattggattaactattgtttccctgcatttgtagcgttttgttgtacctttgtttctgatgttatttatacttgttccttgtgcataactttattgaatgttctataaagcggatgtttggtactactctgctccatcatttttagctcttctccactaactatgacgtggagtagctctttgtagagttttcttcaactttaaaattattaaatgtccatatgaaatgtctattgtattcttcaaatttgaccccaccgtcatacactcattttcttgtgttatttttaccgtttgttgcaagtgctctccatctctttggcatataattgaataccacgtacgtctcattgacgcactaattccaggagaactggccgccgtgcccgcgcctgcgtgctggtagctgcgcccgctcaggacgtggctgcgaccgaattttttacattttggtctttt

SEQ ID NO: 68826 - DNA, 461 bp, Zea Mays
tcgctccctatatttcttcaacggaaatccaacctcgtatgcatattgactataaaaattatacgcctcgtccacgttactaaatgtcatatcgactttaggtatcaatcttatatcaatattgtccggctgcgcatagaaatttaacatttacgattcaatagcgactaaatctaatgtaatatagatacaacattacaaaaagtatgtaagaaaataatagtatcataattgggagaacttacatggctttgaagaatatgaggtgtgtcctgttcatgcgccccaatatgtctcatggggatgtgcttatctgtgccgaccatgtctgtcgattttgtgtgctcatcaatatgtccaggtgccctcaatgccgcgggggagtaacagatacaccctctgtgtaaccggtgatcgcagacgctacaggatgcatgtccattgaaatagacgtacatgtt

SEQ ID NO: 68827 - DNA, 384 bp, Zea Mays
acacgaggggacgtaggcatcagagatcctgctctctcaactccaatggcacgtcgacagcgggatggagaagacgaaggcagtgcaacacgctaatgtgaggaggagagagtatgtattgaggacgacgtctcgccctcaatttgtacacatgacgtggcaaaatagacaagtaatcaaccacataatcacaacactaacgtgacaatcaatcataattaatgcgaaaataattacttaccaaagcatgtcagcgcaattttctccatgcatgcaaaaataccaagtagcaaatggaagtcgtgcacccgcaaggtcggaagcgagaaatcaccaaccattcacgtgcatgtcatgcacccgcacccattgctccgccccact

SEQ ID NO: 68828 - DNA, 422 bp, Zea Mays
atgtagtcaagaactaaggaaggagactccaagacaccaaggaaggtaccactaaagtaggtaaggaatgcgtcaagggttgctctaagcatgaggcacgtatagtaggagtaggagcatctaggaagaacagaaaataaaggggaacaaccaaagatactaatgaaacatcaaaagaaggacgaggataaaaagtatgagtctcatcaaaggcatcatcccgagagatcctcatccgacgagcaattggatcccaacaacaatatcccttatgctcaacactatacccgagaaaaacacactcaaccgattgaacacgcaacttagtgtgctcacagggtgggagcagcaaatagcacacatagtcaaacagacaaaaacttgaatagtcaggcgtctagccacaaagacgctcaaaagga

SEQ ID NO: 68829 - DNA, 676 bp, Zea Mays
tgataagggagaatttgagaactgcacagtcaaggcagaaaagctatgcggatacccgaaggaggctattagagtttatagagggttatcacgtgtatctgaaggtgtcaccaatccggggtatgcaaaggtttaaagttaaaggaaagtagtcccctcgctttattggacccttcttgatcctaaagcgagtgggagaagttgcctatcaactagaactacccgatcattttgcggatgtacatgatgtcttccatgtgtctcaattgaagtagtgtctcagggaacctgaagagcagctacctatggaggatcttagtgttcaagatgatctgacttacactgagtatcctatcaaaattcttgacaccttgactcgtgtcacaaggagtaaagtgataaagatgtgcaaagtgcaatggattcaccatggagaagatgaggctacttgggaaagagaagaagagctacgagtagattttccccacctctttcctagttctacctaaatctcgaggatgagattctttataagcagggtaggatttgtaatacccaaattgtaaaaacctaagaaagcagagttgcttccttaattgttttgcattccactcattacaacatgaaaacatcttatttaagtcaacaaataactaataaaaatatattctaagca

SEQ ID NO: 68830 - DNA, 316 bp, Zea Mays
ccagcgagctcgatcccgcgatatctatgtggtagattccaatcaaaggattcaggaagctccaacgactcacctagacttcagtgctcgtgcaagattggccggggacgacgccagacgataggccgacaccgagactgtccttagcgcaagtatgcagccacgcgctactgttccaatcacctgacaatggtagagttaagaactccaacggggtaagcttcacagacccatggagacctcggaataggcatcacctaagcctgcgactccctgcaacgccctgaccacggtgaggtgagaatctggtggctat

SEQ ID NO: 68831 - DNA, 1002 bp, Zea Mays
gaacaggatactgaacaaggaccttcagatgccactctgatcttggaaaaagaaggcacatccaagaaggttaaatctcctactcccgaagcgtttactgaggagctagactttatcatacgacacgcttcaggtaaacagttgtcggaagagcagattgccgaagctaagcactatgccagggaattaaagtacccaaaaggatccttgctgtataatggcactgatgaagatgactttctgtactaccttctggacaacaaggaaatatctgtttgccgggagatggcaaggaacatagggtttccgaagctcgaggttggcctctctgcaatgtcgaaggatgaccttgcagacagcctcgcttataacagtcttaaggtaaagatgttctgacttataaatagattactttttgtatcttttatgattgtgctgatcccccctttttgtagggcttaatcttgagcaatgctttaagggcacaaaagaatgctgaagacgaaagctgccaaatagcccttgggaaccttcgaacagaggtatcagactgaggaatgaatccctagaaaaggataaaattctgctttccttggtagacagggtaaaggccagcgaagccaaacttattgcgcagtccgaagctcataaggccgaagttgaagacccaaagaaaaagcttgccgaaaagaatgaggatttcgaagtggcgaaagccaaacaagaaataagcgaatggactagttcaagattacaaaagaatgtggatgagcttcgcgaattgaaggagagatattatgagaaatccttaggttgtgctaaaaaattgaaacatagttttgcaaaggtgggtgcatactcatcggagcaaaaatttattagaggcgatcccgagggaattattgaatggatcgacgaagaagctgaagcttttgaagaaattcttagcgatcgtggggatttttgtgcctttgccggtgccagaggggttgcagcaatttt

SEQ ID NO: 68832 - DNA, 574 bp, Zea Mays
gtggcgtgttggtttggctaaccaccatgcatgtcactggcacgacctctgtggcgcgtccttccggcgctctgccctaggcggcgggatcctgcaagtcatacagtttcctttgcctgactgtcaaggtgacccttggctaaaagggtggatccccacattgttttgtggtggtccccaccttctaggcgccatccttgcccctacacttccgcataagtatactggagggtgctcgaggttggtttcgcttaccgtattttcgcgttgtgagctagccctcttgatcgctttgtcttttctcatctctcaactgtttcctaagcagaaggcgtaggttcgacccctacttggctcgtggttttggagtccgggggacaatagatttgtgttcgtgtcgccgagggtagaattaggcgttgagcaacgaagaggcatagtcgttgcattttccggccggtcttggctcgccgcagccactgctccgccgtccacggtcggggatcgcagcttgtgaagaattagaaagtgaagggcctcggcgcaaatgtcagtgacacatagaaatagtgtg

SEQ ID NO: 68833 - DNA, 561 bp, Zea Mays
gagagaggtgccaagggcttggggcacatgcgaaggccttgagggtagcaatcgatgtgagaggcatcagtgttaggggtgtgtggagagggagatgttaggggctagggcgcatggatttggggcggtgaccgacgagggagcatgaggctaaggggtgtgtgtggagaaggaggcaagcgcaacgatgcttgcccaatgtcacctaatacagatgggtatgactatattgggaaatgtcacttctagttatagtccgacgccaaggaattaaagttctaattctaaatgccaattccatagacattcaaacaacataatttagagaacttggtaccaaccccaattttaggctccaatatcagcatccaaataggacatgagacatcaagacatcaagaaccttttttgctatatcaggtactcgctcgaaaccaagaatatttctcaaactagccacaagcttatcatcaagaacaattcatgaaccacgcggtgccatttgttgaagcatattatgtagtgctactagcatagcagtattagaccttaaatcaagtc

SEQ ID NO: 68834 - DNA, 275 bp, Zea Mays
gtttgtcaaatttatgttgatgatatcatttttggatcaactaatgagctattttgtgatgagtttggcaaaatgatgtcgaatgagtttgaaatgtccatgattggagaattgagcttctttctcggtcttcaaatcaaacaattcaaagatggaatctttgtaagtcaatctaaatatttgaaggatatgctcaaaaagtttggattggaaaatgcaaaattcattaagactcctatggcaacaaatggtcatcttgatttagatgagggagg

SEQ ID NO: 68835 - DNA, 308 bp, Zea Mays
aaagaatattttatcctgatcattatgattcactactatgtccagcgctcgccatcgacatcatgttagaaaccggagacaccagaataccagaccatcagatcaatcgtggacgtaaaaagttcggcatatgtcgccccccacggctccaccagacgacttctctgatcggtggaattcccaaaggatgaagtaatgacaccgataccaaacgacacaacttgcattggttgtttcgcaagccccaaatcaggccaggatgacatttcgtcactttgactttagtgcaagatccatatactgccacg

SEQ ID NO: 68836 - DNA, 473 bp, Zea Mays
tacaaggtgacagggagttgacccattaccaacaacaatgaaggaaaggtagggctatggagatgggtaaagagatagctataggatcaggagtggtgtggaacgagacgctaaagtcgggaacccagttggtgggaggaggggcggcgagaagagagccaaggaaggcacccctatagagccaccggggggttagggccaagagtgtcaatcatgggtagtggagaagacaaggcctcgatcgacatggagacaatcatggtactagggaacacaagcagcctaagagcgtgatggccctcttgaaggtggagctcaacgcagtcatggagaataaggttcatgacccgatcaaaggccacgaatgtgccctagagaagctggttgttgtgaagggagacgcgcacacagtagggaggcctatgacccacgacacaatgaaggtggggcatcgtgggagcatctgcaggaag

SEQ ID NO: 68837 - DNA, 1035 bp, Zea Mays
cgcgtgagcatgtcacaccgccttaagtcgtcgccgacttaagtcgattgctccgttagtagggtatagtggtcaccctgagttaagtaagcatgagcatgtcacaccgccttaagtcgttgccgacttaagtagattgctccgttagtagggtatagtggtcaccctgagttaagtaagcgtgagcatgtcactccgccttaagtcgttgccgacttaagtcgattgctccgttagtagggtatagtggtcaccctgagttaagtaagcgtgagcatgtcacaccgccttaagtcgttaccgacttaagtcgattgctccgttagtagggtatagtggtcaccctgagttaagtaagcatgcaggttgacagtaaacaatttgagcgcctttgagaatgaagtctttttattgatgatatatttcccagtttacagaatacaaggccgtcccaatagcttttgaaatatagctaggggtaaaacttcctgagatgttctatattccatgagttcccaatttccgtgtcgtccatttgattaagatgacatgatccaggccgagtgacttctgctactatgaatggcccttcccatagtggcgacaatttgtgtcgtccctcccccgttagaattcggcggaggatgaggtctcccactgcgaaggatcgatgtcgtatggccttgtcatgatagcgcctcagagtttgctgataccgggctgactgaatcaccgtattcaatcgttcttcttctagtatatcaacgtcctccagtctagtagcctcagcttctgctatgttttcaaagattaacctcggtgccccgaacttgagatcaacgggtagcactgcctccgaaccatagaccataaagaaaggaatgtttccatgcagagctctgctaggttgagttctcaggctccagacaacatacgacagctctctgatccacgttcctgtgaacttttcattcttgttgaagacttcctttctgagcgcttccaatatcatcccgttggctctttctacttgcc

SEQ ID NO: 68838 - DNA, 561 bp, Zea Mays
tcaccatacccgtacccgacgggaacctgtcttccggtgcgctacgcccccgtccgcgcctccaacgatgttattgtgccgtgatccagccctgccaccatccagcaataccacctccatgtcccctaccgacaccaccaggtgagaagcagcggcctccatctttcgttgtgcttatggatttctcaaatactgaaatagtgttagtttcatttattttgaatattgtaatctcatttagaattagagatatcatccttagcagtggcggagcactcgttatgacatattatggatgttgtcatacctaaatcaaatgtgtagtacagtggttactgtgtaacttatttgtgcgataggttccaagttcgaatcttccttagtagaatatttcttcctcttttttggttctctgcagccatacctcatttttaccttgcgctcgccactgatccttagtgcggtaatatgacgaggaaggtgatcgtattcttttcatccttcattcatccctcatcatgaaaccaaataagagacgacacagcttcaatccacttcaac

SEQ ID NO: 68839 - DNA, 520 bp, Zea Mays
ggcgtagtgggctagtgtgtagtggttgtaggcttagcgcttaagcatttggttatctctttatttaaagggtccagtagtaacgcaagtgtcgtgggggtgctggctaagcatgagatgctgctaggtgtttgtgtgtattgattaattagtgaaatgcaagtgctaagtgcaccggtgtgtggtgccaaaaattccttagtatcttctgtgcctgagcatttatatgagtaatacaacatttcatatattttataagaatttgtctttgataatagatcattttaagcttgcacaacagtaaacaaagagtgtaaaataattttggaagtcagattatattcatattagccttgttgactacctttccttttgcttcctattttagcactctgatggactgtgcttcaatgatgaaagaagtctagactccacatttccatacattatttcacaatgcctctataagtgtattgaaactgtaatttttctcagttaaacttgggaattaccattcatc

SEQ ID NO: 68840 - DNA, 280 bp, Zea Mays
gttcaccaagtcaatatgatgattgaccaagttaagcaaaggcatgaggacttagtgatcaaatggtcaagaaaatggagacatagctgatacgcttctcgaatcgagtatggttgtttacgcctcaaaataaggtttagggtctcgaggtagcatgtgatgatgacgagaagcttgcgttgaggcgaatcattctcttagagggcttatggcctacggacgcacagatctctacttagaccatctttcccttatggttaattaattctgctaaaatatc

SEQ ID NO: 68841 - DNA, 624 bp, Zea Mays
cgcacgcgagggtagtctacgctgcctctcgtggtgacttcggagtggtcgaatgctgaagaccgtcgatgcggtctttttcgacatactgtaactgagtttttgcgggggatttttgcgggtacattacatggctccgcctcattaaaaacctcaccccccgggaggaaaagagtgtgggccggaatagcactgtttggtgaattacaagggcacgtaggccctgaggatttaaacaaaaaatttgcagagattgtcaatattccaagaatggtctaggtcttcgctggatggcgttgttagcctgtatgcgctgggggatgccttcgacttgacgatgaacggaccctcacactttggctccagcttgccccgtgactctgtccaggtggttcggacgagtacgaggtctccttcgttgaactctcttgggacgactgcttgttcgcgccaggccttcgtttgagcttggtatttgttgaggccctgcagggcgaagacatggtctccatcgatgaggtctttggacgttggtttgtctacatcggggacggctgatgcgcttgttcgagatgacccgtgctttatttcctgcggggtcatggcctccgaaccatatagtag

SEQ ID NO: 68842 - DNA, 576 bp, Zea Mays
tttgaaccaggaaatgaaattggggaatccatttccggcaccctttctaaaaaagggtatcatatatggagttgggtcccttgattgatgcaagaattcatgaagaaattgctccatgtatgacatcacatcttcaaggttggtcaatacatatagcacgatatgacaccactcttcatgtgtcagggttttggtggtcgaaccacttgcgcttctgagttgccctaaaaaaatgctgaggttcaattcatttttaccatcattgtaatgagggggtcgattatgcacgctcgatagtttgacaccatagtatgttgttgtgaagtttgacacctcctccaatatgtatgccttcgcaatggaagcctcaattttgcatttatttctacatttctttcgaatagtgtttatacatctattgattggatagcactaacgtccctgcacgcctccatttgtgcctcatacggaagatgaataatcaaatgctgcatcggattgaagaagtcgggtggaaagatcttctctagcttacacaataacataggtgctattatttccaagtctagaatcacg

SEQ ID NO: 68843 - DNA, 384 bp, Zea Mays
aatcaatcaagttcagaatacacaattttgataccaaacttgaatattcaaaggttggaactttggaaagaaatggaaggtgttgtcgcattgaagattaacaagcaagtgagcttctatgaggaggcgtacaagcagaagtagagaatggatgagcatcttgtagagccgaaaaggaagatgtgggaagtactagttgccaaggaagaggagtgcatcatctcaatcgatatgtccaccttgaatcctgcatggtggatgttctatgaagcaaagtagcgtcaaaatctttagcgatacacatcaacctcaaagcgaagcttgcaattgctgaagtactttatcatattgttaatgcattctaaattactataagattgttgg

SEQ ID NO: 68844 - DNA, 1015 bp, Zea Mays
tccattcctaagatcacatcaatcccttgggatggcaagacagttaagtctgccaagaacactaccccacttaaaaggattctgacttgggagcatttgagctaacatagaaggtctgaccctggggttcgggtgaccagggtaatctctagaggggtagaggggatgccatgcttttccacaaaactagtggctataaaagaatgggatgctcctgaatcgaaaattcaacaaggaactcaccgagcactactcccggagcttgctgagcctcctgagcatcgacgtgatttactcgtgcccttccttgatactggttcttgttctgctggctgatggaggagggtgccttgggggcggatgctgaggtattcttggggccattcaccgagttggagtaagcaggtcccgatggcttcagctggggacagttgttcttgaagtgactgggatctccgcagtgccaacacgcattcgctggtggttggttgcttgcaactgagggggcatgaaaggagctctgactctgctgactgaactgtgatgaggtgggtccagctggtctactgaagcttggttccttgggtggaaatccaaaggatcgagttttctggtgccggtcttgctgctgagctcggaggacttggaatttcctcttgagatggcctttttcttcttcctttgccctttccacttgcatggctttgttggagaggtgcgagaaactgaggaagtcttggctggctaggatggtcttgagttctgatctgagcccctttaggaagcggaccatcttcttgacttcgatgctgacgtcatccggcgcgtagcggccaactccatgaatttgtgcacgtactcactgacagatctttcgtcttgagtcagttcccggaattcatcttccttgagctggacgatcccttggggcacatggtgttctcggaaagcagtttcaaactctgcccaggtagcatctctgatggcagcattgaaggtatcccaccaggctaag

SEQ ID NO: 68845 - DNA, 704 bp, Zea Mays
ctcggtaagctccgccatgtcaaccgcagctcgggacgccctttggttaaccctcgtcctctccagttcaccagttccatgctcaccagttcacaaccgttgatctgccgctgtcgacccgtgccctcaccgtgccccggccaccgttcgtgcattcctgagactttcctcaaggtaatcgtcatagcccgcccttattttcccctgtctcgcatttacttgcttgcaattgctcgccgaagtactccccgatccgccgaggactcccctccgtcgtccggtcgcctcagtcccattcacacaaacccgaccctgccatagtgttcgtcaggtcctccccaacctctccagctatttggactgacctctcgtagcataggagtccttgtctgcctcgcctccggcaacggtgccaccgtgttcctggggagcgccaccgctagcttcccggcgaagttgaagtcccctggcacgcatcctgtccgcccaaccctaatcggacggcccgattatttcaattaaaccagacctaatcccaaccgccatatccggatttgacagctcccctctcactctctcacccgctccctgcagctgggggcggcctgtcaggctgtctcaccccaggccgccgacaaaccctggcccgctggtcagcccatgctcgcgttcacgcgcgcgttcgctcggccagacctaatctg

SEQ ID NO: 68846 - DNA, 356 bp, Zea Mays
ggctattgatagcagtgaagcagatccacttgagattatcatggttgtgtccgagttcccagatgtgttcccaaaggacttactaggcacgccaccagagcgaacagttgagtttgccatagagcttcttcctagcaccacccccatttttaagagagtttatagagtatctggaccagagttagttgaacttaagaagtagatcaatgagctgtcaaagaaaagttacatccggccaagcacctcgccttgggccgcccctgtcctattcgtggagaagaaagatggcactagaaggatgtgtatcgactatcgagctctgaatgaggtcacaatcaagaacaagtaccccttgc

SEQ ID NO: 68847 - DNA, 517 bp, Zea Mays
atcttgaagctgtgggagttccgacctttgatttggctgctctggacttgcctttcttggagaaagaagtgtgggaaacagttaaattgctgccttcagataaggctctgggtcctgatggtttcacaggaggattttataaggcctgttggtctataattaaagtggatataatggcagcagtttcagcagtttggagcaggagatttgcgcagttcaataggctgaacacaacatacatcacattgatcccaaagaaggagggggctgataaagtaaaagagttcagaccaattagcctggtgcatagcttcgcaaaattgatcaccaagctgctagctaatcgcctagctggaaggttaaatgagatgatttcacccattcaaagtgcttttataaaaggttgttttattcaggataactacatgttagttcagcaaactgcaaggttcctccatcgacgaagacatgcccattttcttctgaaattggacatcacaaaagcctttgattctgt

SEQ ID NO: 68848 - DNA, 403 bp, Zea Mays
tagaaaaccaactagaaaagaaaattaaacgagttaggtctgatagaggaggggagtatctttctaatgaatttagtgaatactgtgcggaacatggaatcatccatgagacaacaactccctactcgcctcaatcaaatggggtggctgaacgaaaaaaccaaactttgacatacttggttaataccatgttggatagttctggtttacctaaatcatggcggggcgaagctattttggccgcatgctttgttctaaaccgagttccatcagctaagggtgataaaacaccctatgaaggatggaaaggtagaaagcctactcttggatttctgcatgcatggggctgtttagccaaagttaatgtgcctgcatgcaagaaacgtaaattgggaccaaaaac

SEQ ID NO: 68849 - DNA, 497 bp, Zea Mays
gaagggtgtgagaggggatgtcacgagaacatggcgtcgattgcgatggcagacggcggcgagcgcgctaaagagccagagggtgtgagtgagcgagtgagggagtgagagggagagtcgaagagtgtgtatgagaatccacctaggcacgaggaggcaggaggtgagctccacacagcggccgtgttcgagcgcatgtgggggcacatgttgggcgtgtgtccttggccggtttagtgttgagcatgtggcatacgtgacagtggatgactttgggtgcaaaaataaataagttagagtgggtttctaggcacgaccaatatatagaaaacgattccctttcacccctcttcctttttatatatagggctctcaatcagcatctcgatggttgtgaagataattagttgctaagttgtttttgttagagcagtgatccctggttaagaagcaatgccaaacgatgtcaaacattctcggacaagtcccaatttttt

SEQ ID NO: 68850 - DNA, 453 bp, Zea Mays
gtcatttatgtccgcatcactagggttcaggggcacttcaaaataaacctgccgttcatcatcaggaatctccccgagcgaagcaaccaaggtacagacttcttcagcagagggtcgcactctaagacccaagttgctatcagtcacaggcgaattggacacaaaaagggtgaaagctttgggaggaggtaggttccaggccgagtatgccactggagcaccaacatttgaaaccttacccctgaggatcatttcaagtcggcttaccaagtctatagaaggaattctcctattggtaacccgagttgagtcggccagccctcgatacagatatgccggataggccctatctttcagtggctgaatgttcttaaaaacaaagtcagtgaccaccgcctcagcagttagacctctctctttcagcagtccaacttcagccagcaacacacccgc

SEQ ID NO: 68851 - DNA, 575 bp, Zea Mays
cgagtgggattcctttggcttgctcggccccctctgcagctccgccaagctcgaccctggactcggtgcctcggggcttatgtgggggctagtgcttctaaggtagacgattctcatactccctcattaattggtggtctgcagtagtttggaggtctttatcctgtgcgcactctctgactggtgggcctcaggaactcgaggatcgtttcctcaatagtagctcccgagccaacaggggaagagtgtctctccttgaggctattctgcctcgagcagcatttgtcctgctgccttttgattggtcgtggtatatatgccctcgagattcggatcgtctttgatgcagcttggtctcactcggtatggggtcgggcacttttgctcctttataaattttggcaagcgcccgctcgcagtcaccgcagagtaaactgccttctggttcttttctcaaatggattcttccgctaggtcggttcatggatcatgggttgggaggatgacacgtcatgctagtgaagggccatggtaaagccttgtcttgcttgagttcctcattcccttcttcacag

SEQ ID NO: 68852 - DNA, 558 bp, Zea Mays
gtcgtggtcaggcttcatcatgtcttcatcgctggtgaggaccttccccatagtttcgtactgatctccgcttcgtgttgctctattcggtttcgagtttggggctctaatgcacgaagtacatgacaccggccatggcgccaccgctgatgggctctcgtcgtgcgtgcggccacagtggggtggaagatgagccattgaccgtaggatcatatctggatgctccagattagaagcacattatcagttcggctcctttaaatccagcccgttcatctcggaacagaggggcatggatagatcgtgcgtgtggacctctagagccattgatctttaatcctctggttgtgatcgtgtattgggttggatctaacctcaaccgtaggatgagatctgaacggctctgttgggaaaataccccttcgacgtgaatatttgataaagagaccctactcttttatctattcaacccgcaatcaacagcagtgaatggattatcacagtttagcccaaaactttgcaaaaccgaccctgagttcttaggattttgtacccgac

SEQ ID NO: 68853 - DNA, 549 bp, Zea Mays
ttctcctgaagttctttgaaggatttctgcaaatttgagtatttatccacttcagcttttaggcttgcttcaaaatatttcttttcttgctcgaatttttctgattgtcggagcaattcattctttaatttgtcattttcagtttggacttcagccaaagagccctccatggtttgaataacaaaatccttcttttctaatgcaccttcgtgctctttgaccatggtttcaaggtcttggattatgaagtttttctttttcagattggcttcgtgattttcaactttttcagccaaatcttgaatgacggctttgtttttctcttcctccagatcttgttgcatttttaaaaccttgcttaataatatgctctgtcgaaacgatcttcgttagaacacgacctaaaagataataataatggtaataaaataacaaaaatattcgttaccttgaagttagcatacagcaagcttccggcaatgtgttgtcgttgatagcggcacaagtccgcttccagcttcggcaagccaatgcttttggagagggttc

SEQ ID NO: 68854 - DNA, 775 bp, Zea Mays
caccgcgggcgggttccattggaattctcccgaccgtcgtcgctgaagtccaattcagggaccagggagtttcttgggcacgtctggaacagcaccgaggcgactgtgggcgcgaaggtgtatgcatcgcggaggaatttctcaccggagccgagggtctgcgcgtcgccgtgtgccatcagcacaacgcccgtattttgggtgagaatgcccttgcgacattcgttgttccttcctctctctatagtgtgataattgtcgagtattagtggctgggtcaaggagcgcggcttcgccggtaattgcaccaccgcgggtgggtgctccgccgtgcttggtcaccgggggagtgggaatggttgacaaggcggtcagggtcgtcgatcttcctaggggtggcctagattagatggtagagtaatgtttctccatgactattgagaaccgtcgatctggcgatgactggcttagattaaatagtaggcaacgcgtctcgcgcagatagatctggagcgtccaatcccgttcgggcggctgtcgctttgtaacggttcgcgagcatgtaaatctgactgagcccttgattcctgaccggacggtcgcggtttgtggataccctttcagctaaaccttttacatttaagccctcggagttctgggaaaataacccgccgtccaccgcagtttaacctgagtcttggaacttttgcgcggtagcccctatactcttagaaatcttgtgtgcactccagagccatgtgaaaatggaaaaaag

SEQ ID NO: 68855 - DNA, 543 bp, Zea Mays
ccatagcgcctgaatttagcttttcccccaattcgatcgccatcgccgccgtggatagctcctccgtggccagcgtcgcttgaggtagttccagcccaattaccgtttgttctagcttccttagagtatagtgatgctcctcgtacttagaaattgaacgctaccgtacctagtcgccgggaacagctcgaccttccctcggtatttgccgtcatcctgagcagagggtattctgggtctgactagctcaattaggggatgaactaggatcgcctgggatcagggatgctagcgcaacgcttggtttagacattcatcgccgtttgcggcgagttcccgcgaagagatggccgacgatgaatgcgccgttgtcagggttcggtttggagaagaaacaaaagtgcaaggggtgttgtgtaaatgtcagagaaacagtgaattagtgctaagggttctttaccagttattcaaatctccgagggtctctgcgcaaattttccagcgcgggcgcgtttattctgttgatgggatgacttgggctgg

SEQ ID NO: 68856 - DNA, 845 bp, Zea Mays
tcgagatcggccaaatcaacagtgtctgacgtgaggctccgtccaatccctttcaaaagacgagctgtgccagcagtggatttactcttctttttcttctcgaacggggacactaattttggtatagaaactttagatttctttgatggtcgtggatcccttgatggctgtggagaagatggatccctgaagggcgatgtatgtggcggagacggtgggccaccatgaggacgaggagaaggagggtcagaaagaggatgaggagcagcatgtgaagtttgaggaggtgatgatggatgtacaataggaacagcaatttgagaaggcggagacggttggcctgcgacgacggctgtcgtggtggatcaaccaattcgacatcccttcgaggccaaaggataaaattcttgatatcttgtccaagtgtctcgataccttcgggcccagggatgtctagcatgtcgtcctcggatccttggacgactgtcgtcacttctaccctgcaatattcttctggaatgtcgtttctatggaacttgcgtcctgggatcgcaagacatgtggctactttctttgtacgctgattgttaatactatatcttataactagtgtgcatgccacaggccttgtgatgtcatcaactggatagcggaccttatttcccattgacgcgatagagcttgggatggtcgtaccctcggtggaagctggcagttgagctgctggaattatttgcatatgtggagtggtcatctgttgaacagacatcgcactcgccaattgctgcatcaattctagaggaggattcgatagcatttcagacatcaggcctttgaactctttc

SEQ ID NO: 68857 - DNA, 360 bp, Zea Mays
catgggtatacttacgtataaccacattattatgtaggataaaagatgggtaggttagagcaagaatagcctagggtaagaaagtttatggtgggaaagaactccgtgttgagtggtatggcatctgaagatttgagtttgagttttctccttccttgacgaggttaatcttttcctctccggtcttggtctcattgattcgaggttagtgtactttggggaatatggttaagatagatatggatgagatagactacatgatataggtcaaaagtttgtttgatgtttggtggggatagacagattatgcaatccatcatgactctattggttgggttagatcttctgctcatggttgag

SEQ ID NO: 68858 - DNA, 767 bp, Zea Mays
tgtaaaacttagtgcctcatagagcacctagtgtttgcattgcatgaggactaactgcactttcgaatttgatagctaaaatcttttcaaaaatcgtgctttgaaaagtaactgagtttttgtggtcggcagaccgtctgggccagaaggccggaccgtccacgatccatctagaaaggtctgaagtttgctcacttcggtgtgagctgaagtgtttgcaatgtggactgttcgggccttggggtcagatcgcccgtagccctgaccagagagtgtctaagtttgcacaagtccctgtgtgcttgtgcgtaccgtccgaccatgtgcggcggaccgtccgtaggtgccaaaatgggtttgtgcagggactgtgtgtttttgagcatttgtattgtggactgtccggtgtttgagctcggatagtgctaagtgtaggcagtggaccgtccgaccttggacggcagacaatccgcccatgttaatgtaacttggtcagagctcgggtagctcatgtcagcaggtcttggaccatccgaccatgtgcagcggacaggtcgagctcaccttttatgatagctctgatatgattcaaacgagaatatagtcgttactgtgtacggtgtaccatccagcctaaggacgcggacagtccgcatgtgcgtagaaagtgagtacgttgcatataacaattggaattggatgggaggctataaatagaaggggtgctcatgtgtgagagctctcttggtcattcctagcatacattg

SEQ ID NO: 68859 - DNA, 335 bp, Zea Mays
ggcatccatcaacttctggacgtgctcatccttggcttgctttagggcttcaacagcattgagttcatgactttccaaggaagctacacgggcttgagctgtggtgaaatccacatggagcttacggttgcgcttctctacatcttctgctcgggcaatcatctaacggtggcgccgagccaagaaatcatactgcgcatctagggtgagtaggtatgcagtgaggtacacgactgtggggtcgtcctcaagtagttgctgcccttccaattcacgcatcctagccatccaaactggacggtctctctgaaagggcggaaagaatctaagcgggg

SEQ ID NO: 68860 - DNA, 339 bp, Zea Mays
cttcacataaaaccattcctgcatccaagagcctggccactttttccgaaatgttggcacaagataactggcctcagagtgggacacgaagttatagcagtcgaagttattgtggtattgttccttcctagttgctttcgtctgataggataattcatgaatattacagaagcacctggcgtttggctctaacccttggctcctcatggcccatataaaaacccctactttgataaaagcttcgggggtaagttgatgaagataaatttcaaaagtttttaaaacttcgaccaacatcttatccaggggaaacgaagtccagctttcatgaagcttctg

SEQ ID NO: 68861 - DNA, 498 bp, Zea Mays
cacatactttcttctgatcaatacagctgtgaccttgcaatcgcggtttcactacctcttggtaagtatcacgaaccagcctccgattgtatcatcctttgcttgtttttcgacagacacttgtaagatcttggtaagatacattagagcgtgttcatgtgttccacctgagaggagcgtgtagtgagattattagggataaccttcaccgtttgtttgctgtttttgtgtttcgatggcaggcgacgacgaagaagcaaggatccctacaaactttgatgaatgtgttagctgccaagatcttgaggcaaacaacaagcttctgaaggagcaaatggaggagacggtccacaagtcagtgcatgacgccttcattgacatgaaccttggcaagacatacgagaggctggatcgacaattgtccgagattgtcgacagacttgctgtgtcggagacgcaacaacaagcactgccaccaccacctcctcgtccacgtct

SEQ ID NO: 68862 - DNA, 324 bp, Zea Mays
cttcaggcatcactatgcctcgttttccatagaaggtcctacgacgtcggttttcttccaacggactttgcccacaccacgaggtgctcgtgcagtacgtggtccaactagccccagtccatggctacatgggaggatgaggaatgacgggaataggagtttcctcgtgcgtcggcttggggaaaagtttcggtgcaagtgcaaccgggtcgaaatgtcaccacctcgcccaagtcctagaaccagcaaccaggcccaaggcggagcgcgagaccgttaatttcgagctcaatgatggacgacaatatttgggcttgataagtc

SEQ ID NO: 68863 - DNA, 361 bp, Zea Mays
gaacaatgcagcctcacccgggtaaaacgctcagttttaccctggcataatatataacaccccaggtgttacctagggtttctactcaacacccacacccttgacctattatcacatgtggtttagtttgatcaaaaggcaccaaacttgagaaccaaggtcctaattaagtgttaatcaacttagaataccaaccttagccatatcatgcacataaaaaggggagaagtgcttaaaccctaaatccacacactttaagcaaatagagcaccaaaagaaattaagtaagaaggctatgtaaaacacattatcatgacttgggccatttgtaaaagttgtagcacaccaaaatatctacaag

SEQ ID NO: 68864 - DNA, 682 bp, Zea Mays
gagtaccattccgattatacattgccgctgaagataaggtcattggggctgttctaacacaagaaactgaaggaaaggagcatgtggtgacttatctaagtcggaggttggtggatgctgaaacaaggtacacttttattgagaagttatgcttatgtttgttttatacatgcaccaagtgtaggtgttatttactgtctagtcattgcattgtttctggtcaagccgatgtaattaaatacatgttgcataacccaattatgagtggtagaattggtaagtgggcttatgcactcatagaatatgacttggcctatgaaccattgaaatctatgagaggccaggtcgtagcagattttattgtagaacatcggattaatgatactcataaactagacatgtcatacctcactattactccttggactttatattttgatggatcggtttgcaataaagggcaagggattgacattgtacttgtttcgccaagtgatgtctccttcgacttctctagccgattgaaaacttactgcactaacaatcaagccgaatatgaagcccttttattcggcttggaacttttagattgtatgggagtaaaacatgtgaagacatttggtgattctcagctggtcgtccaacaagtgttagaggaatatcaatgttttgatggcactct

SEQ ID NO: 68865 - DNA, 967 bp, Zea Mays
ataaaatctaattttgtggtacagatcatgaatatgctccattaaattattttggagttgatcatatatcgagcttgcttggattgcggcctcacgttgaaagctcattggtgcttcgaggggtgacggttggtgttgcaacagagaactcaagttgttgggggattggatccctaggctctagggggaccatgagtcagagggagaatggagagaggcccgcctaggtaaatctgcccctagatgaccctgcgcgctgagcctagggatcggacgaggcgaagccaggcaaggggtcggacgaactgctagggaaccactcaagtaggttccgcgtgtggccaacgagttcctctcgtcatcaataccacacacgttgcattaattgtgctcccacacatggcctatgagccctaggcctgagtcccactcatgacctacgggccctaggggtcctaggcatgagccctttgatgccctacgaagcacgcaagacaacgaatgaaagctagaggtcaggctacgaagaccaatggtcgtcatgggaagaggtggataagaggagtaataatgaagctcaggctctcgtcaccagcacgctcccctagcagccttaaaagaagcacgaccggagatttacatgaggatggatatcaacacacagtaaggcttttaccgggggctaaccaacccattctaccctagcacgacgatcccttccgagagaatatatttgtaatcaaggtcagcccgaaaaaggggaaaagagagaagataaacgagaagagggggcccaaaccgagagcaaacacacgatatgtggatcctctagtggaacaacgaatagagaactgggatccttccctctctcacctgcttgtaacccctactacaaaagcaatcaggtgccggtagcatgagccatcgaagactagaagtagggtgttcggcctaaactagtataaat

SEQ ID NO: 68866 - DNA, 280 bp, Zea Mays
ctctattacttcatcatgcatgctgtgtatatggctatttttatggctgttatagatttagagtacatggttcttacaccaaatgagggaatatcaacactgttaaccaacgaatggtgcttccaaatagatagataagtggtccataccaacagatgtgatgttatttttactgaaggtctcatgttcttcccttcaaagtatatgaggttgcatgcatattgtcaattgcactatgggatataatcatatgtgctaatgttgctgattttaatttccc

SEQ ID NO: 68867 - DNA, 386 bp, Zea Mays
taatgcaaacatgcaaccaagtcacaagcatgaaggtgagtactaaaatttttggctttgtttccacaaactgtatgtctaggatatgattctcggtacctggggcccatcggttagcgagcacactaggaaaaggccactagcaagtgtggctcgtaggtcaattggaggagataggtaatgtctaccctggaagaagctgcctcggacgaaccccgcggcaccgagcccaaggtcaggcgtggcggaaccggacagggggttgggcttgccaaagggaaaccactcgagtggatcccacttctagcctgagaccgacccgtcataaatgaccagccgcattaacttcgcctagcatcgagccacagtagaggtgccgatctgcc

SEQ ID NO: 68868 - DNA, 750 bp, Zea Mays
tctaaggttgccgctttgtgcgacgagttgcacaagctgaacatggaagtggtttgcccaggtactttggattatatctcaattgagccaaccttacaagagcagataatcatggcacagattggtgacaagggtgttcaagtcattaaggaaatgctcaatcaaaaggtggataagtataaattcttgcgtcgggacagcaagggtattttatggttcgaagactgactggtagttcccaagaatccagaactcaggaaaatttttttggatgaagctcatctctccaaattttccatgcaccccagaagtaacaagatgtatcatgacctcagatccttatattggtggaccaggatgaagagagagattgctaagtacatatctgagtgcgacacttgccaaagaatcaaaactagtcatttaaaggtagcgggtaccttacaacctctccccataccatcttggaaatgggaggacatttgcatggactttattgtgggattgcccaacacctcccggcaccacggttctatttggtcattgtggataggctaaccaagacaactcatttcttgcccgtgcataccacccacaagacaaaaaaatacgcggaaatctatattgaccaaatagtgcgcttgcatggaatcccagtaactatcgtgtcagatataggagcaccgtttgtagcacgtttctgggagcagctacaaaagtcacttggaacaaccgtgattagaagctcag

SEQ ID NO: 68869 - DNA, 577 bp, Zea Mays
tgtagctgatttgcgcaaagcctttgataaaaatgcgtcggtatggtttgaaaatgaacccacgtaaatgtgcttttggagtgttggctggtgtttttaggatttgtcatccatgaacatggtatagagatagaccctgactgaatcaagtctattcgaaatgtgggacctccgacctataaggtcgaagtgtagaagtttcttggcaaggtgaattatttacgaatgtttatttctaacctagccgggaagattgatgccttcacccctatcctttggcttaagaatgatgctgaattcgcttagggggcagagcagcaagaagcatttgatctcattaaaaaatacttgtcttcggctcctgtattaaaagcaccacgagcaggagtaccattctgattatacattgcagctgaagataaggtcattggggctgttctgacacaagaaactgagggaaaggagcatgtggtgacatatctaagtcggaggttggtggatgctgaaactaggtacacttttattgagaagttatgcttatgcttgttttatgcatgcaccaagtgtagatgttatt

SEQ ID NO: 68870 - DNA, 636 bp, Zea Mays
aagaggttgtagcaaaccagctggtctttgatgttctgccttaactcgttgacatacatcacatagtgcaacataagtagcaacatctcttttcaaaaatcaccacaaatatttttcctttaggtcctggtacatcttagtacttccagggtggatagaataagttgaatcgtgagcctctcttaaaataagttggcgtaggtgctcaatttctagtacacagattctctgtttaaaccataatgtgctttgttcatcttccgtgaaatctgatgtctttcccaaattaatttgtgctttaatttctttgattttctcattggatccctgtcctttacgaatctcctgttccagagtatattccacttccataactgttgcttccatataattaagcataccaaggttgagttgttccatttctcaacataattcatgtggcattaaataggtagtaatattgttcacttgacttttacagctcaaagcatctgccactacatttgcttttcctgactgatactgtatatctagatcataatctttgattaactcaagccatcttctcagtcttaggtagagctctttctacgtgaatatgtatttcaagcttttgtgatccgtgaagattttaca

SEQ ID NO: 68871 - DNA, 903 bp, Zea Mays
tctggccggtgggccccgtttggcagaagctccacccctaagtcctgttgttcttccccacgagcgtatccctcttccccttcgcaacaactttccatgaatgtcgccaacctctaccgacctcctcgatataagatcgagccggggcgccaggcttcccttgttcaccctatagattcagctagcgagacactaaccaggaaaccctaccgcgtcgtagctaggacattggagcggtgtgcgggacggtcgccggggttgacttcgggaattaccgctcctgagcaccaattcgtggtaggagtgtggtccctagtgttcgtcgcgcgttccctgccacaacttgtgcgttgatagggatcaccgggaaacaaattgctcacctacgttgtagaccctacagacttccgtcgtgtgccgtaggcgtgcctcctggtgacctaatccccgataaggttcccaccattgtgctcaccaccttcccctcttcgttttgcattggatcgcgttaaacttatggccttcctggcacgtgctcgggagttcaccgccgatggcaccaccacgcggctcggccgggaaagggtgctgagcttatgaccgttgattacattgcgaaggtccacaattagatctggggtatcccgcttgggggttcgttgggagccattgattgttaatcccatggtcagatcggagcggagggcatggtgagtgcgtagccttggatcgaggatccaacggctccgagtggtgttgcctcaggcgccagaatgatttaatctaggccactggacctggatcgtcgagcccacaatagaagataccctttcgtgatgtctgttttgttaaaaagtccatgagctttagggaaaacaacccgcggtccatcctcgaggtttc

SEQ ID NO: 68872 - DNA, 545 bp, Zea Mays
ccattgattgactgcaaggagaatagcaagatactccttttcataggctgaccttggttcttgggtcctaaggccttactgacaaaggccaatgggtgaccttctcgtagcagcacaacaccaataccatatcccgatgcatcacactcaatagcaaaaggaatttcaaagttaggcaatgctaacacaggggcaaaatatagtgattgtttaagtgtatcaaatgccactgaatgatcttgagtccatacaaacaacacccccttctttagcagctcagtcaagggcttggcaatcataccaaaatgcttgacaaattttatatagtacccagccagtccaagaaatcctccgagttccttgcagttagtaggcacatgccaagatttaacagcctcaaccttagcaggatctgtagacactcctttgctgcatataacatggcctaggtaagcaatttgctgttgtgcaaaagcacatttgaagagcttgatatgccattgatctgttaaaagcaattgcaggacctgtcccaaatgaacaag

SEQ ID NO: 68873 - DNA, 406 bp, Zea Mays
gagaactcaaacgacaacaggctcaagaccctggtgaacaagattcgaagctatggaaacacaagacaaacggatcacaacgttgtgcgcctcatgttaaggtcatttactataattgatccccatcttgttaatcttatttgtgaaaaccccaggtataccaaaatgtcacccgaggaaatccttggtaagtttgtaagcaatcacatgatggtaaaagaagcaaggtacatcgacgacatcgccaatgtaccttttcctctctacgagccgcaacccgttgcactcaaagcaacggtcagcatggagacactcccaaacaaggtgacgcaagtggaggtggttggacttaatgaggaggaaacgacgcttgtaataaagcgcttcaagaccgcattgaaaggac

SEQ ID NO: 68874 - DNA, 537 bp, Zea Mays
gaaaatgagatttgggcactcggctcggaaacgatcgctcgaaacggggaatctggtgaaattaaagcctggaatatcggatgggcgtgaaatttggcgaatatgttactggaggtgttgggaagatgcctgaaaaatttgggttcaattggagcatttttggctggtttgggcatttcaccgagcatgtggtgtgcgaggatttagggttacggtgaaacggctatttaaggctgtgaaaccctccctaaggagccgagaacctacaagaatgttcaaggcacacagaggaacacataccacaacttggtttcacaggatttcacaagaatttgaaattgacacaaaggggtggaagaggggggcttcactggtggcaggagcacagagagaaagggggaaagagagagaaggggattctcaccagagatggaaggggagatgcacttggacgccgccggtgaagagatcgccggagaggaggggtggtcgccggcgaggaagagatcgcgagaccgagagagaggggcagagaac

SEQ ID NO: 68875 - DNA, 391 bp, Zea Mays
ctctttcccaagtagcttcatcttcaccatggtgactccattgtaccttgcacatctttatcaccttatttcttgtaactcgagtcaaagtgtccaaaatcttgatgggatactctgcataagtcaggtcatcttgaacactcagatcttccattggcagttgctcctcaggtaccctgaggcacttcttcagctgagacacatggaacacatcatgtacatctgacaggtgatcgggtaactccagttgatatgcaacttctcccactcgctttaagatcaagaaaggtccaatgaagcgaggggacaactttcctttaactttaaatctcctcataccccggatcggtgacaccttcagatacacgtgatcaccctccttaaactccag

SEQ ID NO: 68876 - DNA, 792 bp, Zea Mays
accaagggtttatgttcaaacctatgtcttgtaataataatactcgtccttaatatggcatgttattacctttgtggatggttgtattctctattctcatcttcgaatgagacgtggttatcgatcctgtatatgtggttaaatcagatgtgatccgacggactgtcagtttaatcccattttagtgtgtcgtcaccctcggggtggaagtcaatgcacttaagttggattatgcagtgcggttccgccacagttgtgcaagctgaacctggaagttgttccttccggtgaattaagttatatctcggtggaacccacattgcaagagcaaatagtgagggcacagattgaggataagggtgttcaaatgattaaggtaatggtcaagcaaaaggcagagaaatacaaatgctttcgtcaggacagcaagggaatcctatggtttggagaccgattggttgttcccaaggaccctgagctcagaaagaagatactagatgaagctcacctttccaaattctccatgcacccgggtagcaacaagatgtaccatgatcttagatctttatattggtggactagaatgaaaagggaaattgccaagtacatatccgagtgtgacacttgccagaggataaaggctagtcacttgaaggcagcaggccctttgcaaccccttcccataccatcttggaaatgggaggacatttgcatggacttcatagtgggattacccaatacctccaggcaccatgattctatttgggttatcgtggacacgttgaccaagac

SEQ ID NO: 68877 - DNA, 654 bp, Zea Mays
atcttgtcaagcatttgtgggcaagacatggaagtatgtgagcttcatccaagttaactaggtacttgcaacttcaattaaataagtgtaatggccgatgtgtctttgttcatttatgttcatggtgacagaagttatgcttttgtcctatcatggttatttgtcattgttacctgtatgagtaactactagtgtttctttgcctttcaactcctctgtgcaaaaggcctattcagcattacacttcaagatggttgtatgtaaagaaactacaacatcagtcaagaataaaccaatgaagtatgggtacaacaattaaacattacatgaatattatataactacacaacaattattcatgtctttcaacatacacaccaaaataatatgcactattaaggttacaacaacttatggtaccgacatgtctgaattgtcgtcaccatgacaacagatttataaagtttgacacaacaaataactcaaatgaacttataaaattgttctcgtacatgacagggaaaccaaagcactgcaattcaaaaacacccattttagtgaaaacaaaatatgaactggtgcaagtgtttttgtgctccaccatcatacgccatactttagggtcaacctccacttcactcgttcgtttcagct

SEQ ID NO: 68878 - DNA, 848 bp, Zea Mays
gagaccttgaggctcaacagatggtgcaaagactggctttgcacattccagacgaggctgtgttttatcttcatcagggcataatcagaagacatcaacagatatgggtgggtaacaactctactttgagaaccaagattgttcagcttttcatgagtcggctcacgggggacattcaggcatcaatgcaacttatcaaaggatgaagaagatgttttggtggcagggactaaagctagatgtggaatcctttgttaagcagtgtcaggtctgtcagtaggccaagggtgaaaggaagttccttgcaggtttattacagcctttacctgtccctactggtgcatggagggattttactattggctttattgagaaactccccaaatcaggaggatatgacaccattatggtggtggtggacattttttcatagtatgcccgtttctttccattgaagcttccattttctgctcagatggtggctcaagtgattctagacaatgtggtgaagtttcacagggtaccatagtctatagtgtcagatagagataagatttttactagtgtcttttagaagcacttgtttgagttgcttaaggtgaaactagctttaagtactgcttaccacccacaaaaagatgggcagagtgaaagggtaaaccagtgtttgtaaatgtatttgaggtgtgctgtgcaagctactcctcataaatggaagtcctagttagctatggcagaattctggtacaatacctcttatcattcatctctgggttgttcaccttttaaagccatgtatggatatgaagcttatgtgttggctgagcctcatatttagggcatagaag

SEQ ID NO: 68879 - DNA, 479 bp, Zea Mays
agcacaacaagcgcgcaaaatcgaagtcttcttcaaaagactatccgtgcaaaagtcgcctaagggtgcagccggactagcacaacgagtgcgcaaaatcgcaggcacatcacatccgtgcaaaagtctacaccgagaaactgtccgcgcaaagaccgactacaggcgcagccggactgacataataaatgtgctagaccaagtgcgcaacgcccctatggacatagccgaatgcgcgaaggcgcacagcctcatcatacaaactatagttacacacgtacagcgagggcatcacaccttacattggttaaccttcggaatgattcccatctccctatagttaaatagcattatcctcagctcctcaccctcaaaaagacttcgcaactccccctcacctacactcgccccaaccggcgaggacaataattcccgcttgccagccctgcccacacgaagtcgaccaccatccacttcac

SEQ ID NO: 68880 - DNA, 340 bp, Zea Mays
gggcggagcggaaatgggagcgggagggggagcagtggaagctggagtggtggaggtggtgggtacagcggaagtagtggatggctctagagcagcaggagctggtgaagtgggaggtggagtagagacagtggcggaaggtgtggagggagcagtggagcaaggccgagatgcgaggcgacgaactcgataggctatctgatctgaggagatctggagctgtcctccttgctcatcctgctctgctgctactgccgctgcaagtgctgcacgagcggctctgtccatacgacgcttctttctgccctcctactgctcgaggtaaactgtcttttctttg

SEQ ID NO: 68881 - DNA, 1010 bp, Zea Mays
cgtagagctcgagctgtcagagaaccggttcagcggcctcgtgcctcgcgatcttgggaggctgcaggatctgtggaaactgctgctggacgacaacatgctcgaagcgggggacaaaatggaggggtgggaattcatggagtcgttggccaactgcagcaagctaaatcttttcggtctgggtggcaacgatttcaccggagatcttcctgcttcggttgctaagctctcgacaacacttgagtggctttacctagaaaaccttgcgatctccgggagcatcccctcggagatcggaaacctggtcggcctgaaagtacttgttctgacggatactgacatctcaggagcaattcctgatagcatcgggaggatggagaacctggttgagctacacctggacaacaatagcctgtcggggccggtaccgtcatcggtggggaatctcaccaagctcatgaagctatcggcgagcggcaacagcctgggaggatcaatcccgaggaatctcggaaagctcaccgacctcaccagccttgatctttcaagcaaccacctgaacggctcgatccctgaagaaacattccagctgcagtctctttcgctgctcctggacttgtcacacaactccctctccggaccactccctcccaacgtcggaaggctggccaacctcaacacgctgagactgtcaggaaaccagctgtccggccagctaccggcaggcatcagagactgcgtggttctggaggagctcctgctggacagcaactcgttccagggaagcatacctgaggctctaggcgacatcaagggcctccgcgtgctgaacctgaccatgaacgggttctccggtgcgatccccgacgcccttggtagcatacgcagcatgcagcagctgtacgtagcgcgcaacagcctctccgggccgatcccagccgacctgcagaacctgacgtcgctgtccgatctggatctgtccttcaacgacctgcaaggcgaggtgcccg

SEQ ID NO: 68882 - DNA, 392 bp, Zea Mays
gaggcaacgctggatgcaagtgaagggggcactctagagggagccgcattcggtccaaaagctggctctatctcctctggatcctcctctccctcgctgcctacctcattttcttccatgtcttggtggtgcatctccaggtggtcgttggcctccgcaagctcttcctgcacgtcgtggagctggatctccaggatatcgatggtgttatcccggatttccacttgcttctctagagtcatgatgcgctagttcatatgtttcacctgtaggtctttttccaccaattctgaagacaattcgaccacgaagtcctcttgattgttgagggtgatctttgtggactgagtgagcccagtgaggtgtgccatggcgtcactctacaaagcctg

SEQ ID NO: 68883 - DNA, 374 bp, Zea Mays
ccggggtgcatggagaatttggaaaggtgagcttcatccaatattttctttctgagctcagggttcttaggaacaaccaatcggtctacaaaccatagaattcccttgctgtcctaacggaagcatttgtacttgtccaccttctgtccgatcatttccttaataacttgaacacccttgtcaccgatccgtgccatgactatttgctcatgtaaagtgggctccactgaaatataactcaaggcacctaaggaaacaacttctatgttcagcttgcacaactcgtcacacagggtggcaatcttggaatctatactcacacagttacactgggccttccggcttaaggcatctgccacaacattggccttgcc

SEQ ID NO: 68884 - DNA, 1616 bp, Zea Mays
gccaaaatattctaacgaatttcccgaaccttcactgaagtctgctgaacacaatcaggaccatccagggatctctctcccaaggtctcccagcatagaggggagatacaccgcctgccatataaagcctcaaatggtgccatcttgatgctagactggtagctattgttataagcaaactctgccaatgcaagatgatcttcccagctacccttccaagacagtacacaagcacgcaacatatcttccatggtttggatcgttcgctctgactgaccatcagtctgaggatgaaaagcaacactaagggaaagcttggtacccaatgcactgtgaagactctcccaaaatttggatacaaatttggagtctcgatcagaaacaatggacttaggtaccccgtgaagcctaattacttccttcatatacaaggggaccaattctgaagctggattggtggtcttcatgggaataaagtgcgcaaacttagtcaagtgatccactaccacccaaatagcatccctgccctgaggagaatgaggtaagcccaccacaaaatccatggtgatatgctcccacttccactccagaatttccattggctttagcaaacttacaggcctcttatgctcggccttcacgcactgacatacttcacaggcagccacgtacttagaaacgtcaaccttcatccgcttccaccagaagttttgcttcagatcttggtacattttggtttcgccagggtgaacggtgtaaggcgttttatgagcttctctcaagatatccatcttcacctctgatttctaaggcacacaaaggcaacccctgaaacgaaccaaatcattctcatcaatagagaactcccggggtttaccatcgccaaccctctttcgagcttcctgcaataaacgatcctactgctgagccgcacgcactctctccatgagggaagattgaataagcatacgagtctccttactagcggtgccgacatagcacaaagcgatccccaaacggtccagatcagcaatcaactgcaaggccacttttggaaccccggacctactaagggcatcagccaccacatttgccttcccgggtgataatgaatagacaaatcataatctttaatcaattcgagccaccgacgctgcctcaaactcagctccttctgagtgaaaatatacttgagacttttatgatcggtgtaaatgtcacaagcctcgccataaagataatgcctccacgactttagagcaaaaaccaccgtggccaattcgagatcatgagttggataattcccctcatgcttcctcaactgctttgagccataagcaatcactctgccttcctgcatcaacacatagccaagaccaattcgcgaagcatccgtataaactgtgaaacgcttaccgctctcaggcaaagctaggataggggcgtccaccaacttgctcttcaatgtctgataactgacctcgcaatcaccggaccagacgaagagaacacccttctccaagagtctagtcaaaggcttagcaatgctggaaaaatttggtacgaagcaccgataatatccagcgagccccaagaaacttcggattttagagaca

SEQ ID NO: 68885 - DNA, 472 bp, Zea Mays
taaaattcattttctgatttaattatgaaaacccctattaattctggactgcgtatactaatacccacaagtgcaggggttgtttggagaaaataaggaccttatggtaatgatctttgtatacatatggactgcgggttggttttaaaattccaggagggctcttttgcataatctcttggctgaaggggtatggataactactggtcgcccgatggagggcacagatcacattaggacgacatcaaaccggtacgctaatcatgttagctgttttcctgacaggtgaatttggaaacatcaatttcttatgtctcggaacctccagatgtagtcattaaccgattcatcatttccctgtagcagagctaaaaaatctaccttgtccaactcataatcactagagaaaaaatgatcatggaattcttgctctaaatccgccaccaaaaaagagttaggaggtagtgtggtg

SEQ ID NO: 68886 - DNA, 774 bp, Zea Mays
gcagcccctgctctccttccccagtcgcgcttagcctagcctccctcctggctccctgctcttttccatcgccgaggatttggccagcgctatccctactcgcctctaccctggtgctcccctatgtgttgtgcgatggggaatttttagttgcggcaatcgctatctgaacctccaatgtccatgttcttttggtgtgcaatttcaggtactctgcaagcacttgtttgttctgttcctgctctagttctttgctgcattttctgaattagggagcaaattgggaattagaacagcaaatgagtaactccagagagctgtctcttttgaggttttattttgaccaggtttagaaaatcagattattgcaattgctagaggtatgactaactgtccttagatgaattatactgccaaatgcacaattgtgtgttggctgaatgtgccgtagatttctatagcaggaatacaaagctttatttcttgctttctagaactgaattgctgatgtagtgcattgcaattagtttcctgatttgagcactttgtttgtgaaattggattgagcaaatggagaagggccattggtcctactgttactagtgttgtgttgtttcttagttcagttttatgaccttggtctctgatctgtgggatttctgctcggccaacaccagaagtgtgcacacctgcagagaactacaaggactatgctcatgacatcgagtgataaatgaagttgggaggggggggggcaaattgccaaatttgcac

SEQ ID NO: 68887 - DNA, 802 bp, Zea Mays
gtggcgtgccgtttgaccccgcggccgcggcggcctctgccgggcttcccttcttcaacctgccgttggggatgcctccaatgccgatggtcggccacggcggctggcctgctggctcccctggcggcgccggtgtcgggaggccgcccttctcttgacggatcccatagatctatcggcgaagtgcacgcgcgcgaggacgtggactacagactactacgtgtacaacacccaagtagcatctctttctctgccttccgcttcattcccttgcttgttctctcgctcttgtgccattgctgtgatctctgtctctctcatgttttttatgttaacctgtatgggacttgattgtgttaattcttgataagttgagtgtctctgttaatttgaactatgttttgtgaggacatgcattcataaattgatcaaaattcgttttagtttatgtcccggagtcaaatgctcaaggtaatttattaccataaactcttgtgctggtgggaagaaacctcagcttcgttaagttgtctgtcggttgcactggctcttttgtttgtttttcttttccacatatcaaaagttcagtgctactacttattggttcatgaatgttatttaatttgctggtttcatgcttacatatcttttatttctactgatgtttaatttgcaaatcagtaggtttgcatgctttttttttcttgcaagggatccaaataactcttcatatatatataatggggacatcactttattgtttttttactttgttggcgtgtagaatttcactgtttcttat

SEQ ID NO: 68888 - DNA, 400 bp, Zea Mays
gctgaagatgcctagaccatgtgagatcatcaagactttcgcttcattcaaaggccacgtacacttgcgagcaagctaattgtgagctcgcctcggcgttggccagtctccagaaagccgcccctcagagcactgaaggcaagggggatgcctcgaccgacaccatggacgacaccaagcgcgcacggatccgtgtagcttggcgcgagggcaacaaaggagaagtcacgcaaggttcttagcaaacagggtttgtaagaaaatgactccacctagtgagagtcatggatcttgtattcactaagaaagaaccgatgggaatcaagggatacacaacaatgatttcacttagtatggccccgatggtcagaccacagtttattttggtccaagtaccttc

SEQ ID NO: 68889 - DNA, 569 bp, Zea Mays
cgagggctctagttcctgagtgtgagccgcaggttccactgtggactttgaggaggagttctatgccttcggtttcagttatgcatttcagtataggctcgctaatcccctttttgtatagctgaccttcgactattgcgaagttcctgctcctgtgcttcagtcgcttggcctcattgtgatttgttggatggtagtggccttgcaggtatagtgttattggggcccgccagtcttcggccatgatgaggttgacaatgcggtggcccttagtgtcctaggttatttgcaggccttcggggttgcggacggctggcgtgccgatgacgtggtagaacacgtcaaagggcagggcctcgcccttggccgctgctttagccagcgcgtcggcctcttcgttcttgttgcggtcgacatgctgcagggtgaaacccttgaactatttctcgaggctacggatagcggtgagatattgcatgagcacatgctcctttgctgagtactccttttcgatctagccggccacaaccttggagtctgtcctgattatgcatgtagtgacactgagg

SEQ ID NO: 68890 - DNA, 586 bp, Zea Mays
caaagatccttgactaacataattatgactaacataattagagatgacaatggggaattcctcgtcagagaatagcttcccatcattgttcctacaactaaaaagtttcatcgtagggcccaccgctcgttgccgctcacacctcacgcggttgcaaccgctgctaggccccgaaatcgtaatccctaggggtatggggtgtttttatagatgcctggacctggtttgactcaaccggatggcgagtctggccagagcttcctctagctattggaactctaggtctttatatatagcagtagagagcccaagaatgaggtcacggttaacaacaaccagaacatcatgcatcagactttctgtttgcaccggcagcaaaaatagcacatgaacaccttcacaccagcagatgcacgacctccaatcaccattggtagatggcacactacaatacactctcccaatccactacaatatagggcttcatatcgatgaatggcaccaccacgcgatggaaaggaagaggacgaggatcatgtcatcatggaaaacttgcggttagtcgtctgggcagccaccacatgag

SEQ ID NO: 68891 - DNA, 626 bp, Zea Mays
gtagtagataattggcagaaattattaaaatatgtgaaggctatattgtgcatactcaaatcgctctaaatatttgagttgagttgagctttcagactcacgtcgagcgattaaatgatgtagtgggtactcggacatgccgatcaggctacattattcattggttgtgttatgacattggctgagcaattggccgcgccctggcaatacgacgcagtatttgtgtcgttcgaacttggctgcgtcatgtgattgctatgtcgcgctctccattaatcggatcgctcccgttgagtcagaccgccatcgctgagtcgcgtattttttgcatgccctgtaggcactgtctatctgccacgagccacaattgcgcctgttgcgcacgttgcgtggatttatcgtgtaccccaattaccgagccataattgtgcctgttgcgcttattacgaaggcttgctatattgtcgtagccctgatggccgcacacacgttgacgccagatacgctagagctggtactcgtgtggattgtggtgggttgttcaaggtcctgaaatcacattatgtgcaaccttcctaaacaattttgttttcactttatattttgtttgattgtgttgggtggca

SEQ ID NO: 68892 - DNA, 379 bp, Zea Mays
cttgcttgggtgatagtgaatctccaattcataatctttaatcagctcaagccatctcgtctgcctcatattcagctctgactgggtaaagatgtacttcaagcttttatgatttgtatagatatgacagatattccccagcagataatgacgccatattttcagggcatgaaccacaacagctaattccaggtcatgagttggataatgctcctcatgctggcgcaattgtcttgaggcatatgctacaactcggccttcttgcatcaagacacaacctaaaccactgcctgatgcgtcacaatacacattaaatggcttttcaatgtccggttgagctaataccggagcagtggtcaataacaccttcagctgctcg

SEQ ID NO: 68893 - DNA, 682 bp, Zea Mays
ccgggttgggccaactctccttagctcggcccagtatgctttccacactagacaatccatcatagcccaacacagtccaagagcgttgtaaggtgagacccacatgtcggatcttgagctatcccgcgtacttttgccttgtgcactgcaggtggggtcattttgtttggttcttcttttttttatccttgaagcgaactcaggtgcttgattcgtccgcgtttgacgggggcgttcaccaactgatctatcgcgccctcgtgtccctggccctatataacgcaactgcgccctcatctatctcgtgacatcaccgaggagaccagtgcacctagagctatgccatgccagggaagcagaagcacgcagagcggagggcatgagcctccgtcactaggagcgcgattcaccgtcaaggggcctcggtgatcgatccagttggtggtgcaggactagtggtgggaagtcgaggaaatccaatggcgcgaaaaagtctgggtgacggtgaattcctcaccatcgatcatgcgccgccggggatcctcctgacaccgtggatgggtacattcgcgccatctctctggtgagaacccctcccctatgttcgtcgtgttattctttaagcatatcgtgccttggattagggtttatggctcggcagcgtagcaacaccgctctccgg

SEQ ID NO: 68894 - DNA, 929 bp, Zea Mays
ttgctgcgtaggttttgacgtccgggcctgcgcaagcaacccctactgatgatattaattttgtggcggctacgaatgcagtgcctgttagtggaaatttgtctggttctaaaactgagtcttggtcatcaaacggggcaagtttgggagcccgtttttgtggactaaggagtcttcagatgaggatttagattattttgcttcgttggatgtggccacggcagagtccttgcagcagcctgaagtgcgtgaagtgtctgctcccccggctagggcgatgaccgaagagcaccgccggcgaaaggtggtgtcgaagcacaatgttcgcgagatgtcgcgaagtgggaggcgtcgacggatgtggatggaacgatcccgtcttcagctagatcggggtggccaatgagatttgctgtccttgacgttcgggacgtgtattggggagggggatctgcggaatctttttgagggcgaggagttgaagatgttgttgtttaatttttgtgagggaggccttatttcgaaggctgagccgatgttgcatgtttgctgccctcgctctcgtgttgtggtggtgagtgaaaacgctgcccttccccggctcgcaatagagagggagggcaacaagatgtgatttgtattgtttgtgcaatgtggctggcggcccttcgctgtgtgtatgtaaattatgattgcattgcttgttgtgaaatgggatggggacctcgctttccatgatgttggacgcttatgacgcgtacctggttgcatccttaggtggtttttgttcgaccgtgtcagatagcagagactttgcacctttaaggtgatcgtaatagacttaggcggctttaagatgttgcacatttatgcctgtccagctacacccttagacggcttttgctcggatgtcttatagtgaagacttc

SEQ ID NO: 68895 - DNA, 808 bp, Zea Mays
gccagaagaacttctgggcagtcttcgacgttatcgtggatactgcccttgcctcgatccacttggtaaaatattcgacggcgacgaaggtgaacttgaggttcccttgagccgtgggtagtggcccgataatatccagcccccagcgttgaagtggccatgtgtgggcaatcagcttggtgaactgcgaagggttgcccaagcagggagaaaacttctggcaggcttcgcacgacctcgtgactcgattcgcggcgcagattatagcgggccagtagaacccttgacggatcaccttggcagcgagggccctaggccctgagtgagagccacaagttccgttatggacttcgcgtaggatctggatgccttcggtttcggtgacacatttaagcatgggttgactgacccccttcttgtatagctggccctcaataagtgcgaagttccaacttcggtgcttgaggcgcttggcctcgttgacgtcacttgggtggtaatatccttgcaggaacagggttatttgggcccgccaatcttcagccatgatgaggttgacgatgtgatggccctcagtgtcgttggttatttgtagaccctctagatttcggacggctggaatgccaatgacatggtagaacacgtcggagggcaaggcttcgcctctggccgccgcttttgccaatgcgtcgacctctttgttcctggcgcagtccacatgctgcaaggtgaaacccttgaattgtctctcaaggctgcgaacagctgcaagatactgcatgagtgcgaggtcttttgctgaatattc

SEQ ID NO: 68896 - DNA, 699 bp, Zea Mays
gtgaagtgtggatgcaccacaacaagtcacaccgtcaacctgtaagaaaacttatctgatccaaaagcaaattcattcacttgcttgtctacacattttgtatttaatttactcgaaatatttccaaccccggatagcgagtttgacagtgtgtgaatgttagtgtgcacaaggatttgtggtagttatcatattaaagagtaaccataaaaagctatgaccggtatgatgttaatagattatgcttctattcaaccacttttgaagcttgtcatcctcttgcttctattcatatgtggttggtttgatcctaagcaaaggactcgataaaaccaatttggtatggtataatttaatctcaaaaaggttacaaggccatgataatttcatccatgctcatcaagtcgagcaggtgtattatatggtgtatccatgcacaaaggtaagtgcttggcgggtagtgcacaaagttgtcacatccagtttttagaacaaaaccagatgacacattatgtgtgtcttgggtgaattttcacacatacagctgactttattagtgaatcaatagtagaaaagtgaatcattagtagaaagtgtattatataatcgaataatttacttacaggagacacaaatgtcattaccaaagtaaagcacaacagagcagaactaaactctcattgtggatctccatctcca

SEQ ID NO: 68897 - DNA, 846 bp, Zea Mays
ggaatggggaagaggagaggtgatgcacaaactgagaaactcctgcattataggagtagatattatgctccacccccaagctgctgccactgccattctctggaatcaatcatattccttgccaggttgaactccaggacaaaaggttcagattaatgggaagatgcagcttggagccaataataagcctgtggggccgatattgttttctttaagttcctctttgcaacaactctccactctttaaaacaagcagcattgttggattgtcttcattcaattccactgtattagcaacatctagtaattattaatatgatgagagaaaatgacttcaatgactattaagaatctgccaaaagataactacttaattatcatcctacaataacggcgctgtatgattgcctgattgacatgaaataaagaattcagtctggaagcaagttagtgtcatgagctctttggttgctgacttagtggtagtaattgaacacacattgtatgatatatgtaaattaaactgtgtttcagctggtcatataaaatataaagtttaagtagtatgtatacatatctatactactatataaagaaattatatgctaccacggctttaccctccgcattgacactctgctccagcgccgtgccctgtgggccccacgccgaatgcccatgcagcgctctctcagctactgcccgctggactcctatcgtctgcacaaccagttattgcgcatgcctaccacccgaccccgtttacacagctaccacaccgtgcaaaaatagtgcagagcgaacactcgatgtcacggtcccctgctctagaaatttagggctaac

SEQ ID NO: 68898 - DNA, 392 bp, Zea Mays
cagcattagtacacaattgaatcccagaagtcttcaggtgttgatcagcctcatggccaggatgcgaggaggggcaacactgggggtccagcccacaaaaagggaaagtctcaacactagcgccaccacccctatcgtggcaagtcctctgaatcgggtacttcaaaagggagtactcagaggtatcaggttgttcctaagcctgggttggggttggtgtgtttccgttgtggtgaagctcatcgtcgtgctgagtgtcaatggggtggcaggtgctctatctacaacaaggatcccaaggatgtggtgtgtaggaggaatcccaatgggaaacttaaatgggagccaatgacttcttcctctttgcagggcactgtcaacatgatggcaac

SEQ ID NO: 68899 - DNA, 349 bp, Zea Mays
agaaagagcacctccggttgttgtcaatttcttggaagatctcttgtttcatggtcttctaaaaagcaaaattctgttgctctctctaccgccgaggcggaatatatatcggccggtaattgttgtgctcaattattatggatgaaacaaactctattggattatgggatcattttcaagaatgtgcctctcatgtgtgataatgagagtgcggtaaaattggctacaaatccggtccaacactcaagaactaagcatattgatatacgacatcacttcttgagggatcatgttggaaagggagacatctctatatattcaattggcatggatgatcaattagccgata

SEQ ID NO: 68900 - DNA, 1611 bp, Zea Mays
ccactgtctccgaggaagggggcgcatgcgttgatggcacgcaatgtcggccgcggtgggggcgagcggggcaggtcgcaggggaggtgaatgtgcagtgaggggggaggcaggggcgaggacgtgtggtggaggccgggggcgctagggtgggggcacggtgtagccctggtggacgcccacactgaacccttatagagcagtagagatagggcaggtataataggagccctggacttcggataataggagacctggtcggtaacggggtcaggggagcgtacaggaccactggaactgaacgcgtgggtgttcgaccggaccgtgacagggaacgtgcaggttggacgtcatcgtgaagtgtgttatgggtaaaacgttggtcagaacggcaagggtgttatcatatggtagtgggcggaattatagggattagattcctcatgcagacgtggattcagttaattgtggccgcggaatttatggatcttccatggagcataaaggtggaagggatagataaaatatggaataagatgttaaaagatatggcgtaacacatatacgctataaatgttgtgtatatagtatataccatttggtataaaactttgagttaatatggcgtaaatagtgattgagggatatttggattctaggtgacttgctccattatcggtaacagtttgaaaaaagtggaaataccctggaaagggggatgcggttacacgtttagtgtagcatccatcattgtcttcatatgaaaaaacataaggcttcagactgcatcaatcgttggcggtggagatggccaactctggataatcgccggcgatggcaggagatggagttgtgattcgtcaagacactgaggcagtcgttgatggtaacttaatggttacaccacctcatgttctaatggggcctcgaatcaacgagataagcaatggggaggaaggagaacatcggattcgacctccgatgtccaatattagctcccgggagatggatacacctcaagtactacattcacatgtaggttcaattgttgtatttgatagttgtttgagtagattgttatgagcataatcatttgtacactctacattgtcaatgaattacagcgaacaaccattgatccgaatatagttccaatagtagggatgactttcaaggatattgatgatgcatataaattttataaaaggtaagcatatgaagttggatttcccttgaaaaaatatagggacaagacgttcagtaagtggataaattgttcacgtgaaggaaaaagtgcacctagaccaaatgaatacacctaggttgaggaataggaattctggacgtacgcaatgtaaggctggaatcaaattaaaaatatgatgatggtaaaaaatgtggtagctgcaaatattgaactagtgagcataattatgatttcatcactgacgaagcagagaaacaacatctacgttgcaacaaaagtcgggatgcagaattcataaattttgttgatgcaatgcatgatagccgggtgccccagcattgcatagttatatcagacatgcatgatgggccagagaacgtaccagtaactgctcaagatctaaa

SEQ ID NO: 68901 - DNA, 483 bp, Zea Mays
ggaccgctgaaggtatcttgaaatttgaagcgatacgacagcctcacaagttctagcttgtttcctttgtctttgagctttggcatcccccacccatgttgtgttggaagaactttgttcgctaaatattcttgaaccaagtctcgagtacttatatgctctgccacaactctgaattgcacttcagttacttggcatggggagcctatcttcatgaaacataacggccttgtgatgccgaaactcaaccttagatgactcatcacaatatccataatttttccctcctcttcttatcatctttctcgtaaaaccattcactggtccagccagtaggccatttggtgcggtatccaatcacgggagcctttgtatcctttcaatatgccaaattatagcacccgaagttcttgtgcaggccatctgctctgacctttgtctggcaatggagttcatagactctgcagaagccttcggcattag

SEQ ID NO: 68902 - DNA, 462 bp, Zea Mays
gcaactttagaagctggggagagagttatctctagtatgagagaactctattctccttgccgtggtctgaagatagagcttgagacagggagggaaacctcactggaccctgccttttaagcctgctgaaatggacagatgtcccatgaacctgtccaacatgcagtggagttgtgtcctcagggtgccagccacacttgcacttcattacgtggctcacatgctcactaccatataggttcgtagcacagctcaaagacactgaatatggtcatctcccaattacagcacacaaatatcacttatggataggttccaataggttcaaagtcttgatattctgtccagcagagggtggtgtcgtaagacctcgatcctacactccatactcatctcaactacacacacaaatatcccctttgtccccaactgcagacgacaaccagaaccattaaaaacccc

SEQ ID NO: 68903 - DNA, 438 bp, Zea Mays
agaagactgagaagtataaatgtttccgccaagatggaaagggtatattatggtttgaaagcagattggtggttcctaaaaataaggatctcaagaagaaaatcttggacgaggcccatctctccaaattctctatgcatccgggaagcaccaaaatataccatgatctaaagcctttgtattggtggactagaatgaagagggagatagcccagtatgtatcagaatgtgacacctgttagaggataaaggccagccacttgaaataagctggagctttgcaacccctgtccataccttcgtggaaatgggatgacatcagcatggatttcattgtgggtctgcccaacacctctcgtcatcatgattcgatttgggttattgtggaccgactgacgaaatggcacattttctccctgtgcacaccactgataaggc

SEQ ID NO: 68904 - DNA, 289 bp, Zea Mays
gaaaaccttgaaccaatggaagtctaaaagatgtattttgatgggccaccgaagatacaaggggctagagacatggtcctcttcatcgcctctaaaggagaacaactaaagtacatgctacaattcctattcctggtgtctaacaacacaaccgagtatgaggttacacatcgttgtctcacttggaatcaaacaactgctggtaatacggggattctctagtggcgacaagtgaggtcaacaagcactaggaacgctccacagaagtcatgaccaagtattgtgttgc

SEQ ID NO: 68905 - DNA, 608 bp, Zea Mays
gcacagcccatccgcacccgcgcgctgacaggctggcccacctattcagtcacgtgcgcgcttccttcttccctttacaccaacatgtggggcccatttggcatcgcccacaatctctcgcgtgtttgagttagtgtcactggtaggcagtcccgcacgtcagccatccgcgcgctttcgtagtctctagcgggtgggccttgtctgcgcaaccatctgctcactggcgggtgggcccattgtcacggtggacttctaaccagctcgatcgcgggcagcgtaccgacctcaccgtgatcctcgctgggactagcgagctacgacactgtaccacctcgcccataaatagcgaacccctcggcctcgcccactcctgcttcccttttctcgcggtcgttcctccacgccatccactacgcagctgcaatccgcacggaagtacatcatcgccgccacgcgattcgtcgttcacaaggccgacaggcaactctgtgtgggtgcgggcagtgcgggatagaagtgggtagctcgtcgaggaagccgcgggcgcaggggtgccagattcgacgggactttcttaccggagatccacggaccacgcaaccacg

SEQ ID NO: 68906 - DNA, 494 bp, Zea Mays
aaaagatctagcgggggtggatttgttcgcgggcaggagcttatcagttgtactcgattgtcgtgcgacgtggccgagcggtcgatgttgtcgtgggacaccggcgatctcaattgtgccatgctgtggtcctttcaccaggtaactataattgtggcaagcctagagttactatccttgagttgttatgccaacgagcgccacgacaaactcaccagtgcaaactcttgtcaccgccatgatccaaatctccttcaaattcgggacaaccgtggccagcctctataaattgagtgcttcccttgctctgcccccttatcacgaacccaatgcaactctaaccacggcctgccatccaccatagcccgagcaattgcgatttcccccaaataagttctctgcgccaccgcgaacaccacctccgtcgacccactgctctgtcccttcaaccgtctttctaaccgtcgttcttgagtcctggtaagttgctgaag

SEQ ID NO: 68907 - DNA, 1003 bp, Zea Mays
agaagttaccacagagcattcattgctaccgcgctgttgtgctgttaaaatttttaaccatagccgaagcttgatgcatttccaagcaagcgcttcgtcacctgagatcagtttcggctcaaagaacttgaaaacacaaatggccagggtgagatccactactagggtatgtcatgaaggaaaggagaccgaaaccgccgagacaacaccaatttcagaagtgatgaagcgatcaggtctggttgtgtcagagaaaattgctgtcgaaggtgcctccaataccgaagctgaacaaattgtagctggaggtgaaagtgacaatgaaagtgaagaatataatagcatcctgaacccaacaaagcctagtcacattgagtttgggaagtctactgtaacggaggatgacatggttatgatgaggaaacttggttgtttcggggaggctgaaagcaagcttgttcggtttgctggggaggaaattattccgaaaccaaaagaagacgaagttgtcgttttcaagagcttctttagagcaggacttcggtttgccttgaatgacaagataggggaggttttgaagaacttcgagttataccttcatcaattgacacctaatgctatcgttaggcttagagtttttatatgggctctgcgaaggcaaggtatggatgctaatgccgaagctctttgccgggtacatgaactgaattatcagacgaaggctagggcagatggtcttcataagaacttccgctgctacaactttgcttatagaaaagatacaaaggctccagtgattggctatcgcaccaaatggacaaccgagtggatgaatgaatggttttatgtgaaagaagatgagaagagatgggagaagctgatgactatggtcatgaagcctatgagactaagcttcgggatgaccaggcccttgtgccatatgcaacttggctctccatgccaggtagccgaagttgagtttagggtggttgctgtcaaaaat

SEQ ID NO: 68908 - DNA, 637 bp, Zea Mays
cagtattcatgaaaccatactgaaggaagcacatgattcagcttattccatccatccgggtagtaccaagatgtactaggacttgaagcagaagtattggtggtatggattgaaaagggatgttggtgcacatgtggctgagtgtgatgttttccagagggtaaaagccgagcatcaaagacctgttggattacttcacccgctgaagatacctgagtggaaatgggaacaaattggcatggatttcattgttggtctaccccgcactcctgcagggtatgactctatttgggtgattgtggacagactgacaaaagtggctcacttcatacctgtgaggactaattacacgggagccaagcttgcagagttgtatatggctcgaatagtttgtctacatggagtgcctaagaagattgtgtcatacttgggatcacagtttacttctcgggtttggcagaagttgcacgagtgcttggatacatagttgaattttagttcggtctaccatcctcaaactgatgggcagaccgagaggaccaaccaagtactgaatatatgttaagagcttgtgctcttaagcatggtggtagttgggataagagtttaccatatgcggagttctcttacaataata

SEQ ID NO: 68909 - DNA, 291 bp, Zea Mays
caatacccggccggatattgcttttgcagtaaacttgttagcaaggcacagttctgccccaacgaaaagacactgggttggcattaagaatattttcagatacctaaatggcacaaaggatctaggactcttttacaagagaagtaatgatcctagtttaattgggtatacagatgctggctatttatctgatccccacaatggccgatcgcaaacaggattcgtattcttacaaggtggaactgccatctcgtggaaatcgtctaagcagactttggtgaccacgtctac

SEQ ID NO: 68910 - DNA, 360 bp, Zea Mays
cgaaggcacttcttcaattgagatacatggaacacgttatgcactgcagataatgtttctggcagttgaagtcggtatgccactggtccgcattgttcaagaatgggaaacgggccaatgtatcggggtgctagcttcccttttaccctgaaatgattcacacccttcattggtgatacttttaggtacacataatctttgacttgaaagagcaaaggtcggcatcgtttgtctgcataacttttctgccgagcttgagcttctttcaagtggtgtcttatccgttgaacctttgcttctgtctccttgaccaagtcaggcctgaaataccaccattctccaggttctgaccaatttaag

SEQ ID NO: 68911 - DNA, 600 bp, Zea Mays
aaataaacgactagtatttgttatctataatatctgtttgtatgcgatccagtttcatccctacctgtgggcatgcagcaaatggaaatcgggcttaacaagcttagaaataatataggtttgacttcaaatggaagcttgccgctacaagttactgtggttatgcaaatggcaggaatcaagactaacctgtccatcaagggtagcacttccatcaataccccaccgcctcctccacggacgttccaccttcgatcataagaagaagcgccccaggaacaggaacccaactctaaacggtgacgcaccagatccagtaacctacagtgcacgaatagaaaggtgagcggaggtccttcgcggtggacaccaaggacgggggagagatgccgagtaccttgggcagcatgtgactaggaggaggcaggatggcagagggcgctcacgagaaaagcgcgtggagatggaacatggcacggtctcgcatcatcgcatcccttacggcacctagccggatccgagtgctcacctcctcaagcgacatgaacgtggatgcagcgcctccagggggttttgaaggggcagtgggggggacagaag

SEQ ID NO: 68912 - DNA, 567 bp, Zea Mays
cgcgcggtttccgcggatctcgttggcagtagtgaatccgagcgcgaggtaggagatgtgcagtgcccggtccacgcttcggaagggaaagcggctgcgccaagggtcccacatgccggtgagccgcgctatagcaggggtgcggctgggctgagcgaggtgccgaggtgattagttggtgggccagaaccagagaggagcaggtgggccgagcagaattggcctaagtcgggatatggtattttctctttttgtttttcatttccattttctatttaaacttcaaatttgttcctagttccaagttcaaatccaaattcaaattcaactcctatttttgaacatcaaatttcctagtgaatataacttctactatttacaatactattatttattattttcttgttattcatttagggaaggaataaatggtttctcattttctactttatgtttttatttagaattggaggtcaagtttaaattatgattacttatttcaataaaatgtatttcccccaaattcataagtatgagatgcccaatttctcacatgattgttttaat

SEQ ID NO: 68913 - DNA, 450 bp, Zea Mays
caataatagggctaggtggggggatgatttgcgtgctgggcaacgctctctccagggggatgtagccagtttcagttcaggacaggggtacggttctgctgtcagcaaggtggagggttcatcgtcggggccaccaatggcaggtccatcggctgaagctcttgcacaagctgtcgccctgattaatcatgctcttgccaaacctgcacctgaaaccgctcctgatgtaaaaccagtgcctttggggtctcagtttctgtctgatgcaaagggtaagaatgttatgcaaggaaagggggatggggatcaaggagtagttggtgatctgtttggtaaaggcggcggaaaagagaaagcgccatattgctggaggtgtttgacgaagggccataccatgcaggtttgcaccgctgatctgtggtgtgacatttgtcaggctccctctcacaa

SEQ ID NO: 68914 - DNA, 515 bp, Zea Mays
ctaaagtacaagattctcccttctcttttttgtttgaagactatttcttgcagcatgaatttagtgctaaagtggcctgcaggcctgtggccgtggcatgaagcaagagcattagccattagtttgagccataccaaaaaaatatttcgttctctgccactggtaacaataatgtatggtatatctactttagaagaattatcaattcgattccctaccatataaccagctacaacctaacctttcatagttttcaaaaattcataggccaagtcatactctataagtgcataagcccatttaccaactttttttataaaaaactcaatctattagcaatttccataataagagctactctatgatatcaataggtttttgaatcaaaatagaagttcaaaagacaagatttttgaaaactcaattggtgggtggtccatttgctttggcctctaatttctccccctttggtattaagcacaaaaaatggagaaattcatatggcctttcttatt

SEQ ID NO: 68915 - DNA, 315 bp, Zea Mays
gttctaattgtccataatatgtgtccttccttagatatgacaattttttattgcgatcaaacacctcagttatcgcgtcgttgcaaactccactattttgtcgggtgcttttaccatcttgttgtactgtgtagaaagtgtatccattaatgtcgtaactctgccatgtcgctacgatggacgagggtccctgtgccaaccgtttcacagtgtcattctttggtaccttgttttcacaccgcttttgaaaccaatcacaaaactctttgttatggagcctcacaatgtcttcgtccaccatttctgggtttttct

SEQ ID NO: 68916 - DNA, 364 bp, Zea Mays
cctacctgccccatgtacccacacttatcccaactatgtccctagttatggtaacaccaatacccattatccttgatgataacaccaaacttgaccaatataataggttatataacttatccaaccaatctagaagcaaaacaacaagacagactctgcttaaacttatttaactcataaccacctattaacctattttgtttacctaagaatctaccttcactacatgtcccaaattcaaataacaacttcaagaacgaagattgaagatgatcgacctcatcaaatcaaggaaggataagattcaagccagatcttcaaaggaatccagatccacaatcttggatggagtgttcccttacgc

SEQ ID NO: 68917 - DNA, 616 bp, Zea Mays
ctggaacaatgctctgatttagcaagtcgaagggggtgagcaccggtttgatcatgcccgttggctttcgatccgacggactgacgtcatcacccccactcggtcgcccacagaggcggtgccctacgcgtgacgatggttcgtcggcgacgccccgtatgacaattccgggcaccaatccctaccaactactaccacgccacgaggagaacaaggcaaaggtaatggctgaagagtcaccagcgtaggcgatgcatggaagcgggttcacagcaataatcggggccgcggtaggacgaaacgacagggagtaattgcttgacccctgtttggttctatggccttgttgtagcatagttaagttctatgggtcccggtgagcccttctcaaccgacggtcaaggccccgatgacgttgtgagtaagcgacccgacggtggcccgattcccattgtggcggctcccttcttccccggaactctcggtggcgactggattctccactcgatggtcaaggggcgtgttgcagacgcttatatagggccagggaacgggtcagctggctttgttggcgcgacaccatgcgagattcgctccgcgtttgttgagctcgccc

SEQ ID NO: 68918 - DNA, 708 bp, Zea Mays
agagtgttgaggcaacaaaggaatcaaaatactaagatgcaggagcagaagaattcgccggcgaactgaaggaggatttgtcaaatagtgttaactttgtagaaggaggaggagaggcagacctcgagcaaatcaatttggtgaggtccgatagatttgcaaaacggggagtatttgaggtcccactagtcagagggtccaatgcacacttaaaccaagtggatggagtggaggcccaagatattctcttaaatttagctgagaagttattagaataaaccttgttgttgagggaaccaattttagttgaagaatgtttacaaaaagacttataatgacctgattttttacaaagtaggcatttaaccggtatcttacactcgaatttggtatgacccaaattctggcaaccggcaaacaatcctgacttatataggcccgggtgatatatgggcctccaagcctatctatttgcattccgagaaaaagaagtacccagagatttaccaccattataatctaacggaaagccattatgtcgacccattgaatgccgagaatttgaaagttgaattcccggacttttcttctgagatgaataatgatgatccattttcttcgctagggaggccaaatgctgaacacgattcaaattttcatgaactcttccaaagacctttgatcacggaatatcatctttcattcttg

SEQ ID NO: 68919 - DNA, 549 bp, Zea Mays
cgggtgggagcccagaaatgctccatgggccgcttgatgggcctcccgatgacttgcccagcaaggcttgccctcgggccgcaaccaggttggatgagctcgatttagggagatgaagattggatgatcgagttacgtgtagaaggagcgctgatgcctcgtcagggaggttgcacatacccaaagtgctggatactcggagataactcggatgaaggtcgaccgaacttcggataagctggattgcatgccacgttaaaagaatagattcaaatatagttagatagtcatcatgacttgtgaagggataaccctctggtcatctatataaggctgagggggtacccctatgaaggcatctcatcttgtcacatcacatcacatcaccacctcatagctcattagccttctcatagcaaccatgccaccaatagatcaacaggagaactcaccctccaccacccataactcatctataaatcgcgtacaccagtgatactcaaatactcaacctcgataggatgtagggtgttatgcattctagcggcc

SEQ ID NO: 68920 - DNA, 557 bp, Zea Mays
tgtacagtgtttagatttgtgttgttgggagatgaaacagttcagacttttgaatgggctttcaattcattcaaaacatgtatgggatgcaagggtccgagagttatgctaacaggtatgtggtatgtgaatttgttatgcaaacacgtcaaataatttattgtgatagtaaaataatagtttgtgagcaattgcagatcaagatcctgcaatgccaattgctctgagaattgtatttccaaaaacaattcacagactgtgtttatggcatgtccagaacagatttatgccattcttaaatgaattatatgcaaggtttgctgataaggattttaaaacaacattccaatctattatacatcatccattaactcctcatgagtttgaatgtgcctgggaaatgatgctagaagaattcaatctgcatgaagatatgactctatgcaaattatatgaaataaggaaagaatggataccagcattttttaaaaatgacttctatggggtaatggtgtctacacaacgaagtgagagcatgaacagattagtgaagaaat

SEQ ID NO: 68921 - DNA, 942 bp, Zea Mays
cgcaacagggcacgctgaggaatgcaacacggtagactagacaaagacagacccaaatgactggagggagccgattatcagatatataataaatgaggaggagttggatgataaggccgcaacagagcacattgcaaggcaatcaactcactatacgatcatagaaggtctgctatataggataagtgcaggaggagtcctcatgaaatgcattcactcggctatggggagacatctgctggaggaaatccatgtgaggcagtgtggaatacacgcaacatcaaagaccttggtaggaaaggctttcaggtcaggtttctgttggtcgacaccaaagaaagatgcagcggacttagtccagaagtgcgaggcatgctagttcctatcaaagcaacaacacttaccgcttaacatctgcaaactatccctgtaacctggccttttgcatgctgggggctggatatgatcaggccattcaagaaagctcagggaggatacactcatgtactcgtcgccatcgacaaatttacaaagtggatagagtacaaaccaattgcctctttgacctcagcaaaagcagtggagttcattcaagaaataatgttcagattcaggatacccaacaacatcatcactgacctgtgatctaacttcactagcttagagttctttgatttttgcgagcagagaagcattcagatcaagtatgcatcaatggcgcacccgagagctaacgggcaggtagaaagagctaacggaatgatacttgatgcgctcaagaagaaagtattcgacaagagtgaaaagctcacaggcaaatggatcagggaactaccgtatgtagtgtggagtctgcggacccaacccagccgagcactgcatgggaacactccattcttcatagtgtatggatcagaggcagcagacctaatttttggagca

SEQ ID NO: 68922 - DNA, 724 bp, Zea Mays
caggagttgagccacttgaacagccgtgaatgggtgttttaaagccaggaagtgagcatattttgttaatcgatcaacaaccaccaaaattgtatcataactttcatatttgggcaacttctaaataaagtccagtgttatatcctgccaggcacctgcaggattaggcaaaggctgaagaagccctgcagggtggatcctttcacttttggcctgctgacacacctagctttgcctcacaaagttctccatatctccttttaaccccttccaatagaacaacttttttatgcattgatatgtcgcctggacgccagaatggccaccaagggcactgtcatgcatagttgacaccagcttggtccttaaagctgagttgttatcgatccatatcaattcacctttcttaatcacccctttactgagctgaaagccttgatcatatggactgtgtaaactgagtttggcgagcaactgttgcgcttagatcagtgaaataagaattgagcacttcatgcatccatagaggttgcacctcactaattaaagtcataaccagcaagggtcccactctggaaagtgcatcagccacaatattttctttgccttgcttataaactaccttgacctaaatgcccatcatcttagccattgccttcctttgaagttcaaaatgtaactcctgttgacctaagaagctcaaggctccatggtctgtgtgaat

SEQ ID NO: 68923 - DNA, 880 bp, Zea Mays
aaacgccctccaatgtgcccttccaggcgctctgaagaagatcctaatggtacagtgtctgaaaatatcagtgatgcagtgcacctcgccgctggtgaccctcgcgccgtgatccgcgccggtactacgattcgtgctctctggcgaggggattgtcgtggaggggtaaaagatccgaagggggagtggatcaagccgacgtcgccgtacccacttgcccggcgacgtggtcgtgtgaccatcaccatggttgccgctgttcacttcagttgcgctacgccataagccgttttaccacgccgttgtaggtcgtgaaggctaagcagtgaccgccgtagacccttgcccagtaaatgccacgataagcgactccggtgactcacccctctctccggctacagaggtttcccttttataatttggagccaccactcatggaggctataaattcagtgtaccgttggctccgctaggttgttacgaagccaaagcaccagccctcgcctccgatcgtccaccatagcgccctaatttgggatttccccctaatccactcttcgcatcgccgtgagtcacctcgtcgtgctcaaccacctccaggtccactctcgccctcctggttcatgtttcgacacgctcatgtgcttgtgatggtcgtcgaccccaccaattaagctagtcatcgggaacacctcggttttccctcgggtctcgctgtcatcgtgggcagaagaattcagtgccggattaactcaagtgagggatggattaggattgccaaaggtggaatttggtatagaccgacttagggcatgaatggttgggtgttgtggccggtagaagctcgctggagcgcgcacgccgtcgttcaccgtcgggg

SEQ ID NO: 68924 - DNA, 818 bp, Zea Mays
cgattgacttttgagcttcgacatctgccgcaaccatcatccgaatggctgaggagaagaagatcacagaccccgcaatgtctaggttttacgaagctatggagaagatcaacacagaaaagagcaccaatgagatgctggctggattgtctgaaggttccagcgatagcgatcattttgacgtggagagtgggaatggagatgtcaaagatcgaccgtgtaggccgagccatgttgtttttcggaagtcgactatcaagcaaggccaagtcgaagcgatgaagggcaaatattttcatgatgtttctatagtgaggatcgagggggaaagcactgttccccttcctgaagctgatgaggtagtggttttaaagagcttcatgaaagctaggcttcgctttccagtccacaagatgttggttgaggctctaaagacattcgagatataccttcatcaacttacccctgaagctcttatcaaagtgggggtttttatatgggccatgaggagtcagggactggagccggatgctaggtgcttctgcaatattcacgagctaccttaccaaacgaaggcaaccgggaaagagcaatatcataacaacttcggctgttacagcttcgtaccccgctctgaggcaaattaccctgtgcctacattttggaagaagtggccgggctcctggatgaagcaatggttttacgtaaagattgacctggatcaaagggaggatgtgaggggcatcattcaacgtcctatatggtcgcgcttcggcataagggggccatcaatcacaattgggaatgaagtgcaagca

SEQ ID NO: 68925 - DNA, 908 bp, Zea Mays
cacaggtttacgcgaatggtgaaatctagcaaggatggtaaacagcgatcgcgttgaacaagcttttagctgggcaaatgcaatgaatttactgtgaagtactggagcggtcggtgactggaagaggaggcagggacgacggtggtactgtaattcgtcttgccaaccggtgccatcctgggtttcttttctttgatcctggccggcacaaaggtagcagtcagtcggatggagccagccaatcagacacgcaatggagcacttgggcagctctgttaacgacgacaccctgagactcgttaaaacgccttggcgaaggagaggaagaagataaagggaggaacagagaaagggagaggagcagaatgattctattcttgttgtttttcctgcttcccttcggattatatgccttgcttatattgctgttatagctatgacctaaggtccattactcgatccattctgctcctttgactcgaagattaggcttgcgaatgcgacggcccgaccaccatttaaacaccttcttttggctcctttcctcccgtgcccccttcaccttgtggtagcgctggtaggtctctgacattctcctccccttgagaagccgcttgtcctcaagctggcgcggctggaaatcgagttcaaagagcttcttcatcttcctaggacaacagtgcttcatccgtagccgacaagtgaatgaggacctgttgtatggacttacctcctcgaatgataacacgccggtcaaacacgtgttctggtatctgaagaggaatggacatgttaggcaatactgaactaacgttttgggagtccactaaatgcttgagttgggatacatggaaaactggatgaacagtggatgaagaaggcaactgcaatttgtaggcaaccttgcc

SEQ ID NO: 68926 - DNA, 360 bp, Zea Mays
acagaatttggtcgtaccaaaaaatgaggatatcctgtcctgcccgtgtgaccaccagagcagagctgtgagtttccttctggccagattaaagtgctattcctcagtgttatcatggtcttaccgcaaagattccccgtggtttcacaaaaggtaccgtcacctaaagcacacacttgagtagtaacagccgcagggcattacaactcttccagatatccatttaagcaatcagtaacagccgctggcgacatgtacagttcctcccttgcatctccaagctgagttcaatagggtaacaataacaataatagaatggcaagctgtccgaatattcgaacctcgaagctgagtgcaagg

SEQ ID NO: 68927 - DNA, 606 bp, Zea Mays
caacagtgataaaggctacaacaaaaatcatgctcattgtttcaggcaatgaatttgttctgttgtttgtttcaacgctctgtagaccacaagcattaagccaaaggtgatgttatctttcttttctccccaaaatcctagcttgcagtttttcggttcttcccaaacgtgagaccatgcaaaaccagaatattatgcagaggtgcgaatcattttggttgaccctcatagcttatcgctaggcctaactataaatctactgcaactgtgcaaggccagcttgccgattccccatttcttaaagatatatcacaggatgaaaggaatcacgcccgagcactcattctaccttaacctcttgcctaatcactgcatgcataagaagaacaagagaggagaatcctctacattcctaaacgaccaattacaactaatggcaagcaaatcggggttgagggcggccggaaagtgggaacgtaggagggggtggatgggaaggggaggctgctggagaaagcctcgccgccgccatcttcacggtagcgcggaactccgacggacagctccggcggtggcaaggcagcgatggagcgcgcgcggggggtc

SEQ ID NO: 68928 - DNA, 530 bp, Zea Mays
cgggtaggcgattggggagtttccgtcctcgcgcatatgtgcgggacgcgcttgctctttttcgggtcacgtataaatgtggttcatgaacaggtgtctgttggagcacgaacaaacaggttttgccccccaaactggttttggggagttttagcttggccttttagagatgctctaattcttgacgcagctagcgacaatccctgactctataactctgttattagttggccgacatcgatctcaagtgaaaacacaccaagatttcccatgcatttgccctgtgtattctgagaaaccttacaatgcaagcggagtaatgcctggtaacctcagtcagaagtttgtcaaacatatacctaaccgccttcttgtccgtctgatccaacttgatcgtgttccctacatcgttctcgccatttttccgaagggacctgctgcatgctcagttatgccatagcggagtttgggagccaggcaatcatcgtcataggtatggcctcgaagttgatggtgtaatgcatactttt

SEQ ID NO: 68929 - DNA, 499 bp, Zea Mays
caggtatcctagtatttggaactatagcccggtgggtccggaaacctagggtccggtcctagagaatggacgctcgtctcctggggtggtccggggccgtgtagctgcttagcctggttccgtaccctaagcctccacgccccaccactctgcgatgagtgtcttagtatctggagctgtgatccagggggtccgggcacacggcttggctccctaggctaaatcctgcaggttctgttgtgtgaatcaaaggatggctgataccagacgatgggccctatgggtgtgctactaacacttcctagctgaagctgtgaacaggtccaggtcccagtcgaggctacctcctgggtccgaggcaccaactctttcttaggtatgctggtatccagcctcgacacgtcgagcctatatcgcaggggggccaagcaccaggagaggagttggtaaatccacacacagcaagaacaaatactgcacagataagagctatttaatt

SEQ ID NO: 68930 - DNA, 314 bp, Zea Mays
aaaaaaacaagacataaattaaaagatcatttaatgaggagacccttcgagagatttaaactttaaagtgttttctttacaaattagaactagtttccaaagtgagataaatagtaatattaattttttaggtattcaaactattttattgcatggtgaaatacgttacatgattttattcatttatacatatttaggaacattgatttaaatagaatacctaaaataaacctcacataacatgttgacatttctgagtactgcattcatgtttcagttcgaattcgaaaacccaatttggatttgaaataaaa

SEQ ID NO: 68931 - DNA, 654 bp, Zea Mays
ggagagagccgatcatcaggtacataaaaaatgaggaggaaccagatgacaaaaatgtagcagaacgcatcgcaaggcagtcaactcattatactctcattggggaaacactatacagaaggggcgcatcaggagtcatcatgaaatgcattctctcagctacagggaagcagctgctagaagaggtccatgctgggcaatgcgggatacacgcagcgtccaggaccctggttgggaaggtcttcaggtcgggtttctactggccaacagcaaagagtgatgcagccgagttagtccagaggtgtgaagcctgccagtacttgtcaaaacagcagcatctactagcacagcaactacaaaccatacctgtaacctggtcgttcgcatgctggggactggatatgattggacccttcaagaaagctcaaggaggatacactcatgtactggttgctattgacaaattcactaaatggataaagttcaaacccattgcttctctaacctcagctaaggcggtggaattcatacaagacataatattcaggttcggaataccgaatagcatcataaccgacctgggatccaatttcacaagctcagagttttttgatttctgcgaacaaaaaagcattcagatcaaatatgcctcgg

SEQ ID NO: 68932 - DNA, 710 bp, Zea Mays
gcacactgtgttgaaggccatcaaacatgcatgtgctttgtttccacctgcaatcgtaggtatcatgatgccgaagcatgatcgtatgggacgctgaattatgctcttcacatcctcctttcactcggatcattttaacataaaaccattgtttcatccatgaccccggccattttttccgaaacgtcggcacaggacacctcgcatcagaccggtacacggagctattacatccgaagttgttatgatattgctctctcctaattgcctttcgtctgataggacaattcgtgtatattacagaagcagttggcatctggctctagcccttggctcctcatcgccaaaatgaaaattccaactttaatcaaagcttcaggaatgagctgatgaaggtatatttcaaatcttttcagcactttgactagcatcttatgcaagggaaaatgaagcccagccttcataaaacttttgaataccaccacttcgtctgcctcaggaagaggaacagtgttctctcctctaaccctcactacggatatatcacagaaatattttcccttcatcgcttgaacctgcccttttttaatagtggattttccaaaaacaacatgacttggcctccatggccgatcttcggcatcatcgttgtcactctaaatatcaaaactttcgctgtcacttgagtctccagacaacccaactagcat

SEQ ID NO: 68933 - DNA, 653 bp, Zea Mays
tcaacaggaatttatttatcttataattctagcataaattgtagggaaaactaattataaaaggctgagaacgtggccaaaatagagaaaaagataggccaatagaacacggtgggctggcaaagcgtgactgcaggccatgatgcgcggaggtccgccatgcgtggaggtttgtttcctcagcaagaatgagcttgataatctccactcaatctcctatagtcccatctaatagccgaaacggccgtgcgtgtatgggaccatgccatgaaggggtccatggcgccatgcatgggaagaccacgcgagggcgagcgcatgtaagttttttctttctttttattttttaggtgacgctgactggtcaagtcgccatacgaaacttccaatcccattttcacgccgccaacgcgtggaaggcaggtggtatggccacacatgccctatgcaggtaatactgccccttgttttgtccatgggtggggctccatagatgtactcatcgcgtccctcggccacacgagaggacgacatgaggtaacgccatatgcgcaacgcacactggcagcgagcgagaggaggggtcggccctgtccgcctgcctgaaatccatctattgcaacgacaagaccactggtggctcggtgcctagg

SEQ ID NO: 68934 - DNA, 786 bp, Zea Mays
gtttccgccgccgcggtcaattgcgtgttagcgcagcgccaactccattgtgtctgggcgggaagcttcgccgagtccccacggagctactggtcgtctgggcggaaggaggggaccactgggtgaccggaatttcgccgccgcgcaaccggatctgttctgcgccgtgggcagactatctcggtgcatcgattgctgttgagaacgccttctccaatctcgccatggcctagtagtgctatcgcgcctgtttaattagaaaatggggccagggttggcgagatcggacgactccggcgaggttggggcatggcgccgccgttctgtgggggaaggaaaggtggaagatgcacctgtgcggttcgatcgttgttgaacggccgagatcgattgataggataccccttcgtctcatttaatcctagaggtcggatctagatcgtgcgactcggtggctgatcaaggtattttagatctgagtcgtcagccatcgatcggacgactggcatggcatacagattcgcggtgagtcgaagctaatcctcaccgtccacttcaaatctggcggcccatcgtggcccgtaccccttcgcgagcacattagtcaaaagagaccctctatttctatataatcaacccgtcgtccactccgtagtattctgagtcttagaacattatgcgcagaagcccctggccttttatgaatttgaggcccagtccagtgccgtgttaaatgaataaatgagttagaaaattgatttttaaatacaaaaatatatgctagaa

SEQ ID NO: 68935 - DNA, 478 bp, Zea Mays
catcactgaccaagtttcagtgaaccaaccggatgcactatatccgggccaagaatagaaacatacgtaattttaatcttgcacaaacgaacgcggcctaaatgagacctaatctgctctaacactgttaatgagaagaagaatgttgtctctacactttcactgtcccaaaccttggcgctattgtacacctatgactcaaggacgaaacctgcactcatgcggtacgtgaaattcagcatgtcgacttcaacagctatatgaccaaatgtaatataaattgatttgtgtgttcttgtcgtaagtaaaatggaccgcggcccatttaattaatagattttaatatttaatgatcaatataaatatttggactaataatggttgctagtgtttattgttttagtttaaaagaagcagcatgaacttggacggaggcaacaaggtgattaagaaggttaacacctcaaagcaagacatt

SEQ ID NO: 68936 - DNA, 494 bp, Zea Mays
gaactacagcaaacacaaaggactagggcaattaacctttataaggtcgacatgcagagagggagaggagcaagagggcaacctcattattttcatcgtctgatcactgtgtaaaaattctgaatctgtggactaaacttgaattctagtttagaattcaaagttcccaatctgttacataactatggtagtatgactgtacaaacagtatgagagggaaactacaggctcctgagcaggtaggtgggaaaacaggtgaatctgaagccaatgagtcatcattgctaaacctaggctcataccgcgtgattggtagactgcatgaccatagaagttgcgcccgcggatacgtaaagttgtatttgtttggttcgcttctttatacatccaagctccacacatgcaagaaaacgggcgcagccaggcccgcgaggaacgctccaagcgagcgtacgccggcatgcaggctcatggtatgcaacgacacagttcac

SEQ ID NO: 68937 - DNA, 368 bp, Zea Mays
gatttatagtggttcgactcgcctctatagcagttgaacgagcctgcaccatttgaactattgatttgacaatatctcaaagcttgtggtgataattttcaggtttagcctattcaccccccctctgggctattttaaggcgcaataagtcggacgagttaagttggacgagttaaaccggacgagttaagccggacgagctaaatcaaacagaaaacacgtttctatgcggaatcagccgagagagatcagtcgagacacaagaaattgaacagaacaaggaactcaataccagcaatcaaacttcaaatgtaggttgagatcaacagaaactcaatacttaaggtagataaaaccaacaactttat

SEQ ID NO: 68938 - DNA, 911 bp, Zea Mays
gcatcgtgcgccgtgttacccgggttcgccctagatcttcggttcgtgcggggctccgccttgtgagtcgccgggatctcgggtggactccaccttccatatcgatgctacggataaatacccagggtcgtggaccctccttgaccgaaagagcatgtagacccgtagatcctgagggaagtggcgccaccatggccttgtgttcaccagtgtcgctcgcttgtgagaactcatggcggcgtacccacatggctccgtgggcagcgcactccactgccgtgcgcaggttggatgcatgcccaggacgttcgctcaagcactgagaacacgcgaatgtggcggccatgcgcggaagtcgactggtgtgggtgaaattgctccctggactcctacagagtcgttgttccgccatccgccgtgggcaaggcccactctgctctgatcgatggtatgctaccaacccttgtgtttgtactcatcgtctctgcgtgtagcgtcgctcgaatggttgtttggggccctcagagtggtttgggcactcgccggcgatgtccgccgccgcggcatacgctctggcaccgccggcgtaggcttaggtagaaggcctcctggccgttggatcggttgggggcgtctaggattagatcgggatggcggtaggatattgatcgcagatccgcgaagcaacggtttagattagatcacgtataccccttcgtccacatagaatctcgtgcaccgtttcattgaatcgaagaagttaatcggggtcgttgggatctgatcctacggcggtagcgcgcccgtaccccttcatccgctcattttgcgaatgagaccctattcttttaccaaataaacccgcagtccgtcctaatggtaacctgtgtcttagttatttttgcgcatgg

SEQ ID NO: 68939 - DNA, 406 bp, Zea Mays
aagcatctcattacctaattcatatgtagagtaattcatatatagaatttacctaacttggggttgctttgtgtattatgcggatgatctgagaccagtacttgacagtcttattatatccttgttcccccttattattgtttaatttatttctttactattcacccatttagcatcctctcaaaaataaaatgtatccatccctttactattccacactagatggcaagtctcaccagctggaagctgttgctgattcagtttgccctacctgatgcttcgaatatttgtagttattgtgcttaggtgtatgaccttaacgatgattttaggtatcttgggatgattctggatgttcaggtctatcccactgcatgctacacaagtcaattttgcaggttgctct

SEQ ID NO: 68940 - DNA, 403 bp, Zea Mays
taggaggaaaaggaaggggaacattagcgtcttggtttgggaaagatggtggacttgttcctctcgatattaccgccaaggtaaagccgtataggggaggatagaatttcggtactcagatcgcacgatggtgggattgtagaaattgaactagtaggtaaagtgcacaccactgcaaaaagtcaaaaatctattcaaatagtctgtgtccattagaatggatgagtatggtatggttaccacaaatagaatatttaggtgttcattcaaaaaagggagtgcgtgtatgtgtcatcccaattaaaggagtttatgtaccacgggggtgaggtgcccagtggtgtttcataaaaaggtactcttttctagtgatacttcagggtttaagccactttttccaaaa

SEQ ID NO: 68941 - DNA, 458 bp, Zea Mays
caggagtggaggcgccgaagacacaaaaagatctagcagcaacccccaagagaaaaaggatggctagtgtattagatgtgctggagacaataaaaacttcaagctctactccaggaaaaattgccaaggcttcgaaaatacagattgaaaccgagacaaagctgaccgaagccgaagctatactgagccaggccgacgccaaagctgggccttcagtgcccgctaaggagaaatcctgggaaactggagaaaaggcagcggaagaagaaggtatagaacagattttggctgaaaaagctgccgctcctgctcccgaagcgtcttccgaggatcttgattatattattcgacacacttcgggaaaaagattatctgaagaagaaatttttgaagctaaacactatgcccgagaattgaaatacccaaaaggggtcttagtgtttaatggcacagatgaa

SEQ ID NO: 68942 - DNA, 343 bp, Zea Mays
atcacccgcagtccaacggagttgtggaacacgccaatggaaaattttttacagctgtcaagaagatgctcctcgacgaaaaaagggcaggtgggccgatttgttacctgaagcggtctaggcgctaaacacgactgagtgcagggcgactgggttcacccctttccgccttctatatggatcggaggccatgaccccacaagaaataaaacatggatccccgcgaacagtttcgtcagctgtccccgacgtggacgaaccaacttcgaaggatcttatcgatggagaccgcgttttcgctctacaggctctaaataaataccaagcccagacaaaagcatgg

SEQ ID NO: 68943 - DNA, 382 bp, Zea Mays
atcaaggttagtaattttatatctcttgttgatttgattaaatttctctagtgtattttattttagtcaaaaccgtctattcacccccctctagccggtgtcctagatcctacaagtggtatcagaggtaaggactccattgtttctggatttaatcatcctagagttggacaaaatggctagtaataacaatgtgcacattgggaagccactgcattttgatgggaacaattatgactatgggaaaataagaatgtcaatgcatcttaaagctatgggaggaaagatttggcctattgttagagatggatttgttgtattaaaggaagatgaaccatcactaagtgataatgaaaatgttctaaccaatgatcaagctatg

SEQ ID NO: 68944 - DNA, 724 bp, Zea Mays
catagtgctaccaaatacctcatgaatggtatattcccctctcttggactactgctgaactgaaggaggagtcgccctgcaaagcctcatgtgagtaggctctgcgatattcttctaggtccctcatgcaccagaactgtggacattggtcctggacagatggacggatggattgatggagactagagataaatggatgcatgagagggaaattggcagggaatcacgccattttattcccagtcgtcccagtgttgcagaagcgaagcccaaccattccagtcatctgtactgtactgtgcattcagcaacaagaacctacgagctagctagtgagcgagggagacaaaggtagctaggcgcggagagaagataaaaggcaccccggcccggccctcttgatttttctaggttttcacttgtgaattggattttgtctggagcagttggatgtgctccagtctagcccagattcttttattactaccaacccaacctctccatctccatggcaatcacagaatagaagatcatatcatgccgccacacactagcagcacactcgcacctaataatactataagccaggcaggctagctagcagacctcctcacctccccggcgccgctgtcgctggctcaaaaatgtggtaggtcactactacacggtccacaagtttatttggacctgccagctttaagtttttactgaggttacaccgggc

SEQ ID NO: 68945 - DNA, 366 bp, Zea Mays
tggccagactgcgagtggctaataaaaaacatgtggtactaatgtaatctcttctgcagttttgtggtcaatttggaaactaagaaacgaattgtgctttcaggggactgtttggttggggttgaagatggtactgatcaagatttctaggatgctacgaagatgggctgctatgctcaagcacgaaacaagtccggaggagttcgcgaggaagatggaggagatggccaaccagccaccacagattttgtgggagacatactcgctagtgtcggtttgcttgtagtgttaggatttcaatgctgtcagtttaaggctccgtttgaatgtactagagctaataattagtggttgactaaaaaattg

SEQ ID NO: 68946 - DNA, 484 bp, Zea Mays
cgcgaagtggtaggcgtcgtcggatggggctggagcgaacccgtcttcggatagatcggggtggccaacgcgatttgctgtcctcatcgtttgggacgagtattggtgagggggatctgcggaatctatttgagggtgaggaattgagaatgatgttgttcaattatcgggagcaagggcattatcccaaaggcttagccgatgtagtgtgagatgccctcactagtaagtcccctagctcgtaataaggagggaggggagagctcgattgtatttatctgtgcggtggggctggtggcccttcgttgtgtgtatgtaatttgtgacttgtattgtaatgtggcatgttacccttctcttaccgatgtgatgtatttatttgtgcggtggggctggtggcccttcgttgtaatgtgtgattgtgcggctgcacccttaggcgacttttgcacggagttgtcttttagtaaagactgtgtatcgc

SEQ ID NO: 68947 - DNA, 728 bp, Zea Mays
ttttgctcggcttcgagtgataggtctagtaggaatgttcggtaaggttgacgatgctggtatagtcgcatcagaagtcgagcggcgtggcacgggtgccgttccgtgtagggaggcgcaattcgctctaaatcgtgccccatcgttccatggtagttaaggtacccgtaccaccaactctctgactctaacgatcaatcgatttgcttaggccggggaggtcttgattggtagctgcaagtggagtgctggtggtactgatgcgaacggagcttgggagtcagattggtgcatatgagggtgagcgatcggctgcttgctttctcatttctaaattgatggagcgaagattgagctgtctataacagccctggtgttacgagaactaaaactttggcatgacatcatatgccttaggattacattatgtatgatacacctaggatgcatccactagactaaaatttcaaaacaaacttgtgatgtgatgcttgtgtgatgattttacttggtaaaagggattcttgaccctagtttagaatatctctctttaaggattagaaacatgtggcctttgtgagatgagtgctaaaggatgatcttgacaagtgggtagaaatgctcaagaaatattagcttggagagcttaagtgctacatgtaccctagaacactcaaaaccctaatttggaaccctgaaaccctaaagagtgccctattgggtgattt

SEQ ID NO: 68948 - DNA, 459 bp, Zea Mays
gttctccgtcgtggttccggtttcgagtgatcggggaggtggtttagcttggacaggggtaggggatcatggtggaggggtcaatttggttggagggtgctcgggacggccggtccacggcgaggtggcaggcgtccgctgtgacaccccagtgtcacctagggttcttctcagtactagctcaagtaccatcatttcatgtaagccaaattgagcaagaagcaccaaatcaacttaagaataagaagatacactaagtttgcatctaaagaatcatgtccaaaacaaatgaggttttcaaaaaatggaaaaatgttgaaaccataataccaaccctaaataagccatttaagtagaaatgaagaaaagggatgaaagaccaggaaaaacatgagatcatggcttaggccaattataaaaattgaaatacactaactaagctacaataaatattataaa

SEQ ID NO: 68949 - DNA, 758 bp, Zea Mays
cttctatatttgacggtaccgagcccaggactcgattagcacctcactgacaaagtaaacatgcctttgtaccttgagtacgtagccctcattttccctttctaccactagtgccacactgatcacctgggtggtggcggcgacgtagaggagaagggcttcgcccgggttgggtgtgaccaggaccagtggtgaggttaggaacgcctttatccggtcaagggcctcctgggcttccgtggtccaagaaaattggtcactcttcttgaggagcttgtagagaggcatgcccttttcttcgagcctggagacgaaacgactaagcgtgatgacgcgctcgaccaaccattgtactcctttgaggttttggatgggcccatatgccgaatggcttcaatattttcttggttggctttgatcccgtggtaccatgaagcctgggagcttaccctttgggaccttgaacacacacttctggtggagagacatccttaagtctataaccaaatttaaggagctttctcatgtggacattaaggatgggggtataacacagctttggctcgaccggtgggatgacagaacaccatcaaagacttacctggaattattctcattcgtcatcaacaaaaacgtttccgtgcgacaagctatgtcatttgaacatccctaggatatgttctatacgccgatgtctttggaggctttccaacaatattagtccctcatattatctttgcaaatgctgcagattacta

SEQ ID NO: 68950 - DNA, 974 bp, Zea Mays
aaaagtaggaggccccttatttagggtacgtttggttcatgagaaaagctgctttctgctgtgaaaaattattgtgagttttctgttgtgaaaaagttgaaagtcatttggttcaaactgtgttagttgtctactacgaacaaactgtatattgtttatatgtactttatttaattatatctcttaatcaatatatctaataatttataatgtttttaataattttaataacacttaattattcttaatcctttttagttcatatttaccacatctctttattaacatgacgaacatggataagcagcaaaggtagggtttaaactactttcaaatttgtactatagaaaagctacttttctaaaatagctacagaaaagttgaaccctttagttcagtttctgcttttctaaagcagaatcaggttcaaaaagctgaaccaaacacacccttctcatacctcattcctaagatttcaagttgtacttttacattggttctattactgtcctttctcttccaacatttcaggcccaacacaaatgtattttcccttcttgcttgtgcaccaccttcaccactattggtttctaactaatttgatgccactacccccaacacctgaacccatatttgtaagtggattaaagagtccaggaggaaccctaggtctagcctctagatccctaatccactcgtcgatgttcaatcttattggcagtctaccttgctttacctccacttggtacccttaaggatctagtttgtttgagcttgacctccccatggtaccttctttagatcccgtctgcttgagctccaactccacaacatacccaagatcaacctcccaaccattatcctcacatagggatgacaatggatgtcatttatccgcgtacccgcggataaaaaacccgttgggcacggttttgggtacgagtctgtacccatggatatggatacggatagca

SEQ ID NO: 68951 - DNA, 669 bp, Zea Mays
tggtagtcgtcgacaagttttctaagttcgcacatttccttgcattggcgcatccatttactgctctgaaaatcgcccagctgttcatggattctgtttaccgcttacatggtctaccagaggcaatcatctctgaccgtgacagaatttttaccagtacattttggaaggagctgttccggctgtctggcacagtgctgcgcatgagttcctcctatcacccacagtcggatggccagaccgagcgggttaatcaatgtctggaaaccttccttcgctgttttgcaagctctcacccacatcagtggcgtaagtggctgccgctggcggaatattggtataacacttcatgtcattcttccctgggcacttcaccatttgaagtattatatgggcgttcaccccgcagtctgggagtgtccacctcggacgccgttcctcatgctgatcttcatgaatggttatcacaccgccagctcatgacacaaactgttcggcagcacttgctccgcgcccagcaacgtatgaaatatcaagctgacaagcgccggacggatcgtgtttactcggtcggtgacatggtgtatcttaagctccaaccatatgtccagagctcagttgtcgcacgtgccaaccacaagctgtccttcaagtactttgggccataca

SEQ ID NO: 68952 - DNA, 958 bp, Zea Mays
catggcagctgtctgtactgaagcattgttccggtgtgaccgatggctgcagtttcaaagcgaagatttaaaaaagaggacggtgcaggaagctcttctaggcagaagttggaactttaacagcggatgccttgaacagcttggaattacagccgggatattgtccagcgatcactgatcaggcgacacctttcatcaggatgatttgctgatgtacaaacagacagacaaacaagtgtgttctcatggtcaatgtgcttacgactgaccatccactgctttcgcttgccaccagttcacccttttccgcacgtttgtaatcgcgcgcgcgcgagagagagaggcagtgtacggcttgtcttcctcagttctcacgtttgcaatagcgttacccctgcacctctctctgctgaattgttgagcaaggcatcggtttccatttcacctccaatcaggaggagatttgtgatgcttccatgtcgtgacgtcagtgctcccatcaccccaacccccattccagcagtttattaaagtttagaattcgtcaaagtagtcagggttcaggtttgttgtgagattaatgtatgtcagaggaaaaatagaatagcattagtggcggatacgggcagagcaggaggtgatcttggagctcagctagctgctggacaaagggccgttgaaaacacacaataggttagggggatgcgaggatatcgtcgaagatccttgcacatggcactgactgagctagtgagacctagactgtctttgtctttgagacgaatctaccgattatattaatacgatagagtttaaaagacgtattagctaggttcttcgtcgagaggacatacacgagattaataagagaacaaatatgcagctttggattgtatgagcagccgagaataaatatatagtactagaaaaaagcaagaaagaaaaaataatacattgt

SEQ ID NO: 68953 - DNA, 460 bp, Zea Mays
cccacgagctctttcctccctgttcttagctccgccgcaagaatccatgtgtggccagtgcaattcgagatagctcgtgtcttctacttcctcgtttgagtattctcaggtacccgtgatgcttcccgacctatccaattgaattataccatcattaatcgctcggaacatgcggttcctttaagattctccgctgtcgccatgggcagagggttgtagagctccaaattagaaattgagtgaggggaaatactccttaggggtagaatctggtgtaaactaaagattagcgtcggccttcgccccctccggccggtatagctcgccggatttcagctgtcgtgcggagcgccatcgtggacctcacctgtgaagaaatagaacgttaggggtgtttctgcaatctgtcagtgactcgcgtaaacaatgtatgtacccacttgcggttatccaaaaggac

SEQ ID NO: 68954 - DNA, 416 bp, Zea Mays
cccattggctctgatgttttgacgaagaaaagtgcaagaccatcggcaaagaggtcgggaagcttttggcggccagatgcatatggtagatacaccacccgacgtgggttgccaaccccgtccttgtcaagaagaagaacagaagctggaggatgtgtgttgactacacaagtcttaacaaggcttgcctaaaggatccttttgctctcccgcgaattgattaggtcatagactccaccgtggggtgcgagtttctttccttcctagatgcctacttggggtaccacaagatcgctatgaaggaagccgaccaacatgcaaccaccttcgtcacccccttcgagatgttctgctacgtctccatgccttttggtctgaagaacgttggggcgacgtaccaatagtgtatgctccag

SEQ ID NO: 68955 - DNA, 566 bp, Zea Mays
cgggtttctgttacaggtgtttaatcccatttactacttaactacatcagcgcagtgtcacgtgcccaacaaatcatcaacgagtgcatggtgttggccagcttctgtcttcaggttgtcctcttcttctcaggcttccagaagcgccacagctcccgcattctcagcgtcattctgtggcttgactacctgtcggccgactcccttgctgtcttggtcctcggccgcctcactctccgtggcggtggcaactagctagccctcttttgggtgcccttcctgctgctgcatcttggagggcaagagaccatgatggccttctctatggaggacaatgcgttctggaaatgccaccttctcagcctaaccacccaggtgccgacgaccatctacgtcatcagcaagcaaatgcatggacatgaccggcggctcgtggctcccatggtgctcgtattcgtctccgggacggccaagtttggcacgcgccattaccacataaccccaggttttgtattgctatgctatccaccgcttcgtctctctttccctaacatcagcagcgctag

SEQ ID NO: 68956 - DNA, 854 bp, Zea Mays
caagaatacgtaataagtgaagaatgacaatcaaggttggccatgataaaaaaagcatggattgatgcaaattaattggcctattgatagttcctaatagggaggcaaattaggcaatctatttctctgtaaaactaaggcatctaattccttctagtcaaaacctatgcaataaataaactatcttacatgaaattatggtttgactaattgttcatgtctgtattgcaaaagagtaatgaaacataggttctaaacctatccactagcctaacaactaagctagggaggtaaagcacgcaatgaaggtacacaacacaaatgcaaaatcttaagtgtggtagagatacaaactcttatcaacgactctgatatttctgctaagtattgagaagcgcataagcttctatctattcctcgattgagccccacacaagggaagcccacgcgagaggcaaactctcattcaggtaactctgtagatagtcataggccttttctacatgcaagtggtgctttggtgtggactctcctggatgctctttgttgtctgtactatcaatttttttgctgaaatgtgatgggcttcattccctctaatacagggggtggccacaccacaaacacagttggtgtgatcttataagattacaagcccatccgatacaaataatacaatggtggatacaagcaccaacgattaagacatgactaattttcacttctaatcacaaggacaaaacctagaccaagttatttgcagggatataactaatctaaacactttgcaaaacacctacactaatgatcatgtgatatttgagcacctaggtgtctagagctactaggagcga

SEQ ID NO: 68957 - DNA, 613 bp, Zea Mays
gcagatcttcagctggttgagttgacgtggctcgtcgaggcggcttcagtactggtggtgtcgtcaagaatttcttcagtgcatctagagcttcctgtgcttccgaagtccactgaaacttatccactttcttgagtagcttgtaaaatggtaaacctttttctcccagcctggatatgaatctgctcagagctgccatacatccggtaagtcgctgaacctttttttgtgatcgtggtgcttccattttcatgatggcttcaatcttatcaggattaacctcaatttctcggtggctgacaataaatccgagtaactttcctactggtaccccgaaaacacatttttcgggattaagcttccatcggtaccgccgtagagagttgaaaaccagatgcaagtcctcaatgaagttttccgagttctccgttttgattaccacatcatctacgtaggcttccacacgcttgccccagtgatcagctaagcatgtttgaatagctctctgataagtcgctccagcgtttttgaggccgaccgacttggaggtataatagaaagcaccaaacggagtgatgaacgctgttttttcctcgtcttcctttgccaaact

SEQ ID NO: 68958 - DNA, 1163 bp, Zea Mays
ctcatatagtaggttgctcgatacttcagttgacaagcagagaggataacacctattcttcaatgtttaatctcgttaagaggacaaaagcttataatatctatttataaggcatggtagtcgacaaggctggttgcaatgtacttgatctttcagtggttgcagtagttctctagtgaacgtgcaagcacattagttccactaaggattcttggtgaagctagatctaaggtgtccgaaaaacgggcagggtatgaatagggttggtagcatatgtacacaacaaaatgacacataagcataagttgcttacctatgtcttggttatggtgaagctaaatagtaactccaagatccgatagtcctagaatggatccttcaacttgtgtagcttgcggtcatgtactattatagagagaatgaccctaagactctaacaaaggtcacaaccaccaccaagattatgcaagtttaagcgaccaaggattatgatggaacaagcaagattgtaaagggaaaagcataggacgacggagctatactagatggactcaagcactaacactaatggtggccaaccattcaagggtccactagggaaggtcttcactcatggaaaattctaatgtggtttggttggttgtgaaacacaatgctaggtgaaacaatggctatgagggcttgaactacgatagagaaattggcatgcgttctctctatgaatgatagcaagaagaatggaggaagaagacaagttctaggaggaaataatggtgtggtacaattacataactaaagcagtggggtgtcatacacgacgacaacacatgatatgaagcatttccttgtgcacatgggcacaacatggcaaagaggaaggatatgtgacaacatgtggcactaaagttccgagtatgtcgagcatctagttgggtgaacaactaacctagttaaatgaccaaatgattgaatcatttttattatggttccagacttcacaacttctctattcttctcatgatcaagaataaaattttatcgatatgtctaaacgaaagttttaaatttgaacaactccaactaaattaagttgggatacctttgtatgccatttgtacctaaagctctataaatcttggttcaacttcttactaagtttccac

SEQ ID NO: 68959 - DNA, 599 bp, Zea Mays
gacacataggttgagcgcgtgagtggaaaagcgagggcataagcgtgttaatgttcgatcaggggagcacttgcacatgcacttaggtgtgggtcagtatttgtaggcttcgaagggctcagggtacaaaagccaccagtatataaaataactcgcttcaggtagttcccgtcaggtacttttcttgttccaatcctggaggcggctggagttcattgtataagcttctagtttaattagtgtgctttttttccctgcctgaatacgctttacattaaggcgatcatatatatacatgctgaataaacaatactgtatgtgattttttttccttttagagaaaaatgtaaacttaattggattccacatgatggctacgaggtgcaaagaacctaaaccggagcgctataattatatatatatatatatacacacttagctaggtactctgcttgctttatggatgcttaaataaggtacgttgatagaaacaaaaagaaatggagatgaaaggaacatccccggggcttaaggacagctcaagaatatgtcccttaaagcaagcaccgcttgtttgatatgcatagcatcaagcaaat

SEQ ID NO: 68960 - DNA, 862 bp, Zea Mays
catcttctagctactcatcgattggtgaacacaacattgacgaagattacaagctcaagattcaactgagcgccacgatctcctagcacatgctttccactcggtttcggttgaagttctagcctattgttctagcacatgctaagggtagattcgtcatagtttctcgatattccatggttgatgagtgttctgccctccttatccttcaacttgtaggtgcctaatcaaagtacgtctccgattatgaatggcccctcctagggtggagacaacttatgctgatctttgttgctctgtacccatttgagtatgaggtctctcgcctccagagttcttccacatcgtaagtggggttctggcccgggttcgtaggtcatgagtggatggaggaccgacttccccgtcatgactcgatgctaggcgtatttaatgtggtcattcatttatgatggggcagtccgagtcgggtgcggaatccactcgagtggttttctcttagttcgcccaaccccgggcttagtgccttggggttactcaggggtaggtccttccagggcagactcttcctctatcctttctctaactcatgagccctaggggcctggggatcctatcctcaacacatatcccatgcacaccagataccatggtgctcgattgaaaactatgaagtaaatacaagccgacttcatatcccatgccatgttcgacgtgtgaccaggcatgtccaatgcattctaaaaaaaatctacaccaagagcactttcttatatcttttgaattgttctaagtctcaaatgttttcccaaacatgttgagcatagttagcattttcaaagtattttcaataaacattttg

SEQ ID NO: 68961 - DNA, 463 bp, Zea Mays
tcccaaaattagacgccaccaccgtaggactctataaattgatgccccagtgagttccgctaggtaattacgcatccaatgcactagcccttgcctctgattatccaatagagcctcccaatttcatatttcccccaaatccgtttttcgcgccaccgtgaacacttcgccgtggccagccctctgcaggtcaattcaagcttctttgattagtgttctagcctccctcaagcctcttgttgctcgtagacccattcgattaagctagactgcagtaaatcatcttgaacacctcggattgtctctgatttttgccgtcgtcgtgggtagagagatttcggccagattcgtgcaattagttgagggattaggatcgcctggggtaggatttggtgttagacaatttagggcactagccattgcgtattccagccagtacaggttcgccggaggcatactcatc

SEQ ID NO: 68962 - DNA, 445 bp, Zea Mays
gtagaagtgaggcgcgagtgacacgacgacgaaaggaccgagccacgatgaccgccggtgaaatatctccggccagacctcaacctaatccgcgaagcagggaattggctccaagttatcatgtcgcggttgttcctatctccaattcatctgatcccatccaaatccatagtacccctgatctttcttcagatatttccctgagccactgatcttcattgcttcactgaaccgaccacttttctccaccccctttctcttgattcttgttaagaacaggttgagctctattaataagaagtattcgccacataatggtcttcaactttactacaggatccatggatcaaaactgtatggattctaagttatggtgctcgcaattcggtcgcatttcactatgaccatttctgttttgaattcagttttccgtagcactttgaac

SEQ ID NO: 68963 - DNA, 326 bp, Zea Mays
ttaattgtcgatttcccaaaaattgtatgacttggcctccacggccgatcctcagaatcttctcccccgctttcagcatcataatcatcactgtcactggtatcttcagacaggccttccaggatctccttagtaatcttctctgtatttgattttgccattgactcgataaacccagctatgtaaggattggcagccttcttctcttcaaagagcttctcctcttcagtgagcttcgtctcagcaataacctttttgtcttgagacatttttccttcggaaatggcgaaaaagtgtctttcaaaccgaagcttaggaagcttgag

SEQ ID NO: 68964 - DNA, 780 bp, Zea Mays
cgactggacaatgggtgctgaaaaatttgttcacacacgaagctgaggcgtcgtcttggctagatccatctccaagtccaacaaccgaagcgggagggtctcgaagccttgtaacacatatttgtatattaaccactaagttcttcatttgtaacacacacaaatatgtacattcaatgaatacctgagctggatgaatcaaagggaatgtggcggaggtggcggcaatggtggaggcagcgattcaagttccagagacgacatcccaaaggatgacatctggatgctcatttgttgtgctagttgctacaaattatagacaagtaactactgaggaagtacgatacgtaacatctttgtagttgaaacgaataacatattactttaacttacttagagaaaatcctgttgttgggtctagaggttctcatagtactcatccttctacatctgatgctcaacttgctacctctgatactcttcttgttgcctcaatatgtccctctgatactccgattattccataaatgttgcaatctccatgtcttaggaggtggaacgagaatgagacacctgaggggacaatgatatgaatcgtcgtccttaatgtcttagttctctagagtcaatcgaagaatcaaatatacccacctacaggattgaaccatagacttagtacaatcacaagcatataagcataacataaaaatcataataaaaatactctcaacatccatgggcttgtcctcctgctctagcatataccgcctctaggtcgat

SEQ ID NO: 68965 - DNA, 1412 bp, Zea Mays
gaaataaagggaaccaactttttagaagattggaagaatgaatcagctcaactgaatacatgtttgggaaacaacgacagtctcgaagtcaaaccaatgctagaagacctcatatgcaaagctcaacgcctagactcagagacaacgagacttgtggaaaaagcccgcaaggaacaactcccggacctcaggacagatgaacaaggagccctttgattcaaaaatcgtctgtgtgtaccaaaaggggaggcatgagaagtcctgctcgaggaagctcacaactcagcctactccatccacctaggaactaccaagatgtacctagacctcaaaaccagatactggtggagagggatgaagaaagagatagcacagtatgtggcctggtgtgacacctgccaacgaatgaatgtcgagcaccaaaaacctgcagacctattgcaacccctcccagtacctgagtggaagtgggaagaaataggcatggattttgtaaccggactaccccggacgcaaaaagggaatgactctatctaggtaataatagatcgcctcaccaaggtagcccatttcattccagtgaaaactacctttgggggagccacccttgcccgaatttatctcaaagagatagtcagactccatggcatcccaaaaaagatagtgtcagacaggggaacccaattcacctccaaattctggacaagccttcagaaagctatgggcaccaagctagatttcagcaccgcttatcaccctcagacagacgggcagacagaaagagtcaacaaagtcctcgaagatctattaagagcatgtgtgctagcgttcgatagaagttgggaatctagtctaccatacgcggagttctcatacaacaacagctatcaggccagcatcaagattcaatgttcgaggcattatatggacgtaaatgccagacccctctcatgtggtccaacgtaggggataaagcactagaaggacctgcctttgtcaaagaggcggaagagaaagttgccctaatccgcaggagattacttgaagctcagagtcggcagaagagttatgcggacaacaagtggagagaactcagatttgaggaaggagacttcgtctacctcaaggtctccctaatgcgtggtgtcaggaggttccaagtaaaaggaaagctagcaccgcgattcgtcggaccctatcccatcattggcagagtgggacccgcaacataccgtcttgaactaccagagtccatgactgacatccacaatgtgtttcacgtatcccagctccgcaaatgcctgcaagcaccagaaagtcacatcgaagaagaggcattgcagattcagaaagatcttcagtaccgtgagaagccagcaaagattcttgattcagcagtccgaaagacccgc

SEQ ID NO: 68966 - DNA, 486 bp, Zea Mays
ttcacacaaccgctagattggtcaatgagggtgacgctgctgacatgactgagacagctctgatttcgaaagtgatgagggagtccgacattgccgagccaagtactagggaagaatgtctacttcgggaaaaagtaattctaaagccgaaggtgaagccaaagttgatggtgacgaagaaaatcccaatattctttgtcgagtaagcctagccacatcgagtttcgaaaatctactgtaaaggctacatatttagatgtgatgaaaagacttggatatatcggtaagaaggatgatgatttaattagatttgctggtgatgaaatcgtcccggagccggaggatgatgaagttgtggtgttttagaagcttgttccacgttgggcttcggtttccgatgtacgaaatgattgttgaggtgctaaagaagttaaaatatatctgcatcagctaacattgaatgtaattgttagacttagcatttac

SEQ ID NO: 68967 - DNA, 503 bp, Zea Mays
cggaactcccagctccgcctgctcggtgacgtggccggcctaccgctcgacgtgccgctcgtgcccgaccacctcgtgcaactctacggtatgctcgagttctgaggtgtgacgtgagtgcatgaactatttattgttatcgtgcgaattctgctctgtcgttggtgttgcgctatgtttgctgtatgtatcctgtgttgtgctgatgtatcatccgtgtatgtttgtcatgtgaacaacgtactgtaagtgtggtgttaatgccgtttgtggtcgcataaagaatgtatgatatgttatgtttatgtatgtaactatgtataaataaggcatgcacacctaaagatatgcagaagattcacactagggttgttcggttgtgtctagttgttaggtgttggcactccttgtgccctttcttctccaccttcccattgctccaaattaaggaaaaaggtaagcattgtattcattgatttagtggttattaaccagaaaacagt

SEQ ID NO: 68968 - DNA, 387 bp, Zea Mays
tcataaaacatttaaaaccacttttctctcgaaggatgtagagcactagcactttctactaaacatgtccccaatttcttaggtataacaaggacaaggcaaacaacactaaggtaatcctactaggagcaataatttggccaaaacaataatgagcatttaatgtaatggaagatgggagcatggaatacttgtctttctctggagttttcaagtttgaaggactggtgaggtgaccagagtgggggtgaatgggagacacaaaaattctattttaagaacaacaccgtgactttgatcccgacatcaacgaaaccccaagggacgactaaaactacatagcacaataatacatagcctagtgtcgactgaatatatcaaattgat

SEQ ID NO: 68969 - DNA, 696 bp, Zea Mays
ctggagcaggtgctggcacaggatcctcaggggctggacggtaggacccaaagaggaggcgagaggcctcaagagtgccctaaaactgtggtggctgaattagctgagcgaagatgtgacaaagatagtgagcatacagtagctggcgccgggcacgtagaccatccagtatggtgtccttgatttcacaaatgaggaaatccacaacatcaaattcggagtgagagaccagggcaccaaggagctagagttggatatgagtgacagcctccctgtaacccaaccgttgcagaagcgtccgtctcatgagctgatatagaaacttggccgctgtggtgaagtctgccggagaacgtcgcgacccatctgagaagggtggtcggaacagagccacgacgtgagctgtactaggagcaactccgccgtgagggcgacgaggaggatcagaggtgccacagcacaagctatgaagacgagtcgatgactcattgaatccaaacaactggcgaatctggctggcatgaatggtaacatcctctcgctcaaagcggaatctcatccagtggtgatcagggtcgatccatacagtagcatagaaaactcggacccattcctcaacatatctaccgctggtagtcaacagagtgagaagtccaggcagatatgagaggtgtacctcagagtcagcaccagtgg

SEQ ID NO: 68970 - DNA, 826 bp, Zea Mays
tttgtgcgtttaatagaatattgaggtattacactagatgggcatttctcctcctaatcccgacatgttctaaaagcatacaaataaaatccccaaccacaatcaatgtatgctatgtgtggtgatttatttgagaaatcttacgcacattgcagataggagttttatgcagtgcgctttggacttagattaatgcagtggcatgaatactacactttttctttcaagataaagggttagtctcaacttccagcgagacgtgcaacaataagttgcttcgtggttacaattctgcatacttattattattaccaaataaacaatcaatcatcaggatttagactgatgtgcacaacactatgttggccataaaaaaacttcaaaggctcatacacaccattcatcgtttggagcaactagttgacttcagatcaacatgtaaaatgaccatcaaggtctagtgctcacaaggacattcaccgtttgcattatgttgtaagcacatagaaaagtgtgtgttcgtataatggtagtaaagtgcacaacatctggccaatgctgccaagtagagattttttgtatgcagagatgtatagtctagctcgttttaccattgcccatggtttacccaattactcataccgatctgaaattggatttcaagttatgcaacattttttaggtataataattttgagagagaacttataacaataatcaattattgggttccatattatataccaatttgttctataaagcattatttcgatctcttcattgttgagcaaagagatgctttggcatataactaacaaggacaaga

SEQ ID NO: 68971 - DNA, 667 bp, Zea Mays
tgtttatgtattttttctggtgttttttctgctttatttctcgtatgtagataattggcagaaattattaaaacgtgtgaaggctatactgtgcatactcaaaattactctaaatatttgtgttgcgttgaacttttgaactcacgccgagtgattaaattgtatagtgggtactcggacacgctgatcagtttgcgttggtaatcggctgagttatggcattagctgaatattggctgcgccctggcaacacgacgcagtatttgtgccgttcgaacttggctgcgtcatgtgattgctatgtcgcgctctcgcttaatcggatcgctcccgttgagttggaccgccatcgctgagtcacacatttttcgagggccctgaaggcattgcatgtgtgtcgcaactattgagttacaattgcgcttgttgcgtctgttgtgtctgttgcgcgtacttatcgtgtacccctactaccaagccacagttgtgtctgttgcacttattacgaaggatggatgtgttgtcgtagccctgatggctgcacacgcgttgacaccagacgctagagcttgtactcgtgtggattgtggtgggttgttcaagcccctgaagccacatcatagcgcgaccttcataaacaattttatttggctctatattttatttg

SEQ ID NO: 68972 - DNA, 562 bp, Zea Mays
attaaactgaagaagttgagtgttgccttatttgatgaagagaattgcatgattacacttgataatgagcactacaacagctatgtccaagtaattgaccacctttcatcaattcttgatttattgtctactgctagttctacattgactaatttcttctccatgatcaggatcacaagtctgatgcagatttcttgaacaagccccttatgcactatagagagatggaatcaatatttggtaatagcatggctactggaaactttgcaaaagattcaagtgcagctctaggtatagagaatgtgggtgaaagccaagaagaagatgatgttacttctcatgctcaaactgaggggacaagcactcaaggagcaacatcttctgctaccagaccaagtaagaaggccaagctagctgaaatggaagatgaagggctagttgcggcttttagaagtgtaggtgagaatcttgtcgctgccatcaaattggttgctaagcctaataatgagctgccaagtgatctatttgacatcctaaatcaaatgcctggtttcaattctgc

SEQ ID NO: 68973 - DNA, 673 bp, Zea Mays
gtttgctcctcgcgtggcggttcgccttcttcgcactcggagaccgacgcacaaggagtatgactcgtgggcccgggcccctgtgacagaggctgggttgctttggtgtgcgccgggcgaggttttctgcggcatctcggggcgcgagcaagggaggcttccttgaaaagggattcaccccgcgtgtagcagttacgctttcgcattcgctccactcgctgtgccctttcgccttcgagttctcctcgcccctttgcatttgcactcttctgccgccgtagtcgccatggccttgctagaccctcctgagtgcttccagtccgaggtggctctcaactcggtgcgcaacctgctcaaaaggggtgcgccgacgttcgccgaaaggatctgtgccagcgccactccccccagcgatctcaccgccgaggagttcatgctcttcgtctccaacttctcctgtgggttggcgctgccgatctcgcctttcttcctgctgctgttggaggagctcggcctccaacttcagcacctcacgccccgctccatccttcgggcggccatctttgctcacctgtgggagatgttcgtgggggtggtgcttcttccgccagcgcccgggcaaaagggtgtcgtgcagcgaccttctggaggtggaaagcgaggcgagctgcgg

SEQ ID NO: 68974 - DNA, 450 bp, Zea Mays
tatgagaagattgatgtttgccaggacaactgtatgcttttttggaaggaacatggcagagactagaaatgcttaaaatgtaggaagtcgaggtacgtggaccttgtaaatgaagatggggagaaggtggtgacaaatgttgcacataaatagcttcggtacatgcgtctcactcctagagtgaaacatttgtttctctcgaggaagaccgctaagcacatgaggtggcataaagattgtacggacagacaagatgggttaatggtgcacccgtcagatggtgatgcatggaaggctctttacaactttgatccagattttgccagcgatgcaagaaacgttcgtattggcttggcaactgatggtttcacaccgttcaatatgaccgctgcatcgtattcatgttggcctatcattgccatatcgtacaaccttccacctgctctttac

SEQ ID NO: 68975 - DNA, 913 bp, Zea Mays
gaagtatgagcctggtcatcaggcgaaatgccaaaagggaaacatattccagttacatatcttgactcctgaagacatgaacacagtgttgactcctaaagttttggagtagatagaacaagaggagaaataagaagatggtcttcagttatatcttaatgctatcagtgggactgataatctacagtttatcagactcagggtattggttcaacatcagatgttgttgatgttggtggattctaggagttgtactagttttatttagcaagcagatggtggagaagttaaggttggaggttgaagagtgtgacctagtaaggatacaggtggctagtggtgatgtgatggtgagcaatcagaggatgaaggaagtgaagtggtggactggagggcatatctttacttttcccatgagagtattggatattggggtatatgattctattctgcgctttgattggttgagagctcacagtcctatgaattgtgactaggataagaagactttagggttttatcataaggaataatgaattcaaattcaagtagattgtccagatatcactgagatctcccaagtacatgttgttgtggttgaagggaaatgaggtttgggcttttgtgttgctggaacaggtggtgcctgagaaagaagaggtgaaggggcagttggccacactactcatagaattctaggatttatttgctcatcctgcagccctacctcctaaaagggtgtttgatcactacatccctttgttgtctaggtcaattccaatgaatgccatgccatatagatactctccactacacaaggatgaaatagagaggcaagtggcagagtttctcaaggcatgcttgattgctccaagtgtgagttcttttgcttctcctatattgctagtataga

SEQ ID NO: 68976 - DNA, 854 bp, Zea Mays
atcaagtacatgaaataagctggcgcattcgtcagactaaatgacatgacaatgaactcatatagtccatacttggtgataaatgttgtcttcggtatatccgaaggtcggatcctgagttgatggtaacctaacctcagatctatcttcgagaacacactggcccactgattgaatagatcttcaattcagggcagagggtacttgttcttaacagtgaattcattcaaggatctgtaattaatgcacattctctttgtaccatctttcttctccgcaaataacactgggtctgcccaagttgaggtacttggtctgatgtagcctttctctaacaattcatcaatttgcttcttgagttccaccaattctagtcagaacactcgatagactctcttggaaataggggcggtgcctgggataagctctatggcaaactcaactttatgctcgggtggcaagcctggtaactcagggaacacatcagggaactctgacacaattctaatatcctcaatcaagttggcctccttgctatctatagacaaatagtaacaggctccttcttctagtttaggcatatacaactcagttactacttcctttccggatggggacactaacttgactgtcctcttatcacaactaacaatggcttggtttctgtgcagccaattcatccgtaggatgacatctaacccttgagtacccattactattaggttagtgggaaagtctatcccccttatttcaatccttagattcagacacatcttatcggactgaacttttaccccaactaaattaactcttaaaggtggaatcattggttctacgaggatgttatgtgcttc

SEQ ID NO: 68977 - DNA, 504 bp, Zea Mays
ccatttctgttgtttgtgttattttctcaaaattttaactcttgcttatcagcccacgcctgattttcgagcttcagtttaaaaacaagtgcttgctccatgtctgaggagaagaagatgactgaagagaagaagatgattgaggaagagaagctgtatgaggagaagaaagttgcggatccttttattgctgggttttatgagtctatggcaaaaacaaatacagagaagattaccaaggagataatggaggatttgtctgaagattctgatgacagtgatgattataatgtggaaagtggagatgaagattctgaggaccgtccttggcgaccaagccataacatattcagaaaatcgactatcaagcaaagtcatattgacactatgaaagggagatactttcgcgatatgtctattgtgagggttggaggagacaacactgctcctgctcctgaggaaaatgaagttgttgtttaccgaagctttttgaaggcaggcctt

SEQ ID NO: 68978 - DNA, 592 bp, Zea Mays
gccacctcaaccctaggctcggtgcaggagattgtcgaggttgatggtcgtgtagtcggtaaggcgatcatcccttgtttactctctagctttctcgtcccttctattaccatgtatgtcttttttgacagccttgaagtccgcactggagatgttgcaccactgctcgggtcaggtttggtggaacgttaagacaatgtcccgtgtcgtatctaggacatcgttgatctcggcgttcaatggggagtcacggttgcgctactcattggggatcttcaatctagctacgaccttggggatgtcgtcggtgctccctcatcccttttggacaaagggctagaggacgtgctaaagggcattgacaaggcagttagttgtgttgtgcaaatgttgtctacgaacgacgttgtgcgtagcgctcgctaacagtagtataacgtgacccaacgtcgcttccgacgaggaataacaaaaaaaacattgcttcttattttttgacttttcgtgttcatgtcgtggggtcctagggtctttgtttcataaacattatcaagtgtcatccctttaaagaaggggaaaggagcataggaaa

SEQ ID NO: 68979 - DNA, 555 bp, Zea Mays
aggcgtgacgtccaacgcttagcttagaactccagtcatgtagtctgtaggtccacccatgcataagagacttgtgagatcctccctctctcgcccactttgaacccctactacgagcattgatcaacaaaggagctggtagcgcaagccatcgaagactggatgtaaggacgttctgtccaaactagtataaagcttgcgcccaccgatcacatcctccaaaccatggaacacgcacatacaaatttacttgtaagagcataggttcaaaacactaatagttggcacaccgggtaggggccttgtgcgttactaacatttttcttcgctaggctttggatggccagtaatgacaacgacgtagtttgggcccccaaaaacgaccattcattttgggagtctcgactttgatgtcaacaacaaggggacatgatcaggggcctaaaaagcacaaatcccctcggcgaatgattcacacgacattaccagaggctttggcagcctccgactcagctcccctttgggaagcagtggacgatgatgcgtgctggaatc

SEQ ID NO: 68980 - DNA, 595 bp, Zea Mays
acaaattctaccccccttaacagaaatctcgtcctcgagattttgtaagaaagagggtgcaacaagtttggtttgtaatctatgtttcaatttctaagggattttaataccagacgactcttttttgtccaagtttataatacaaattaccaggtgattacgaaaacatgggtatatatatgtatatccattttattatgtaggataaaagatggataggttaaggcaagaaagattatgacaaggaaaagtcttcatccgaaatgtttaagtcttgtttcatctcgagattcgccttgactattatatccttccttgttgaggtcaatcttcttttcagaccttggtgtcttcattcgagtcatgaacatgtagttgagacaaacttgtaggtaaaccaagtagtttagtcggcagggcagttggcttagtagatgacttaagttagatgagaatggtagaatcagagttagttgttttgttccgaggttgggctatatatagttcatacaagtgcctatgtaggttaggttgttgttcatggccgagtcgatctagggcaccaattttggattaaaacatgtttatatgagtg

SEQ ID NO: 68981 - DNA, 1264 bp, Zea Mays
aatggattgagttcctgggaagattttgcacaggcggtgttgcagaaatttgggatgggagattattttcaagccatggataatctgttggagttgcgtcagaaagggacagtggatgaatacctaaaggagttcgaggtgattaggtatgcggcagctatccacaacccacagttggacgagaccatgttcgtcgcacatttcatcaagggtttgaagcaagaattacaagggcgtgtgcagtctcatgttccagctacggtggatagagcagcgtttctggcgcggattcaacaaaatgttttggaaaagcaaagacagaagtatctgaagtttggagggcagggtaaaatcaataactctgctgttcggcaagaaaataaggcagttctggcgggtcaagatctgtccaaggagaaactggtcagagagtaccgaagacagaacgggttgtgttttacttgcggggacaaattcgagccggggcatcaaaacaaatgtcctaagaaggtacaaatgcagttgaatgttctgtcaactgatgaactaaagatgactttgacagacaaagtgctggacagattggagcaggaggagctagtagcagaggagtgtttcaagttgtcgttgcatgcgatcagtggcactacggctgaagattgtatgggggtcagggcactgttgcagaaccaagtgttactgatactagtggactcaggaagtttggctagtttcattagccagactatggtggatcgagtaggattacccacacaacagtgtgcattggcgaaggttaaagtggcaaatggggagatcttgaaaagtgacagagtggtaaaatcgatggaatggtgggctaatggccacacctatagaaatgacatgagggtgctggagttaggagcttatgatgcaatattgggatatgattggttaagaagacatagtcctatgcaatgtgattgggaagggaagatcataagctttgaggataatggggaggaggttcagttgatgggaactgctggtcagcagggagaggtgttgggaatttctacggtgcaattggagaagatgataaagggtaatgatatttgggcttttgtagtattggagacagtcacagaagtggagcagttcaatgaaggagaattacagtttttactggaggaatataaagatgtgtttgatgctccaacatctttgcctccatcaagaccattcgatcatcatattcaactacttccagatgctataccgg

SEQ ID NO: 68982 - DNA, 752 bp, Zea Mays
ggagagggcgccatgaggagaggaagaggcggccgacagattcaaggccattgatggcgggagttacagagaggagagtaaatggggaagaggaaagggaggtatttaggctagatttacgctcctttgatgactggttaagcgctgctttaatcattcgggaagcagcaaccgttatggtggcggaggtgctgttgcgagtgagagaaggggaggggaagaggtcacgacatcagtggagggcggaggggaaggggaacaacatccatggggctcctccactggagcaagcgaagaggtgacgaggagtcgaggagtcggcggttgcgctttagagaggaaacggtggcggcactgtgtcaacctgagatagggatgaaaactggatgggtacctgggacgggtaccggatatgggtatgaaaataggacaacttttcggatacagatacgggtaattttttttgtcgagacggatacgggtcttacctggatagtgatcaccggataccggtaggatacggaatcaccaatacccgataagtatccgaaaattccacgtaggatacgggtacaatacgggtgggtacccggaatgaagtggcaaactggcaagtcattgtgtttgcgtctgtgctagtcttgtgtgcacgcgaggcaagcgtcacaagcttgctggcctgctccctactggtcggcccattaggacattacgacatttgccattatgcccccaaatcgtgacgtggtgag

SEQ ID NO: 68983 - DNA, 1372 bp, Zea Mays
tctcagctgaccagccatctcgtcaaccaaagcctgacattgaaaacaaaagagtgcaaagacagtactctgcctggagtatagccagatcgggaaaagccaaattacctgaagattggagaaaaatgaaggaaaccccaaatcatgagaagtcaggcggtgacttgacgaaggaatatcagccgggacaatctgaatagcatcaccagggatcaactcagcattaccagcaggaatcggaactctagtgtcaggaacgccgaactctaaggcgactttctcgttaagccatgcactgttgccatgccgtcagaatgtggaggagaagacccaacgtggacatccatggaggtatgggaaggggaacccgctcggacaccctcgggggctgggtcgcagcctgcactgcccatcggagccggatcaccaccggcagtaccctcaggggctgggttgcagttcgtgctacccacccgagccggatcattaccggcaacaccctcgggggctgggtaatcgttggcgccatccttggggactgggttctctgcagcagccacctctaaggctgaagaattctcagccacctccatggaaatggagcaacctaggccagcttcttgactctgaagaccgcactccaaggtcgacgaggcacgagacgctgctcaggataactctaaccccacaaccggaatgtcaatgcaaacatccatcataccaccatctgttggctcggacagcagatcttcaggaaccatatcctcgagagcctgatcaaaatttgctatggacaactcttgcagaccaacgagagtagacaaagctggcgaaggaacatcactactctccccactgactaggtagcgccgactgtttttccgaattaaggggaactcctcctcttcttcatcatcctcatcaacaatacgaacaatacacccattgggatcagctctggcaggatcacacccattgggatcagtttcagcaggacaacacccattgggatcagcttcagcagggtcacacccattgggatcagcgtccatagggtcacacacattgggatcagcgtccatagggtcacacccattgggaacagctctagtaaagagttccactggtacctcttcagcagcaggagcagaagggccagcatcatgatccaagaacgacactcgccgaagctgcctctttttctttttcttcccctcggcaggaacagtcggatgactaagttggcgaagacgtttccggcgagtaccctcagcccttcgagcatccacaactttctcaggctctggaatagtcccagcagccaccgtttcagtaagggcagagtcagagaaatcccccgccaacatatcca

SEQ ID NO: 68984 - DNA, 277 bp, Zea Mays
gtggtagaagtttggtcaataatatgctactacaacgagcagcagcaacccagattaaaggaaatacatatacgtgggtggtgcttgttcgtcactttagtaaaacacggtattttcgacggttaaagccatcagacataagttattttcgacggacggtcgtaggcttatgttcagcggtgcccgtccctctgtcgtaaagggtcaaaaatactcttatttccgacggtggccattggacataagctatgtctgacggcacctttcggccatcagc

SEQ ID NO: 68985 - DNA, 289 bp, Zea Mays
tccactagattagtgatgaatggctaggatcaagtcgcgccgtaacggttcggctgcgggtgtatcgtgcgttgatctgaatccgaggggcacaatcggatctcagataattaaatctcgtccgtcgatctggccgtcaatggtaggtgagcgtattcgattcataaccacgttgattgaatcgtgaccgtgcactcatgatctggcggccagagctctctgataccccttcggcctgcaccttttgctaaagagaccctagggttaaaggatatcaagccaccatccc

SEQ ID NO: 68986 - DNA, 941 bp, Zea Mays
acaattaatggtgccgagatccgaagtggagctaaaactcctgaactcggttcttcaatgaagggatgcaatgatggtggtaagaatcattcatggaaagcaccagaaaagaaggtggccaactcaaatattgatgatggtagaaaggccccatcagatatgaaaacccttaatagcaaaggcaaaccttgcattgattttcatgctgcatttgtacaacatatgatgcagttagatgaagaaacggatacagactcagaaaaaactgaagacatgttcataggcagggagggaaataatcacttgagctgcgaagtgaattcaaagaagcggatagaaggaaatgatctcaatgcatacatggaaaatcctacaaagggtagcagtttctgcattgccactaataatggtgctgtagtaagacataatcttatgcagcgaccaagggcttcaggagctctgtatacatactcaagagctaaggagtgcaatggtattaatttgtgtcgcaatgtgacttgtcagaagggtaaaggtgttatccaaaggcctgaagtagtgaatgatctcaatgcagctcctatgcagatctcagatggagcacccaagactaaccagcatctgccatcaagttctggtggtgctgccttggacatagtttatggaaactcttcttacactgcaatggatatagatctcaatgtacctcttgatgtgacaccccaagaccttgagaacagtcatgctgaagcttcttccatgggtcccagtgatcctcaccaggcaacacataacgtaccacaaactactcagccgcagactgctaatcaaccagcagcctccattatgctttttggtcgtgtcatctatgaagccctgtccactggtacagcaaaccgtactcccaatctgcagggaaaccaggctgttgtcccttcgag

SEQ ID NO: 68987 - DNA, 542 bp, Zea Mays
ccacttgtgagatctacatatacaatgtacttaagtcgagtggtgtaaagggaagggagtcaaaaccttgttgaaaaacgtttgtgaaaggctaactcacctgtagtaagtttgtagaacactatgacagttggcacatttgagaaaaggagagacacaacgagagggtgttgaaccctatctatatggtcgtcagactgtcggatgggtatccctaggttcgtacaacgcactgatatagcattagacgaaacggtctaagaaagggcctgcctatcagtgtgaggtcgtggcttcacaggggcgtcataccgaaagtttatggttcaatagtctaggagtggatagcgtcgaaccaaacattgccattgttcactaagggacccacacgttagcatgtatgatgcagatgcatcatatcttggagtttggccttaagttggttattagaccagtccaacaagagttggttgctctcatgttttttctacacaggttgacgaacaaggacaatttggttcaacggtcatcggaccacaagc

SEQ ID NO: 68988 - DNA, 567 bp, Zea Mays
tcatgattgacgaacatcgtgtcattgatgtatatctgcgtgtcagccatcatgttgttacttttgtttgcaggctttggaaacctctccgtgcaggtgaggtgctgccaaatttttttgttgacatgcttgtttattttttgcaagtatcttcctagccgttggcgaggcatataaactccttcgtgcactcaagatgacgtatgagcagatacatgcttgtccaaagggccgcgtgctatttaggaaaaaatacgcggaggcaaagtacggttcaaagtgtaaattgtctaggttcatggaggtagactctagtgatggacagaagaggtagcccaacatccccgcctatgccaccttccgttcataccgaggatctagcatttatacatggccgaggaatccatgaaacagatgacatggcacaaaaatggcaaacgatacaatcctgacaagatggtgcacgcatccgatggtgaagcatggaaacactttgatgccattcaccgtgagaaagccgaagaggctcgtaatgtacgtgttgcgctggccacagatgggttcaat

SEQ ID NO: 68989 - DNA, 623 bp, Zea Mays
aactaacgtaactggaacagactaatttggagtcaaatagcaaaagttatggagtaaggaagtgctagagctatttaatatcaattccatactgagatataagtcccaggtgtttatctatgagttccagggaccaaggtgtaagaacccaccatgaccaaggatggcaggtttattatgaaaaagacgaggggcacatttgcatgaatatgcggctgaaggggtatcggtgatccacatccacccaatcagaaatcaagggttgagatcaccaggccgaagggggtatagggttcatctgatctagcccgcttatcgcagagtgtactgccaccaaccaagcggtatcctaatctaatccggaccgatcagctcgagatcaatgacccacgtcaaccatcaccaaatccgatcggagctgcggttccaagatccaacggttcattgctatttccccccatcatcagactcgtccatcctatcttcgacagctagcaccatgtctccctccatccgttcaccgcccatggcaacgacgccggttcttggtggtgaccacaccagagcacgatcggtccatcagcctagtgcaagccccaacgcgcgagtcggtgcaaagtaac

SEQ ID NO: 68990 - DNA, 788 bp, Zea Mays
atttagaaaccaactatatgaaggtccaaacaattgttgtatcatgcattggtaacaaagggtgacaaaaattttgataaaggagaccaatacaatatggtcattacattagacctgctgattttattgaacatcattcacagtaaataatgaagtcaggaccatctgaaatgtaattcacacattgaacttgtgaagtaaacaatgaccattacttaggcgcgggtaaggttagactttttgggttaacctaggatgaatcatgcacaaacattcgtaaatggtcaattgtactggaaagtggggaccaaaataatgtgccacaacacttgacagtttaacgcaccttcgaagtttaggcataatctagggtttcaagtaaatgcgaatcggcagagcaatagggcgtaatcgtttggacttcccttcgtttggtaaatatcaaggttattccgccggatgttcactcccataaaaaaaccctaaaagccacaccagatctgtgtacatgtttggtgcggggaatagtccattggtgtcacatgtaatgaacttcggttaactggaatagtcgattggtgttgaatttcattcatcaaagggaggcgcatgaagtagacaaagtatacaagatgaagggcgtacctcaagaaccgaagattacggccgaaacaacacgaatcgaagcgttgatgtccggatctgaggtagccgtcgatgctcggagccggaaaggaaggaagcggtcgcgacaaacctcggcggaagcggatttgaggcctcttcgt

SEQ ID NO: 68991 - DNA, 800 bp, Zea Mays
gcaagcaacttcctcttcattgcctctctaccttcaaaacccgaagtgatctttgcttttgccatatccatggcagcggcaacctctggtatggctggcttttcatcaccatcaacaattcgcaacacaatgagtggacagtggttgtgatgcaagaatacaatcttggactgagttccaaaagtttgtagaaagaagtatctctgtgaccttcttttctccttttgtgcttgataacttggacctagtccaatcatcactaacagagaggcatctcaaagcttgcttatgcttatatatggactggagagttaggaaagatgtagcaaatcttgtaactgcaggtctcactaaatcaccccatatcttctccctcatggcatcaagaagtttgccatgcccatatatgaaggttgtcacttggcgagcatgggaaatgcatttcttgaactctccaattttcccaatgtcctcaagcatgaggtccaaacagtgagcagcacatagagtccaaaccatgaccaccaacaaggtgctgcttcaaccttctaacacctgcatgaacaattttgccacaaaggatgcacttcaccacatatttttgttcaaatccggccaataacaatagttccatgctggatccttcgattttgcctttctcttaggatctttgatcgtatggctgctggcttcctaactccccttgtggtcgatctgcagatgcatcttccatctcttcaaggcctcctgcagatccgatgagagggcgggggagggtgagcagaggccgggcgagcttg

SEQ ID NO: 68992 - DNA, 488 bp, Zea Mays
tgcttaaccgaacttagtcaccggggcggtagaatttggtgtagcaccggcaagatggccgccgtgggcaggggcgctccctagctcggctctgttgggggaagatgaccggtctgccgtaggatggccgctggacggagtagaatagagcgcgcgtaccggttggatcccgacggtagagatctgatcagacggatcagggcgactctatttaaatctgcgctgttgatcgtgatttgagcggtctgcgccacgtaccgtttcgctggtgtcttgatctaattcgtgcggtcgggttaggatccaatggcctaggatcgctgataacccttcagtcaagcattaatgcaaagtagcccctcagattttgttaaatgaacccgcggtccaccctatacagcgactgagtcttcgattctttttgcgcttgagcccctgcgttttctagtatttgaggccgagccgagagaacagaaaaaccagagaaa

SEQ ID NO: 68993 - DNA, 311 bp, Zea Mays
cgctagcgcagcatggacatatgtattgcaggatgtcgacaagcaaccagacactacctacactacacatgcatggcgctggaatcagaagtagaaaagaaaattaacacgtttttgacaaattagcaggcttcaatgttcagttcaacagtgtgtgtgtggatgagaattgtttccgagtcatttcaataccaaatccatctgactcagcagagtcaatatttcttattagcatatgcctgcaagcaattaagggcggcaagtagaagatacctactacctagaatagtgctagatatattatgctatct

SEQ ID NO: 68994 - DNA, 514 bp, Zea Mays
tacaagctggtcgagagagggagtggatcccaagtctctgtgagtgattgaggctagtgccatttatcgaaagtggagggcgaacgatcaagtcttgtccactgtcctctagaggccctagactcctccttttatagccttaaggagggagtctaggagtacaagggttgtcgtagtgtttgagtggtggcgaactcgagcccctgtagtgatggattatggggaggctacactagcgcaaaacaaaatttttgaccccataaaattagaaaccaccacagttatagatcatggaattaccactagacgcgtagggcagtggaagacgtcttaatgtagacggacgcgtcgagcagtgttgtgcagtcgtcgacgaccttcacgtcctcgtgtggttcatcctagtgctccagatgcagcacctctgaggtatccacatgtatagggaggaagcgccgcgttccgaactgctaggttcacgatggcggctaggtgagggcgaggggcggtcggc

SEQ ID NO: 68995 - DNA, 1222 bp, Zea Mays
cggccctggattttcctgcccacgatgacggcgatcaccgagaccaaatcaaggcgttctcgacgagtagatgtcgtcaagctcatttagttgagtcaacaagtatcacaagtatccaagggtgctaaaacatgaacatggagggtgagtgcggacctaggagcagctagccgcgatggggtgaattacggccgcgcagtcgaccaatttggggaaaccccaaattcaacggctatagtggctaattgagggcagggatggatgctctggcttggtgataacatagcggagtagaccgtgccatcaatttataagggcgctaagcggtggtgccgaattttgaaagggaaaggccggcggtcgaagggagaggtgagtcaccggcgtgaactatcgtggcgttccccggggtaatgccttaggcaacgaacatacctcatatggatatctactgcgacgtggtagttcttctaagcatgtggcgtggctacaaacaacggcaaattccggcgaggacacctctgaccaatgcgcggcaagtgtcacagtgaatagtccggtgataaggctctactcctttcctgagttgagatctttcattgcccacagttatctgcaagccatgacgcacgaatcgcgacgatcgacgttaatcgcggcgtagggtcaccggcggcgacattcactgaatccgcagatcttttgccactgtaccattagaagcttcgtcagttgctctgaccgagcatcttcagaggcgtttttcttaatcttttgcgtgacaacttgttaatctatctatagcaaacttgtagcctaacaaaccagctttaactttgttataatgtccatcatcaaataatcacaggatcttactcaaaatcgagctctaagttcatccaacttcactgttactgaaaattcagacattgggctgactgacagcacaactttgagcttagttttctcccaactttatataacaataatgcttaatcccttaagcaaagttgtacttttataatagctctagactttttatgtgttgaccctaggcaaaatctttgtatttttagatctacagagctccaaagtcagccttgtgcactgaattttagacttagccacatgaggggtgttgagtggctttttgcaaataagcccaaatcacatcttttgacttggaaatcctcaaatgtgtgaaccttatgctttggggtac

SEQ ID NO: 68996 - DNA, 657 bp, Zea Mays
aaggctttacgagttcaccaggaactaggtacaagattgaatttaggccgaacgaggatagagaagcggatcgacggagagggtgcatacggcggcgttcttcggagcaacggagtgttctggtggtgggactttagtaaactttgattgattggcgtcgagagcaacaggaagctaaggacatgctggaacccaaggcaattgagtgagtaacagggcacgaagagagctggccacggagaggtcctgcacggcggcgctcggaacagagcggaatggattttggactgtgtgagttctccagtgaaattgagttgattgcacaagtgctcgtgtgcatgatgtggtgaagaagaaggacccgggctcaatttataggccgatggccgaagttggatgaggctcgcggagctgtaaacgcactggcgagctcacccgcgcgggcagagccacgacgatggtccagcgaccgccgattaaccatgcagtgccacctcgggacattagcgccacgtcgcagaagatttttaccgcggccgaagacccatccccagccacggtggtgatcttatcccagcaagatttttctgaactccgatgaacagtacgccaaccggcttgatttcaaacggctattgctcctaatttcgtgtggtt

SEQ ID NO: 68997 - DNA, 372 bp, Zea Mays
cattccaaatatcagaggttaaagcaagagaaaaggcagatttcaactttcaacacttttagcatgttgatctttaaagtacttttccatatctctagttgttgctcgtgggttgccaccaccagaattggtgctctggcatatgtaaactcttgctccctaaccctaactattgcagtattgctccatagtccctaactctaattgttgcttatgtactagacgtagagaactggtgcgccgatgatggagagtcggtacgatccgacctccatgaaccacgagctcgtgctcatggttctaactctggacaacttggattatgctagtctaggttatcatttaggggccaatgccactcatgaggctccg

SEQ ID NO: 68998 - DNA, 1592 bp, Zea Mays
ggagaagtcagtggagaagggagtgaaacccacctccttgcacctccggagctgccattagacttagcccaagttctggccaaccaaacccgactcattgaagtcctcaccagaagacttgagaaccaacgcccgaatgatggaaggcctcaggacaggatgggagattttctaaggctcaagcctcccacattcgctggatccagcaatccgctcgacgctgatgactggctgcgcataataaaaaggaagttagaagccatcggatgccttgagaaccagcgtgttcatctggctgctcatcaactttctgggatggccctatcctggtgggataccttcagcgctgccgtcagagatactacctgggcagaatttgaagatgccttctgagaacatcatgtgcccctaggaatcgtccaacttaaagaagatgaatttcgggaattaactcaaggagggagatctgtcagtgagtacgaccacaaattcacagaattggtacaatatgcgcctgacgatgtcagcacggaagccaagaagatggcccgtttcttgaaagaggtaagaccaggactcaagactatcctcgtcagccaagacttcctcagcttctcgcacctctcaaacaagaccatacaagtggaaagggctagggaagaagaaaagggtcacctcaagaggaagtttcaagtcctccgagctcaacagcaggacaggcaccagagaattcgatcttttgggtttccacccaagggaccaagcttcaacaagccagttagatccactccgtcacgtttcagtcagcagggtcaaagttccctctaggccccctccgttgcaagcaaccaacctccagccaatgcctgttggcattgcggagaccccagtcactacaagaataattgtcctcagttgaagacatttgtgcctacctactccaactcggtgaatggccccaagagtgccccagcacccgcctccaaggcaccctcctccaacagccagctaagcaagacccagtatcatggcagggcacgagtaaaccacgtcgacgctcaagaggctcagcaagccctaggagtagtgctcgatgagttcctagttgaatgtactcccgtctctgtactttttgatttaggaccatctcattcattcataaccactggttttgtggaaaagcatggcattcccactgcatatctagaaattcccttggtcacccgaaccctaggggcagaccttctatgccacctcaaatgctcccaagtcaggattcttttaagtggggtagtgttcttggtagacttagccatcttgccatcccacgaaattgatgtgatcttaggaatggattggttaaccaagcataatggcgtcataagttgcacagataagaccgttcttctcactggccaccaaggaaagtcaatttcatgtaaggcttagccacccgcccaagatccaatggtgtttaatctagcagcagaaagcatatctgtagtagaagaattcatggatgtaatcccaggagaattgccaggaatgccgctagaaagagaagtggagttctaaattgacctaattcccgg

SEQ ID NO: 68999 - DNA, 850 bp, Zea Mays
actagacccaaagatgggctgtcagactgcttggagtctgaattcagactgacagaggaattgcatgaacttagggcttgaattcaatcatgatccaataagaattggactagggatgctatagcaaaggtgaagatggtttgtagtgctacaactttgctgcagagcattggttatgttgccatggcaaatttggagaaaacctgccccaaacatcgactgtcaggctgactgaataggattctgatggtacagtgaaccggataggatcaaattcagatcacatcaccgccgacgagctatgcacttggattcgtgctcgccgttggcgattcacactcggatcggttggatagcgtttggggtcagtaaatatcccgccgtggatatgctccgtccactaaattactccgaccaccgtacccgagctagccacggcggattcagatgagttcgccggtgacagacgcctcacggccttgcgccacgtgccttggcacatccatcgcatcgccgtgactcgcattaaccctccgttcatcgccggggagcttgccacagtaataggacaccaatcgcgcgcgccagtaacttcttgtttctccggccgccgcgcgtcctcgtctaattcaccggccactgctcgcggactctataaattgagcgcaccgtcgggtccgtagggtaatcacgcaccaagccaccaagtcttgcctccaatcgttcactagagagctccaattccttacttcccccaaatcactcaagaactctgctcggtttgacctcgccgtggccagcgcgcctcaggtccgctcatatcctctgccctcccgttttagcgttctgg

SEQ ID NO: 69000 - DNA, 437 bp, Zea Mays
cgagtattttgttgctataaaactcaacaaccttttcattgtattgaaccgtgaatataaatatcaatacacaacatgaaattgaaggatttccgacaaccgccttaagtccgagggcttctaggctagccgtcaaaagtaaaaaaaactgtcgacggtctatctgacgatcgtcggacataacctccgatagctatctgatgggtcgttagagcagtatacaaaagggcaacggggtgctcgtgctgtggtttgtttgaatcgaccaatcacatcattttttgaatgccccactgcctgttacatctggagagtggttcaaaatgctctttatataaatcatgttcccatgaatacagaagaattatttgggagttggattaatagctttgataaaagagacaaacacctagtcattgttggttgttgcgcgatca

SEQ ID NO: 69001 - DNA, 739 bp, Zea Mays
atccaatgtttggattttaagttagtgtgaaaatctcattttacaaaaaataagaatgagcagttaaaataagtgttttcagaacacacttttcgataggttaataactttccttgtaggtatttgggaaaaatattcattttcttttttatagagcccattctatttaagtaatagacttttgactaaaataatttattctttaaaattgagcatatttatttataaaatattacctttgaatttattatatttttgaaatatttaaatatatattatgtatatttatatatatctattctttaaaaaaatacacaaaacactcacgcacgcatctaaattaagaaaaaaaacaaagcacgctacgctcactcatcggctaggttgagcgcccaccttttttttcttctttttgttgttgtggccgacagtggaccccaccataggcaattgttcatctcccatcccattccttgctcccgtccgttcactcgacaccagataacgacgtcgccgttcgtcctcctcatcgccttcccctagtgcgcatgccgccgacactccattcccattcctctccactcacgccgagctcgttactcttctcccccattgaaatgctgctaatgtttcttcttgaacaccattaatagcagccgcccacgcccgcctcttctccttccccactagtcgtgccatcaagcagccccactcagctattaatggccgtcgaatcctg

SEQ ID NO: 69002 - DNA, 341 bp, Zea Mays
gcgcgcccgcggtgtccattttgcacaaagatccctggtcgtttgaaaaatccataaagaatcctctctattgtttctctgtctcactaacatctgcacaaaggtccctccccattcttgtttcttcacagctcgagattccataccggccggaaaacgcaacggctatgcttcttcgttgcacaacacctatttctaccctgaacgaccatttcccttcactcaattgcaaggttctagctcacaatcactctgtccatggtgatggcgcaaactgaggacaatctgtggtgttcccggtgatctatcgtagtctagttcaattggccgggccactaagc

SEQ ID NO: 69003 - DNA, 575 bp, Zea Mays
gcggagggctttgcgctcggccacaccatcttcacctcacgcctcgggtccgccaacctaacgtgagcccgacgcttcttccgctgcgcatcttggcaatccttctccatcactgccgatacaacagcaccaacattccttctgtaagggaaaatcttcatgtcacgagctaatcgagacgtaaatatgtcttcatcggccgcccggggtatcggaacgttcctaggccagcgaaccctggtaaccttcagcattcgtgtagaagattcccgaagctcgagcgaagacatcgtttccccgggagctgtgcacgtctccagcaaatccacaacaaaatgatcggaagccctcaaccccaaatcctcagctgctgtacctaattttcttttcctagcggtcgcacccgaagccttgtgccgtgaggggccttcatcgaccgttgacattgtatgttttccccggcggccaacaacgtctgcacagtcctcccgggtaaccaccatacggcaaatggtttaactcaaaaacacggttcagcctaacgtttgaaccgcgaatatcccaactccttaaag

SEQ ID NO: 69004 - DNA, 893 bp, Zea Mays
ttagtattaagattttcgactagatcggtaatggcgaaattatattatagtggttttctaatccctaatattgctatataacccttgacttcttatacttttgtttccttgccattgtattgccatccttgtgcaaaatctaccttgatatattaaacctttgcctctctacttttctccttgataatgctttctccctaactcactttatatccttggttgtatcattcatcctcactttaatagttcatggttatctcatttcactcttggccaccaacaaatatgtcttgtctaactccttgctatttcttacctgactccttggctttataatatctttcttattccaaacctcgtctcaccttttgttttggttgaatgagtagaattggattgtgttgtgctggtatgcttgagttcattgtcctttgtgttcatgtttgatttgcttctttgaaatgattgttggtgtattgtgtgacttatgtccacaatggcattagttagctagataaaaccttagatagatgggttttctctactctctataatttgtctttgcttaaccctttcgtcccttccattcttccatacccatacagatgtcagaccttggaatgtcaactacaagtgatgtcactaagtgcaaagaatgtggtgtgttggcaagtcaaaacaacactataaataaaacagctgatgaacagacattcaagacacaaaaggatgcacaaccaaaccaacagacaagtgacctgggaacatgttgttgttgtgggtactatggaattccttgtcgccaagtcaatgcaaatgaaagtgaaactacaaaacagaagaaccagattttattttctggcataaaaagacagatgtctcctcaagaacaa

SEQ ID NO: 69005 - DNA, 445 bp, Zea Mays
tgagatttggctgggtaaagatgtactttagactcttgtgatctgtgaatacgtgacatttgttcccaatcaagtaatgtctccatatcttgagagcatgcactatggctaccaactccaaatcatgggttggataattctgttcatgaggcttgagtaggcgagatgcataagcgatgactttctcattctgcattagcacgcatcccaaaccttgtcttgaagcatcgcagaagatgacaaagctttggtggatatctggcaatgtcagtactggtgcggttgtcagtttcttccttatgacctggaaactttcttcacactttggggtccacacaaatttgttgtctttttgaggagttcggtcaagggttttgtaatgctggagaatcctttgataaaacgacggtaatatcccaccattcccaagaagcttcgaacttca

SEQ ID NO: 69006 - DNA, 355 bp, Zea Mays
gcgtgctgaagaggctgcctagcgtgaaaggcgcataggtattgtttttgattttttagcttcagtacttgcttcgaggcttcgtattaacaattttcctactacagctgaactatccccgccaccggagccgtatgatcccctagctgatccagagatgaaggaatcattgcacatcataagcatggctgaatccattattgacgaagtcatcaataaattactgaacgaagttgcggagaaagtccttagaggggaataggttttattgtaaaaacattttgaaaagcttgatgtatagaacaaatgaaggaagattagacctcttttgtaacaaaactatgtaatgtttgaa

SEQ ID NO: 69007 - DNA, 1704 bp, Zea Mays
gaggaatgacagaacgaaaagagctaagttacctgaagattagaaaagaatgagggcaatcccaagtcatgagaagctgtgttgtagctcgacgaaggaagatcaactggaacaatctgaagagcatcgttgggggttgattcagctccactagcagatattagaattctagcatccggctcggctccagggcgactctctcactcgaagctaaagaagtatgcatcgctatcactccatcagatcgtggtggagacgacccaacgtggacgtccatggaggtgtgggaaggagagctcgctcagacaccctcgggggctgggttgcagctcacactacccatcggagccggatcactaccaacaacaccctcaggggctaggttgcagcttgcgctacccaccagagccggatcattaccggcgacaccctcgggggctgggtaaccgccagcgtcacccttggggggttaggttttctgcaacagccacctctgaggctgaaggatcctcagtcacctccatgggagtcgggcaatcctgaccaacttcttgacactgaagactgccttccaaagtcgacgatgcacgagataccgcccgggatacctctaatcccacgtctggagtgtcagaggaaacatccatcatatcaccaacagtcggttccaacaacatatcttcaggaatgacatcctcaagggcctgatcaaaatttgttatggataattcttgaaggctaacaagagcagacagagctagaaaaggaatatcactatcccccctactacctctataatgccgactattcttacgaactagcggaacttcttctacctcttcttcgtcctcgtcaaaaatacggacaatagatggtgcgcgatcacacccattgggatcagcttcaacaaggttacacccattggggtcagtttcaacaggatcacacccattggggtcagctggtgcacggatacactcattagggtcagttggtgcacggtcacacccattggggttagcttcaacaggtacaccaccagtggggtcaacttcagtaaagacctctgctggtacttctttgcaaacaggagcagaaggtccagcatcctggtccaagcatgacagtcgccgaactcgtctccttttattcttcttctcctcagcaggcgcagttgggcggctgacctgtcgaagacgctttgggcgaataccctcaggctttcgggtgtccactgttttgtcaatctctggtataaccgcaacagccattatttcagcaggggacgagtcagaagattctccagccaacatatcgagtatagcatttatttctgcatcatctgcacttgctggcatatcaaaatgaacttgcctctcatcattgggaagatcacaaggagaagcaaccaagacctcaatatcttcaggagagggtcgcactctaagacccagaccactatcaccagtaggaggattggacacaaaattaaaaaaggacttaggaggtggcagattccaagcagagtaggcaacaggagcaccaacatttgatactttgcctctcaagatcatgtctagtcggctcaccagatcctcagcaggaattctcctattagtaacctgagtcgagtcggtaacaccactgtacaagtaagctgggtatgctctatccttcaagggctgaatattcttaaaaacaaag

SEQ ID NO: 69008 - DNA, 385 bp, Zea Mays
tctcatcaagttcctggcaggatcaaccttcatgtttgcctcctagatatgtatatggtagacatctctcgaatgcttcatagacaccgttttgagaccatggtggcctaagcttctctaacaactcactgagacacaatagaagacctgttcgggaatttcaatgaatatttgacattgagtccaacacaggcaagaccatgttctatgagtcagcctatgtgccatcatacaactggtccaaacctagtctaattttaagtacaagtccaatttggacacaaccaagtcttctaagttagcttctaatccatcagatagctatggtccaagcctagttgattctctctcgtacccaagaatattgcttcaatctcaaagttga

SEQ ID NO: 69009 - DNA, 656 bp, Zea Mays
atctgattatatccggcattaccatcaagaaaactaataattctattctctgatgcattattgattaacgtgtcggctatgggcatgggatactcatctttaaattgtgaaaatcaatgcataccctaagcttacctgactccttcttctccaccggcacaatattggagacccactctgcatatctgcaaggtctaataaaatcagcttctagcagccggtggatttcatccttgattcgtgggagaaggtctggacaaaatgttctagctttctgcttgaaaggtctgaaaccggacttaatgggcagtcgatgctctacaatctctcggcttaatcctgacatctcagtgtaattccaagcaaagcaatccgaatattctttcaatagagcgatcatttcatttctaggattggtctccagggtcttgtttacaaaagtcggccttggagttttaccatctcctatgtcaatctcctccaaaggatcggccgatgtaaacccctgtcctagtttatcaatatatctgaattcctctatcatgtctcccacagaggaatcagatgatatttgtgtgatggcggactctccggtctcgggggccggattatccgtaacactgtctttacgctgtggtagatgttcggtcttaaag

SEQ ID NO: 69010 - DNA, 507 bp, Zea Mays
atttccttctggagtcacatccacttgtgtatagaacacttgcccggatttcctattgtccttcccttttgcactgttgccacaagtattcttgttctaattttgagaactgtttcccgtggatctctggaaattggaattattctggcggggatagggacaatctttaatgaaatgtcccacctctccacggttgtagcaaggatatttggtgccaacgggagcaggcaagcgggaaacttggacatttgcaggtggaagctggtttagccagttggtggaatgaatataggtgggattcttgaatggataggtagttgaacgataaggaacatttgcagaaccaacagtcctgattaccaccttctggcgcttcgttgttgactaagaaaaccttggcctagaaccttttcatgcctgcttcacattctgatgcactcgtgccttttcttccacggctatggccacacttattgcccgattgaaggtaagatcatagtaagtggc

SEQ ID NO: 69011 - DNA, 1234 bp, Zea Mays
cgcccgcggtgtccattttgcacagaggtccctggttgtttgaaaacccataaagaatcgtctccactatttccctgtctcactaacatctgcactaaggcccctccctttctatttcttcgcaaggtgaggtcccgaccacggacggcggagcagtggctccagcgagcctataccggccagaaaacacaacgactaggcctcttcgttgcttaacacctaattctaccctcgccgacactaatccctcaaccaattgcggagttctaactcaaaatcgctctgcccacggtgatggcgcaaactgaggataacccgaggcgttcctggcgatctaacatggtctaattcaattgactgggctgataagcatccccagtgcacaagagtgctgaaagaaggacaaggaagggatgaacagacctgtagatgtctggccatggcgagctcactcatggcggagttctaactgatttgggggaacttcaaaattggagcgctctggtggacaatctgaggcacgggcgggtgcgttggatgcgtatatacctaatagagctcactggggggtaatttagcggttccatcggcggtggtggctaattttgagaagacgcgcggtggccgggaaagagagtgagtcatcgtagcggtctgtcgtggcggtcactgggcaatgagctatggcagttactgggcagtcactacgactcgtgacgatgtggtaaatggactaaggcgtggcgcaaccgcggtgaatggtgtatattccggtgacggccgctcggccacgtcgtcggcgcaagtggatgagcgacagagcgcaacagtgcctccaagttcatccacgacaagatctttttaccccacgaagttatccgtgtgctaccagacgtgaatcgcaacgccggcgcaaatctgagcgcggggttgcctgcggcgaggtgcactgcacctatgatcttattcatttcactgtaccatcataaaccctatcaggacgcctgacagagcgatttgcagtgcctagatctccaattttgatgtgataatatgctaatccacctttaacaaagttgttgttctataatctagctttaatcttgctatatcaaccatacttaaattctcactaaatcataatcaaaatagctcccaaacttggtcctggttcactgttagtctagtttgagagctacaccctactgacagaccaacttcagctctatttttc

SEQ ID NO: 69012 - DNA, 805 bp, Zea Mays
gcgtgacaataacgagggggcaaaaaaactcaatccttatttcttaccctaagctatgaaatcatgctaacatgcaatgtcaatggtagagattataaaacaaaaggtcatgtttcatctgaatggcaagctagtcccatcgagcagtggctccacatgtcagtgtctgcttcctcagaagcaaaggcacgaaagcgaaaccctcgctgtcgccgatgatggcctcttggcaatggacacatgccgccataacgatgcaacaaagaactgcaccagaggttggctactatagtaccctatgagcctatgaatcagcaagtgttcagtgtctgccgcaaacgattgatgaatagcagtggaaaacaagctcagccgttgggcgcccgtctgcaaccaaaacaaaactaacgtcaatgtggcatcatctcgcaaaccactccagtgtcctcgatgccttgaccctcgccattgcgcacatgaccctcttctccaactagccgctcaaacgccgccacatcaactgggacagccagtagttgtcccacaggatatccagtagtagcagacacaccatgcaacgtgactgtcgacacgcaacacaacgactagcttcaatagcgcggacgcgtctcggcgtaggcccctgctcgacggcctccctcaccacctcctaggtggcatccatggagaccacacacccagcggcgatgatgttgaaggcacgggcgttcggtaggcacccagcgcgctccatgcaccccagcatccagcatgacagacaagtcacccctgtcagacaacgcgt

SEQ ID NO: 69013 - DNA, 613 bp, Zea Mays
accgcggctaactcaccccagccaccccttgcccacgccagctgctcggatagcttcgctagagacccgtgaagcttcccaaaccctcacactgagcgcaaccccactagagacgccagaccaccctcgccggacttcctccgctcaccagagagtgtggaccaggtaagccactacaccatgttcaaattcctcgtgcgcacagcctctacgccacctggtaaagcttcccgagccaaccaattaaattttatcgtcgtatttaggccggactcctcgccgtctatgagctcttccaccctcgcgcgcccatctccgactgccatcagcccatcgacgtgttcaccaggacctccccgacctccgtggacacttcaccagagctagatcaccaccggtaagccccgccgccctttcttccaccacggttactattccagtgaggttaggagcgcgagttaaatagttcacaaacctaggggattttctgcaatgtcagtgactcagataaatagtatcccagggacccgtctgtaaggaacacaggaaaaatacgccagggacccaagcacaaattggatttatttttccatttaaaattcaaatccttttt

SEQ ID NO: 69014 - DNA, 1004 bp, Zea Mays
caaacatttcagcttgttgccaatcaaatgcttgatacgtggcacatatatgttgaaaacgtcagaaacaggccgttctggtgcaatgacataacatgtttttgaacggctacgaaactgtataaagccaagttacaactgttagcagtaattgaaattgtaacatctgcataacaggacaaaaaatgtttatgtctaacctctgcatgaccgaatggttcaccagttttacggggggggggggcgtctgtcacccctagccaaatctcttatggtctcattatcaaaaaaacttaatgcggggagtaccatatttgttatcaggtgatgcagggtgatgtaagtgatcaagatagtaaatctgaacaaaaaagaatgcaaaaaaatatataattactacaaaacaaatatttgcatatcatatatatgcttggtaaacaaagaattacatactagaacaatgagtgaacatccatatattgttgttgtaatgtttgttttgttccttttgtgccaacgagtggcagcatcacacaaatccgtataaactaattgacaccagtcaatatcaaccatccgggtcatgtttgaagtcattagtacctcatttgtttgtaatgccccatgaagcagatggaaaaagaagtcgattgaataaaatcagaaaaaaacatctgaatgataactcatcatcattgccaagcactatattgtcctgaagcttgacaatatcaaactcatgtttacaaattttgagatcacgtctcagttttgaagcagcatccacttcaccataccaatcagtaaactccctgccccctccagcacttggcaaacccaaaataagacgaaccgtctcttttgttatcttcagttccttgccagcccctgggtgtatggtcatatcatgtggatccaatttatccatcaaccacctgatgagagatctgctctctaaggcatcagttcgcaaatcaaatatactagaaaatcccaacctagcg

SEQ ID NO: 69015 - DNA, 745 bp, Zea Mays
gaaagatctccagtgccatgaacctgacgccggtgaccttccgccgcaattcgtgctcgccttggagattcgtgacgtgtgagaagtagataacgccgggaaggggtgaaaagatccggggagaggataacccagtcactggccggtctggccatcgtgtcctgccgcggttagtcgtgttggcatcaccggagctcaccgtttccccggccgtgacacgtagcgatctatcctccgcgtcataaagatcgtggcaagcaaccggttatcacccctgaaccatttccctctcgcgcgccatggtgagcaggccactgtaaaaatatcctggccgctgtgacctcgatcccaatccaaaattcgtgataagcttagccagagcctataaattggaggcaccccctattccacctacttgttacgcgcccagctcaccacttctcgcccaaatttgggttttcccccaaatcagttctccgcgccgccgcgaacaacccctccgtcgacccaccgctctgtccctccaaccaccttcctagctgttgttcttgagtcctagtaagttgctaaagcttatcatgctcccaatttatatgctactgcactttgtcgttgggaatggaccgggaaagcttcaaatcctcgggtgcccatagaccgagctctaggacgacgttcgggatcaattagtgatccccagtggagtgccaagggtagaattaggtgtagttcgaattcgagcacg

SEQ ID NO: 69016 - DNA, 365 bp, Zea Mays
ctttgggttgttcccttacgggcataacatttgtgttgttgtagcagctttgatggagaaggatcggacgaaatccttgaagaagaggaaggccccgaaggctctactgcggctggtgaatccccacaaggagacgagagccttcttggctacagttgtgggggtatgatgcttacagacgtgttcgcgaaggctactgttgctgaggcaatgctgcctgtgcctgcccgtgccgtttcggttatagcggcgtcatctctggttgagcctgcacaagctgttgcaccgtaagaggtggaggatgcaacttcaggcgggggttggttcatgagttgtcggtggacgactacctgattgaagggttt

SEQ ID NO: 69017 - DNA, 357 bp, Zea Mays
gcaatcagcgacaggcgctgatttggatttggaagaagacgaccctgacgcggtggcacaatcacatctctctgcttcatggtggtggcctcctccgtcgcgctgctccatggcgagatgagcacaggcctgcctaacgacgagcgcgcgctaactctgtctcttttcttgccagcgattgattcccagttcttgcctatatagccatggctatggactagataatgatggggttggtggcagatccgactcacgcggcgtggaaatcggatttagttaggattcctcttgaggtgcgctcgatggggaagaagatctatctgccgaggggggtaccagtcagcaacagagggagag

SEQ ID NO: 69018 - DNA, 470 bp, Zea Mays
ctaatggtcatacaaaagatttctggtgacgtgttaaagactctgtagtgctgtaggccagattgtgctggactctagttctgatatgattctgtagcattttattttattagccttgaacgcggtagtcgatacagtataggcctgtttcaaaggttcatcggaaacagttctgttcctgccaaaattggggaatttccagcaaaaacattagatatccatcctgtgagcagcccatccccgtcatgatgtctctgtctgctctcctgtcatctcatctagttatttttggtgcttcagtttattggttttttgcatcctgaagtgatgtgtttctatgttatgttcgtagttttaggttgtgttgctggtgtgcagtgtggatttgagttatacttgttgggtggttagagtaattattttcgtcttacaccataactttggattgtgattggaacatagctttgaac

SEQ ID NO: 69019 - DNA, 520 bp, Zea Mays
aaaaaagctaaggccaacaataacaacaaagtagatcccctgttggcagctgatgctgtttctgctcaagggtggattgttgaaggtggagatgaagaaagctctaatgtcaacattgtgactggactaacatggcaacagatcgcagatgcatgggggcctaaggaggtcacaaaactgcggaagagtgctagattggctcagccaagagacatcgaagaagagcaactcccatctaaaaatgaagaagaagaacccataaatgaggaagaaatagaatttgaatctgaccaggatgaagtgatcacaactggttattagctgcaggagcaagaagtagtcaatgatgactgattttgatgcctcgaccatctacttttaatcataatattatgtctaatattatcctattagttagtgtcatgttggagtggtaaatctagtcttttccatttgaatattggcttgcaagccttagaccttcactacctgtgattgtgagaactatttcagtatttat

SEQ ID NO: 69020 - DNA, 562 bp, Zea Mays
gaacttgttcttagagcctcgagccaattaatctcaaaattggcttcagcctcaggggctggtgggggatggatatcccccaggtggcacgacctggctacaatctgtaggtcgatgaagaggcctcggtgggatatacggctgggctttgtaagctattagtcgggcgtgaccagacacaagcgggactgcggttgcctgggtgccaaggcacatggatcggaccccacccatgcggagggcgtgacgtgttcctaaggactcgctgacttttgtatgggtcagagttagtttcagaccggcaatggtcgtgggacgtggtgtgcgtgactcagctctctcgtcggcataaggcggatgaaccacccaatggagaacacgacaaatctcagtagacaaagtcgtcttctaactctagaattctctgtaatcacaaccaccaagcaatacaatcttcgaacaacacaagacgtagggtgttacgcgcttcagcggcccaaacctgtataatattcttagccctgcacgaaccatgagctgcaatcgacttcgtcgtcctact

SEQ ID NO: 69021 - DNA, 884 bp, Zea Mays
tggaagagaccttctagtgtctctgaaatccggtgtttcttggggcttgctgggtattatcggcgcttcgtaccaaatttttccagcattgctaagcctttgactaggctcttggagaagggtgttcccttcgtctggtccggcgattgtgaggtcagttatcagtcattgaagagcaagttggtggacgcccctatcctagctttgcctgagagcggtaagcgtttcacagtttatacggatgcttcacgtattggtcttggctgtgtgctgatgcaggaaggcagagtgattgcttatggctcaaggcagttgaggaagcatgaggggaattatccacctcattatctggaattgtccgcggttgtttttgctcttaagtcgtggaggcattacctttatggcgagacttgtgacattttcaccgatcacaaaagtctcaagtatatttttactcagaaggagctgaatttgaggcagcgtcggtggctggaattgattaaagattatgatttgtccattcattatcacccagggaaggctaatgtggtggctgatgcccttagtaggtccggggttccgaaggtggccttgccgttgatcgctgatctggaccgtgtggggatcgctttgtgttatgtcggcaccgctagcaaggagactcagatgcttattcaatcctctctcatggagagagtgcgtgcggctcagcagcaggatcgtctattgcaggaagctcgaaagagggtgggtgatggtaaaccacgggagttcaccattgatgagaatgatttggttcgtttcaggggccgcctctgtgtgcctcagaaatcagaggtgaagatggatatcttgagagaagatcataaaacgccttacaccgt

SEQ ID NO: 69022 - DNA, 699 bp, Zea Mays
agtcaaccctggttttagggacctcgccatcagagtcgctatagtgactcacatacccaaaaggacgtgacagatacaccataccacatgtatgcctacgcatgcgagcgggtgatgtaggcccgtgacaagagacggagtcgcgccattcacggctgcaccgtgggggctgactcacaggacccgccatgcactaccaaggagatgtcaacaggggactcgctataggaggctgtataccataccaggagtacggctacgcacgatcctacggagggtggcccactacgatgacccggaggagcagatttatctttctctctctctctctcatagaagaccaatctcctctgtaagatccaacacttgagctataaaagtgcagacccctctccttcttttgggacaccagcacccacaagttgtaacacgttccatcgcaatactacgattaacactacattggactaggactctggcctgaaccagtataattttgtgtccaaagttcatctttcgagtcctaaagattcgccatttagagtgagtccatgctagcatcccccaccgaacacaaatctattgtccctcggtttccgaaaccatgacagaaggacaccatatgaggccactaagattagggtttaagggcaactttcattggatctaaccaagttaccaccttgaagttcaccagca

SEQ ID NO: 69023 - DNA, 446 bp, Zea Mays
cctgtggctcctcggccttatcatctttagcttcggctggcccgactgtaggcaccttcggcactatagtcggctcttcagcgctctacacaatcggagcagcttgctttacttcggcagctgaggaggtccccgcgccaaatttaggcaccacggtcggttcaatgtaacatggccggtgggtcagaaccttcatctttttacccttcggctcagctgcaatggccgaagcggcaggctttctctttttctcttgccctcgtaatgggtaatggtaatcagggtatacgaagccaatagcatcaaataccctgttcaatcttttcttgccccgacccccgaaagctgcggacaaagcattatcttcggccttggagtatgctccaagtagctcatcactggtagcttcgatacacttcagctagtcgtcgtctggctcatcaaac

SEQ ID NO: 69024 - DNA, 405 bp, Zea Mays
tagaaatcagagattagtgccctacaaatgaccttgtcagactgactcaatggggttctgatggtacaatgccgtagaaatatctcaggttcagccccccctcgccgttgatgatcttgcgctcggattcacgccggcgccgcgattcacgcccagttaaacggagataacgatccccgggtgaaaagattccgccgtggatgaacttggagcacagtagccactctgtcgctcatccacttaccggcgacatggccacgcgaccctcaccgtcgtgccatcgttcctcgtggttatgccacgccgtcagccatcttatcacgtcgcaattgatcacaatacacagcccttctattgcctaaggccttgccacggtaacagccacggtcaccgcgccagtgattc

SEQ ID NO: 69025 - DNA, 642 bp, Zea Mays
gttatattccggacaatcctcgatttattggcatctagtttgcacattagcatatgatgttctccaccaaacagtaaagcactagggccataccccaaggttttgcctttttgccctagcttcaaaacttcttcttcattcacctctttgccactaatatgtcttgtgaagaagcctaactcctcatcctccctggtggtttgcgtagcttcgaccacctatgcttggaggcatagtttcttggtcctttgttccaccttctcccgccctgaagaaccgccacctttggcaccattcttaccaaaagaggatgaaccgccgaaggcgacactgctaggccccacaatatgtgggctctccacttcttcatcagagccctttgaggtcggcataaaccgagtcaatgaatgtactaagggactcaatggggaaaatggtagaggttgagtcattacctcaagaatccgggtgcagttcaatgacgaagttatcgttgttctccccttccccggttcttgggtgaccacaacttttgttcgagccgaagcctttgctatggctacgttcttccaaaggactttggctttctttttcacctagcccaaagatggctcttcatcctctttcttcatagccctcttt

SEQ ID NO: 69026 - DNA, 588 bp, Zea Mays
gacaaggacaacggtttcccgatgtacataactgttgcatgatcttcgagggggcaccgtcaacctcccctcgaggcagagcaagaaggaacgcggggaagtcttctcggtcgaggtaacaaccctggtctacctagactggtcggatcacaccattaccttcgaccgagacgatcacccggactacatcccgaaccctaggaagtatccgcttgttgtctaccccatcatcggcaacacacgcctcacgaaggtgctcatggatggaggcatcagcctcagcatcatctatgcagacaccttggatctcctaggggtcgggcggtctcagatccggcctagggccatgccattccatgggatcacccccggcaagagggtgcatcccctcgggcaaatcgacctgccagtttgcttcaggacccccaccaatttcttaaaggaaacactcacttttgaggtggtagggttccaaggtacgtaccacgcagtgcttgggcagccatgttatgccaaattcatggctgttctgaactatatgtatctgaagctgaagatgactaggcccacgggtgtcatcactatcgg

SEQ ID NO: 69027 - DNA, 445 bp, Zea Mays
atatgagaattctgccaacgaaagacacttgtcccaattcttcccatagtgcaacacacatgccctcagcatgtcctcgagaatttgattcactctctccgtctgaccatctgtctggggatggtatgctgagctcctaatcacagtggttccaagtgacttttggagctactcccaaaagcgtaccacaaacagtgctcctctgtcagatacaatagtcttccgaattccatgcaaacgcactatttgatcaacatagatttctgcatatttctctgtcttgtgggtggtatgcactggcaagaaatgagcggtcttagtcaacctatccacaatgacccaaatagaatcgtggtgccgggaggtattgggcaatcctacaataaaatccatgcaaatatcctcccatttccaagatggtatgggaaggggctgtaaggcgcct

SEQ ID NO: 69028 - DNA, 1032 bp, Zea Mays
gggagatgtatgcgacacaagcatagaggttctagatagaacgagtaaagtggttcgacgggaacacactatggttttcacaccagcatagtgaaaaatgtctcagaataacctcttggcatacttgcaacttcgtgttgctagcggttacatgtccttttatctcatagtttgcttcatgtcatccagcgacaaagagagcaatgtgctaacatctggttgagcaatgtatgactgagatttctgacatatattcatctgataaggtcttattgcttactaataaaatcccaatttgtgatgttttctgtgccaaaaaggctttcatgcattaatattgaatttcttcaggttacttcgggtaaaactttatgcacgaggagagagcagagatttaacttatatgtgtttcattgtatttcgatttaatttcccagatttaatatagttgttatggccacttggcgatatatataaatatacgatgccacacaacacaatcaaacaaaatatagagagaaaacaaaattgtttacgaaggttgcacataatgtgacttcaggaccttgaacaacccaccacaatccacgcgagtacaagctctagtgtatctggcgtcaacgcgtgtgcggccatcagggctacgacaatatagcaagccttcgtaataagcgcaacaggcacaattatggctcggtaattggggtacacgataaatccacgcaacgtgtgcaacaggcgcaattgtggctcgatgatcacggcagacagacagtgcctacagggcatgcgaaaaatacgtgacttggcgattgcggtccgactcaacgggagcggtccgattaaatgagagtgcgacatagcaatcacatgacacaaccaagttcgtacgacacaaaatactgtgtcgtgttgccagggcgcaaccaatacttagccaatgttataactcagccgattaaaaacgtagtttgattgacgcgatcaagtacctactatacaatttaatcgttcggcgtgagtccgaaagct

SEQ ID NO: 69029 - DNA, 1006 bp, Zea Mays
cgaagatgcagcctctgggtcgatggcaaccgcactgctacgtgggagggggaagataaataaaaatcagacaaaaagaggaggtcggcgagcccgagggaggatgccaaccttgacttgtgaccgacagagcgcaacatctcctaaagctcaaagtttgaccgctgactaggttggagacaagttcgaaagacaagttaaggatgaatagcaggggagcgaccacccaaggtttataaagagggtagaagggcgctcgagtcctccctaggacgtggacgatggtacgacaaatttccgagttacgccacaatttctttgggaacaaacagacaagacacatgtccgacccgttatcagcccataatggaagacagtctcccctcgagggcttggggctactgttggggaaatgatccctaatccctgtacccaccggtcattgagtgcgctaaggaaagagccattaattgcaggggcccattagtcagtcggaagaggtaggtgcaccaaccttggatggacccacccccggtcaaacctcgtggaacctagcctggggccgggcatggcgaagcctgacaagggaggacaggcgtgtcagaagggaaccacttgagtggatcctgctcctggcgccagactaacccaccataaatgaccaactgcattaaccacgtctggcaccgagccacagcgtgggcaccggtctgcttcccactcatgacctactgacccctcaggcagcataccacttatgacctatgagcccccggactgtggcagattaatgggccgcgtgcccctcagccaacaatgcacttatgccatatcgtactaggcctaagtgtgtagacctcccgtagggcactacacgatgggtcgcaccgagccccaagctacaaaagctaggggtcagcatagcccgaatgatagcgtctgggacaatagccaccgccacgtcatccaccatgataaatacgtgacagccaggcatccccgggcc

SEQ ID NO: 69030 - DNA, 669 bp, Zea Mays
ctctgagtcattgacggtttacacataaacccttcacgttttattttcccccaagccgaggtcctcgacgacggtgagcgcgggggatgaactccggtgaggttgtgccggtggattcacacaacgaccggtgctcccgagcggccatcaccgaatcgaaccttccccgagtgtttcccctaacttaatttgaagattggtatcctaatttgccttggccacggcgaccgaaggccatgcggacaaaggaacatgttcccggtgataggtgatggtccagttcaattgaaggggtcgaagagctttaggaggacctagggatgctagaacaagccacgaagagacttgaactgacctgagctgagctggtcgtggcgaggtcgttttcacggtggcggaaaactaaattgggggaaatccggaattggtgctctgcagtgaacgattgctggtgattcttggtggctggatgcttaactatcctatggagctcatcgtggcttcaatttattggaaggaagagcggtggcgctcaatttggctgagcagtgctggcggccggagaaggagaagagcactggcgcagtggattggtgtccaacaccgtggcaatcgctctggtgatcaacggagagcgagagcagactacggcgatgcggtggaaagggt

SEQ ID NO: 69031 - DNA, 777 bp, Zea Mays
gaggacttcactgataaagtaaactggctgctgtactagatatgtgtgcccttcttctgcctacttgactacaaatgcagtgcttaccatgtgagtcgtgcaggagatatatagtagcaggtcttcaaccggctgattggatgtagctcggcgtggcggcttgagcactggcggcatggtcagaaactttcttagtgcttccagagcttcttgagcttcggtggtccactgaaatttatccaccttcttgagcaacttatagaacgacattcctttctcacccagccttgatatgaatctgctcggtgttgccatgcatccagtgagcctctgtactttcttctgtgatcgcggtggctccatcctcataatggctttaatcttctctggatttgcctctattcctcaatggttgacgataaactcgagtagctttctagccggtaccccgaacacacacttctctgggttcagtttccatcggtagtacctcaagctgttgaaggcctattgcaaatcctcgatgaagttgtctaagttttctgtcttgatgactacatcatcaacataggcttccactcacttgccccattggtcggctaagcatgtttagatagccctctagtaagtcgctccaacgtttttgaggtcaaacgacatggaggtatagcagaaggctccaaacggcgtgatgaatgcagtcttctcctcatcttcctttccagactgatctgatgatatctggaatagcaatctaggaaggagagcatagaatag

SEQ ID NO: 69032 - DNA, 517 bp, Zea Mays
caattttgatacattcatcgacttgctcaacaagcaatctctgcaatgtcccaacacccttgtcggtacagagcaagtcttctttgacggtctttctctcacccatcatcgacaagaggacatttctactcgtcctcgttccctaactctacaacctctctttccctatagctttccactctccgtttcaatatgaactccaggtggagtcccaattttgatacattcatggacttgctcaacaagcaatctccgcaatgtcccaacacccttgtcggtacagagcaagtcttctttgacggtctttctctcatccatcatcgacgagaggacatttctactcgtcctcgttccctaactctacaacctctctttccctatatgtatcgtccacctccgtatccataccgaccaaatgatgatgctcctcctcccactactaagcttctaacaatcgacactcctaccactgaagccccttccaccgacactcatcctcctcatccttttgcttata

SEQ ID NO: 69033 - DNA, 505 bp, Zea Mays
aacaatacataccaagcgaccaaagaaaaagggagatccaatatttcgtgttataaataaagtacgcaattataaaggtaccacactcccaacacctttaccttacctcctttggtacaatatagaataaatcaagtgaaaattgagaaacatgataaaaataaggtggctgcacaagtcacattattggatagagatgatgaaactttacctatctccttatatgataatagagtgctttatatgatgcaacagatgggctatgatacatctactggcccttcactatgcgatggccgagggcagcttgcgccatttgaaaagatgatgtcccaagctcatcttgacgcattacatgaaggtcaagccttaaaggaaacaaaatatgggctaggttatgaggttcatatgacctctatcgagccagttgatgctacaacaacatctcccgaatggaagatggaaaccagccaactattgatgagttggacgaaattaatatcac

SEQ ID NO: 69034 - DNA, 475 bp, Zea Mays
ccgttcataattagtgtccctacatttggggcaggccattcattgtccaaatagatcattacagcctcaaattcatccttcatcagcggctatcaataattccacagtacatctaggtgagtatattgtttggttatgatttagaagtagattataggcccaaggagttaaatggtgcagctgattctttgtctcgtcgtgatgagtctgaaggcatcatcttcaacatatctgcacctaagtttcaactatttgggctaaacctaatggcttacttctattcaaatgagaagtgttcatgccaaacaattcatccttgtgacctcaattgcttgtcgatgcacatgatgttggccatgaaggtgtgtagaagacaatccacaagtggcgggcctccttttataatgctcatgcactgaagtgtgttcgtgaatttatcaagagttgtgctatcagagaaacaagtgaatacctt

SEQ ID NO: 69035 - DNA, 473 bp, Zea Mays
agctatcttatcaacaaatggttggaactgttgcctagtcaacttgtgtaaggataaagggagccccaaataatgtcaaggaaaggttgaaatttcacatggcatcaaggtttggacttcgagcagaacctcatcagagcatctgataggatacatatttgacttttgcacattattatgtaacacagaggcatctccaaacaattgaagaatgttaagagtaaggtctatatctgcaggtgttgggcataaggaaaggaccacatcatcagcatacatggagactcgatggagccttttttctactagaaagctgctgaagcaaaccatcattttctgcctttgaaaacatgtagacaagaacatccataactaaaatggatagcatggatgagagggggtctccctgatggagtcccgtttgacgcttaatatggcgacttggaaatccattcaatagaatctgagtagag

SEQ ID NO: 69036 - DNA, 352 bp, Zea Mays
tttggtgcgggtcgcccgcagcttgtcgaagaccagggtcagatcttctactacagttgatccctttctagtcttgaccacgatgtcatcgacgtaaacctccaccttgtcccggatcaggtccccaaaggtcttactcatcgcctgaacaaaggttggcagggtgttcttcagaccgtaaggcatcacaatataacagtacaacccatctaccgttacaaaagcagtgtgtttcctatcctccctagacatccgaatttgatgaaaactagagtaggcatctaggaaagacaaaaagtcgcaccccgaggtagagtccacgatctgatctatacgtggaagtgggtacggg

SEQ ID NO: 69037 - DNA, 485 bp, Zea Mays
cgcttcctgttgttctgccccccaggtgaattcgacatcgtttttaagccaaaggataggagtgaaggcaccaatcttcccagctaggttagaaataaaccttcgtaaataatttaccttgccgaggaatttctgcatctcaagtttataggtcggaggtcccaccttccgaatggatttaattcggtcagggtctatttctataccatgttcatgaatgatgaatcctaagaacttaccagccgacactccaaaagcacatttgtgtgggttcattttcagaccataccagcgcattttatcaaaggctttgcgcaaatcagctatatgagaactaaactcagccgatttgactacaatatcatcaatgtagacttccacagtgttttctaacagctcgtgaaagatcaaattcatagccctctgataagtagcaccagcatttttcacaccaaatgtcatgacaacccactcaaataaaccaa

SEQ ID NO: 69038 - DNA, 357 bp, Zea Mays
gccttgtcgtgatagcgccttagagtctgctggtaccgtgctgattggattactgcgttaagtcgttcttcttcgagtacatcaatgtcctccagcctggtggcctcagcttctgctatgctttcgaagatcaaccttggcgccccaaacttgagatcggcgggtagcactgcctccgacccatagaccatgaagaaaggagtgtttccatgcagggctcggctaggttgggttcttaggctccaaacgacatagggcaattcccttatccactttcctgcgaatttttcattcttgtcgaagacctttttcctgagtgcctccagtatcatcccgttggctcgctcaacctgcccg

SEQ ID NO: 69039 - DNA, 303 bp, Zea Mays
tatgcatctaaggctgacaataggtcgctatgctgtctctcctcaaaggggattatttgtagatagtaagaatgctaaatgctgggtaattaagaaagctgaatgtgtgcttcataacataatcgttggactgttttatctccaaataaatgatctgttcttgtgttatgtatttattttctacagtaactctggttgacaagtgccagccaatgccttcctgttctctgattagtgcacactgggatttctaatgagacttaatatttagtctcacggttgctttgttctgttgaaaaacat

SEQ ID NO: 69040 - DNA, 392 bp, Zea Mays
tctttatccaccaataatattgttttagatcatgatacatcttagtggttccaggatgaatagaataatgactaagatgtgattcatctagaatttgctggcagatctcatcattttttggcacaactatgtggttgttaaaccatacaacaccatgatcatctcttctgaagcagttggcttttccggcctccattttctcatgaatgtgtttcattccctcatcatttctttgtgcgtcaattattctttgcaggaggactgactcaagcttcaagtgatttgaagttccatgttgaatcattcccaggttcaacttctccatttcttggcataacgtaatgtcagaagtcttcattataagacaatgacagaaagccctgtgacttaac

SEQ ID NO: 69041 - DNA, 967 bp, Zea Mays
ttgggatcgtgtgagggtcctcgccgtggataactccagccagtaaataaatccggccactgtaccgcactcaccacggccacttcggataacctcgccggtgactgccgacattcggccttgtgccacgtgcctgggcacctccaccgcatcgccgtgacccattgtgactctctgttgatcaccggaatgactgccacggtaataggacaccaatccgcacgccagtaactttccactcctccgaccgctgcgtgtcgtcgctcgaattcccgaccatcgctctcgcttagtataaattgacgccaccgtgagctccgtaggatcatcacgcacccagccaccaagtattgccctcagtcgatcaccaacaagctccaatttcagacttcccccaaaaccttcaagaacaccgagtgaattgatctcaccgtggtcagccacttccaggtctgctcataccttctgctccctcgtttgagtgtccttatgtacccgtgatgcttatcgacccgcccatttgaactgagctgccttagatcatcgggaacgcgcttggtgctccgtcgttgccgctgtcaccgtggacagagcactgtaggtctccaatctagaaattgattgaggggaaatacgtgggagtagttcaattcggtgtctgccgctcgggagcaccagtctttgtgccatccggtcagtctaacctcaccggtgagcaaagctccgccgcgcgatatcgtggtccaggcgcggtgaagaattagaagtgcagggatttttctgtgaatgtaagtgagacagtgaatagtggctgtgggttcttaacggatattcaaagcagcgagggtctctgagtaaatctgccagcgtgggcgcgggcgcgcgcgttttccacccgggattgggtcgcctgggctggatttggcccaagactgttcattcccttttctttttctttttctaccag

SEQ ID NO: 69042 - DNA, 470 bp, Zea Mays
gttgcggatagcctcaaagagaagctagtctattgctgacgaaaaaatgatattataagtttatggtgaggtatagagggataatatagggaaaatcgttgcgtgagatggtaatatagggtccaatctaagtgatgtggccagttagtgagatatagggaagaaatttagggtgaacacttatgatagtctccacaaacaactagtcgcagtaggttgtcatcatcaccttcccggccgtgtgccctccaccgccaccgccacgttcaacagcctcatggcctggctcctcaacgcgtgcaataggcaactcgagagcaggaggttcgccacgggggagatagaggtggatagtggctactcacagaaaaagttctctgatatcttcgcgacgacgcattggatgggacgtcggacctgacgtaggggcagtgccgtgcatgccatggcggggatgcctagtcaggtct

SEQ ID NO: 69043 - DNA, 469 bp, Zea Mays
ttggctatatgaaatacgacaacaatcataaaactcgctatatatgtgaggtacattattaccttgctcgtagcatacaggagaggaggagctgtattcgtctgtttctctcatcagttacagccaacttgcatgcatccgatgatccattcaccatgcatgcatgcatcgacgtcgttgacgacgactgatgagctacggctgccgccatggaggacatggtcggtcggggcatggattttctatctaccgaggcctcgccgccggcaacactattacattattagccttgttgatccgcagtgacgtgtttgcgggctctacactgcacggatcagtcagcacagccaaagcccacaagccacagcacagcataccacctgtatatgtatataaatacgctgcaacgtcgctcacatgccatcccggccctagctgcgactgcgatgcaagcatcgcacgcacccag

SEQ ID NO: 69044 - DNA, 441 bp, Zea Mays
cgtagaccggccgattggggcagagactagcgctctactttggctgaaaccgaattcaaaccctaactaacgtttcccctaacctaattccatcaatggctacatggtttgctctggccacagtgaccgagaaccatgcggacaaaggaacatgttcccggcgatgggtgatggtccagttcaattgaaagggtcgaggagcttgaggagggtctagggacactagaacaggcaacggagagacttgaactaacctgagttgagctggccgcggttgagctgttcttcacggtagcggagatcagtttgggggaaatttgaaattccagagctcaggtgaatgaccggggctaattcttggtgattggatacttaactaccttacggagcttgcgacggggtcaatttgtactacgggagggcggcgaccgggaatttgat

SEQ ID NO: 69045 - DNA, 430 bp, Zea Mays
gaagatcagattctgaaataacagacatgtggttacccgaaaatggcaactgactattggggtcgatgggcgggatgattgccacggcggagctctgcctcttccgtttcggcgccatcgcaatctcgcaggcagaacgaacaggagcgcaatctcagggaaatagaggagtggttcggagcggaaatgtgaagttagggctcagaaatcaaaagcgcacgtcgacacgagtataaatggggttttcccgggtcgggcgctatttctaaaagtgccaagtcatcactcgggaaagcgaaacttcagacatgactcgacggttacctctaaaacgccgacagtgtcaagcaccactcggcggttacctctaaaacgcgtgcagtgtcaagcaccactcgacggttacctctaaaacgccgacagtgtcaag

SEQ ID NO: 69046 - DNA, 470 bp, Zea Mays
gtggcggagcagcgactccggcgagcccataccggccggaaaacacaacagctatgcttccccattgcacaacacctaattctacccctaacaaccatttcccctcactcaattgcaaggttctagctcacaatcactctgtccacggtgacggcgcaacccgaggataatccaagatgttcccagtgatctagcgtggtctagttcaattggccaggctgctaagcatctacagcacacagggatgttgaaacgagagtgaggaaggcatgatcggacctgtggagagctgaccacagtgagctcactcacggcggagttttgactgaattgggggaacattgaaattggagcactctggtggacgatctaaggcacgagcttgtgcgttgggtgcgtgactacctagcggagctcacgggatgctcaatttataaggcccgagggctgtggctcgtgaatttggaatg

SEQ ID NO: 69047 - DNA, 1459 bp, Zea Mays
cacgtgttatacgaccgactgcatccgaatgtgccaccagaggttgcagcaatgggagccggaacatctagagcagctagtggaggacctgatggggagctagatctttttggagcccctccttctatgaacctcgcagatgaacgtgctcctgaagctggcaggggagcgggagcggctaaggacaaagataattagagtagtgtagtttaagtagtgtccttatgtaaattaaataagaaagttgagttgtatcagtgagtatgtataattattaccaattcaacataatgtaataaaggtggtgtactttcggcatgtaataattcagtatatttttcttcctcagatgctcatgacgtggcgggaacttcccgcggcggggaggaaactccaaatccgccacatgtacctcccacattggctgaggctattgctgccttagttaatgctaccgctgacaacacatgtttcctgtgtgaattggtggggaatcagtttcagcaacatggatgcagaggtcaacctcaagggccccgagacaccacatacttggagttttctgaaacccgtccatcgctttttgttaaagctgaagaacctttagaagcggatgaatgggtatgggttatggagcaaaaattcggactgatccgatgtactgaaacatagaagcccctattcgccgcccaacagttgagaggccctgccatcacttggtgggcaaaattttcaactattcagcctgcgggacacctggtcacgtgggcagaattcaaacaggcgttcagggaacattatgttccagaaggggttctacagatgaaactggaggagttcttacgtttgaagcaagggggagactcagtaacgcaatatctcaacaagtttaatcatctctcccaatatgttatcgaccaagtggacacggatttaaagaagaaaaattgcttcatgaggggtttgaatgatcgactccagcacaaaatggccacatgtctagatctcacctatagcagggttgtaagcacaacactgtcagtagaagccaagagttcgggagaaggaaaaacaaagagatatgggggtgaaggatcatctcaggggtctaaaaagcagacaaggatggtaattcgtcccttcaacccaaatcgtttttctcctcgtccacccacatatcccttcaggcaacaagtgttcatctgtcccactcctacctcacccagaacaatcagccgaatgccccgggtgctcgtttccccgccctacccagttcctcaaatggttgctttaattgtgggaagtctggacactttatcaaaggctacccctacccgaagtagaataaatcaaatctccaacaaatttatgggaacacgactcaaggtaaagggaaatgtgatcaaccctccagcaggcaagaatacaaataaaactaggcgagtttattacaaccaag

SEQ ID NO: 69048 - DNA, 576 bp, Zea Mays
ctgcgttggtccgagaaaataatgaattccgagtgttgaagataaggtctccactggttcactgccaatagaactgcaaggtattccttttcgtaagttgagaggccttgagtcttggtgctgagtgccttactgacgaacgcaagaggatgtccttcctgtgtaagaactgcacctatgcccttgccagaagcgtcagtctcgatagcaaactgtttggaaaaatctgggagagcgagaaccggtgccgtggacaaagcagttttcagtgcctgaaaggattgctcgtgttctcccgtccagacaaacggcgtgttcttcttgagaaggccggtaagtgttttggcgatgactccaaaatgtcgtacaaacttacggtagtaaccagcaagtcccaggaagccgcgtaattgtttgcaatcagtgggttggggccaagtggtgacagcagcaaccttagaggggtcggtggccacacccctgttggatatgacgtggcccaaataatggatttgttgcttggcgaatgaacacttggagagcttcacttgccactggtctgtggacaacaactgc

SEQ ID NO: 69049 - DNA, 579 bp, Zea Mays
ggcgcgtttattattgagctctgagcagtgagctctgactgagcaggcactggaagtactgtagcattctctcgttcgctgcttggcttcagcgcattccgattgcgagcacaacgtagccgaatgcgttcatggtctggatcgggattctctctcggtctccctcccgtcccgtcccgtcccgtcccgtcccgtcccgtgagagcggataggttgaaggagtactagtagagtacgtaagtacttcggtagtactggattggtactaagattggacatcggaataccgataataccaggcaaacacagatgtcactactcgaacacgaaaggcaagagagcgagaggcaaacaggaaaccaggaaagagatgatcagtaggggcacaagatgcaaaatcattgtacggttgcagcactgtccagagcctgctttaacacgcccttgtgtcccgtggcaaatccagcgtaatgactggctcagaatggcaataaaaccgtctcaggagtaaccactgtcaaacacagttactgcggccactgactgttgtaccgtacacctctgggttgagcttccggc

SEQ ID NO: 69050 - DNA, 313 bp, Zea Mays
gtagcgtaggtggatagcggtgtcaaagactcatgtgatgatggagtcctgaaaccctctatctcctgcatccaacactctgatatgcacgcgagtgatgtagtaacaagctcgagggggctcagacacctgttgtgtgtcgtagagaggtcgaatgtaggttcccaacacatgcagcgcatcttgtagcaagtttgggaagtgtcccgtcttgaacattgaagtgtaaagttccgcgataggccgcaatccaacaaagttgtcctcatgctcattgttggcatcctcaatgttgtcattattttcatcgtct

SEQ ID NO: 69051 - DNA, 1039 bp, Zea Mays
agcctacacatcactcgttctagaggaaggttgatttggtgtcgatgaactagtctgtatcaaaggcgtaggagtgggactgtgggagatagatgtaccatgggtcatcgtcgcatggacacgacccatgggccgcttaagcaaacccccaataagtcgaggccaagctatgctattaggccgactcacatgggaagctagtgctgccggaaggataacataactcttccagaaggattccgaagagcacgacatcaagacgttatctatgtgcgtgtatcgcagaagatccaacaagatttcgaataacgtgcccttcgtgtggcaggatagctgattgtttgacgccaagctcggaaggagataaccaccggaagagtcggcgcgtaataatagcgaaagtagataggtctagataagttttcacgacttataaagggatatccctccggtcacctatataaggctgagagggtaccctacaaaacgatctcatcatccctctcgtaccaaccacacacattagattgataggagagtttatccatcgctacccactactcatctgtaacttgtgcatcaccaacaaattcaatactcaacgccaataagacatagggtattacacatttaggcggcccgaaccagtataactcccttatgttccgacgtgcacctatgcgtaccatcgagtcacgatcaacgacgccgtcctacccaaaagaaccacgcggggtaccccgtagtgcgtagtcgggtcataaacactgacaactggcgcgccaggtagggggtgtgacgttgtttcacaacgactccatggtaatcgtctgtaacaccacgatcgtcttcaacgtcggggaggcttttcgctttggatccctctcctggatcgcagaccggaaaggcgtcctgcaccgcatcgtggatccagccaaaaatgaatcttctctcatggctccgatcgcggatgcaggctcgcgccacctgaccacagcaaggactactccgacgaactcagaagcacgaagacctcaac

SEQ ID NO: 69052 - DNA, 987 bp, Zea Mays
cgccggtggtgtgcacccatttgccgtgccatccttcggctttcctcttggctagtctctggaaagacgcaggcggtgtacacacttacctctcgactgcagctgacagtgggtggaaagacacagttaaggtactcgacgtaagttctttgaagaacgaccttcggtcagacttccgcctcgcctgagcacaactttgacctcgatatccacaacggaggacgaccgacatcatcagacactacagagctgacacactacttagagaagcttttcccatacttagcattgtgtcaaccactatgatatgggcaacctctcgctaggggctcgggtacgtgaccgagccatcggcctcggctctcagcagaaaccaagcaggcgtaagtaaacaacaaataccagactattcctcaagccataccatctatagggttacggtgacaactcctcacagtgtgtggccgactcccgtcctccaggcagctccccttggggctataaataggatagaccacagcttctgaaggacggcagacgaacactccacaagttttcttctccacatggtattggtacttgcctcaatcaaccccagggacttgggatccttctcactcacactatgcttgtattccctactacaagcacttaggtgcgagtaatacaagtctcatcccccgtttgctaggagtagggcatatacttgcccgaaccaggataaaagacttatgtcaactcgcatcaccatctaggtctggggcacgcggtattatatcactagttggttaggtcctcggtccaaagagcatgagtctcgtttgtacgcttggacataaagcctctcgctttgctgcgcagcgccgcgacggaaaaggaatgcttcgtgttaatgaataaggttgtccacaacaaattaaaataggggatttatagtccatattcaaagtgaagttaatgataacattagctaaaggcatccaaata

SEQ ID NO: 69053 - DNA, 4008 bp, Zea Mays
gtgacttccagaaaagactagtaaagattttgtccctatccgaaaccaaagacttgggagtaccatgcagtttcataatgttgtccagaaatacttgagccactgtagctgctgaaaaaggatgtttcaatgcaaaaaaatgagccgacttagtgaaacgatccaccacgaccaaaattgtatcatagccttcagacttaggtaatccctcaatgaaatccatcgtcaaatcctgccaagcaccatgtggaatgggtaaaggctgaagaagtccagaggaatgctttctttcagtcttagcatgctgacaaatgtcacactgactgacatactccaagacatcacctttaagtcccttccaccaaaacattctcttcagtctgtgataagtggcttggcctcctgagtgccctcccatagcactatcatgcatagcagaaatgagtttggttttgagggcagaattattggccacccaaatcaacccattcttccttataataccctgatgtaaagaaaacccatgttcatcaggactgtgaatggccaactgacccaacaactcttgagcttggacatcagtaacataagaattcagtacatcctgaatccaaagaggctgaacctgcatgatagtttgcattaccatagcatgtcccactcgagataaggcatcagcagctatattctctttgccttttcgatacaccaccctgaactggagtcccataagcttagccatagccttgttttgccattcagaatgcaatgtttgatcctccaagaagctaagagccttatggtcagtcttgatgatgaattctgcatgttgtaatattgtcgccacttggaaacagccaacagtaatgctaaaaattctttctcatatatggacaacaactgattctttgcactaagagccttgcttagataagccacaggtttatgtttttgcatcagcactgccccaatacccactgcacaagcatcagtttccacttcaaagggcacctgaaactgtggtaaagccagaactggagtagtcatcatagcctgttttagagcaacaaaagctgcctcagcctctgtagtccacacaaaagccttgtgctgcaatagtctagtaagtggcttggcaatgactccataattcttaacaaaccttctatagtatccagttagacccaaaaatccccgcaattctgttactgacgatggagtgggccattttctcatagcttcagttttagaagggtcagctgctacaccatcctgagaaatcacatgacccaagtaaatcaattcagttttaccaaaagcacacttagacctcttgagaaaaaattgatgctccctcagtttagtgaacaccatcctcacatgttgcacatgctctctccaggaagcactatagattaatatgtcatcaagaaacaccatggtgaacttcctaagaaagggtgctagaatggaattcatagcacactgaaatgttgctggagcatttgtgagaccaaatggcataactctgaattgataatgcccttgatgtgtcttaaatgcagttttgtactcttctgttatccccatccgaatctggtggtacccagcagtaagatccagactcgtaaagtatttagtgccagctaactcctccaatatctcctcaaccaacggcataggaaatctgtttttgatagtaaggtcattcaatttcctatagtccacacaaaaacgccacgagccatcctttttcttaactagtaacactggtgaagcaaaaggactagcacttggggtaatgagcccagctttcagcagtgcatctacctgtctttcaatctcatccttgtgaaaaggtgagtatctataaggtttagaattcacaggaactgctccaggtaacagaggtatatgatggtcaaattctctgacaggaggtaactgagtaggaatagaaaataggtctgcgaactccatcagcaaagcctgaatatcttcatgctgaacagtgctgttatcctccttaacctcctctagcagaaccatgatccacacgtcatgacctttgagccatttctgcacttgcagaactgacacattctgaatggaagaattgttctcagcaccatctccatacaacttcacccattggccagcatccttaaactgtaatactttgtcaatccaatcacactccataggactgtgctccatcaaccattcataaccaagtatggcatcaaatacccccaaaggtaacacccgcatatcagtatgatagaaatgtccatgtgaccaccactccaagtttttaaccatagtgttacaatccaatgcatgcccactagccaccttaactttcactggctgacagtgttccacctttaaacccagcatatgcaccatatgttggctgatgaagttagaggaactgccagaatccacaagcattaacatggtatgttttcccaccactgacctgattctcatgctttgttcattgtcagttcctgatacagcctgaaaagataaccgacagcagtgatcctccctctcatcctcctgggcaagtttctggagaacgtcatcagtgagttccattggctcttcctcagtaaccaccgcattcaactgaacgggtttcctccttacacacttggccaggtgtccaggctcgaatttctcaccacatgcatagcacagtccattaagcttgcgaaactctctaacttgtctctcacgaaataattctccccccatttgttgtcctcttccatctaccttattaccagccaagttttgcttcgtagcatacccttgtctggcaaccttatgccttcctttctccaacatctcctgctgtaactgggctaatgatgcagccttatctacagtggtaggttgatgcatctgcacagcatgttgaatctccaacttaagcccatgtataaactgtgtcacaaaaaacagttcatccaaccttgtgttgtgcacagcagcctgatatctggcctgttcgaactcatgcacatatgaatccagagtatccacctgcttcagatttctcaattttctcagagccttggcatacgcatctgccccaaacttgccctctacggctgtcacaaactccgtccacaccctcgctccttgtttcaatttctgcacctgccaccatctcgctgcattctgttccatgtgaatagaagcagccgaaacccacagagacgatggaacttgatacatgtgaaaatattccaggcacttatctatccaaacagcaggatcatcaccagaaaatctagggaaagacatcttaggcagtacctgcgtgttcgcgtgcccgatcggcctctcctctcgatgtctatccaccctcggctcagaatgatctcttctctgaaatcctcgctcgaaacccatgttctgctggtgattcctccttcctcgattctccacttcccctgatgaattctcgagctctcttcccatctgatccagccgtaattgagccatctctcgactcgtctcctccagcttcaggtacagttcggttctctcttctgcagcccgttcagcgaccgccgccgcgatctccgcctgcgtcatcaactggttctgtaccttcctcatatccttcacctcttccgtcagtgcttccatcgactcgaacatccgattccacctctcctgcaccgctcgatcggattccgccatggcctccaaaatgaatcgagtctgcacggagggcttcgccttgggagccgtcgtggttgctgccgaggatcgcagctctgataccacttgtgatgcccgtggccgacgtcgcgtcgccgtcgacgtgaggatcaccggtgattctcagagatacagaagacgcaaggtttgccacggtttatggagttctgtttctcttcttcgctaccttcctggtctcacacacagaattatttaagcagtcgcttacatgggcctcacgcccttacacatcatccggcccacacg

SEQ ID NO: 69054 - DNA, 849 bp, Zea Mays
ataatttagagtcggaccacttagcttttcactgaagtaggctattggtcttcgcccttgcatgagtacgcctccgatcccaattccactagcatcactttctatttcaaatgtcttacagaagtctaggagtgcaagaactaggctgttgttaacttcgttaagtatcatacaaaatgaacaccgtcaaaccactccaactatattctttaaaactgtgcagaagtccccgctgccgaaggaccctcagcgctgccatccttgagcgacgactgctcttccgctcccatctccaccttggcgtccttttgggccaccgagctttctaggccagcgaggtcctccacttcttcatccatcatcgcctgcaaagacatcacaacaacgcttcagacagtgaacacacacacatcaccctcgctaaagacacaaacgtacttgtgcaagtgctcggttcgccctctcccgaatgacaccgcgaccgtgaggaccccacatcctgtcataaagcgctccagtagagcgctttagcatgtcgtcttcgacctattatacagtagcatcgaagtcctcgttgctccgatcgaaggcctcgaaatgcctacatccctcgtgggacaaggcattcgcagcccctcacatgacatgagtgacacataggacataaggcccgtcacgatggacgggagcgacactaactcctcttgtagccatcgaaggaagcaggtccccacctcctcccccgacttgtcgaagggagcagtctgcacaccaaggtcacggtatgcatccacaaaaagtatgtgcgcccgatccaccccagcatgggtggccgactccgttttctcg

SEQ ID NO: 69055 - DNA, 319 bp, Zea Mays
gatttaaagttaaaggaaaattgtcccctcgcttcattgggcctttcttgatcttaaagcgagtgggagaagtttcatatcaactagaactacctgatcacctggcagatgtacatgatgtattccatgtatctcagctaaagaagtgcctcagggtacctgaagagcagctaccaatggaggaccttagtgttcaagatgatctgacttatgctgagtaccctatcaagattcttgacactttgactcgagttacaagaaataaggtgataaagatgagcaaagtacaatagaatcaccatggggaagatgaagctac

SEQ ID NO: 69056 - DNA, 560 bp, Zea Mays
tgagaactaaactcagccgatttgactacaatatcatcaatgtaaacttccacaatgtttcctaataattcatggaagatcaaattcatagccctctgataagtagcaccagtatttttcagaccaaatgtcatgacaacccactcaaataaaccaatgaagcctggacatataaaggccattttagacgcatcttcttcggccatgaaaatctgattatatccggcattaccatcaaggaagctaataattctatttcctgatgcattattgattaatgcgtcggctatgggcatgggatattcatctttaggagtcgctctatttaaattgcgaaaatcaatgcatactctaagcttacctgactccttcttctccaccggcacaatattggagacccactctgcgtatctgcaaggtctgataaaatcagcttctagcagccggtggatttcgtccttgatgcgtgggagaagatctggacgaaatgttctagctctctgcttgaaaggtctgaaacccgatttaataggcagccgatgctccacgatctctcggct

SEQ ID NO: 69057 - DNA, 522 bp, Zea Mays
tgccttcttccagttaactgctgagaagatatagggaacagaggcagagggaagagagcgtaccttttgaggggcacaattatttaatgtgatgggacgtcctatcggtcagccgaccgtttgcagcgagcatgtgcgtggaattcaaaacgaccgccatctggccatgacgattcgcacatcagtgacttcgcccatccctataaattagtcggatcgttaccttgcctctttagccttcctgctttacacgttgtcctcgccttctgccaaaaaagatatcttcctcttctccccgtcttctttcgccgtcctgatggctgagaagatcagcgtccttccccatcgcgacccatggcccatctccttcgtcaccgatgaggatttggaggcattggtcgacgccgatctgctccgcccctgctcccacggcccgcagccttagtggttcgcgtcgggcgatgagcagatgtcggatctgtccgcgggctacgtgttgagtgtcatatcatttcatgagtg

SEQ ID NO: 69058 - DNA, 343 bp, Zea Mays
tgaataatgcaatacacagattgatttgtaatattgcctttgttcgtgcgtactgaaactgaagactaaattgattaatttaacaagcatctcaccagtgtatgtgtcctcaccgtcacattgtgtagcattgggcacatcctctggcatccggtggtcgaagcttgtgacaggaatcacctgacgtcgcatcgatcccacaccagatacatccaactcttccttcgtcagacctgcatctcgttgcattcttcctgccgcaaatggtgaagtacgaagactttctcaaacctccattgcatgaggacgtggcggcctgtacatggacgaaagaggggcgagg

SEQ ID NO: 69059 - DNA, 544 bp, Zea Mays
aggctggctagctcgttatgtacagtgcgtacgctcgcgcgtgcccagtacgacgttgttctgaaaccgcaaatagggagaagacacacacacacatacgccatgtagtagtacagctgcatgcaagctatcgctctgcactactactccacctcgatgcctgatgatgatgaatacgagcgaggtcaggccggtggcagcagagccagcagggtggtgtggtgtggtgggggagaaatgtcctgtcctgtccacgtaccggccatggatgatatggatccctcgcctcgcccgtccaccatgcatgcgcatgcatgcgacagttatttttcttcaattcaattcaattcaattcactgacactacgtacggtttacatcgactgaccgacgagatggatgatagatggcccggccaccagcgccacgccacaccgcccgcccaattatttcttcatcagcttccttctcgctatagctccatcaactctccatactgtaccgcgagtgtgtggtatcatactacgacccgtggcaaatcaaag

SEQ ID NO: 69060 - DNA, 326 bp, Zea Mays
gcctgattgctcttttatatacccctatacctgaccacacaaggcacaccatgcagtacacatgtacatcaccagcacggcagtaccaaatggaagaaggtaggtagagcgacaacacagcagacagtacgaagagtccaaagtttgaaacaaacacaccgcaacgcgccaaaacgcctgcgctacactacaactcttcttcaacacaggcacacagcatcttcacctcggacgcgaaccggtccatggctgaccgcggcagcacgatgggcacggcgatggcgtcctcgccgtcgccgttcgtgatggtgacgataaaagtcaac

SEQ ID NO: 69061 - DNA, 495 bp, Zea Mays
gtcgtatgacgggctatgccattcctttggttaatcaacttgttagatggctttggttaagctcgtagttacgatgaattacttgttgtagtctaaatgtgtatggttatgatagcgggtaaaaagtagtagtgctcatgtgatgtctaatttaaaatgcaaattgttgagtgattgtcgtgaagaatgcgttgttaattggttgtagtaattttagtgcactaatgacttgaataaaatttgcaagtcgaattattggttctaaattgattgtctcaactcgaacaaatagtaaagcattagagtaattcaagtctctcgaacgcggcgattcttgaattatacatgagctgaaatttattgatttctgttttggactgcacgcactgttttagttgtgctgtttgttggatgagtcaaatcatgttttctgtagaaaagtcatatagaagagttgtagataaccttgttatcttgcttttactaaaaattgac

SEQ ID NO: 69062 - DNA, 274 bp, Zea Mays
ccaatgcatagccatcatagcccgagcaaaccacaccaccctagcctcatccaagaacactgtcatgatccccaagctccagtgaaactccctggccctttctccagctctctaccgcgctagagctaccaccattgctcactggactagataaactccgtcggtgaacatggccagagccaccccgtatactgtcgcctgattccttgcaccagtagcacgctcgtgctctcgtgaatctccctagcctctcaaatcgagctctaccatcacc

SEQ ID NO: 69063 - DNA, 593 bp, Zea Mays
gccatggccgggatagggagaggtcaccgtgggaaagaagaggaagaggaggctcaccttggtgacgagaagacgatggcgcggacggtgagccgtccatggcgagcgcagcagagtgattcggttttgaagggtcgtgggaagatgggcgatggggaaccagagaaaatgggaggaagcagttaaggagaaaatgaataggacgacgtgggagaatttgcatgcgagcggacccacatacgacagttttccaattgaaaaacaaacacacggcgtggagatcgtacgaggcacatgcatgcgatttcttcattcttcacctccttcctataactgcacatgggtgcatgcaggcaacaggcagtcggacagggccagggcgagtgggcacgaggcgcgcgcgcatctgtgcatgccgccatgcgcgacgaccaggtgggcttttccttttccttttcctatctctttcttttttctttatttatttctttttctatcatttgaactaaatgtcgaatgcaaaaacaaactaagtgaatgcatatccaataaattcgtcaatcaaaacatatgttccaccaggatatatcaat

SEQ ID NO: 69064 - DNA, 299 bp, Zea Mays
gaaagaacaagcgaaaaaagataaaactaacaaataaataggtctcatgagtaactgatctaacttttgatgtcttatttaccaaacaaaggtaagttcgtcccatcctcattaaccaaacaaaaatagagttatgcgatcccacaaatcggagatagaatcattttatttcatcttagctcctaaccataggctatctaccgcgggcagagaaggtaataaaaaaagacgttacaaacaaaaccgatagaaaagaagctatctttatcacaatttacgacaaaaattcacaaggtatg

SEQ ID NO: 69065 - DNA, 427 bp, Zea Mays
ccaaatacgacatcgtaagggtgtcgtgagcctgagtgacactgacatagtgggtatatcgaaagtttttgtcacaataaggacttcaggggcaccatcgtggtcgggagtttgaagaggatgctatcatgaaggttttgaggaatgttgtggtggggagggcgaaacatatttccatgccaaaggcactgataggtctccccactcatcctagattcgagaagaccttaggtctcttgattttattgttgggaactcaagatattattacactagcacttggagcttggccttctcatgaagatagagcatgtgagtccaaaataatgcgaccccttatattttgtttgtgaacgagtggctagttattttctcattaataaaacatttttgatgatgtcgctgtttgtagaggttgtcaatcgat

SEQ ID NO: 69066 - DNA, 398 bp, Zea Mays
aatcgtggaggcattatcttcatggcgaatcttgcaacatttacagcgatcataagagcctcaagtatattttcactcagaaagagctgaatttaaggcagcgtcggtggcttgagttgataaaggattatgatctatccattcaatatcacccggggaaggcaaatgtggtggctgatgcccttagcaggatcggtattccaaaagtggccatgcttttgattgcagatctagaccgtatgggggttgcattgtgctatgtcagtaccgctagagagaagactcggatgctccttctgcagagagtgcgcgtggctcagcagcaggatcgtttgttgcaggaagctcgaaagagggtcggtgatggtaaatcctgggagttcaccattgatgagaat

SEQ ID NO: 69067 - DNA, 581 bp, Zea Mays
attcataggggaggctgccaaggctacgccctacccgcccgtcgtgtgttaaaggtagtgatagatctttagaccaacttaaatgtcccactctataagccaacacatagcatgtctgcatctaacatgacaatctatcataaaatgctatgttaacgactcagttgttactaactaattatttagtttcatctgtaaagacaacataagattaaatatccttatccaacacctgtgcaccataactacagcctcgtcctagtcctagcatgcgtcctaactctagtcatctagtgtccgagcctacaatgcgtcctaactctagtcatgtagcgtcctgtgtccgcgctaaccgctagtcatcggcccgctattgtctcaccagtgattgccctccattttctctatgccacacctacggttgacagccacccatcctaggctctagatcgacaatagctaactggccaagttgcccaggacaaggtactaactgcttgtcgtcagaccaacaacgcagaccaacaacgccacggttggctaacttagtagtctcgtcttttatctattccaggatccgc

SEQ ID NO: 69068 - DNA, 688 bp, Zea Mays
aaaaaatactgatgttaattctactataaaaaatctaaaacttatttctcaattgtattagtatattgatttctagatgtctacaagtaacacaataatagctcaaagttatatttacccagctagtctatacataaacaaatatcatgttttagataagttcagaaaattttccataccttactcttctcctgattgttagaaagtcgataaataatggtactagttcaacctttcatgcactccctaagaaactgagacccggatacaggttggaagcgcacccctagtgttcgccgatcggaggcaacaagaagaggaaaccaagaaacttaccggctgatgattggcttctccacctctgatttatgtcgttgtgctgctaggaactatgtagggaatgaagagttgtgccatgagcccttcgatccagaatatccacgccaccaggaatttcgatgaagggaagaggagctatggcacatagagacgaagagaagatgggcgacggcgcacagagacaaagggaataggactgacctccctaagatctgcgacagcgcacaaagataaattaatggattttcctctttgagtaacaaaaatttagtgcactataaagttttccgtaacaaatacaaaattaaaaattcagttgtcagcactttgtgcaataattggttttttg

SEQ ID NO: 69069 - DNA, 446 bp, Zea Mays
atctctttttaaaccgtaccaccaatacttttctttaagatcctggtacatctttgtacttccagggtgaatagagtaagctgaatcatgagcttctctcaaaataagctggcgtaagtgctcaatttctggtacgcagattctcttcctaaaccatattgtgccttgttcatcttccgtgaaatctggggctttacccaaactaatcaaagttttaatttccttaatcttctcatcagactcttgtcctttacgaatctcttcttccaaagtagattcgacttccatcatcgttgcttctacattattgagcaatccaaggttgagtcgttccatttcccagcacaattcttgtgacatcaaatgagtagtgatgttgttcacttgacccttacggctcaaagcatcagctactacatttgcttttccggggtgatattgtatct

SEQ ID NO: 69070 - DNA, 1259 bp, Zea Mays
ttcaggggtcccagatcaaggatcacccaggaatttttggcttgctggctaaggtatgattcagaaaaccagacacaggaatacatatagctagttgccgagctgtcataaattttctaagttatcagtataagtaacccattactcagattttgtaaagaaaaaggatgacggtcaccaatcagtcttttaatctgagtatatatgatgtgtatagtgtacttgggcagttggccttaggagttgtggcccgtatgatgttgttagcttacttggatgatgtgggtacttacaattgatgcaatgaagtgttttgtacatggcactgagcccctgacagcagcaggttgtcatgtggactgtggagtaaattatcggactaatgatgatgaactgctccttttactgtttggtggcaatcagtggagttcagtgaaatacttgtgggggtttaagtggtaaataatgctagcattacaaccaaggttgttaaaatcgtaatcttgaatcggatcggaactccaatagtaggatcgcaaatcataggatcatcactgctagaatcacaaaatccaagggttcttcaacaccggattctctgtatgcggatgaaaatatttggtgaaaagttggttccaaaggagttgaagaaggggatgaactctctcaccattctggtggcttgggaactttggaaacaccgtaacagatgtgtcttcgatgggatgatgccagatttggtggtggctttacaggacattgctagcgatggagtgctctggtgttcggctggggccaaggggccccagcagctggttgtaagggtctcgaacagaggctagtgttgttgcgttgtcacctcctgttctcagggtggctggtcggtgcgttagaacatttttagtttgtcttggtgtatacagattcctttccttgtgtactttctcctttcttaatgaaatgatacgcagttctcctgcgtgttaaaaaaactgtttactttgtatgtgttctattttcattacttttatgtaaaaatctgtcttttttctgaaaatacttgtttcttgtttgcagtactatagaatatacctcaatgtcctgactatccctttgtttcttgtcgcacatgtggttcctcaggtcagttgtgtttttgctttgctttattgcatatgtgattcctcagatcaggtgcttgcattacgtttttatgtggttacgaacaaatgccatgtggtcaattaccatttccagat

SEQ ID NO: 69071 - DNA, 384 bp, Zea Mays
tgcaagcctcctatgccaaaagccatccaagtgatgctttggtaaagaggcaagttctcaagtctgcatcttcagaggtgaaatccactaagtagagattgttgtatctaaatcctttgaacaccattgattcatcatctatttttgatacaataacctctgttggagtgaataagcattgaagtccaagatcatagagttgacccattgataataagttgaagctcaaaggtgcaaccaagagaacatttgaaattgatagatcatttgaaattgccaccttgccaagtccttgaactttcccttttgaattatccccaaatgtgatttttgtcttgtccatcaacattcacatcaagtgaggtgaacatctgtgggttgcct

SEQ ID NO: 69072 - DNA, 438 bp, Zea Mays
gcccacctagcgtcaagatctcccttgtgaagcgtcatgctgaatgtatgaatttaccatatgcttttgttacttggcctgattttattatttgtgtgcaagtaatgttggatatgtcctcggacatagttttaaggggaccgattctagggcgatttcgaaccaaccgcgtcctaatcgagggcgtgatcctatcttatacttgtggtcctttggatcataggagctatatagatgtggaaggggacgacatggaagcattgactctcttaaaccctagccgtcatagacaccctcgagactcgatctctctctaccctctagtgttcggaatcatccaacctagaagcgatggtacccgtacaaaccaactttcctaccccactgtcggccatagacgtgcacccctaaggccttactatgtgaggaggatgaggc

SEQ ID NO: 69073 - DNA, 329 bp, Zea Mays
ggaccatgacctcggatcattgccccttagttatgcaaggtttctctgactttagtttctatagggggtttagattcgaggctttttggacaaaaattgatgggttcaatgaggtggttcagcaagcgtggacgtctagtgttagctcctcatatgctatccttcgactgcatgtgaaaatgtcccgaacggctaaagcgctaaagatctggagacgaaagaatgtaggcaattttaaagtgcaactataaatcattcagacagtccttatccttcttgagaaagcgcaggaatccagacagctctccggggatgagctagaattcagg

SEQ ID NO: 69074 - DNA, 391 bp, Zea Mays
tgacgatatgccgcacatgggcattcagcgacggtggccccggcgcgctgcagatctccccaggccggtttagcgagcctgttttccaggtgcggattgctccttcttcattcccttctcttcccacctacaaaagctattggaacggcgcaatttgttttgactgtcatctagagtagaaccggttccaccttctgaatttaactaacgaatgtcctgttgtgattctcttgagccaaaagcataacataagttacatcgaaatgtagctaacaaacagccaaacaggtgcatgtgtaagcacgtggattcgatgggctatgcaccatgtgaacattgtgacttacaagaatgctttgttaccagttaccacgaccatggcacacatgag

SEQ ID NO: 69075 - DNA, 301 bp, Zea Mays
ctgaacattatacatcaatgttcgagacggggcactttcctaacctactgtaggatgttctgcatgcgttgggaacctacgtccgacccctgtatgagacaaggcgagtgtgcgaaccccctcgagcttgttactacatcactcgcattcatgttagggtgatggatgtaggtgatagagggttcaggactctgtcagctcatgagtctctaacgccgctatccacctacgctgcttcggacagcgatgctgctaggcgaactctatggtccctcagccacacttatcggcagcagctgaa

SEQ ID NO: 69076 - DNA, 529 bp, Zea Mays
tactcgtagtatggttactgttgcgcgtgtgacaccagctgactccgtacgtctccgtctgaacgttgatgggcagagcaagaaggcaacaagcaggcacggaatataatcagtgcaaaatgctctggatgctgttgctgtagacattcactaccacctcgcctggacctgcatgcatggaatggaattggagaatccgaggccgatcggatccgagagggagccggctactggtgcatgcggtgtgtgcacatgtccggtcgtccacctcatcaggcgtttgctgtctgtccaaatgtccatctatccatcacgcatgcatgatgcatccatcaccttgaatgacacaacacacttgcacgcacacactgcgtggtgcgtgcacgcctgcatatatgatcttaaactcgctcgcacacgtaaaccttacagtacatatatgatccgtcggtccgatagcttgctgttggcagcttgcacagctgcacggacaccgcgaccgacgagaccgtgcctcgggcgtcccgcg

SEQ ID NO: 69077 - DNA, 545 bp, Zea Mays
gaggtctggacctgttcttaggcgcttcccaacatattctcaagtgattagttagataagcacgtgcgggataaggactatatcgcctgaattaatctaatcacggatcgtccgggatacactcgtggaccatctggggcacagaccatctatactgcatggtcggaccgttcggtcatacctaggtgtgaaatctggtgcttaatacatgcccctgccttttgtggaatctaagcgaaccaaaagcatctgttacaaacattgtcttccgagaaatactagatttcacaaatcaccttgttctcgaaataagaactctagcatgatgcaagtcttcatctcttttaactaacgaatgtagtcatttaatagaacttctaatgcacaaaggacgataaggattgtatcgtcatcggccatgactatcaatatatcaaaagggacaaaactgtggtgcccccagcccgaacaagcaaacagactaagcatgtaatatggattcatcattgtactttctgatgaggacatcactcccataaaaataa

SEQ ID NO: 69078 - DNA, 457 bp, Zea Mays
ctcccctggatgaagaggacatcggggtagaaaggagcaggtgcgactgtgtgcttcttctcatcctcctttgagggcggaggtgttgggaggattgctcgttgtgttctccttccctgatatggaacattcacttcccttctccgaatgatctatgtccactccttagtgggtgaggtggacaatggagttcgtcggggtagggaggccatggttgactggccttccccctctagggacttttgagcccagacttgcgcggggccatgccttgtcgtgctgtgagcgggggtacgactcgtggtttcactctagcttcctgtggaatttctaaggaggatttcttcttgggtggagttgctatgcggtgtagagttccctctacgtccgctacgcatgagatggtcccgaagcagaaaatagctcccgggctgaaggtgatcttgttcttgaagat

SEQ ID NO: 69079 - DNA, 527 bp, Zea Mays
ggacaccgatagttggaatgactaactagagaagccaaaaaagctaaccatagtggctgcacacgtagggacatcgatggtgcaagagtatatggaggaatagaccatgttggccaagccaagataatggttggccaagttaaacaaaggtgttaaaggacttgttgattgggagttcaaggactagggtgacatgtgtcaagatcatagaaaaacgtatatcggatacgctactcacaagaagtttgatggtttggaccttagaaacaccgacgtatggtttttgtgtttgggccttgaaaccttgttggcgttctgatgggattttggaggccgcacgtgacgccattgcgaagcttgcgtcgagataagaacaaagtcatgaagaacatatggtcgttagatgtaccaatctaaagttgggctattttgctcctaggttaagtgattccgccaaaatatctaagggcaatgatagaaacgtataagtagccatataatcaagatagcaggctgctccaaccagc

SEQ ID NO: 69080 - DNA, 1003 bp, Zea Mays
ttttagtagaatatctgatcaacggaagtttcactacttaaaagaaataagctaataagtagctagctaacaaaataggtctaaatcaattgaagctttacatgcctcgtccttaccaaacttatctttgtgtcatataaataatttgatcaagttgattatcaaatcaaataaaaatgacaagttaccacatcttggtaaatatgtcacggactcacggtgatcgatcggtgcgtaaaaggtccgtatggtacagcacagacagccgattgctgaatttttgttgcatgtcagatgggacgtaggaacagcttgttcagggatgagatggagaatcccactcagtcattgccagatcatggcgcacgtgatctgcacggtagtggtgtgtggtgaatggtgatagggaccgcgtgagaagtgcgtggctgtgacgaggaccgagcgtggtcgcaaagagctgccgactggatgacagtaagaccctacggttggagacttggagtaccgtcctcgatccgtctctatcgattgtctagtgatatatggtacggtttttattggtttgtgtcatttttctaataaaaaataaaaaataaatcctggaactcagtctataaatagaggagtgtttgattattcacacaactcaaactttgaatttctattccccctcctcatattcatctcatcctcatttcacctaagctaagcgttgttgtgatgccttcgtttagttcggatatcgacatgaacgaagacgcggtgattgagttgccgcaacagactataatgtagcaggcgatggaggttgtgtccgagtcctccacatcatggagacgaccttggcaacatcgggtatacatcgaccgccatgaccggttcatgcaagtccactttcaatgacaccacacgtctatccaatgctctactttcatcgaaggtaccacatgggaagtagtctctttcttcaaatcttggagaggttgggcgagcagttccc

SEQ ID NO: 69081 - DNA, 859 bp, Zea Mays
accattggcatccccgtagttcatcttttccaaattatgtcctttctagttgagttttgagccatagtttagattaaatcttctatttctattcttatgaacttgtaaccactcacttagtgtcggtgtttcgagtaagcaccagtgagtaaatgtatgtattcgcgttttaggcctgaatagtgtgctcggtggacgcaatggttatactggttcggactaaatgtccttactccagtattcgacgactcgcactactggcacctgattgtttgtagtaggagattataaacatataagagaaggaaagttcccaagtcttttatggggtgtgagtacttctatcgtattgtgtgtgttgtgttctgcatgaggctggctccaccttttataggacaaggagggggcctcttacaatggcttcttccgaaagggagagtaaaaaaggtaaaaaaaatatcactctttggtaacttgccatgcttcactgcccttccttgagtgggtcctcaatcctatcctagagatcttgcggagatggcgcgatctatatcattgatgtgtgccctaggtggtctacaatatggggtttttcccatatctttctcctatgttgaccttccttcttagtagcttgtaggtcctatttcgcatgcaggggtcgtagagccccttagtaggcttagacctaaggggtgtaggtcatgagtggagaaggaatgggttatgcccatgccgtaccttattggccaacgtgataatgagatgtacgtaaagctagcagtgcaattggtctgagttcgccgaatccacttgagtggaccttgactggctcgttcgacccccctgctagttttcc

SEQ ID NO: 69082 - DNA, 439 bp, Zea Mays
tggatcaggagagcttgcaaatgtaggtggcttatgactcatgaactccctatgcttatctcggggtggaactggtggtggtggtggaggcagtggtacttgttgttgttgctgctgctgttgttgttgctgcatttgctgttgcagctgctgttgttgcgccctcctttcctggcgtatctcctctcgctcctggcgcaactcctgtcgtatctcttctctttcttgacgcatctcctggcgttcttgctgcatctgtgcacgcatatctgccatggtgtccgccatttgctgcatcatcctcatctgagcagcaatcagtgggtcaactccgcatggtggaggattaggaggattcatctctgcaggctgtggctggggttgtctatatatccactgagtgtgtcgattaggaggcaaatcaattccaccaccccgc

SEQ ID NO: 69083 - DNA, 347 bp, Zea Mays
gagctaacgacgcgatcgaggcgtttaatttgcatccacacaacgtatacacgtatgagtgcgggtgggtgtctactatcgcccgagtggaaataatacaataagcttgaggtacatgttgtgatgatgaggtgcagccgtacgtaggtgctggaagacgatggtttcaatggcgacgcattgttgttgctcatgcatgcatgatactttctaaatgatgatgtacaggaacatgagccaaatgtgtgggaaaatctaaaggaaactaacgtggcaaaaatgttagatgtttatgggattatattcctcgaacatgagccaaatgtgtggaaaaagctaaatgaaac

SEQ ID NO: 69084 - DNA, 1302 bp, Zea Mays
accgttctcatactcctagacatcaactcatatagttgccactcccattcatccgaaactgatggctcgctacctctctttgtgacaaaccatgagttagaccttcctaggacttcaacacgagctagtgatgctcttaatgctccacatgtcagggtcctggccgctagtgtacctatcaccgactgtcccttgctccatttttcgctggagcaactacgagccctctacggaccggtctttgaactctagaattcatgagtgacttgtcacatatattttggtccctaccaaaggaaatgaataagttcagggtcttaccggagagggggtctcggtgtttgcttcatttcccgtgcaggagcgcttcaaagggtggcctcgtccagtgcgtcactcccacgaactcaacacaagcgggtcatgttgtgcaccgccgcccgtcgttttcttgaggggagctgagctggaggcctctgaggcccttggcaatatcgatcaagtacttcatcgagaacacgcaaggccctacctagcgcgtaaaatgtcggtgtttaattttgaaccagctccaacaagtaaattgtttgtgcgtgttccggggtctggatggtgtgcttattgggctcgagatttaaactggttcggacagaatgtccctacatccagtcttcgaagactcacgctaccgtcaccttgttgctcaatgctcgtagttggggttacaagcaggtctgtgggtgagagagggaggaggctctcaagtctcttatgcgtgtaatgacctaaggactacgaatctggtgctctcaacctagctaagccttgggcgtcgtggcagcgtgctccttggctttggccttcgtagtcctccatgcattctagcctagttgtccgtgtatcggccgaccccccttttatagaccaaggcgggtcagttactggtagcttctcatggaaggagctactgcatcgtggtaaaacgaggcgttcaacctcggtaaagtcatgcttgttagtatgtgcctcggtcgtctgggcttctctgtccacactttttaagactggcgacatggacggcgaagagctccagcaccatcattatcgtctttgtgccacaccgaccccttcctccgtagcctggggctcggcgtgactcgtcgtgttgtgggtcctgtaaacggccagtgtgctcaagcctagggttgataggccgtgggccacaagccttgggtccgtagatcatgagttgaagcaggaccgactctctctcacagcgacccggtgctaggcgcagttaat

SEQ ID NO: 69085 - DNA, 684 bp, Zea Mays
aaatacaccccaaccaacccattcaatatacaagagatgagcattcatttatacattcaataacaatactcccaaagtgatcaagtctcccaagtgccatatctgagtgatttgagccttgagatagtctagtgcctcgtgagaaagatggaaaagagtgtgtgatgtgttcttgagcttggagttttgactcacgtttattgtaaaggctagcgagaggcttcgatgtgtgaagtgccttgcagagacttcggtctcccgtttaagaaaatgtagaggactatcgatctttggaatcacaaaagatggttgaaaagatctggtcctttgtgttttcttgtttgcgatttgttttcctctctccctctctaaagttctcttgccttgatattgaaccaaatctcttgtggagctcccaggttaattctcattcaaaatagcaacatgtgcaagaactcatctcgctactctgattatattacttcttgttctaacaccttattaggatcgaagtttttgttattaagtgtataattttaggtcacacctattcaccacccctttaggtgactttcagttccactatagagttttgaaggagagttgctctcgagtggactggacctaggcatgggccatctgacccaaccaacccaacctgccccaaaaaacctggcccgacca

SEQ ID NO: 69086 - DNA, 484 bp, Zea Mays
aggtaatgtacaccaaggcggttagcccctttctattgccagggaatatggatggcagtgggtcgggtaaagtgcgggtaagccatttacccgcccaccaacatatccgcgcctctagtgcttacccgtgcccgtgagagcttgcatgtaaaattttcgtcccgtgcccgtacccgcaggatatccgcggatatcgggcaacccattacccgccagaaaataccattcgagtatgtggtcatgttcattgcaccaagaacataacttgacagacataatacaatggcaaggaacatagttcaaacttcaaagtccacaaacatgatcgatcatccacaaacataactctcaaatgcttaagataattaattattacaacacaatgttttaggataaaatgaacacatgggcgatattttgatgggctagtaaattaagcgggtaacgggtaataaccgcgggcgaaattttatatccgtcaatt

SEQ ID NO: 69087 - DNA, 659 bp, Zea Mays
cactaaagtccatcaaagatgatatcttatgatcatttctaatgagttttgaggttttaacttatttgggcttcattttcactcataagcccaacttagggttaagtactctaccccagggttaaccacgcatcaactcataacatcacaacttgtttgagattttacctagtgaatgcaatctaggtgtaacaaacacatgttatgccaatgctcatgatgttatgctcaagttttagtaaaagtaacaccagaggtgttatagagagagacatcctaatggttggtctcggtaaccttgagcatcctggtcgtgtacaaggaatctcaaataagaaaggatggaaggaaggattcggaccacagtgggaaggtttgtaaaggaaacgtgatcaatataaagaagagttgtcggattattttaaacaggaggccaacaaagaattcaaagacctgatgtctcaaatgctatcaaatcctcctccaaaattgttctcttcctcatcctcttgaagacccatagtctacgccaccagcaagggatccaccttctccatagccatcaagggatttgtggccattaaagaaatctaaattccctataccaaaattggtgtccacgttcgagaaaaagaagagtaaagctactgctgctggca

SEQ ID NO: 69088 - DNA, 450 bp, Zea Mays
tggacagaggagtcttcggaagaggacttggattattttgtagcgttggatgtggctgtggcggagacttctccgcgtgtgatgggtgctgaggatcttccgggtgcgagtgctgggcgcaggcggcgaagggcggtggcgaaacggagagtgagtgagttgtcgcaaagtgataggcgtcatcgtggtgagatggagggtggtcgtcttcgtgtggatgtgactggcaagcgggaattgttgtcctcaccggctggggcgagtgtgggtgagggggagttgcgaagtctgtttgcgggtgaggaattgaggataatgttgttcaactatagggagatgggtatcatcccgaaggttgagccaatgtaaagtgtgatgccctcgctgtatgtatgtaaacatacttttgtgtgatgaagctgcgcgctttcgttgatcaggccgctcccg

SEQ ID NO: 69089 - DNA, 356 bp, Zea Mays
tccggctgcacccttaggtgacttttgcgtggagtgtcttttacaaagacttcgattgtcgcacttgttgtgctgttccagctgcacccttaggcgacttttgtgcggagtgtcgcacgcgagggtagtcagcgctgcccctcgcggtgacttcggtgaggtcgaatgccgaagaccgtcgatgcggtctttttcgacatattgtgtcttagtttttgcgggggatttttgcaggtatattacatggctccgcctcattaaaaacctcaccccccgggaggaaaagagtgcgggctggaatgatactgtttggtgaattacaagggcgtgttagccctgaggactcaaacgaaaac

SEQ ID NO: 69090 - DNA, 589 bp, Zea Mays
cgagtagcctgcctaagtaaattatcctgactagccaaagcaacgttcagctcttctatctcagcggcaagatcatcgacagaaggtagtacctcagaagtagtgtcgtcgccgatgtctttgtcgtcgctggtgccgaccgcatcctcaccaagtgcaatggtgcagaagcctcctgcggtgttggcaatgaagcacagcccatttagcttgtcctcgacccgcctctcagtctcctcatcgctcgaggaagatataacattgtcggagtcgtggtcgaggtcgctgagggaggcgaggaaggtacactccttgatctttgccttctgaaggtacttcttcttgagtgcctccttgttgaatcctcccttggacttgtacttgccggaggagtacttgcccttgcaccgaccagagtgatggccgcgtgggccagactccgatttgcccttcttggggcagttggcaacgaagtggtcgggatcgccacagttgtagcatctatccttggacccgccacgccggcgactcatatggttgttgtggaaccgcgtgaaccggctggccacaagtgccagctcctcatccc

SEQ ID NO: 69091 - DNA, 515 bp, Zea Mays
gcctcttttccctgcgtttatctggttgctggttcatgtctctccgtggcgcaggcggtgcagattttgcgcctccgatgaggtcctaggcccgctcattcgcggtgatgtagatgtccgcctccctgaacaattattcggaggtggccggtgccttttgaagtatggcccagatgaaggccgggtcgttggatccccgatagaagtcttcaatcacagctgcttcagcgacttgaggaatacggttcctcatcttttgaaatcttttgaggaacgatcggagagtctcatcattctggtgcctaatagatttgaggtcccatggctacgccggtttatcggagagagactagaagttcacgataaaccaatgactcaagtcactccagtcatcgatgcagtgtcgaggtaggtgtcgaagccattgcagcacatcctgccctaaaacaatgggcaagtacactatcatgacgtccaccgttgccctagaagccatggcaacggttgtatagaca

SEQ ID NO: 69092 - DNA, 381 bp, Zea Mays
ggatgaggggcttgactacttaacggagccgtgggtgtgcgcaatttatagcaggcttgagcggtggccagtgaatttgagggagacgcgcggcggccagagaaagagggggttactggcgcgcgcgattggtggcaattactgtggcaagctcccaagcgaccaccggacgggctaacgtgagtcacagcggtgtggttaacgtgccaaggcacgtggcgcaaggccgcgaagtggctatctccagcgaacccatccgaagcaaccgtgatctgctcgggtacggtggccggagtaaaatagtggccggagtgtatccacggtgtgatatttacttacccccagcgttatctaactgatccgagcgcgaatccgagcgca

SEQ ID NO: 69093 - DNA, 512 bp, Zea Mays
cagacccctccatatgggaggtttgggaattttctagtttgaaggaattatgttgggctctccatatgagatagttgtggctacataaaactaatttaggaaagccttgggcaaacctccctattcaagttcctaaaaaggcaggatctttcttctccattgttttggtctcataagtgggaaatggagcacacactctgttctggacaaataaatggctcttgggtcagaatgtgtgcaatctggcgcctaggttattcaccataattcctaaaaggattgctaataggagaactattcttgaggctctttccaacagaaagtggatatctgatgtaaagggtgccttgtctgtgggagttatagttgaatacttgaacctttgggagattctatcagaaatagtgttgcaacctgaagtaaaagataagcatgtattcagcattgtggcagaatgaaattattcggctaagtcggcttatgatggtcttttgttggatcaacgtcctttg

SEQ ID NO: 69094 - DNA, 307 bp, Zea Mays
gtaaaattcccggccaccgcttgcgacgcctataaattgagccccccaccagttccgcaaagtcatcagctagccagcccccgctaatcgttagcaatcatccaccagtgagctcgaattcgagtttcccccaaatcagtttaccgccgccataaaagcacccgcgtcgtggccagccacttccaggcctgatcatgctctctgcggttctgtttcagtacctgtgtgcattcgtgatgctcatcaacccaccagatcgaactagaccatccccaatccgcgggaacgtgtgcccccatgatcggtg

SEQ ID NO: 69095 - DNA, 554 bp, Zea Mays
gtgtagtaaataaaatgtacaatagattttataaactctcaaagtccctcctttgccataggcttttccatttttgttgcttttcctatcacatttcttagtaaatatattatacctctaattgtatgatcattatcactatagcccacaattagggcttgattgcacttacatttagaaatttcgggaatgtgaagaacattgttaagagcaacatggtgcatattagtattgatagatcatgaactaatgtgtttaatttgcaagcatgcttcgttcccacttgcacaatgtcctgccatgatattgatcctacatagctaggcggatcaaggtcgcccgtgatgtgatccgtgaaactgatatcattttaccagttggggtcaaccttgtatgagcacgtaaatgtcgaagtagctagaagtttgattgagcttgtcgtagatctagcactgaggatgaggactattgtcatgataaccaccatgagagggagcactgccacggaagcgaccagtgtggctacgatcactacaaccatgaccatggggggg

SEQ ID NO: 69096 - DNA, 624 bp, Zea Mays
catggatgtcgtcgggccgcgtgcaggatatgcaacagttagggtattttggcggcggggtcgggcgtgtgccgggggcagaggagattcccgagcctgagggtgaacttgttgtgtttgaggcattttttgttgccggccttcgtctgcctgcgcatcatttcgtgtcggaggtgctgcagaagttcggggtccaagttcatcagctgacaccgaacgccgtggtggcgttggcgaagtatgtctgggcaacaacttcgtatggcggtcagccttcggtggaggtcttcgccaagcactactgcttgcactggcagaagagaaggattggtgacgaaattgcgcaattcggatcgtgcactttcacgccgaagtccgggaagacttcgatggaggttgtggagctggtcccttgtgcccgaaataagtggggcaactggtgggactacttgttttatgtttcggaggctgaagtcgaaaatcaccctgggctccctactgccatcatgtgttcgcattattatgtggcgtacccgccgtttgaagtggcggaggatgacgagactgaacgggcccttcggatcgctgcccataggagtagcaggcgcgatctggttgaggaat

SEQ ID NO: 69097 - DNA, 795 bp, Zea Mays
cgggtacccagctggcagtgacgcagtgcggtatagccatgcccgtcagccgcatcttgccttgcgccttggcctgctcctgtgtgctccctgctggcccaatagcagtaggagtgttgtgcctcgacctgctagatctctcctgggctgggatgtataccaacgagcgacatgtgttggtgtcgccattcacgtaacattttgagggctcgagggctgctgtcgggtacccaggatcggggtacctaaaataaggcctataacctcctggtcgataccttctcaacaatcggtgacgagagcatgaggaggttgaatagccacccgaacgaaggcaccagtgaagccccagaccgtctaggccagggccacgcgccttcgggcacgcaatccgcaaggcgcagatccctacgaaagtgagggtgccgacaaatatctccaagtacgacatatcttcgaatccgagcgtatagctggaagactaccgccttgcctgccacacggtggggatcaaatatgaccacaccatccaccttgcgaaagggcaagagcctggctcgaacatttgccatccagcaccatcaatatatgaggatataattagaagttaagaaaattcgtacacatttgtatatattactattaatatacatatctatttttatatatgaatctacacattgtgcatgtatgaatgacaaaaggtgtatataaatgtagtcagcaaccttccactcccctctcacctatagccaacaaccttgaaatcaagccatgagggagattctccacgtc

SEQ ID NO: 69098 - DNA, 463 bp, Zea Mays
gaagattgatgtttgccaggacaattgtatgcttttttggaaggaacatgacagagagcataaatgcttaaaatgtgggaagtcgaggtacgtggagcttgtaaatgaagaaggggagaaggtggtggcaaaggttgtacataaacagcttcgatacatgtctctcactcttagactgaaatgctggtttctcttgaggaagaccgctatgcacatgaggtggcataaagattgtacgaacagacaagatgggttaatggtgcacccgtcagatggtgatgcatggaaggctcttaacaactttgatccagattttgccagcgatgcaagaaacgttcgtatcggcttggcaactgatggtttcacacctttcaatatgactgttgtgtcgtattcatgttggcctgtcattgccataccgtacaacattccacctgctctttgcataaaatatgagtttata

SEQ ID NO: 69099 - DNA, 332 bp, Zea Mays
agcgaaggctactgtgacgcttggagcgattcagactttgccggcatggtgaaggccatggagcacttcgcccaaaagctaggcgtcgctctactcgacaacaccccacctagggagtcagggcagtcctacacttcatgatgactacggatgaaggagtgggccttattttcttctatcgtctcatccattttcttgtgaacaattgtgcccaccggcgctttgagggcttttttaaacaaacttacagttttaaaagacggtttgttgtctagacaattgtgaatcatctaggcccctaagtggtgttttggtaattaatgacaactgac

SEQ ID NO: 69100 - DNA, 809 bp, Zea Mays
aagtccaggggctcttatgcaaatccacacagccaatgggtatcttctaacctgagccacacgatttagatctgatggtctaagatatgacatgaaagggtatgttacgaggtgcgctggatcgacaatcaacggtcacgattcaaatacccgaaggggtatacacccgactgatccggagcgttcgtggctgatccaacggccgatcacaacaacacatcacaaccccccatcaaggatccaatggccactagttttcttcccctccaaccccgagcagaggcaccgccaccaggcaacaccggcgagccacccatcctgcccatccggttaaacaaatttgaacccaggcacaacctacgcagagagaagattacggcaagcctggcggatgcttttcttaccgaacactgtggtgacaaagacgctgcccacgcttcacacatggtgatcattccaacacatataccaattgaaaaacgacaatgtcatacatacaaaaaccaatatctaagcgcaccatgatcacaaagaaattttcttgggtacaccaaatgaaaggaaacaacatattaaagcataaagcacctaagccaagatattactaattgaaaggcaagagcacaactatgatcacaattaatggaacttcaagatattcaatgaatttgcatagttccattctccatacctttgccttttacctgaatgcaatgagatccattcttctaggtagtatgaagtgggatcacctattgttaccaattcatggcttctttttgattatgcacttccttctttaagattac

SEQ ID NO: 69101 - DNA, 506 bp, Zea Mays
ccctaagccgagttagcgtgagcatgttgcaccgtcttaagtcgtcaccgacttaagccgattgctccgttagtagggtatagtggtcaccctaagccgagtaagcatgagcatgttgatttcaagttcaatcaaatcgaagtcagctgttagtcgagagtctaaatgcctttgaaaatgaaaactttattgatgatggagtccccgattacagagtacaatgttgtttcgagagcttttgaggccttgctaaggataaaactttctaagatgttctatgttccatgaattccccacttccgtgccatccatttgagtaagctggtatgatcctagctgagtaacttctgatacaatgaacggtccttcccatagtggtgacaatttgtgtcgtccttcccccgttagaatttggtgaaggtctaaatcccctactgcaaaggtccggtgccgcatggctttatcatgatagtgcctcaagatctgctggtacctggccgactgaa

SEQ ID NO: 69102 - DNA, 529 bp, Zea Mays
gggccatcgggcctttgccatgcctggtcagtaatcgggtcgggctagtgccaaccagtgccggccctgtgggggtccagcagtgcccttgatctgggcctccagattaaaggggcctcatctcatatccttaataaatgttagtatgtacacagtaattagattgtaaagcccaacaaacaaagagtacaattaacagctggccagtccgccaccaaagcacgtttgacactttgacgtttgcttcctttccttctcacgtacgcaacctgtcggctgccgcccatgattgacgctcccaattccatttccttagcacagcaccgatcggttttcaattttcaattccatttccttgtacggctgtacccggtacagcggtaccctatctatctgcttggatccttaggccggcggcatacagccagatattaatcccatcagccatcacgattcacgccatcagcggatcagcaaagcaatcagccaagagccaacgtccgtgcatccatcacagctgttctcaggt

SEQ ID NO: 69103 - DNA, 411 bp, Zea Mays
gttaccggcgccatgattccttgatgacagcaacgcagttcatccaagtttggtgggagcaactcactggatacccatgaggacaattggtgatcatgagcaggacataccacattctccaaagccatgtaagttcagtaagatttaggaagtcagttgttattccttaccgtaccgtaaaataataggttgagaaactccttttcaaaccaaatagacagtttctcaatcattccactagtttgtgtcagaatttgtgcatatttgttatactatccgtgcaagtttggattgaatgcaaacatagtaattaatgtgttgcataatgttgtgtaaatttatgattacagatcaagactcagcaatgccagttgcactaggcagggtatttccaaacaatccatcgtttgt

SEQ ID NO: 69104 - DNA, 638 bp, Zea Mays
gaacactggtgctccgaggattttggccccgcgcttcaacaaacgcattggcgtcctcctccacggctatataatacggtacgccagagccataccatcccgtcgagcccaacccaggacccgccacgggtgaagcagaggagatcgtctccatagctactccttgtctgggcacgagactgatgccggtgaagtactcgagacagttcgtggtggcgcgctacatgtggtcgtggccttctcgggcgacgtagtccaccagagcactaccaattgctcaccagagaaatttagccaccgtggatccgctcctcgccgtgaatgaagtccggcatgacaaaaccatgggtaaggaatcatccatgaagtttggatcctctcttcatcgtgtagaattatttgggtggggatttgggggctgggggcgtcgagcgccttcaatctagccagccgccgcatgcaggggcgacgccgcctcatccgacctgtgtggtgagggtggatcgggtgccattgtattccctattagacgattgagaatagagatggtataactttttggttgttttaaatcatgactgtcagatcttgaggtgtggttaagattataacctagcatatcccttcgtcggtgtttt

SEQ ID NO: 69105 - DNA, 1765 bp, Zea Mays
tggcaggccctaagcacgtacatgggcctggcccaaaactatcacaatctaacacgcccccgtagtctgagcgtcgatcatcagccacttggaagaacattcagactggaacaaaactcggtaaagattgtagacgtcagaccctttgtgaagatgtctgcatactgagaggtagtcggcgcatgaagaacacgaacagcccctgtggcgaccttgtcacgaacaaagtgcaaatcgatctcgatgtgcttagtgcgttgatgttgcactgggtccgtcgagagataaatagcactaatgttgtcacaatagaccagagtagcacgacgtattgggtggcgtagttcatccaacagctggcgtaaccaagtccgtaacaggagagcggtacaactgaaggccatgatccaaggtgccacgaatataccgaagaatgcgtttgaccaaggcgagatgaggctcacgagggtcatgcatgaagagacacacctgctgcacagcatatgcaatatctggacgagtgaaagtcaagtactacagcgcaccggccaggccacgataatgagtagcatcaacaacaggagcaccatcagaagagagcttagcgcatgtatcaaccggagtactgcatgacttgcagtcagacatccctgcgcgctcaagaatgtcctgcatatattgtctctgtgacaaaaataaacctccgttgtgctgggtgacagatacacctagaaaatgatggagattgcccagatccttcatagagaactccgttgtgagagcatcaataatacgacgaagtagcagtgtagaagaagcagtcaacacaatgtcatccacatagagcagaaggtatgttgtgtccgtgccgtgtctgtatataaacaaagatgtatctgaacgagcaccaacaaaaccaagagtccaaatgtgagaggcaaaccgactgtaccaggcacatggagcttgcttcaagccatacaatgacttgttcaggcgacagacatgatccggaagggcagaatcaacaaattcggagggttgctcacaatagaccgtctcagtcagcgtaccatgcaagaaggcatttttcacatcaagttgatgaataggccaattatgagataatccaactgatagaacagtgcgaatggtagctggcttcaccacatgactgaatgtttcaccaaaatcaaccccaggctgctgagtaaaaccacgaagtacccaacgagctttataacggtcaagcgagccatctgaatgaaatttggggcgataaacccatttacctgtcaccacgttgacacctctagggcgcgaaaccaaatcccaagtgttgtttgcctgaatagtagtatactcttctatcatagcatctctccaatttggatcagcaagcacacctcgatatgtcttgggcagcggagacagagaggagacctgaaggttgagtttattgactgggagccgaaagccagtttttccacgagtttgcattccatgagcattgtcaacttgaacaacggggatggcacgagcaagtagagtagtctgtgtagtatccatcggtgcagtgagtgggctgctcaagacacccactgtagcagtcacgttgccagcagtgacaacatccggacactcttgggtgtcagcctcctgcttggcgcgaactccatcctgcagcaagacaggggcagcaccgccagcagcatcgacgagggagactccgtcttcagtagcgcctaggacacttgcagcaacc

SEQ ID NO: 69106 - DNA, 587 bp, Zea Mays
atgggagtaaaacacctctaaacttcctctgtcagaatctgtgtagtgctgtttcagatttctgaaacagaatttttagtgacattggctgtactttggggtaccataacttttgttctatatgtttttagctatgggttgctatacaaaataggtagagctacaagtagagaataattttggttaagggagagtggtttgttgctgcaaaggattgggagatcagagggccggaactgggaggaatggaatgaagcagcatgactgataagttggattcagagtctgttcaagtgattgaagaagatcctctcttcctgtcctgtgcttatatgtttcgatgctggtatagatggaaatatagatgaagtacatggctaaagatctaaaggctccctcaccactaaaaatatctaattggactgtgttggtgaattgggagcagtgaagttttaactgttttatcgtttgtatacaggaaaagacaaaggagctactggtgtatataactgggataagcttgaagggagcagcaaaagatctagagccattcctccactaaaatatcacctttggatgtgtttgag

SEQ ID NO: 69107 - DNA, 399 bp, Zea Mays
tttcagcaggtttgggccgcttgaggagtgtaataccctacttcttgggatgactttgtatgtgggagatgtttacaagtggtgtctaccaagtggtgaagtgctaacgagatgaaaatgatggggaccccccttggccttatatacacgaccgtagggcacttcccacgtacatgttgatcacactcttccaacttatctcctagctaatagtgaacatacttcgcttatcctgaggaaaaaccgacgcctccatttcgagctatccccggcgttcaaggatgtcgggcgcgggaaaagcaaacaatttcaacgggatcatgcccaagccacgaataatccggacatgagcctattgccttcctgggttggcccatttacaccgttatcttcgctcgg

SEQ ID NO: 69108 - DNA, 415 bp, Zea Mays
tggagatacacgttggggttcacattataaaactctcaagagcctaagtaatctatttcctgaagttattgaagttctccaatatgttgaaaaagaaggtccaaatgattctaaaagacgtcaagcacgtggtctgctagattacctcaaagattttgactttgtgttccacttgcaattaatgttgcttattttaggacatgcaaattctttgtccttatcattgcagaggaaagataaagacatcttggaggccatgttagaggtgaaattaacgaagcaaaaatttcagcaaattagggatgatggttgggattctttgttgcaggttgtacactccttttgtgaagaacatagcattcctaagttggatatggaggatgactatattgatcgccataagccaagaaaaaag

SEQ ID NO: 69109 - DNA, 640 bp, Zea Mays
ccaccattaaacaaaaggaaacatcctaagagaaaacacataaacgaatcaaacaccctctaatctagcattggatctccaatcatagcttgcaaagatctctatatatctaacacctctaaggctcgacatactgtaaggatcttttgttgagcttcttctttctgcaacaatctccaaaatctgaaccagtatgttcccctgaatagaacctacataatagataggttttggtttaaaatttaaaacaccatcattgcgacaaagccaaaagaccaaaacaataccgtcactccaattaggagttttttctatatgcgagattattgttagcaacccaattgcccattatatgattaatactgatggtaagtaattctccaaataattatagcaaggtaacaatttaaaaaaatgctaaatactatcattttaattacaaaacttgcatttcatgctacctttccagattccacccgagcttagctaagttgtcactggtgagagtaacaactccgtggccctacctagatacccacaagaaaattatatatttttgagggagtttaagtttccaaagcagcgtattacgatttgtaggggtgtactcattaaaagagagtatattgagtgaaccgag

SEQ ID NO: 69110 - DNA, 1172 bp, Zea Mays
acaagagatgtttagactagatcgaaactccgaaaacaccttggagatgtcgagacatgaaggacacaaacttcaccgatggtgaccttttcacagacgaaatggaggcccatctccatgtgtttcgtgcgtcgatgctaaacggggttggagagttagacgacgttgatgttgccgcaatagccggtgctacgagatgacacgctgtggagttcgtgaagaaggcgatgcaatcaggaagcttcactaatgtcattagcgacaatgtgatactccgcctcaacgctcgagtgggggacgacgttctgacgcttggaggaccaagacgaggttgtagcctagaaacagaacatagcctaaggtggattggtgtgtcttcggacaacctactcgctcaccattagtgtaggcgacgagctcagaggcggaggggtagcgaagaagtctgtcatcttgagtgccctaaagatagcgtagaacatgtttcatctccattagatggggctcttgcaaatcatgcatgtgaagacaaaactgctgaacaacgtaagcaaagttgggcctagtgaacgtcatgtactaaagggtgcccgcgagactccaaaattgtgtggcatccaccataggagggttgaagttggcggtgaacttggcctaaagatccacatgtgtggtgtagtgcttgcaatctgtgattccccgcgctcaagaatgtcacacgtgtagagacactgatgcaggaagagctcatcggatcattgttccaagaaagcggtgaagagatctcatgtcctcattgcaaattccaactacagagctgagatggtgcactgcaaaagctcaatgctagaagctatgagaacaatatcatcaacctatagcaacaagtatatcctctcggtgcctcggtggaagatgaacaacaatgtgtgtacaatcgttgatttgaccaccagactatcgtagtccactcaagccgctgggtgaagccccaaacaacctaacgagccttgtagcgatctagggactcgttactcgttagcatgaaacttatgcttgaagatccacttgccagtgatgacatcgaaactaggtggatgaggcaccaagtcctaggtgccatttgtcattagcgcctttgtcctcttcttctgtagcaaggtgccaatgag

SEQ ID NO: 69111 - DNA, 314 bp, Zea Mays
tatgctgagatagatctcccctctcactactctatcgagatacaactaccaaacatggagcatccaaggacttcgaccctaatgagtccaccaccatctaatttctccaatgaaatcctgatgattggtttacttgcactttcaacagcttccgcactatgtccaactagtctccaatcttttgatatgaacactagatcagcaatctttaagaaagttagtcgacttgcacaggaatcacctacctttccaccctacaattcttttgatattcttattaatgtcatgttgaaaatcttcatttctaagttttg

SEQ ID NO: 69112 - DNA, 868 bp, Zea Mays
attaattctctattttcattactctctggattgagcactaaattctagaaaacgtagggggctaaatcaaagttttcccatgactctagctactggcacatggactgcgggttgattagctaaaggtttagggtctcttttacaaacggtgtcggccgaaggggtacggcgaaacctgggtcgttagatcgtgaacttgagcacccgattagatcgacccgattaacaattccagccactacccaccgttggatccgaattcatcggccgaggaccgcccgccacgtcgatctacttcagaccgtgcgattaccaattaacggccccgataggatctggtcgaaccggtatgcgctagagtcaatcttaaccgttcattttacatctgaaagccagggttttaccattacgcaatctaatctccgctgccaaattgaaatcggatggccaccacgcgtcgtctttcttccgccacagcaccgccacgtttgccccggcggcggcgtcataaccggttcagaacgcaccacgcagctacgacacgatcctaatgtgagtgcactaatgcgatgcgaagctcaaggtggaattagatgggggtaatttactgaggatgaagacccagcaggcccggtactcgacgtggtgcggattcacggcggcgtgacaacaacggcgagaaattgacgtcgttccggtagatgccaacaccgcccaaggtctgcacctgaaccttctcgcctaggcgcccctctggtgctatcccgagaagctgaacgccggtgagggagcagaacccgctgcgacttcaactccgcccaaattcggctctctgcgctctatctctctggtcgcgtgtagcgcaaat

SEQ ID NO: 69113 - DNA, 1158 bp, Zea Mays
aagtcaaaagatgtgaattgggcttatttgcaaaaagccactctagaactcatgtgtgactaagtctgaaaactaatgagccaggctgactttggagctctgtagatctaaaaatacaaagatttttcctagggtcaacacatcaaaagtctagagctactataggagtacaactttgcttaagggataaagcattgttgttatacaaaaagtggagataattggccctaaagtctggctgtcagataatacagagaatgaatattgactatcagtgagttttgaggaactttaggcttgattcatgctcaaaggagtaagcaactgggcaagatctctatagcagaattgtagtttgtatgtagggctacaagtttgttatagatggattggcatgttcttgcacagaaatccaagttctaggcgttgcaagtctggctgtcaagcactctgaattgggtttccaatggtacagtacactgaaatatcccaatccactgaacctcgccgccgacgagccgtgcactcggattctagcccgccgcggtgtttcgtgctcgacgcagttggataacggcaagggggtaagaaatatcaccccgtggatgaacttgagccactattcactccggccaccgtgtccgcttagctcacgaccgcttcagaaccgtcctcgccagagttagccaccttgcgaccttgcgccacgtgccctggcatcttaccacatcgcagtagctcgcgttaggcatatccggtgatcgccggtgagcttgccacggtaattgccaccaatcgcttgcgctagtgcatctccttctctccgaccgctaccgcgcgagctccaattcactggccaccgctcaagggccctataaattgagcacaccctaggctccgttaggtattcaagcatctaatccacctgctcgtgcctccaattactcaccagagcccccgaattgcttagttcccccaaatcagttttccgccaccgtgaacaagctctcactgtggtcagtgcacttcaggtccgatcttgcccactgctctcttgtttcagcattcttacatgccactgatgctcctcgacccattcaattaagctagaccgcgctagatcgccgggaacacttctgttcatccgtagttcgcact

SEQ ID NO: 69114 - DNA, 337 bp, Zea Mays
gcgattagtggctttcacgtggcgtgttcaccggcgatcatcggacatgcataacgcgagcgattgcgacgtggtaaatgccgaggcacgtggcgcaaggccgtgaggtggctgactccagcaaacctgtcccaaagcgaccgtgacatactcgggtacggcggccggagttcatccacggcgcgatatttccttacccctcgacgttatctaactaagccgagcacgaagtggcgaacgtgaatctgggcgcacggtcgccggcggtgagcttctctgcgctggcgttctgatccgatcactataccatcgtgaggcttcatcagttggtctgaca

SEQ ID NO: 69115 - DNA, 394 bp, Zea Mays
cccttttataattacaagagttagtgaaaaattagaagaaaacaaaatcatgcatgtttcatggaatgcttgagttacaccttaaaactaattagagatttaatggttatgtcatggtgttctaaagataaatattaatagttcttcatcatgattttgtgtgatgtcggacatttgcgccgaagtgttttattttggtgaatacgttgttaatggtataaggtaattctagtgcacgaaataactcgtataaaattagtaagtctacttgttgatcctaatatgattgttttaactctaacggatggtaaagtgttagaataattcaagtctctaaaacgcggcaattcttgaagtaaatagaggctgaaaattattagttgttgttttggac

SEQ ID NO: 69116 - DNA, 554 bp, Zea Mays
caagctgccacataaaaattggagatcaaggccctacaaagtgctctgtcaggtactctgaatggggcttcccattatacagtagactgaaaaagatcttcagattcatcgcacctcaccgccagtgaccctcgtgccgtgatccgcgccggtgctacgattcgtgctctctggtgaaaggatagtcgcggaggggtaaaagatccaaaagggggatggatcaagccgcccagtctctgtacccacttggtctgcggccagccgagatgatcctcgccggcgttgtccgcttaccgttcgtgcgccacgtgcccatgagctttagcacgtcgaactgaaccatagtagtaagtccgtccatcgccggaggctttgccacggtgaaacccacgataacctgcggcggtgactcacctcctctctccgaccgccagccttttccatcaaaattcggagccaccactctcggacactataaattgagtgtgtcgctagctctgttaggttgtcacgaagccagagcacccgccctcgcctccgatcgtccaccatag

SEQ ID NO: 69117 - DNA, 382 bp, Zea Mays
tacaccagtaccaagccactgtaatttttgcagaatttttggaattttattaaagcaacttgtagttcaaacccactccaaaatatttaagagaataaaagaaaaggaaagaagaaataaacctcaccccaataagtctaacttgagtacttgtcaactctcactaagacttagaaagaattcagtggaaccccgaaaataaacctaccacttaccttaagctgagtttaacccaatttaccaagtataccacccaaggtcttacataagtaaagttaaccttgtttaactcaagtaggtcatacatcgtcaaaagttgtaaattctaaagcacctatcatatcatgcatatatcttacgcattgcattcattagattgtaa

SEQ ID NO: 69118 - DNA, 628 bp, Zea Mays
ctagagaaattggtataaaagatggatgaatacataagggctgataatgacttctgccaaagaagggaggagttgcacagatacactgaaaccaccagtggctttagaggaagttttaacccaaggcatgtccgaagcatccataatccggtatagggtgaagaaaagccaacccaatcctagagccagttaggccaacaacatgcaagctcttagcatcagccttcccacaacacattttgtccagttacttcaagaggaggaaggggaggccgaagctttggtggcaagtttaacaggcctccaatgaagacattttgcttgttttgtggtgaggacaagggccacacaacaagagcatgtcaccatacaatcaataaacaaaaataacttgcttcatcagctgctcaacctccctagtcgaaggaggtgttcagtacatctttgtattgttcatcgtatgttccacagtatgttcagccttagtcacaggagccatggatgcacttacctttggcttcaaatgcttcaagcaatccagtaatgagcccatggtcaccatctgcttcctttgtcccgggaccacctccctatgaccaagttcctgctagtcatcccaagttcccag

SEQ ID NO: 69119 - DNA, 506 bp, Zea Mays
atgtggttattagggcaagggctaatcagacaatacactctcagtcatcttatagccaaaaacatctaatgctggcatttgactatgatgtacctcatgatgttgtcaatggcaatgaggatgagaggttgtatccagatttggttcaaagccatccaatattggtactagataacatacctgcataatttgaggacactgaccaagaagacgaagaggataacattgacatgggtatgtctagacataaagatgatgaggacagaccagtgatcgattatgacaaggataatccttccctagcagaaggcaccatattttcatcgatggttgattgtcgaaatacactcgctacttatttcattaacggtgaaatatgactttgaaattgacaagagtgagccaagcaggttgagagtgcactgcacatatgagaggtgtagatggaggatgcatgcttctaagatgtgagatagcacactcattcagatcgaagtggccctttt

SEQ ID NO: 69120 - DNA, 555 bp, Zea Mays
tgaagaccgccctccaaggtcgacgatgcgtgagatgctgcccaggatacgtctaatcccacatctggaatgtcagaacaaacatccatcatatcaccatcagtcggctctgacagcatatcctcaggaatggcatcctcaagggtctgatcaaaatctgttatagaaaaatcctgaaggctaacaagagcagacagggctggggaaggaatataactatctcctctactacatctgtagagtcggctattcttgcgaattaatggaacctcttcttcttcttcgtcctcatcaaaaatgcgaacaaaagatggtgcaggagcacacccattgggctcagctgcaacaggattacacccattaggttcagcttcagcagggtcacacccattggggtcagtcggtgcacagtcacacccattggggtcaacttcagcaggtacaccaccagtgggatcaactccagtaaagacctctgccggtacttcttcagcaacacgagcagaagggccagcaccctggtccaagcatgacaatcgtcgaagccgtctcctt

SEQ ID NO: 69121 - DNA, 565 bp, Zea Mays
gcgaagggggtcacgacctcggatattatagtctcgagaaggagtcctagcgagagaatcaggtggttgggcaatgtttgcaacgaccgtgtagtttgttacgaagcgcgaggggtggctttgttgtgatggagggaatgaagccgatgcctgggacccacatgtcggcatctctgatttcgtccacgcgcgtggcgcaaggttgacctacgggtcccacacgacagtggtgggcacacgcaaatcgttctagcgggtcggctgggcaggtaactaggcctcgtaggcttcagcctaggcatgtggtaagtcatttctttcttttattttcaatttctgctttcttttctattttttaaatttcaaattgaattcaaataaggtttaaatttcaaactcaattataatgcacaatccaaaaacccagcatgagatgcatgaatacatatatttttatttaattaattaagcatcagttttagatatataattcatacacatagaaatattcattctaataaaataactcatagtgtatatcctttataaagatgtgcttaaatcc

SEQ ID NO: 69122 - DNA, 436 bp, Zea Mays
aaattgaagatcttcgaaaacagctggcagaagaaagattaaaatgtgcagttgccgaagctgaccgagacgccagtgaatactggaaaaatcactggcaaaaaacagttggggagcttcgttcttcaaaagaaagatgctatgaaaattctatggcatgtgtacaaaagataaaaaccagcttcgccaatattggcgcatactcaaatgaggacaacttcgtagtaggcgaccctgaaggtccaatgtaatggatcaagggcgaagccgaagcctttgaggaagttttgggtggccgtggagatgtctgcgccttctcaggtgccaggggaattgcggccatcttagagaaggcaggatgcgagcatgtgaagattttggcccaagccgaagacgcgttttctattgaagataaaaaaaacccttcggccgaggc

SEQ ID NO: 69123 - DNA, 418 bp, Zea Mays
gaatcatgagtggccgttgctgcaagcgacgatcaatcttaccttgtttccaccccaccatgtgtattcttttgctcaaatggagaatatgtgtcctagacccaagagttctaggactgacaaattctaggcatgtgatcaaccagtcggatacggatggtctactagtggattaatataatatcgtggttatgtaataaatattatgtttcgttattaataaagcaaagtgttttagcataatccacaatatgatatcactatacatgtgattcttgatccgattgcatgtatagtagacttccagttttatcctttaaacctggtgtgacatatggctatgtacacatgaacttattgtgtcacaaacttaaggggttatcatagtttcatagatgattgactctagtgtaagtgt

SEQ ID NO: 69124 - DNA, 545 bp, Zea Mays
attttctaagtgtgagttcactaaaactgagatctcttatctaggtcacattatcagtcgtcaaggaattgcaactgatgtcacaaaaattgctgccatcaccaattggccgacaccatcttcagtcaaggacctgcgaagtttcttggggttagccggcttctaccgcaaatttgtgagacgctttggcatcatcagtcgccctctctttgatctcctcaagaagaactcattattcatttggacaacagaccatcagcaagcctttgacactctgaaccaggccctcagctcagccccagttctagccttgcctgatttctcccaacccttctccatttacactgatgcatgttccaagggtgtgggtgttgtcctcatgcagaatggccatcctctggcttacttaagtcgtgcactgggtcccaaaacacaaggcctctccatttacgaaaaggaatacttagccattctactggcagtagctcattggagatcatacctacaattggcagaattcaccattttcactgaccataaaagct

SEQ ID NO: 69125 - DNA, 674 bp, Zea Mays
tttgttatttggtccaagtggttttggcgccagcacaaaggtgaacacatctgatctttaggctagggttggttttgagacttagaggaatttttgatggctctattgtgttctccactgggtgaactgatttggggtttttgttgggcctttttgtaatatcttccttaatacattttgtagattttcaaatgtacttcatctttggtaaaggtttcctttcatgatttggccatttgcccactctttcccctttaatcccatgtttagggtttaatggcttaagaggggaattagggttttggaggctaaacatgattctaaacatgggactaaaagcttaccccatcacttaccccatcacttatgtcccctttcatgagtgatggggtaagcttttaggctttccttctaagtgaatatatacttcaaacatgggacttaaagcttaccccaacacttatgtcccatgtttagaatcatgattctaagcttttagtgccttcactttccaatttagcatataggataagtaggacataagtgtgttcattgagctagggccttgggtaacacctagggtgttacatggaggaagttgggataaaattctaccatatgctgagttctcatataataatagttatcagggcagtctgaagatgtcaccgttc

SEQ ID NO: 69126 - DNA, 609 bp, Zea Mays
cgaacgcgatggctggatcttctacttgccagagccatcaccagtctggggcttcttggaaggcgactgtgatgccatggtgatggagagacctcggctctggtaccaaatgttggaaatccggccactggacgaaagcaatacagacgtatgcgtttggacacgagaaaggaacttcgtgctggaaagacacaacttttctgttgattgattatctctatataaactaagtacatgcagtagtataaggtaacaaatgattgagctaatcacggcatgatcgtgagcaattgttgccatcccaacaacctaggccatgctgtgatttctaccttctatcttaaggacttattcaaatagaccatgcagtggatgtgtggaatactttagctcttgtttgcaattgtgaaatgccccagtgaagcacaacaagtccatttatttgcgtggattgtcatagtgttttgaaacccaaaactgagctccactatgtcctgtcaatcccatagcttctccatcgtgcataacatgtccccggcacctaggttgagtcttcaaccttgccccagctggtttcatggtatggcttgttcgtttagctggagtttt

SEQ ID NO: 69127 - DNA, 377 bp, Zea Mays
aaatgggtcaggcggctggcaccgtttcatataacacggcatcggatggaatcacagtcaaccactcaaacgcaacgttacacctccccgtcgtatcattttactatttcaagacaagacgatggtcacctttcactggatagacacccatcgggtacccattgggtgtaccatccggattttttgagattttctgaagcaacaagacagacaacatatacacaatgaatacacaacaacaaagggggagattggtcaaactggaggaagtccatactccaccaagcataagtccaatcagcagaagcattgaagtcttcgatcgagtgccgtccagccaggctccctctggtttgggttcaaccgaccgagctcca

SEQ ID NO: 69128 - DNA, 1024 bp, Zea Mays
gcgagatagaccgacggttattcaccggtgatagaaacaacggcgagaccgcccaggctacgcgacggatttgcgatggtggggatgtctggcgaagaatcccgacgacttcaaaggtccccaccacgcggtacaattctctttttcttcgctcccctagcttcttcgtcaagcctttcgtagtctggatactcgaagttaagggcgtccatcatccgattcagccttcgttttttccgagtactgaaggcagctttcatcaattgatcctcttttttgtataattctcaaggatctcattgcgcattgtctctatcatttccaaccattcggcacaggggccgctgaaagtgttctgaaacttgaaccggtatggcaaccgaacaagctcaaattttttcccttcttccttcttcttcgacatcccccacccaccggatgttgaaaaggttttgttagctagatattcttgcaccaaatctcgagtagtaatgtgctctgccacgactctgaattctacttcggttaattggcatggagagccaagctgcatgttacacaatggcctcgtcatgccaaagcttaatttcaaaggactcattaccatactcataagtttttcccttttttctcatcagcttttacataaaactattcatttgtccaacctgtaggccacttactgtgatagccgatcactggagcctttgtgtctttccggtatgcgaaattgtagcatccgaagtttttatgcaagccatctacccttgctttggtttgatagtgaagctcatggaatttgcagaacccttcggcattagcactttttccttgacttcataaagcccatatgtacacgctaagcctgactatagtgtttggagttagttgatgaagatagatttcaaacttcttaaaaacttcactgatcatttcgtacagagggaaccagagtcccactctgaagaagctcttaaaacaacgacttcatcatttcttggctctggaactacttcatccacaa

SEQ ID NO: 69129 - DNA, 406 bp, Zea Mays
gcggaaaggaaattagcattgaagaatctataaaaacagggagaaggttcgattactaccttcgtgtcacgttgcgcaaattatatatgtgttctaatgaccacccttttgaaggctgccgaaaaagctacaagtattaggaaaaatttgcagaccaagaaggccaaaggtactttccttttttaacactactgaatttctttgtgctcatgatgacagcttgtcctctaacttttgctgggaagtttctacttcgcaggtgataattgaagtaaagcataccaacgctgaagccaaggatgttgctattgaagcagaagtagtagctggcagggctacaaagaaagctgcggacgaagttatcttcaagatttgcgaacaaatttatgatgaatgatgcaaggat

SEQ ID NO: 69130 - DNA, 556 bp, Zea Mays
aacaggatgagatcacgagagcggatgatgttttgtcatgagcgtgatggctcggggagcacaggttggggtgtggcatacgccaccacgcacgcagtaggcagtactagaggcatgggcgttgccgccccccgagtatgagccatcctttttggccgctgctttggtagattttgatgccactttgtgctagtttatcttgctgctgcttggctatttgttccgtgcggaatctggaaagctgtgtgctctgttctgttttgccttttgtgtgcttggctgcctgtgctgcagcgagcctttagtattgttcttctctggtgatgtggttcatctttcttgggttcacctgccatgtgcttctgtccgctgcagtgtggcatctctccttttgttcgtgtgttttgtgtcatggcatcttatgttggggtaggatctataatatcatgttgctggtttcatcaaagatgtttatggactgtctgatcacctacggagcaagggttccttactaggaagtgtgaccttcaagagaactgttttgtggttccttctg

SEQ ID NO: 69131 - DNA, 439 bp, Zea Mays
gacgaagtgcctttgtatgctgctttgcgtcaaagcttaggttcgtccgtcagtgagaatcattcctaaaatacacttgttaacgatgaagccacatgttaggcaagtgatcttcgacatataaggcccccaacaatagctccttgcgggatgagtttgttttcatcgtaacgagcttagatcacaaaaatataacttggaggccatatgccaaagatccaaaaacaccttcctaaagcttgtttaagaagaagatgatccattcgcagtgaaagcgggcgacccggaatttgagtcgtcgagggagaagcaggggacactgcgcgagaatgttttcaatgacccatgccgcttcgtgcgcatttttcagtataaaagcggccgagggggtgagggaaaatcacatttactgcccttacctacttgctgccaaaatttg

SEQ ID NO: 69132 - DNA, 809 bp, Zea Mays
acggtacgaaagctagaggacaaattcgaaggattagagttccaccatgtggaaagggatcacaatgtagtggctgacgcactatcgaagatggggtccaattaggcccaagttccacctgggttttcgtccaagaaatatagcaaccgagtgtcaccacagatcagatggaggaatgtcacgttctaagtcaggcagaggcagatccaaatgactagagagagccaatcatcaaatacataagaaatgaggaagaaccagatgacaaggctgcggcggagcgcaccgcgagacagtcggtccactacaccattatagggggcttactgtacagaagaggtgcaggggtagtccccatgaagtgtattcacttggccactgggaagcagttgttggatgaaatccatgctgggcaatgtggcgtgcatgcagcgttatggactctggtaggaaaagctttcaggtccgggttctactagccaacagctaagaatgatgtagctgagttagtctagaagtgcgaggcgtgccaattcttatcaaagcagcagcatctacccgcttaacagttgcagactattcctgtgacctggccgtttgcatgctggggactggacatgattgggcccttcaagaaagctcaaggggatatacacacgtactagttgccattgataaattcacaaagtggatagaatacaaacccatcgcctctttaacctcagtaaaggcagtggacttgattcaagaaataatgttcaggtttggaatacccaacagcatcattacagacctggaatctaacttca

SEQ ID NO: 69133 - DNA, 694 bp, Zea Mays
ggaactggaaggaggaggatgaagtaactgtggccgcggatggacggttggattttacggattaacaagatcattcctaaacgcctactcagtgataagtaagatctagatgcctctatcctagcgctcctagatagcaatgtgttggcatcttttgaggttaagcactaactatctttaaatcccgcatacggtacccggaccgttcgggcatccagtgccaaatcgggcgctcaacataatgcttgtactatctacacaaatgcttgctggagtagtacacaaatgcttgctggagtagcaactagcaacacataatgcttgtactatctacacaaatgctttctgagtagcaactagccataccttggtctgacccaagccattttggtattgccttgtgcctacgttctgcctgcaattttcttctttgctcaaccgtcgcacgcacaacacaacacctgcttctcagcctgccgccgctccgctctatggagttgcgtgctgctcatcctcatctttcacatactgctcgtgctcttccctgacatgtgcttgcttgtatgcgactgcttgcgctaggcagctaggcctgtgttcatagctgcgttatgcacgatatcctggcatgtgcttgcttgtatgcggctgcttgtgctaggcggctaggcctgtgttcatagctgtgttatgc

SEQ ID NO: 69134 - DNA, 655 bp, Zea Mays
agcgaggaggaattgtggtggataaagcaccaacattaggggtggtgtgttaggaggtatcaaactcagcaatccagtctgagactgaggtgggtggagccaagcagttgacgatcacgacttagatttaaggtatgacgagttcgtacaaccgatattgttggtcagacgaggaaggtgatgaggcggcgtcgagcgttgtgctccgtacgcgtcgagggctctaacaccattgggcattgggcatagtagttgcaagtggtccagtgacagcagctatcgccgaccatgccttgtggttctacgatggatggatcctgactaacctatgcttaggcgtaaggacagaaccgtatgcctcattagtcattagaaccaacaatcctgagcggcaagaagcagtgccacaccgcgtgcaacatgtttgacgaaatcgtatgtctgctcctgatagtgtcgacctcgcgactgaatataatccatgcaacgcgttttcgtcgagcagcattagcaaatagtactagcaagtagcaagcagcatgtattttcattctgtcccatactcccacgtctcgccgtagtcgcatagttgtggactcccttgcacctgccccaataccccacgaaagcaaggtatggcgagcgcaagggactg

SEQ ID NO: 69135 - DNA, 1054 bp, Zea Mays
ggttaacaatgaagttgggcaaactttgagattggattcgaccatgatccagtgattgtttgaatatggttgctatagcaagattgtagccaaatcatagggcaacaactttgttacaggtagattaacaagttgtcatgtaaaaatttgagatttgggcgctgcaaaccgctttgtcagaacaactgaagcagcccctgatggtatagtaacgaaaagatcttctggtttagtgaacctcgccaccggcgaccccacgctcggattcgcgccaggtgccacgattcatgctcaacggagtacagataactgctcggggtaagaaatattgcattgaggatgaacttaggccactattccgcgctggccgctatgtccgcctgactcacggccagttcagataagctcgccagagttggccgcctgttgattggttgccacgtgcctaggtactgtaccacgtcgcagtaacgtgccttggcgtgtccgttcatcgccggtaaccttgccacggtgaaagccacgcacctcttgcgccagtgctctcccctctctccggccgccagcgcgccatgccaaattcaagagccaccaccctcgggtcctataaattgagcgtgccatcatctccgctaggtagtcaagcatccagcgcacccacttgtgtctcaaattgtccaccagagagctctaatttgagatttcccccaaatcggtcaagaacaccgcaacgtgagagctcgccgtggccagctctgcacaggtcggattatgccctcctcgctcttgttttagcatccctgtgtgcttgtgatgcttttcgacccagccaattgagctagaacacgtaggatcaccgggaacgcttcgggttgtccgttgatcgcgctgtcaccgtgggcagagaggttaggggctagaaccttgaaattggttgaggggtaatggttattaggggtccaattaggtgtcaaccactccagagcaccggtcattgcattttccggccggtcttggctcaccggagccgctgctccgccgtcctcggttgggg

SEQ ID NO: 69136 - DNA, 742 bp, Zea Mays
atttttgctatgttgcattcaaaatggcagttggtattcaaattgtacttaagttttagacaactttctaataaataaaaaaagagaagtagaaaatagaactccaggcacttgggctgaaactctgctcggcctatttcaactgccactgctaacccagcccgaagcccatttgtgcgcggcccagccaccctgcaaagccaaattgccggcccatttccgtacgtcgccgctcggaccgtagctcagacccgtgttgtgttcccgccatacgggacccaaccgtcagtcaacctccacacatgccagcctcccttctgccgccaccatgtgggcccacggtgacaaactctccgtggcgttgcaactgaactccacgttggtcggagtcggagctgctcacatgctcacgtgtcaccatgaactacctggagattagccaccgtcggtgagggaaacagagaaggtcaccgtcgaagcagagaagaggatcacgtccgccgccgaccgttatcgtgtacgtcgatggtctgcgtggggttggtgcccatggtcgtgccgagggaaggaggatctctgctatttaggcctgggggtgagcgtttcgtcgccgtagaaggaaactcatcacgtagtacttgcggctcgacgcaagcagccctaaactaatttgtcgtgttctccacaatgtttagcaaagtcgttgggtcgggacagtgcatccgggcggactccggttggc

SEQ ID NO: 69137 - DNA, 500 bp, Zea Mays
ctgttttctccagctgaatggtgggaacttcggctgctgcagcgggtattacctccgaagttgggaagacttcttcagcagactcaacagcctatgtctttgagacccctgcaacaggcagtatagcagccctctccaagacatatgacttaggtcggtgagttacaactttcattttctttggttgcggcgtggtagagggggtcgatgatgtaattctctttttcgccccttgcttccaagccggaaagcagtaatcgggataagcaaagccaataacatcaaaaactctattcagccttttctttccatgggcgccgaaggcagtattcatggcttcatcttcagctttggtataagcccccaacaaatcatcagtggttgcctcgatggcctcgagccatttgtcatttggctcacggaactgacttctgtagtggtatatatatttcaaataaactagaccaccttcgtttgagctgtcagtggtctccttcggc

SEQ ID NO: 69138 - DNA, 501 bp, Zea Mays
agacccagcccccgagggtggtgccggcagttacccagtccccgagggtgttgccagtagtgatccagctctggtgggtagtgcaagctataacccagcccccgagggtgttcaggtgggctctctttcccatgcctccatggatgttcacgttgggttgcccccacctcggtccgatggggcgacggtggtacatgcttccacagttttaaacggacaagtcgccttagaggtcggcgagctagatgcgaggagcctgatgtctgctggcgagctgagatcacccctgatgatgcccttcagattattcttgctgatcttccctcgtcgagacatgacacaactcctcctaccttgggtctaccactgttcctctccaatcttcatgtgagttggcctcttactcttacattgttcatattagtgagttatatttcttctgctcatctgtctttgatcacaggcttttgtcgatggaaggtctgctcagctgagatcctg

SEQ ID NO: 69139 - DNA, 1179 bp, Zea Mays
gcaaagacgccttttttgcagatcaccaagcaaggggcggaaaggagctgagacaaagtagagcggtgccgaccgctgcacccctcaccaggcgaagcctggcgatgccacgtatcctgcgacacatagcgtggaccatcaagaaaatccggtatcgacacccggatcacaacacgcctcagcattaaccgaggacaagatgtatacctgcccacatcagtggagggcgctacaactgaagcacacagaccaaacagtggctcacgcattacgaagaaggccattgactctctgcaccatgtcggtagctgccatcatggcctccacggtagcacgcggggtaccaaggcgaggggtgagaggcggagaagacaagacgacatcgccagagcatccctatagacaacagtacttcagcctacgttgcaaccttctcctgcactctaccttgactaaatgaagtgggggcacggcaggccagaaaatctacacatagactagaagaagatccataccctgcacacgtctgaccgatgcgatcatgtgtgcccgagagacccatggactcatgcccggtgtgtgatgaaccacctcaagaaagggtatgtcccttacactgcataaaccttcgagcattccatgcaggtcactcgagggctgaaggactacatctagcacgtgcgctcgcgggcacccaagaaacaaatggactctcgtccgatgcgcaatgaaccatcacaggaaagggtctgccccttatactatataaacccctgagcaatccatgtggaatacttgatggatcgaggactacatctaacagatgtgtttgcgtgcacccaaaaaaggaactgcataaagaaagtctcttcgcatcttcaaggagttacacaaaggctcagggctgctgttgggtacctgtgaatagggtacccaaagaaggccccaagaccacccaaagatggcccacctaccaagcagttcagcaggaaggcacaaaaggccatccggggatgcctcgccaagccgactgacccacgaaacaaatgtccgccgtgcaacccaacaaggcatggtcaccgaccaaccggcccactgagcaatccaccgaggcgaggcttccgaaccacctgcccgttgagcaacctagcgaggcgaggctgctgaccaacctacccc

SEQ ID NO: 69140 - DNA, 771 bp, Zea Mays
caaaaaaactctaatggtgtcataggagctcacttgtgagtgttacaagtgtgtagtcctttaataataactatatttaaggtagaagttataaaagcccctattgtaggacatatgaggtatttaaagtttattgaagttactagggagttgatgctccattggagtgctttggccaccaaaagtgcttaaggaattattagatggatagcatagtactttatgaagtgtttagggtaattagaccaccacattagtgcattgctgtagacttaggttgagtgtttaataccttttgtcactcagtgcttgtgggcgttattgttgtacactagtggcttttagtctaataatatcaccactgtgtttatggagtggttgtcttgctcatactcgagaacaaggtccatagcatttgggacagaagcttgatagtgatattactcacttgcatgtgggcaatgatccacatgctccacgaagatatctgatcaaaatcttgacccttacgacaacatccttgcaaggggtcctaatgatgactaacagaaaatgcgagattttaaatactcagaaaaaatatcattgtcaacattgccttatattaatgctgagagcaaagacgtgcttctagcatgtccacatcgacttttaatccttagtcgtccgattgtatctcaacagcaaggaacgaaagcagtggccaaaggagcttttgtgtgtatgcacatatttgcaccaatttccagatgtagtccagcatgcctgcct

SEQ ID NO: 69141 - DNA, 601 bp, Zea Mays
gctaggcgggccacgagcagtctaggcaaagaagatgcctagcgatctcgacgggacgccaagcgggataaagaagcgaggaaggagagtttgttggattggggtggggcgcgcgggaaatgcagcgcacacgggaggaggaagatggcgaggcgggctaggcaaagatgccgcaacctcgatgggatgccgattaggatagagaagcgaggaaggagaatttgctaggtcagaatttgaatgtcgtttttctattgttgccgcaaagaagatgcctagcgatctcgacgggacgccaagcgggataaagaagcgaggaaggagagtttgttggattggggtggggcgcgcgggaaatgcagcgcacacgggaggaggaagatggcgaggcgagctaggcaaagatgccgcaacctcgatggaatgccgattaggatagagaagcgaggaagaagaatttgctaggtcagaatttgaatgtcgtttttctattgttgccgatactgagcagtttagctagtctcttagagttgctctaagctgctgcttctaaccactcagactttagtttttttttgtgaatttgatgatgtaaaaccta

SEQ ID NO: 69142 - DNA, 443 bp, Zea Mays
gtggatgaagaatgttcactccaaaggagcaagctctcgcgtgaaaaaaaagaagaatgaggaaaacaaaacccaagttttgaaggcaaaggtataaataaagattttattttactggtcaagacacaatagagtacatggtcgggtgtagaatagataatcataccattaagagaggagctctaattagcaaattcggtcatatagtgtcactagatgttggaactacatctatttacattgaggcctagtgacacattagagagtaagtgaaaatatttgtgaaaatacttttaaagatattaacaaccgcctaacatgtttggcaaagatttttagagttgacacgcttgcaagggccaaagaaatgttcttggtgctgctaatgagcatgcatcacacatgtatggtgtggcgtcggactggtgcaccgaacacgacgg

SEQ ID NO: 69143 - DNA, 445 bp, Zea Mays
ctggacggcttccatttccggcttccctcttggtgctctttctgagggccccagagccagagccagaagccccggcccgtaggcggtaggccgccgtagctcgtcggtcgtcacgagcagatcagcagcagagtacttaaccgagaggtcagtcaggtgaaattttattgggcgcgtcgtgtggacgtcaattttgcgtaggctgctggctgggtcccgccaaattctaacgagcgaggtggtgttatctctaggcaattcagatctgttgagaatagtctattcttttatctctgttaattaacctggcctgaaattcctggaacgcatacgtacgtacgtacgtgtggagacctggagagatacggccaagaatcccgcacattattgcgagcgattgatggtgccgtattgaccaatccatcaaggttttggagctaacaat

SEQ ID NO: 69144 - DNA, 274 bp, Zea Mays
cattgagggccctgtgtcagatttatgaagaagtggccgacaccccgctcagattctttccgccctttcagagaaaccgtcctgtttggatggccaggatgcgtgcattggtaaggcagcagctgcttgaggacgacccctcagtcatgtacctcaccgcatacctgctcaccctggatgcacagtatgatttcttggctcggcaccactgtcagatgattgtccgagaagaagatgcagagaagcgcaaccgtcagctccatgtggatatcac

SEQ ID NO: 69145 - DNA, 420 bp, Zea Mays
actgacagttacaatttgtttccaaatgatgcaaaaagatcctaagtcttctacagatagatacaaaaggaagttttaagaatcttcagcccttcggaacaagcttcggcttaacggccttcggcgccaccatcctgcagagagaagaaggtataaataaatcaggaaatatggtaaaggaaaaccaaggtaaataagataggtaaaggtttcatactaagttaagtagttttcgtgcttcatccaaggccagttcacgcccgccttttgcccaaaattgggtgataaatctgttccctatgcttcggcctttgtctggaatgtcaattagatatgatgtcgaaagattgaaatttggcttattaacagttttggcgtgagtgcacccagccttcataaaagttatagctgtgccgcgtg

SEQ ID NO: 69146 - DNA, 711 bp, Zea Mays
gagaaatcttgggtttctattgtaaccaactgatccgccagctaaccatcaggtgcgggctcccggggctatataagttgagttctcccagctattcacgagcaaaattgtcagttgtcgctgtccgacgaagggagcagggaggagcattggaccaagccgcacgtcctcaacgcttaatcgagtagcgagggtgactggagtgcgaggagttgctcaccagactcttttcactgccgtgggatcacgccgccgcggccagaggcctccgtgctatgaagaccggtaagatgctccctattttctttgttgaactcttgtgtttgcgtcataccaagcagagttaattttggacgcctgtgagccgagttgctatggcacacccaatggcaccgccacgtcgtgcgagcgtcgaaggagaggagacgagtcggggaccgtccgattatggtccaacgggtaggattagatccccgtatacccgttcacttcataaaatcctgaccatgggtctgtgttgtgcagcgaggattagactagtgcgtaccccttcgctttattgatcggaaccattgtatcgagatcctgcggctctcttttcgtgcgtgtatcaggcatggttcttttaaataaaggacccctgtgcgtctacctattctgctcgctgtcccgctccattgaaaaacaactacatgtggtcttaactattac

SEQ ID NO: 69147 - DNA, 604 bp, Zea Mays
gtgcaaccggctgctggtgaatttctcattggaattgcacgacaccaccataccgccacccgccgcggtcagctcggttgctgtcatcgttttggggaaaggagcacgacacaacattctccatcattgccggtacatatagcactatttgaagcgaagctataggcacgtgggcgagggtctggtgaactcctgcaatggcatgccgccgtgggccgcagaggcagagagctgcgccaccgtggccagctgcggggtagaagatgaacacgaaccgtccgtttgttgatgagcgccttagattagatgaggggagagcgcgttcgaccgtcgatcgacgaatgcacggtctggattagatccgcaccataccggttcaatggttgatcccagcccatggatctagatcgtgcgcaccagaatagatcacgacgttttaaaatcgggggccatcggatcatgatccagcagcccataatgcaccgtaccccttcggccagcgctaatgcaaaagagacccttggtttggataaatcaacctgtcaaccaccactactgtttcctgagtcttagtacatttgcgtgttagcccctgaactccccg

SEQ ID NO: 69148 - DNA, 859 bp, Zea Mays
gttgagtcaaggtcaaatattgtaaagctccaacaatacttctgtatcttgttgattattctaactcaacaactctccactgttgatactcagtttagagaggtgtagtaatgggtttttacagttcataccaactcttttgagaatagcagtagcatatttactttgagagaggtggatgccactgctgaccaagtacttcaataaataaaacagtgcattggtccaagatctttgaaagcaaaatctgttctcagatttttgagcaaggctgaaacaacatcctatgaagagcttctacaataatattatccacatatgccaacaacaaaaaacatagtaattccatctttaaaaatgaacaaagaagtatcagccttagatgaatgaaaacccaattttagtagctgttcactgagcctggagtaccaagcaggccatagatggctttgtccaacttgtaaatgtagtgtggctgtatcttgttcttatagtctggtggttgtttcatgtaaacatattactcgagaatggcataaagatgcataatgtcaagctacctcaaggaccatcctctagtcatatcaatagacgagatgattatgatagtaacttctttaaccacacgactaaaagtatcctcgtaatctatgccatatctctgattaaaaccttttgctactagtctagccttgtctctgtctagagtaccgtcagcctttcatttcattttgtatacccatttgtagtctattacatttttagttcctttaggtggaaccaaatgctagatcttgtttttagctcgtgcttcaaatagcatccatagcatacttccaatttctatcttctaatgcct

SEQ ID NO: 69149 - DNA, 642 bp, Zea Mays
gtcgagcgcggccgaagtccgacgagctgtctggaccggccgaatggggccatgactagggtctccgagcgactgacacgaaattgagtccaccccgaccatttcccccaacccaatttcatctacggccaattggttttctctggccacggtgaccgtgaacatggcggactgatgaacatgttcccgtgaattcatggcggtccagtacaattaaagggttcgggaagctttggaagagcctagagatgctagaacaatcaacagaggagtatgaattcacctggaacaggctgaccacggcgagcttggttctacggtggcggaaacttgatttgggggaaacaagaaattcgggcacactggtgatcgattgctagcgattcttggtggctgggtagttgatgaccttgcagagctggtgggggctttaatttatagggagagcgagcggtggtgatcaattcggtcgagccatgctggcggccggagataaggaagaatactgacgtcgtggattcgtggcctcaaccgtggcggtcattccggcgatcaccgtgcatgcgagacgcgacttacagcgacgtggtctaatgctttagcacgtggcaggcgaccgacgagcagccaacgccggtgaac

SEQ ID NO: 69150 - DNA, 399 bp, Zea Mays
gcaagttgtcccctcattttattggaccaatcatgatctttaggcgagttggggagatggcataccaactcgagctacctgctagtctatcggatgtgcataatgtgttccacgtatctcagctcaagaagtatctccgtgtccctgaggaacagttaccaatgtaagagctcagtgttcagggtgatttgacttacacggattacccgatcaagattttggatactttgactcaagttacaagaaataaggtgataaagatgtgcaaagtgcaatgaagtcaccatggagaggatgaagcaacgtgggaaagagaagaagagcttcacatagactttccccatcttttccctagaccttcttaaatctcgaggacgagattatttttaagggtgtagg

SEQ ID NO: 69151 - DNA, 878 bp, Zea Mays
agctgcctcaccccgttatttgccctttatgtgattaagcccaagaaatagtgcaacacatcttaacctcctgcgttttcgcccaacaattttggttcagtattctctccccatgtggtttggggcatcttaggattcctatgcaccactgtaggttgacaattggtgagtggaaaacagtggaggccaaattcaagaaaaagctcagcagctggaaaggaaaacttatgtcagtaggagggcgtctcgtattaattaattctgtgttgaccagtcttgcgatgtttatgatgtctttctttgaggtaccaaaaggtgtgctggagaagatagattatttcagatcgcgttttttctagcaaggggagggccataagaaaaaatataggctggctagatgggatgtaatttgtcaacctaaagaggttggcgggctaggcattttgaatttagaggttcataataaatgcctcttaagcaaatggttgtataaacttctcaatgaagaagggatgtggcaatcattattgagacgtaaatgtctggccaattgaaccttatcccaggcgcagcgtagggccacagattcacacttctggagtggccttatgaaagttaaggacacattcattagtaaaggaacctttgtgattcatgatgggtcccaggtgcgtttctgggaggatgactggcttgggtcaggaacgttaaaacttcgttttccgtctctttataacctagcgaggaggaagaactcaactgttgcctgtgtattctccacggtgcccttaaatatatcctttcgtaggggtttggctcaacaattgacggtccaatggtttcatttggtctcacttgtagcgcataccgaattgaat

SEQ ID NO: 69152 - DNA, 748 bp, Zea Mays
aatcggctagccgtgagcaggtgattcacggcggcgtagtcgaccgaattgggggaagaggggaattctccagctacggtggttaattgagggggagaatgggtgcgtcggcttcgcgatgacctagcgctgtaggcccagccaaccatttatagggatagcgagcggtggtcgtgaatttggacgagacacacggtggccggaggaagggaagcttcactggtgcagtggtttcgtgtcctcagtcgtggtgaaggctccggtgatcaacggagagcaagggtgagtcacggtgatgcggtagatggacagagacacgcggcacaaggccgggaggcggtggctcaccggcgagcaaatctgctccagctgcaaagcagcagagtgcggtggtgagtcaccggagtgacgtccagcgcacggggtgacgaccgaagcgttatccccaatcctagggcacaaatccacacgccggtgacacgaatcacggcggaggagccgtcggcggtgagatttttctgccgtggcgatctgatccagtattgttactgtaccatggcgatttcagtcagataaacctgacagagcaactttaggtcctattttctccagattttcaatggtaccaagcccaaacatctatagaaaagttgttcctctttaataactctacaactttgttatagcaaccctaggtagattcttactggatcttagtcgaaatggctctcaaacttggatccaagtc

SEQ ID NO: 69153 - DNA, 518 bp, Zea Mays
aaaatgcataacatttttaatggggggagagcaattagctcgttgcacttaaaatgattaactgaaattatggttgctagtagagaggggagccaagaaacggaatcaggtgaaactactcgtccatttctggctctcccagtacaggcagaaaaagatgaatcggttcagtgaaacgtttctgtactacctacccgtttggcagcgattctggagtttcacgtgagcatcggaactgttccaagctgccaaaagggctcttagtattgagttaagacaaagcagtttgatcctgggtggttagttgagctcgagtcttccctttgttaacagtaacaagctcatcattctggacgagtttaaagttttatcatcttcattgatttcttcaggcttacatgcttactctgcagaaatgagctcagctgatattgttctcatcaaaacattaaatgtaggatatccagtattccagtggttaccttcttgaattggcttgagtaaaccctttgggcttt

SEQ ID NO: 69154 - DNA, 302 bp, Zea Mays
gtgatgatgaccttgatggtgagttctctactctgggaaggagatcaggttcttcttcttcaacccctcaagctatctcaactgttgcatctacctctgagttaggttcctacttagacaacgatactatcactgagtttgatgaggacttcaatgtcctttcttggtggcatcaacattagttaacttatcctgttctttcactactagctaaaaatgtcttgacagtgtcaacatctactatttcctcagagtctacctttagtcttgctggcagggtgcttgaagagcgtcgacgtcgt

SEQ ID NO: 69155 - DNA, 805 bp, Zea Mays
ccggatttgcgccggttgccgtgattcgtgcctggcacgccgtggatattcgcagggaggtaactttggacgtgtcgcgacctcgcggacctagcccgagtctagtaggagataattcaccggtggccaccgtagctcggtcatttccgccaccgtgtcatccatgcctcgctcctccctcactgtatcccttctttacgtggtaaccatgcacgaatggtgtactccgcggccgtggatcgttagccggaccaccgcgcctttaaatagccccgccacccatggcgaggtattcacatctccaccagtgagctcagttgaagcccaaattcgtggaatcctctccacctctcccaaaattggtagtgcacggtgaaaccatagtcctttacggctgtgtagccccaacctcacctcctaattctgcccggaaccgttgcggcgccattttcccccttttctatcaccggcaagcgaaaatcctccgcgccccgtggccagctacttccaggtctgctcctgctcgttttaatcgtgtttcagcacctatatacactcgtgatactcatcggctctgcccttcttgcttgtccacgctcaatcacccagaacacatgaacttgtgttcgatattccccgccaccgtggtcagactaagccagagccataaccactcaattcaatctcattctagggttgtattatgtccgtaatacttgcccagtcattaaattgggcagccatcaccaatcttggccggtccgagcagcaggatcatcgacggtgagcgcgccgtggatttgga

SEQ ID NO: 69156 - DNA, 650 bp, Zea Mays
gacgagtttcagaaaactccaagtatgtggtgtctcggggcccttggggtggaactctgcctccatgctgctgaaactgattccccaccaattcacgcaggaaacatgtgttgtcagcggtagcattaactaaggcagcgataacctcagccaatgtgggaggtacaggtggcgggttcggagtttcctccctgccgcgggaagttcccgccccgtcttgagcacgagttcttggtggcatctgaggaagaaaaatatacttgattattacatgctgaaagtacaccacctttattacattgtgccaaactggtactaattatacatactcactgatacaactcaactttccttatttaatttacataaggaaaacaactatactacactactctaattatcttcgtccttggccgctctcgctccaatgccagccttgggagaacgttcatctgcgaggttcatggaaggaggggctccaaaaagatccaactccccatcaggtcctccactagctgctccagatgttccggctcccattgctgcaacttccggtggcacttttggatgcagccggtcgtataacacatgcacttcctcatgcagagtgttacagtatgcttgtagattctccagagctacacttagtt

SEQ ID NO: 69157 - DNA, 510 bp, Zea Mays
tcgcgcacacgcaggaatcgcaacaaccatcgatcggaatctctcacaaccgggcaagctccgttcctcctcacgcctataaatggagcacttggccacaacgcatccctcacatatccctttccggagccggaatcaagcgccagcgtcgagtctgcagcacgggtcgccgttgcagggagacgccatggcgatgtcaccgggccctcaaggtatgccctcgaactccacgcaactgaggtgatcacgccttaggcctcggcaggtgatgcggtccaggttggtcgacgaattcatcgccggagcaaaggaatctgccgctgggccgctacacgggtgactatcctccctcgtcgtctgctgtcaagataagcacctccgttgggctcgcttatgccatctttttgcgtaggattgtttgggagggggatggtcaccagtgtgccgtactgggggtcgccggcgcgtttccgccaagcgcaaggggctaccgggttatgggcagtgggc

SEQ ID NO: 69158 - DNA, 803 bp, Zea Mays
accgaattgacttctgtagcggtatgtatatttcaaataaactagacaaccttcgcttgagatgttagtggtctccttcggcatttcccattcattgacaaggggccatactttgaaagctatatgctcttggaccaagtctctggtgccaatgtagctgcacacaatgttgaaggctaccaggcaggcttgagctttgtcactattcacgatcgagggccttcagacaccaaagtgagatcgtattggacgttgaattatatcttttacatcctccctctcaaccaaatcattcttaacatagaaccattgcttcattcaagacctgggccattttttgcgaagcgtgggaatagccttgcattagagcggtacatgaaggaatagcaaccaaaattgttgtgatattgttccttttccattgccttcgtctggtaagataattcatgtatattacagaagcaattgacgtctggatccaacccctggctcctcattgcccagatgaaaactccattttgatcaaagcttcgggggtgagttgatgaagatatatctcgaatcttttaagtacctcaatcagcattttatacagaggaaactgaaggccagcctttatgaaacccttataaacaaccacttcatcagcttcaggaagaggaacattattctctcctccggccctcactatagttgtatcacgaaaatatttacctttcattgcttcaatctgtcctctcttaactgtggattttccaaatacaacatgacttgacctccacggccgatcttcggcgtcatcg

SEQ ID NO: 69159 - DNA, 974 bp, Zea Mays
tagctactatctaggccttctccgtggcatgtcgttgctgcttagccaacacaagcgtctgttgctgaatgaggtgctgaagtagtgtagtgatagcgggatcagtggactaaggaataggaggaggagttgctgagctagaaccattgtcctttgcaaagtgtaacgtggatgaacaactagaggtggtggtggaatagttaagtcctcattcgtaaaatcatctgatgaatcatctgcagctccaaactggacgagctctcgtttctcaatttggcagatcgcctcatcctcctcacgctctacatccaagtcctctactaaaatctggcagcgtctatgaccaaggactcagccagctagacatgggtcgacttcctgtagaggcttgtaaacttcaaaagaaaggtgtgtagttctcaaggtcttctagaatcgatggggtcgaatcagttgtacaaagatatgacgaaggaattaagcatatggcagctagcgataggctcgtagaccacccaaaaggtgtcttcgatctcacaaaagaggaagtcaaccacatcaaagatctaggaaaccaaggcatcgagcaaccagagctaaatgtgtgtgactgcctccttgtatcctatcctagatgtctgaaaagagtcaagacgttagcgaccagtggtgctatatcaccatgagggcaacgaaaagggtctgcagaaccgtagcacaaactgtgaatcctcatcgacaactctagcgacataagagctctctaatctgagaagcgtgtaaagtgtcatcctctctctcaaaccaaaagcaaagccacatgtggttagggtcaatccaaactattgcaaagaatactctgacccactgctcaacatgtaaaccagcaagacccagcagagtgtcgaggccaggtggtaagtgatatgaccctcgatcttagagccaacagtctgttgtagtgattgaagatc

SEQ ID NO: 69160 - DNA, 424 bp, Zea Mays
ggcgcctaggttgatcttcgaaagcatagcagaagctgaggccaccaggctggaagacgttgatgtacttgaggaagaacggctgaatgcggtaatccaatcagcacggtactagcagactctaaggcgctatcacgacaaagctgtgcggcaacgtttcttttcagtaggagacctcgtcctccgccgaattctaacgggagagggacggcataagttatcacccttatgggaaggacccttcatagtagcagaagtcactcggcccggctcgcatcgcctcactcagatggatggcacagaagttgggaactcctggaacatagagcacctcagaaagttttatccctaagctgtatttcaaaactgctggggcgacaatgtattctgtaaagtggaaatatgtcatcaataaagagagatt

SEQ ID NO: 69161 - DNA, 397 bp, Zea Mays
gggccattcactaaggcgttaaagagctttaggtttttctttgtttccattaaaaagttcacaaagtggatcaagtacaagtcactagtcaaattcaacttataaagacaatcgaggtcctacaagagactacatcgcttcagcatgcctaatcaaatcattgctgacttgggctcaccttttactagcataaagttcaaataccagagtcaatactatgggatcaatatagactatactttagtatctcacgtgtgggctaacgagcaagttgaatgaaccaatgacttgttactccaagtattcaagcctagattgtatgaacaattcaaaaatatgatggaaaacagatgcaagagttacccaaaatagcctatgggctacaaacttaacaaag

SEQ ID NO: 69162 - DNA, 565 bp, Zea Mays
cttccaagagttggaggatggccagtgtgctggacgcagtcttggaatcgacaagggcgtaaacttctgctcttgcgaaggagactgctaaagctactacaattcgtgctgaagtcgaagctgggcctttcgtgcccattgaaacagggcctgctggagcgagacggagtattgaacaagaaccttcggatgtcgctctgctcttggaaaaagaagacacgcccaagtaggttgaatctcctactcccgaagtgtctactgaaaagctagactttatcattcgacatgcttcaggtaaaaaattgtcagaagtggaaattgctgaagctagacactatgcccgggaactaaaatatccgaaaggatccttggtgtataatggcaccgatgaagatgacttcctgtactgtctcccggataataaggaaatatctatttgccgggaaatggcaagaaacataggatttctgaagctcgaagttggcctctctgctatgtcgaaggatgacctcacaaacagcctcgcttacaatagtctgaaggtatagaagttgttgacttatga

SEQ ID NO: 69163 - DNA, 444 bp, Zea Mays
ggacaacagtcgtgctgaccgagggcatttgtcgtctgtgaagaggaatccttgaaatgtactttgatgtgaggtatgctcgatgttgacgccaaagtacctatcatgaaggttgggggacaaactattgactctacagatcggcgatttcctatttgagggcctttgcttgttctttttcctcttggataaggtgttgtatcattgccttgacttcattgctttgtcttttggcttctaggtttcttttgcatctacaggttggaattgtgcatgtcgaggctcctgagcaggagttgttcttccgtgctgatgtctaggtctttactatcttgaagcatgccttcgtccactttagctaggtgggggtctagaagtgtgaatctaggggtacgacaggcatgtttcttgttagatcgggccatattttggcttggtatgggt

SEQ ID NO: 69164 - DNA, 1094 bp, Zea Mays
cttcaggagcaggagatttagatttctcaggaaaattccctttgtccaatattatcggtgtagtttccgaaggtccaacttcgacataagctttcgaaggtccaactttggcaggagcgttggctacgctcgcgacaacaatttaccttgcatccttaatctatgcgctgagagcttcggcagaggcaggagctgatgtctttatggattccaaaacagcgtctaacatgctagccatcctcctttttcttggaatcagtgcgagaacgcttgatggcttcggcaatcctattgtacctggtgggctcaacaactttaactgatctgctgccttctctaatttcagctcttcggccgggtttgtactagcctcgactggcacagcatgacctggttctgtggcagaaggggcaactcttgaacgttcaataagctctggcacatcggctgtctcaatgtgtcgtggtctacatgtcaagaccttgactttcttcaccttcggcgcgctagaagatgccaacgtagcagttttccttttccccttttgtttgcgaacaggaaaacagtagtcagggtagataaatctgataacattgaaaaccctattcagtttctttttccctcgagcgccgaaggcgactgtcatagcttcgtctttagccctcgagtaggctccaagcagctcatcacttgtcgcctctatagcatccaaccaaacatcatttggctcatcaaaccgatccctgaaccgaaatgtgtacttcagataaatgaggccactttggctggagccagcagcagcctccttcggcatttcccatccacttgcaaggggccatactctataagaaatatgctcttggaccaaatccctcataccgatataagtgtatatagtattgaaagccgtctggcacgcttgcacgtcatttccgagtgcggctgaaggtcttctgatgccgaagcgggaccatataggacgttgaatgatgccccttatatcctccctctagtccaggtcattattcacataaaaccactcctgcatctaggagcttggccactttttccgaaaggtaggcacacagagcgag

SEQ ID NO: 69165 - DNA, 445 bp, Zea Mays
acatattgttttcataggattgttagctatcaccaaacattattatataattatgttaatatggtccagagtctgggtgtgtttagactacagcaaggtacactgttacagtattgcagatgcttttcctgtgccgctccatcgtagtgtgtgtcaggcatcaacctgacattatacgctaccggtgaggatgagagtcctatgaagaacgagctcaacacaacaccaatacacacgagaacacttggaacacgaatggttttggtgctgcctgaaagcacaacttttctgaactcctattgcttcttttattctgaatacaaagagcagaaatgcttggcgcttagccacacatcacgctacaaacgtgtccatccccatgtccacgatgccgctaattcactggtcattccagggctgtgtgtgagctaatcttgccacgccc

SEQ ID NO: 69166 - DNA, 359 bp, Zea Mays
tgacagagtgatgcatgagtaatcagcgaaagtcatgatgactgcagtccatgcagcatttataggcagtagccgtatgagtaatggtgagtcattgccctcgatatggtaacgtgtgagtaactgcacggcccacgtattgtggactgggcacgtcgcctattagtggaatggacaggcgtacatcttatccgtaatgaatgcgaaggcacgcgtagtccagaggcgtcatgccaggttccgcccgttggcttatgccgcgcgcagtatgccacatggcagcattgagtctccacttgagcagggagcaggagtgtatgcggataggtccggatcccaccagaccaggtctggacacg

SEQ ID NO: 69167 - DNA, 727 bp, Zea Mays
ggtggccagagagaggggaagtttactggtgcaagttaccgtggcatttactggagcgtcgactcggaggacagacaagctatctaatgcgacctacggcgacgtgatagcaaggcagtagtgtggcgtgctcaggttaacagtgatcatcaccgcgatggtcgcgcggccacgtcgcggcgcaagtggatgaggtgacagagcggccacagtgctctgacttcatcccttgccaaaaatctttcacccagcgaagttatccgagcgccacagggcacgaatcgtagcgccggcgcgaatccgggcgcggggtcaccagcggcgaggtgcactgcacctgagatcttcagccactgtaccatcagaacccccatcagagcgtctgacagagcgatttgcaggaccttgatcttggattttcatgtggcaactacttaatctatctgtaacaaagttgttgtcctataacccagctttgattttgttatagcaatcatacacaaatacttactggatcatactcaaaatagctcccaaaatcagccctagatcacggtcagtcctgattcaatgtcaaagtcgaccgataggctagtttcatacctatttttctcctatttccatgtagcactagggcttaatcacttaatcaaatttgtacctctaacatagctctacaagtttgctgtattgacttagggcaaaatcttcctgaattgtggaatac

SEQ ID NO: 69168 - DNA, 324 bp, Zea Mays
gtgacggaagaaaacagagtacagatgtatagcacgcatccctgtgcctgccgggcttattgcttttttaggtctctcttcgttgccactcgccaaaataccccgatattcttgcgctcgtctaattaccccacttaaacccctttcctagctaaaataccccactgtactaattacttgttataatggacatttatacccttacaccgtttcttaacgtcacgttctcgtttcttcattttttctgccgtgtgacagatgcatcatgctgttgcagctgcgtgcgcttgtgctactgtccagccattcttttgatagaacaat

SEQ ID NO: 69169 - DNA, 562 bp, Zea Mays
ctaattattgtgttctttctatattgcatctaagtgctctattaaaaattttctgtgtttttaatttctagggttacaggtatcaaacaactttattcccacattttttttgttcctatgtttcaccaatcctgcatttcaaaggaagcctaaggttcatttactgttaagtatagggaaaaatgaaattttgagtgggctaaaatagtcatgttctaggcttcctcgtcggatcggtcaagtcctcatcgttccgactttcatctttctcagcctagttttcacatctatctattcgatcccattcattctgaagcagctcgaaccagtatgtcatccttctcctcagcctagttttcacatctatctatttgatcacattcattctgacgcagctcaaaccaatatgccctgatgtctcattctcgacgtcgtccgacaatcgatgccgcccgaccacactccactctcagtgcccccatcttgctcatcatcacgacgtcggtccacccaacaggtctgatctcgcttgtcatgacaatttgactgtctccggcgaatg

SEQ ID NO: 69170 - DNA, 353 bp, Zea Mays
tttacggatatgcagtttcagtttatatcatatatttcctattgaatggcaccttactatttcataattgtcactgcagaacgtgctgatttcaggatcgtgcattttacattatttgtctcaacctgaaggagcaattcatccaagtaaaggcgtgtaacctaaatctcctaatataatctatgcatagttatggcaatttcaattcaagtctgacccactagcaatttttatggtgaatacctaaagatttttcactcaactactttggtcacatataaaattctatgatttataaacatgcaattttagtagatgcaaattatagtaaacatttaagagtgaatgatata

SEQ ID NO: 69171 - DNA, 461 bp, Zea Mays
ccggtgagtcagaagcctcggagatagtctgttgagcggcaggacttcatccgtaaggaggtccggaagctgctagacgctggcttcatcgaagaggtccatcacctagtgtggctagccaacccagtcatcatccccaaggcgaacgggaaacttcggatgtgcatcgactacaccagcctcaataaggcctgtcccaaggacccatatccacttccacgaatatatcaaatcgtggattccacctctgagtgtgaccttctatcttttctagatgcttactctggtttccatcagatccagatgtctagacaggataggaaacatactgcttttgtaacagtggatgggctttactgttatgtcgtaatgccttacagtctgaaaaacgccttgccaacatttgtatgggcgatgagtaagactttcggggacctgattagggacaaagtagaggtata

SEQ ID NO: 69172 - DNA, 289 bp, Zea Mays
gcagacactacgaggtcttcgaccaatcagacgggagctttgaacgcgagatctttaaggccaaagaccctgttgtgaagcagtcagcgggggcactttttgataggatgtggtgggtgcatggccgggaggctgtcagggagcgatccgaccgggcgagagagcatgtgacagttattattttgttgtggtttgttgcgtgggtatgtgtagtttttgctgaatgaatgtgttgttgctgcagatggagcatgccgaggacatcgaggacttcggaggtctggtcagc

SEQ ID NO: 69173 - DNA, 374 bp, Zea Mays
aagaagtaacaaagatgccagggattttaagtccttcaacagaagcaacagcgctgaaggcagaaaagagttctgccacaactcctaagagaaggaggatggtaaatgtattagacattttagaagcaaccgactccataagtcccgctcccacagggagggttgccgaagctgacaagacgcaacccaaagctgatactaagcaaatagaagtcgaggctacaataacccaggctgaaatcgaggcagagcctacagtgcctactgagatgaagcttgccgccaccgagcataaggccgaaggaataactccagatattaatataggttttgagaagagtgcggccaaagaggccaaatcccttgcccctgaa

SEQ ID NO: 69174 - DNA, 1176 bp, Zea Mays
cttttctatagcacatatctacagaaaatacaatttagtttatcaaacatacagcacagggaaatcactgcgtgcagtccaaaacaaaaattaataaatttcagctcctatacaattcaagaattgcagcgttctagacccttgaattattctaacactttgacaattgttagagttaaaatgaccaagtgagaactaacaagtagatttactaatttttatacaagttatttcgcgctctagaactaccatacacaattagtaacgcatctaccacaataatcttacccagcatacatatatatcgatgcgctcttcacatagtaatttgtattttaacttgggcatcacatgaacactactaatttttacccgcgaccgtaaccatgcgtatttaggccataacaagcaaatcatcgtgattacgagcttaaccaacccatctaacacttcggctaactagagcaacgacatagcccgctaaataacatacacgtcggcttgactattattatcactatctaaggcacaacatacaccacaacatttttataaacatacatattcacatgtatattcacacatcgaccaaattatacgaaccgtaaacctctaatctctaactcgaaaccatcatgcgcttatttcccaattcatgaacacataacgcgtattgacccgactcaagatatagaggaagcgattactattttggcatgtcaccacctctctaattaagccaaaacaatttctacttatatcgaccgaacatttgtgtcgagcacaccttatattaccttgtctcgtatacaaccatgttgtagcgtgcactcgagacactaccgattaacttaacgcaattaccactacaatgcacttcgatatacacgttcgacatcactgtgcttcgacagaccccacacttccaatctacttgtcacatccaaacacaccacgtgcccactgcgttctcatgaccaattttagcacaattatttacgacaacatttatcgactagacaatgaaacactaaccgaccattcgcacatctcatcttaaaaacactaatcacatgtcacataatttatatcttcgatccactctatcctacactacgatgaatacataaaatatttttaacatagacgaacatcttagccgactgcgaaaattac

SEQ ID NO: 69175 - DNA, 1326 bp, Zea Mays
ttggtctttaatcaaagctctcagcctaacacattttgagttctcaatgccactcatagcatgtacagacagcatcatctcctcttcagtacttccactgccagtttcaaggaaattcaacacctcatcagatagcatagggccaccatcaccacccttattaaggacaatacaatttaactgtggtgccactgctattttacacttgtgccctggcatatatttctccccacacttatagcacaacccatttactcttctatattctttgagttgtttagccttccataatccccagcagtttcatctagctcctttgttcccataggtatgtttgttctggctgcctgaaactttcttcctccactgttttgtctggtctgccacccttcatgctttaaggctaattgagcagccatagatactgtttgagggaacataacttccacccccatttttatctcttgtttgagtccaagcataaactgagtcaccaagaaaatttcactggtagccttatcatataacttgatatgataaaccaacttctcaaaatgggttttatactccaatacagttcctgtttgtttgagagtgagtaactccaacatcctgtccgaatgagtatttgcttcaaattctcccaacactgcctccttgaactgattccagttcaacaaatgcaaggtgtctcgcgaagcttgaaaccaatgtgctgcccttcccctcaaatgcattgatgcagcacaaacacagaaccccataggaatctgatacaattcgaaataagactcacagttgtccaaccaaactcgcacatcatctccttcaaaataagggaactccagcttgggtaaccacccctttcttccctgataatcattttccaaaccctctctgccctccgagcccgatacgaaatcaccaaataccggaatggaagaaacgggaccttgtggtacctgtgtctgtccaccctgtggttgtccattcttcggtggagggggaggtccaagaggtggtccaatcagcccatcgcccatagaagtcttgccaggctccctcattcctccaactgtgttggacacagtattggccaacctgctttgatcctgggaaacctgagccaatgatttcatcgataaatccatcttggtctgcaggtattgcatcagcttgtcgtgttccatctgcctcttctccatttcagacaacttgacggacaacagactcagcccgtcgatcttcttggacagctcaacaagcgtggtcgtagaggcgtcccaggcctgctgaaacttctcggacatgcgcttctccacttca

SEQ ID NO: 69176 - DNA, 538 bp, Zea Mays
caaccttgtcggcccagccacacgaactggaggaagtgcaagctttccttgggaggatcgcacgcgactcttcgggagacgacagccccccagcatgcttgaaggcatatattgtctttaaggtgacattatattttgcgctcaagattacacagattattgactgaagaaaggtgggagcattttgatcgtgcatgtttcctattaacactgcaccacacctagggccttgtttggttattcgcatcccacatggattggaagggactaaaaaaatttaagaagaattttgacttcttgtgtatttaaacccatctaatccagtccaatccatatggattggcactaaaatgaacaagccctagaggatatccgaaccaatgcaacccaccaaaatgaaatagttgggtatgtgtcattttgcatatacacaatagtggaacccacaatcctccaataacactgatgcaatgttgtctactccactccatcttgctcgagatatatatggctcaagtcattatatcctttaccgaag

SEQ ID NO: 69177 - DNA, 288 bp, Zea Mays
cgtcgctgttgcgtggttcgtcgtcacttgtctccacgggcggttgtcgtgtaaaagctcgtggtgcttgtgcttccggtcaggccgtcccgtgggcgtggggggcctgctgtcgtcttggcggccacaaggtatccaacacaaacagccagccgctgcgacaagacattcttccagtgcgtcccgaaaaggccgccccatgtaaaagattacttgtctagcagtgtgcattgccacgcctgtactactacattggttagttgggatgtcgctgcgaatccttgtaga

SEQ ID NO: 69178 - DNA, 850 bp, Zea Mays
atccgaggacaggtccgaatgcgggttgctgacctgttgctcgtcaggtggcaggtccagatgaggctgctgtacaggtggatcattaacaatccattggtcccaatctccttgaatgttgtctgctggctgagcttggacattgtcttctggcgggaaattaagatcccagcccacagccggcacaggttgacctaaaccaaaaaactcaagagggggctgctgaccatcctccgggaccactggcaccgggtcctcatcttgaggctgaccccccagcaaagtttgttggatgatctcacattgcactgtccacgagtcaccaataaagccatcaacttctgaaaaaacaatgaactgtgggacctcctccagagacgtgacccgaaccctgagcagagtcctgtagacattgcgtctgtcctcttcccataagatcaatctgccaaaagagccaatagccgcctgcaggtattctgatgaacggtaatctagagggaaacccaacaacataagccagcattcccgattaaagaaaagggctctatgattccaagcatcgttatgccgctgagcagtgaaggaagcatcgaggtattgttgtggaccgagcaggacaagattgtctctttcaagcacgctgctaaacttaaccagaacttgacccaggtgcgaccgctggatatcgcgcaccccaagccgtctgtgctccacaagatattctctaaccacatccctcaccgccgggaaagtaatctcatggtcaggtaaaggttgaatgctgataatagcccagtcctcatgcaatggcgggaggcgcctagtaactgacctggccataatttcccgg

SEQ ID NO: 69179 - DNA, 610 bp, Zea Mays
ttgagatcgatcatcgatcaaggttgcatcatcacattcagccctttcccaggatggtctggaccaggaataattagggaaagaaacatgtaatcatatttcatgcacagatgaggtggaaggttgtatggaataacaaatacagtccaacaagaatatgatgttgcgttcgtattgaaaggtgtgaaaccatctgttgccaacccaattcgaatatttctcgcttcactagcaaattctggatcaaagtcatctagagccttccacgcatcactgtcagacgggtgcgtcatcacatgagtgtaccctcgttcacgttatttatgccatctcatgtgcctagctgtgttcctcgaaagaaacaaacgcttaacacgaggcgcaagaggcatataacgaagttgcttttgggctacagttgatgtgaccatttcaccatcatcgtttttaacctctacatatctcgacttgccacactttagacacttactatcattctcatgatccttccagaacagcatacaattatttggacagacatcgattttcggatagtccatacctagactagagagcagtttcctgcactgatacacgtctttcggcatct

SEQ ID NO: 69180 - DNA, 591 bp, Zea Mays
ctatacataaacacaaagagaagatcaattgtgtctaaagtgcttgttagttactatattgctgtgcaaagtttagagggggcgaggaatatatacaaactatattgttactaagctctgtacattaaaggatcatagatggtgttgtaccttcatgcaattcacaacaatctaatggtaatggtattggtgtctatagaatctgatcgaagtttgtgaagttggctagactttatcctacatatgcattgtgcgatcaatatgaattacaacctatagctataaaaaagaagttatttgccttttgttttcaataatcctatataccacatagttcttaggtggtgatgaaaagtcttctttgttaagttgacttgcattttgctcatcgttctatggttaagtggataagaactataaaaccattttgctagtttaaagtagaagtacagttgttctctctctttttccctttcagaacatgtatcaagggataatggactccaatatctgttattgtggtgttaagaagagacaactaagtaactttagcaacatatagtagctaaataacaataccaaacttacctc

SEQ ID NO: 69181 - DNA, 1036 bp, Zea Mays
ctttatttgcggcgtcgcatcaaatatcagttgccaagattccgtatatggtgttgcttgaggagtgacatttgtgttggtcgtcatgttcttgccaacgtcaccatgtttaccctgaaaaaattgtaatggttatatgctatttaaagtaaacgatgaatacaacccttcaatggaaatacaagtaataaaaaaacattaccactggggttgtaggtgttttggtctgtttcgttatgtttgtatgaaccagtggatcaatgtcagcttcattgggacaactttctaatagtacacgaatatgctgttgccttaacagtaattcatgtgcctgtgtgtctgtcaactgcgtatcctgctgggatgctggagtagacatatcaggtacagtttgtggggccagacacgtacacccttcttttcgtatcatttaaacaaaaaaacatcgttttaaataatggcatcataacgacatcggcaaaatctttgaataacttttttatattgacgtaaagaccataaaactgactaacctaccgactagggaagaatatcatctgattttgtagttgtttctgcccatcataaccatcttcattgtcccccgactcagcacggaggacctcatcaattaactcgccaaaaatatcagatagattgtattgtttctcaacaatctgctgaagagtctgtttaataactgaacaagccttaccaacctcggtatcataatgtgacaacttctctatgaaacccaggcgatggcgggatggaagctgattcagcttgcttgatatcaaatccctgataagcgggagttcgatgtgaattgtgtgctgtccagatgggtcaggacgcggtacatcaaaagtgtttgtcctggtcttatgctgttgtaaaatgaaaattattaagtaaatatacagcgtataactgaatattatgttgaaattttatgacaaaaatatataaatagaatcttgccttaaattgtgcttcaacaggtggtacagctgtgtaacaggtctctgtggtg

SEQ ID NO: 69182 - DNA, 614 bp, Zea Mays
atctttggaaaagcacattagggagtatctaaaaacactaacagaaaccaattttgaatatagaaggtttaactgagtagcaaacatgtagtgagatggtgtagaggaggcttaagtgggtttacttctgattttgccggtcaaagtttaagagtctaaccaagagtgtactaatgtatagacattgcatctcggtaccgaaaatgaaatcattagtaaacacattgcaacataggaaaaagtatcactatactaacatattttattatcctaatggacaaatgagtatggaaacacagatcttaaccaaattgattaagtgtgtacccgggtgactaaaaaataaagtgtgcatgcacgaactatcaacctggcaaaagaaaacccatgtcgtagcctacaatgagcaccagaaatttgcatagtcaaaacatgagaggagtctgatcttaacctaattgattaagtgtagaaccaaggtgactaaaaaataaagtgtgcatgcatgaactgtcaaccagacaaaagaaaaccaatactatagcctgcaatgagcaccaaaaatttcatcctcaaaccatgagaggagtttggatgcgcacatacaaattcca

SEQ ID NO: 69183 - DNA, 702 bp, Zea Mays
tctagtctggtactgtgtgaataccaaatccatgttgtgccgctaatgcaccctcttgagctataaggtgcataagcaaaaggagccctcaattggtgacaactggtgctctcatggcaattcaggaaaaggcaaaggtatggagaatggaactatgcaatttcattgaatatcttgaagttccattgattgtgatcatagctatgttcttgtctttcaattagtagtatcttggcttaagtgctccttactttaaaatgttgtttcttttggtgtacctaaggaaccttcttaatcatggtgtacttagacattgctcttatatgcatgatcttgtcgttttcaattggtatatgtggtgcaatgactatcatgtatgaagcatgcctaggttgcttgtaaaatgttatactccttaaggcatgcattgttgtattaagtcaactattcaattggtatctttgtggatagattatgcctagaccaagatatgttgtgatcccctccagttctgagaatgctagaatgtgcaagtacaagtcattcaaatacttgatgcacaagtttagggggagcacacataacttgtgtcttttgagactaattgttgcttgagtgcttttatagtctaaaggtgaaaaagggaagatgagcaagaaatggagcaattaggacttgggtacctccataagtcaagtattt

SEQ ID NO: 69184 - DNA, 712 bp, Zea Mays
ggaggtggtagtggctggaacagtcggccatgctcgacgaagtgtttgaagtctctgcagttccacagggtgtggtgcatgtccatgtgatacggacactgggagtcgaggatctcatccagtgttcgcactcctccgcgaggtgcgccgcaggctcgagcggcaggtggcccggcggtatgcacctcctcgcggggcctttttcccagcgcttgtccggctactggttcataacccgccgcggtgcgggtggcatagattttgtgcctccgatgaggtcttgggcctgctcatccacagtgatgtagatgtccgcctccctaaacaattgttcaaaagtggccggtgccttttgaagtatggctcgaacgaaggccgagtcattggatccttgatagatgtcttcaataacaaccgcctcagcgactttggggatgcggttcctcatcgtttgaaaccttttgaggaacgatcggagagtctcatcattctggcgcctaatggatttgaggtcccatggctgcgccggtttatcgtagagagactagaagttcgcgataaatcggcgactaaagtcaccccagtcgtcgatgccgtgtcgaggtaggtgtcggagccactgcagcgcatcctgccctaggacaatgggcaagtacgccgtcatgacgtcctccgttgccccagcagcccgggcggtggtcgtatagacagc

SEQ ID NO: 69185 - DNA, 389 bp, Zea Mays
gtatttcaaatcattctgcagtggcaatcaattattgatatttaggaagtatcggcagtttttttcgaaggaaaatggcatgagctatgcttttttcaattaagagaggaaggagatttaacatagtttttaaatacacaagtgcagcacttcaaaaacagtacacaatcttttatattgtagttaaccacagattatagatctttaaattgaagtgcaacattaatttcttttcataatcttttatacctcagtagccttggcttggacatgtaagctgcatgcattgtgagcatggtggtctgaaagccctgagatgtttgtgttggtactcataagttgcgttcagtagatggagcatttatgtccaactgaatacaaatcaccta

SEQ ID NO: 69186 - DNA, 341 bp, Zea Mays
ccagccacaaccagcagagatgaatcctcctaatcctccactcggcggagtcgacccactgattgcagctcagatgaggatgatgtagcaaatggcggacactatggcagatatgcgggctcagatgcaacaagaacgccaggagatgcgtcaggaaagagaagaggtacgccaagagttgcgccaggagcgagaagagatacgtcaggagagaagggcgcaacagcaatttcaacaacagcagcaacaacagcaagtatcattgcctccaccaccaccaccagttccacctcgtgataagcaccgagaatttatgagtcataagccaccgaccttcgcca

SEQ ID NO: 69187 - DNA, 349 bp, Zea Mays
gacatctttgacatggtgctacaatggagagcatgggcccaagaacgggagagcaacaaagtagttgggtttagccggtagaattcgaggtttatttaacatctcgtctctcttgcactgtaaaaagagaggggcagagtaacgtctaaggaagttagaataagaaagatttaggtcatggcaagtgaggttatagatacacgtaaacttgccaagcacaataatccacttagtagctagacagacacaaaggtggagtatgataattaagctataacttccaccatgagacataggtgaaaagggaactagaaacttttgatgcttattggtgattgagttgtaatct

SEQ ID NO: 69188 - DNA, 977 bp, Zea Mays
cagacaagctttgtactgaatctggcgcactgttaactgtcttcagaaatatcacgtcgtggataagggtcagcccccccccccccggcgataagaacgccaccgcggcgtgactggtcgtcggtggccacggtaaatatcctcggcgtcgtggcaaaaggttactgaggtggcgagctccggttaaacggcgacccccgtgccatcaccgaaatccaccgcgcggaaagcttgccagcgcatccgaagtccgcgcttcttctccaactccggtcaatggcctataaattgacccctccccgaactccgtagggtagtaagctgtccagccaccacgaatcagccgcagtcgttcattggaatccgcgaatttggaattctccccaaatccactctccgccaccgcaagaaactgctcaccgcggccagccctttctaggtccgttcatccctcactttcctttgtttgagcactcttgtcaccctgtgatgcttaccgagcctccaatttgaactaagagaccaccactcgtcgggaacacgatcaaacgatcatggtcttcgcggttctcgtgggcaggctagaataggtcaccaattgtgcaattaacttgggggaattactcggggtagcttggatttggtgtccgccgctcgggtgcgccggtcatcgcctcaatcggccggtgcagtggctcgccgaagctcctccgtgcgctgccgtcgtcgaggacgtatcaggagaagaaatagaaggggaagggtctttctgtaatctgtcagcggcacacaggaatagtacaggaacttatttccagttacccagaaccccagggacctttccgcaagatcgccagcgcgggcgcgcgcgcgggcgctttctccctctgagctgggccactgggctgaaatcagcccagtactattcatctgttttctttttctttttactctagagccaaaacaattttagaaaa

SEQ ID NO: 69189 - DNA, 531 bp, Zea Mays
ggttgctcgtctctcgatcgacgctgaatagctagctacacatgcgatgcaaccgtgttgacgttttccagtctgtccgccacactggtagtactgaatagtaaaaggagaagaaggaaagaaagaaagaaaaagtcatcgcttgactcggtcgattcagatgagagagctgcatgcacatgtgtagctagctgccgtctgaatcctgaaagatggatttcccttcttgaattcggtagcttcgtatgatgtgggctggagttgcattgcacatgtgtagcttattcagatgtaaacgccgcattttcaagctggctagccccgccgagagatccgacatgcgtgcacgattaagcttcgtcgtgacattaattaagcttttaatctaggttacaaacgtgttgttaggtacaacttgcaggtgtcagttaccgtcggcggcttttatgttccatggagcaaaccccaagcggtacatgcgtgcgtgcttgccctaattatcagcgttaggttaatcccggctactattaa

SEQ ID NO: 69190 - DNA, 1031 bp, Zea Mays
cgacggtgatcaaacgggccgaataaagctcagcagcggttcgttaggcccagcggttcgaagagtggaaggcattacacagaaaccgtacggtgccagaatttgactgggcctcgttttgctcccggcccataagcattcagaactaagttctttttaaaaaaaatcccttcaactttctcatctcaaaataatagcatactgaatccccccccccccaaggatgtcccccactaccacatcataagcacagtaaggaatattccaaagaatggaacagtaaactgaagtttgccaccgccgcccccccatgttcaggttaggtagacacgcaatcgatcgataatttggcatgccttaaccacagtgtgacgtttggaattttgccgggctcagcttgaaccgctgctggtaccctgctcgagcaagcaaataaaagcccccctctctctctcatactctttttttgtcaggttgatggaagtgagaaaaccttagctttcaaggcatcgtcggcacttcagttgaggacgaaaccttcggtttactcgtttcacgtgtgatccagctaagcactagagtgaagtcgtagaaacattggccctttcgttcgttctcttgggagagttccagtggcgatgaagctcttcagttttcacagctcctgcactgcatacctgctacgttttgaacatttctgatgaagcattcttttctcccccctttgtttaagatagactgcttatcacaaaactaatcgtccaaaccaaacatatggccccatattcgttccaatcacctagattccagaaacacctggccgaaacgggcaacgaacaatccgagcgcatcctctgtcggttgttcccatcgtcgtcagtcaggtataggtatgtataaacatgtgtcggtttagcttttcaattttttcatcagagagagagagacagagagtgttatagttaaggccgaggccggggtcggccggcacgcattacactttggttgcatggcgcgagtccgtgtgcatg

SEQ ID NO: 69191 - DNA, 321 bp, Zea Mays
gacgtgtttccacaagaaacaccggctggactacctccaattcgtgggattgagcgtcaaattgatctcattccaggggctgcacttcctaaccgtccaccatatcgaaccaatcctgaagaaactaagaagatacgaaggcaagtgcaagaacttcttgataaaggttttgttcgtgaaactttaagcccttgtgctattcctgtgatttaagtacctaaaaagatggatcttggaggatgtgtgttgattggagagctataaataatattaccgttcactatcgccatcctattccatggctagatggtatgattgata

SEQ ID NO: 69192 - DNA, 348 bp, Zea Mays
gcgagtgcaggagacgaggtagcgacagatgacggtgacgataagcgacaaccattgtcgtgttgcgacggcgcgcagagaccctaatgagttagcgagggaccagtgacaccacgatcccaccaatagcctgcccatctgctgatgcggactaggaggcaaaatatcaatgttgtgtgcaggatcccgacgagtcgacgagctgatgggtgatgagaaggcaaggtgcgctgcagtgggtgggttaggtcaccgacttactggtcagtcgatgaccgaataagcgagtgagccacgagtgggcttgcgctagggaagataatcaaatagctcagacgaagagtggac

SEQ ID NO: 69193 - DNA, 475 bp, Zea Mays
ctcggttctgcagggcaaaaaagaaagaaagaaaaaaggttgatttgctcggagggaagacgcaatctttggcctccgctggtggtggcctgctggacaaataaatcttcaggacctcgagaaagattggtgagtgaggcttccgtgtcgtgtgaactgtgatttacgcgaacattggtcgggtcccagcacatgaacttcagtggaactgtatggtgatttctagagaacagttcagttgcaaaagataaaagggaataaatggccatcacagaggaacgaggggtctggaaagaatatcggtggtgtcaatgttaacacaagaactctactgcatgctactgggacacgataagacgtcggtattctcactgtttgctattgtggcacttgactcagctccagcaaaaatgtgcccatgttgcctacaactctagctccagcaatgaacagttcttgtatatgttcccaaaat

SEQ ID NO: 69194 - DNA, 619 bp, Zea Mays
ctcagatcgctttgagagcgcaccggctattggatttacctgcttttctgctcatagccggtgccgatttagaggttcatctctcttatctgccaggattgctttcactactaactgcgagtgggagatatatcgaggagtgggtcagagtgttttatgctacagtgtggattgaccctgatcatcagtggatgtgattccgcttcgggagaaaggatgtcactttgcatgctagccagattcgcagctctttggatttccagagtcatcgactcggctccatagtttgtgctacggcaccttggatcctcctcgtcgccctcatggtggagttgcaccagccacaactcacgccgtggccctattcagacctcctttcatagatgggtcacgacgctctccaactgacttcaccactgcaacgaagtacttatatgagctgatgagatggacacagctacctaggatgggatatagagaggctactactcatattcagttatggctacttggtgccttgatctcacattcagagtttgatgtggttgacttccttatttgtgagatcgaggatacagtattggatggtctccgtgcttgccgtcagctgccctatgcg

SEQ ID NO: 69195 - DNA, 519 bp, Zea Mays
cgcccgtccctttcgagttcgtcacatgccgtcgttaccaaacacgcagcggaacagaacccagcccagacttgtccttgcacggacgccacatgcagaaacataccgccggcgccgcctgcctgcctatctgcatccagtatggcatgggacgccccacattcactctcacccttggttttcacgaccaagacatgatgtgtgtatactgtgctgtgcccgtgcaactctctccaacggagccggcgcttgttccagccagacactgagcaccaccaagatctactcggttcggtttcaatgagatccagccatggccggttgcatggcgaggagggaagccggcgacctggctggctggctggccggcggcgattggtgaggcgtccttgtacgtcggtcgattagatgggggtgctagctagcaagaattaatcaatcgccctttctactttgctggaggagggatggggaggggtcaaaatgggtttagggccgtcacgggaagcctgggggggt

SEQ ID NO: 69196 - DNA, 708 bp, Zea Mays
gtacaaacggatgcagtggaaaaagagcgagagaaggataggagaagaaagaaaagcaatcgagagtttagccaagacaacactctggacttaagagaggcattaaatctcaacgtttgaagcttcaactatcgctgaagcaacgttgccaagaagtaaaagagggggacttattcttgaagataaaatcattcaactgcttccatatgcaccaaaccacctgggataagatatccatgaagaagttgtaaccataggcgtcaagatcatgattccactgaatacccacataattccaacatcttgtactaaatggaaaatcaaacagtaggtcataagttgtctcttcacaattcaaatcacaaaaatgcagtcaaagttattgcctgatgctagaaagccagagacaatctcgtctgacatgatcaatggcatttatgaccatcaccaacagcttcaaggtgcacattgcaaagatgggcattgtagaaaaagtagagttgactagagtaagccatcctaccattgataaccaggtactagtggcattgtgccttctttcgactttggtaatgagaggaagatagtccttgatttttggtctcgtgaggcccatcggcaagcccagataagtgaagggaaaggtgccaatttgacatccaaacatagctgccagctgggtagttttagtggcatcaaagttgatcg

SEQ ID NO: 69197 - DNA, 683 bp, Zea Mays
caacaccgtgctaccgcttgttgtgctaccttttgtcgcgctaccgctcgttcatcttgccagttaccgtgcgctcttggtccaacaagaggcggccaatggcagatctaggaatatactataggggggatgatttcttattgactagtgacagaggcagcaaaagctggtagggggctcatttttctctccttttcttcctccaccttctcctctaccctctctctttctccaatggagtgggggcttatttttctcttttcttcttcttccaccccctctcctttattatccacctccatatccagtggagtttcatggatgtagggggctggagccccctaacgcccttcagatccacctgtagagatggtggcgacagatgattctctctagtatgttagccctttgtatgtatagaccttactaatgagattttaccctaaaggtgcattagcattctcatggatcatgattggctcttgtgcatatattcaacaatctcacgcttatactagagtcaatcatctactcattattccaatctctgaagtatgtgacccattaagtatatgtatagatagtcatggtcgcaaatcatttgtgagccattagtcaatagtgtgtctagcaacacatattgaatcacaagtacacatagaaactatatcatttgaaccttg

SEQ ID NO: 69198 - DNA, 540 bp, Zea Mays
cttggactaaagggctctggaggctccacctgaccccagtggacctatacccatagcaggctctcgagtaagccacacgtctacctgaccatgtcgcgtacccggtcaaaggggtggcagagtcaaaagacgtgcagagtatacccagtggaacaggtgtagctatagatgccaaatacctgactcctcgttatcaggacccattactacatggttccaaaacgccatagtggaattttggttagcactcacatagccaaccacgtatggacgaccttgtaccgagcatgtcacttctccatacctcatggcaatgacataggatctgggacacgtgtcacagtattgaaggacacatgtagcatcatggaagacgtacttctacactatcacttctccaagatttctccatacaaactccatgggccagatcattctatgggagcaggaggagttatggcttggttacacctaactattattgtaccctctctttccctcgatctattaaagggaaagggaggcccagataagggacac

SEQ ID NO: 69199 - DNA, 543 bp, Zea Mays
atgccgcgcagcccaagttgctgtcgcgccgcctatctgaatacacttgaaattagtggccagtgagtagtcgcgaagcctagcagagatcctcatattgtgccttagccaccagaaccggggaggcgctctcaatcgctgcaaattggtcgtcgaagtgcctccgtcgccgtgatccgaaccctttcgtgggcagggaactacgcgccataatcgccattaagcccgtgaccatcatgttcgcgactccctattcttcgcgtacgacatgcattagggggaaattagatccggggtaaccgattgcgtgaactctggcgagacgtgcgcgccgtaggattggaattgctcggtcggatttaaaaactaggcattctccctgggcgatttgatccgaaccgtagggagttgatcgggcggttcggggtgaatcaagcctcataaactcgagaccgttgatcccggatccaacaaacgcgattgcataccggttcgttttagtactgatttgatcttggcgctcgggttataatcggatggccg

SEQ ID NO: 69200 - DNA, 426 bp, Zea Mays
cgccgataatatttgttaaacattgtagacaattcacttttcacacaagtatagtaaagtgagtagtcagtaccagatagcccagataataatctcaagatattgctgaaatcccttagtttggctctaggatctaatataaaagcaaatgcatatagcataggaatattcctctaatatttaagaaacttagacttcatggagtgaagtttaaaatatagagtgagatagagagcctgctggtggtggtggagatagtctaagacgagtagaaccgtagaaacgctcctcgtgagggtcgaggtgtgaagctgcgggtacattaacacaggccctagagtaaacaataacacaaattattgttgcggaagaagcccaacccaagcgcaagcgaagcgatagcgacggcgacggcgtctaggctgc

SEQ ID NO: 69201 - DNA, 349 bp, Zea Mays
gaaatttagcataaatcctatatctgttttataacagcaaacagagcccaaaattacggcgtgaaaatcgtgtgcagccgatcgtgcgcgggttctggctcgggcggattccagcataaaacgtgagctaaaacagtgtaaatgagtacgaaatttagcgtaaatcctatatctgttttgtaacagcaaacggggcccaaaattatgccgtgaaaatcgcgtgcaaccgatcgtgcgcgggttctggctcgggcggattccaggttaaaacgtgatctaaaacagcgtaaatgagtacgaaatttatcgtaaatcctatatctgttttgtaacagcaaacgaggcccaa

SEQ ID NO: 69202 - DNA, 286 bp, Zea Mays
actaaacccgtgtatctttatttgcatcacctattgttttattgaagttcattttgttcccccactttgttttatggaattaaccgtaaccgtcttcggaagatgcacgcaaggaatctgtccatagccgacggcccagcccaggtagcgtcaaacacgaattgcgtgataaagaaagatcacgtgttcacaccagatacagggtgtacatgatccggccataccagtacaccaccagatagagtgagctgtgaagccacactctagtgatggattgtaatcgaac

SEQ ID NO: 69203 - DNA, 789 bp, Zea Mays
gccggttccgcctcggcagcggaagatgtctcctcaccaaattttggcactatggccgtttcaatatatctgggcctgtgggtcaaaactttgattttcttacccttcggcacagcagaaatggctgaagcggcaggtttcctcttttttcctggctatcgcaggggatagcaataatcaggatatataaaaccgatcgcatcgaaaactctgtttaatcttttcttgctccgacctccgaagactgaggacaaagcatcatcttcggccctggtatatgccccaagcaactcgtcgctagtagcctcaatgcatttcaaccaatcgtcattcggttcgtcaaaattttctctgtatctgaaggtatatttcaatcgaactaatccaccttcgctggacctagcaacagtctccttcggcatctcccagctatccacaagcgaccacactctataggctatgtgcttttggattatgtctcttgtgccaatgaaagcacagacattactgaaagccttttgacatgcttcagcatcattttcaatcgccaccctcagccttcgaaggccaaagcgataccagatgagacgttggataatctccttaatgtcctccctctcaatcagatcattcttgacataaaaccattcctccattcaggccccaggccatcttttccaaaatgttggaaccgggtagcttgcattgggacgagcaataaatccataacaaccgaagttgttgtgatactgttctttgccagtagccttcgtctcgtataatagttcg

SEQ ID NO: 69204 - DNA, 305 bp, Zea Mays
gccgaggcttatcctagagcgctgcgaaggctgttttcgttgcgtcagttaggcacgctggataactatgttcatgaatttgagcaggatcggtatggagtggcagtgcataatgctcaatatgatgaaacattctttgttacccactttgttcgtggcctcaagtttgaactgcaggatgtggtgctagttcaggttcccactacggtggatcgtgctatattgctagcacagattcaacagaaggtgttggatagaggacgaggtaaaggacaacatcagttgccatatctgaaacagcaaca

SEQ ID NO: 69205 - DNA, 425 bp, Zea Mays
tccctacctgggtaatttcttcttctgcttatggtacaaactaatggttattcatgagttcatcacaatgtggaacacaagggctgacatgttaattctccaaatctaggatctctgttactggttgaacgcaattcaaattgtgtgtgtagagggtgtggggaagggcattctttctattgtaccttttaaagttgaacaaagaaattagctcgttgatgactttctcttactaagattgtttagctctgttcttcctagccatgtgcccctgttatcccggattttctcttgtttatcatagagttgattctaagttttagaaagtatgtatcccatctagatagtgtttcctgtagaaaatttcccatgcaccgattttacttttcacttttcagtcttctggtttataacatgtgaaaata

SEQ ID NO: 69206 - DNA, 825 bp, Zea Mays
ctttgtctttctttttatgaagtttcccaaaactacattgtattttgattcaatggcttctagccattcatcgtctggctcaccaaactgatgcctaatcctgtatgtatacttcaaatatactaagccccccttttcagccccatgccttgatggactatcctcctttggttccgacatctcccagttagcctgaagcggccaaacattgaaggctaaatgctcttgcacaaactctctggtacctatgtagttgcacaccacgttaaaagccacaagggcagcttgagcttcgtcattcatgacacatgtcgacctctttatgccaaagtgtggttttacaggtctttggatgatatccttgatatcctccctcttctcaagaccattctttaaatagaaccattcccttgtccaagcattcaaccatttgctttggtagtccatagtggggtatctagcatcattccagtatgcgaaagtgttgtagtcaaagttgtgttgttgctccttcctagttgcttttgtttgataacaaagctcgtggatttgacaaaagtagttagcgtttggctctatgccttagctcttcactgcccagatgaagatacccaacctcactaaggcattcagggtcaactgattaatgtatatgtcaattttttagaacctctaccagcatcttatgaagcagaaattggagtcttgcctttaagaaactttgaaacactaccacttcatctttcttaggaaggggataatgttttctcctccaagcctcacaatcaaagtatcactaatacaattggtattcttcagtacctc

SEQ ID NO: 69207 - DNA, 297 bp, Zea Mays
attttggagaaaagaaaatggaggacatacttggtagtcatttcttttggcccaagatgagaagagatgtggcgagattggttgctcgttgcacgacatgtcaaaaggcgaagtcacggttaaatccacacgtttgtatttgcctctacccgttcctagtgctccttgggaagatatttctatggattttgtgctgggattgcctaggactaggaagggacgtgatagtgtgtttgtggttgttgatagattttctaagatggcacatttcataccatgtcataaaactgaaagatg

SEQ ID NO: 69208 - DNA, 543 bp, Zea Mays
aagaaaaggaaaaaagttcaacagcgacgggccaaaattaacgggctcgacccaccaactcagggaaaacagcccccgctcggcggcgctgatgaccaatcatgggagaaaaactggtgttcttggctaccaatggtggaacgggggaaataaagggtggcttgggtgcgtaacggagagacaagactgagagcatgctcaatttaaagggagtcaccacgacagtggtcaatttgactgctgaatcatggtggcagcgataacccgaggaactccacgttagctcttacggtgtcctcagaccagtaatgtggcggacttagcacgacccctttatgccagtgcaacacagaggcctccaaccagctacgtggatggccggagcgtccggtggcttgctacggcggcggtgaatgaaacacggtgagcacacgtggtgtccgtggctagagcggtaactcagtcaacaaatccgagccagagatccttttaccccttcgttgatccacgtctcggcggcaccaatcgtggcgcgagctcgaa

SEQ ID NO: 69209 - DNA, 504 bp, Zea Mays
agaacaccccttagtatgtaaacatgcaacctctacactggatgggtgttcaagtttaagtctttaccactataaagcatcggtttctaccatttccactgtcatcatatgtcacgtgtgaagcacattttcatttcttctcatcctcacatgcaccttccacctcctctattgctcgatgagcatgacatatgggtcccacagccatgtctttcgcatgagtgtcctctacttcgatccgctctacgagtactggatccatggttaatacacttctatctctgtgatctacgctgctagattccagttgctagttttgttgttctagggttaaaatgttgttgtgtcaccgcttcctccatgcgatcgtgctccccgatgttgttgcctcatgggtagcagcaagaagccacaccctttgccaaagagaaccatgctttgttgcctcccttgagcaccatcgtgcatcgatggaccgtctagaaactttttgagaaatcgacg

SEQ ID NO: 69210 - DNA, 291 bp, Zea Mays
cagcttctatacaattcaagaattgccgcgttctagagacttgaattattctaacactttaccatttgttagagttaaaataatcaaatgaggactaacaagtagacttactaatttttatccatgtcattccgtgcactagaattaccacacgtttaacaaatgcattcaccataaccatgcacatttataccataacaagcaattcaccgtgattacgagcttaaccaagtcatctaacaagttggctaaccagagtaacaatctaggccgctatacaacatactcgtc

SEQ ID NO: 69211 - DNA, 511 bp, Zea Mays
aaaaagtgctcgctccgcatgttcgtggggccatgccatgattttgaggagtcgtgggtgataagatgaagcttggctaaggcgggtgtaaggattgctggtaataacccacatcttgttctgcatgccctatgtcggacggtctggagatatactcggatggtccgcacgtatgaccggatgatccgagcttgtctgttagcccttgcatagagtacggtggccctagcgtggatctcgatcgctcgtcatgaagttaggagcaagctgttgtagggtaggacggttcgagctcaggtccgaacggtctggtcgtgcgtaggttagtcctagatcagttgagagggttgtggttgtgtcacaaatgtattcatcggcatatcgtataaaggttgggtttgtatacacccatttacatctaatgcttttgctaaggttgactcaatcgtgaccttgtgtgatggagaattagacatggtagatttgttttatcgttcatgtgagtttctta

SEQ ID NO: 69212 - DNA, 586 bp, Zea Mays
gtcttgggggcaacgactgaatatggcagtggtggccaagtatggaacggaatttccgctttgtgatttcccagagtattgatgcttcatgatatcttgaacgacgtgaagggccacacagttaaacacattcatcatactcttagagtggtgatgcagcgaatgagctaccatatagttgacttcctagcgtagatcagtccaagccgtgttcggctcctcggtaggtatcagccataaagagtcgattgcttcctaggatctagtcaggcccatgtatcagggacacgtgaggccgataccactccaaaacttggccccgttcgcgtcaagcggatccgagccaccatggttacaaccttcaccacataatcggaacatcatgcgcgtaatcaggcctaacaaacctggcgagcgatagaacgccaatcgggccagaggcctaaggaccagcgagagtcgatccccggaacaatccctgccccggctgacgtaatgtgtccggcatgttactagaacattcgacgcgtgtgtagggcctaactatgcagatgttaggtagatcctcggtgcacgaggactaacc

SEQ ID NO: 69213 - DNA, 576 bp, Zea Mays
tctcagttgttgggcagcaaataatggcttatgtggctccgtgcaacggaccaatccgaacttctgctccattactcttatccattcatcagcttctagaagatcttctgctttaataaagagagcgggacgtgtctaagagaattccagatatgaggtttcacgcggtccttgtggaggagctctcccaccatgctgttggaactgattaccctccatctcacgcaagaagcgggtattatctgcagtagcattgaccaaggcagcgatagcctcagccagtgtcggtggtacaggcggcgggttgggagtatcttcccatccacgggaagtccccacaccgtcatgcgcgcgagtccgtgatggcatatgaggcaaagagacatttggaacaaatatgacattccagcacataccatcatattacattaccaaaatgtaattatacagactccaacgtacaacttgacttcagtacttattttacataagtatttcatctaaactatactattctagtcttcgtcatcctttgctgctccatttcctgccacagcagaccgttcaccaaattgc

SEQ ID NO: 69214 - DNA, 498 bp, Zea Mays
aaagtcattagttttcttggtgggaatgtcggatataatcaaatctttatggctgaagaggatgcttccaaaacggcctttatatgtccaggctttattggtttgttcgagtgggtcatcatggcatttgggttaaataatgctggtgccacttatcaaagggctatgaatttgatcttccatgagtagttaggaaacattgtgaaattatacatagatgatatagtagtcaaatcgactgcatttgattctcatctagccgatttgagcaaagcctttggtaagatgcgtaggtatgggctaaaaatgaacctccataaatgtgcctttagagtgttgattgggaaattcttaggattcatcattcatgagcatgacatagaggttgatccaaccgaataaaggctattcggaacataggagcacccactagtaagcttgaaatacaaaagtttcttgtcaaagtaaattatttatggagattcatttctaatcttg

SEQ ID NO: 69215 - DNA, 405 bp, Zea Mays
catgttttcaggaatcatggtgcactctatctgaccaatcatgcaagcataccaactgctagccaaatcattccttgctagatctcatcacggtgtgcgccttctgcttgcgaaacaaacaaaaaagtatatcacacatcagatttctctgcaagtccgtcggtggatctgtagccaccgccacaagtccactaccatgaacactaggaccgagaaatgactcaactcaagaaccctagctaacaaaagagagagaccaactggatagaagcttgacagtgtagtggaggttgccggcggcggagaggatgtcgtcatcgcgatccccgctcatcaacaccttgtcttctcgcttgcgctgcccccgtacgtcttctcatcgctcgcatgggattcgttcctggc

SEQ ID NO: 69216 - DNA, 739 bp, Zea Mays
cggagccgagaagttgcgcactagggctccttgggtctgtttgggtggtgatcgttgccacgccgctcggaattgctcgtctgcaccccgggaattgttcaccgtcgcgaccgttccgccgtggaccgcaatccctccgtggcctgagcactacaccgcgaacacgccggtaagaatccccttcttgtgctcgctaggttctcctacttgtgtacgcgtctcgaattgggttatggggcaccgggggcaagctgtgggtgttctggcgggcgctccaccgtgtggtttatgcgtcgctgtgcgcgggcagtaggattggggaagacgaccacggaccgttggatcaggcgcgtgtggatcagattagatcgggataccggttcgaccatgtccacccatgaccgtcgattggcgatccgatggtggggatcggatctggactacattaaacctaggccgttgatctattgttgaacgactctgattagataggagataccctttcgctcgattgaatcgcatccatcgatgttcaatcgggcgatccaagatgttttggccaccataagatctgagccatctagattaaatcctggggctcctgcgcgataccggttcattatagcacccgatctgatctggaccgtcggttttggatctgatggccagggttagacgataccccttcgcgatggcaattacactaaagagcccctcggtttatttaaaaacaacccgc

SEQ ID NO: 69217 - DNA, 1028 bp, Zea Mays
ctgattaccccagagtgctacccattaacaatcactcatcatcaacccgaaccacaagggacaagtcaaccttgtgtctgcaatctcccccttgatgagtgcattgtcaacaccaccatatgaacatatgtaagcagaaataggaagaaaaagagaaactcactcaaacgactaaaagacagataaaagccaaacaagtcatttaaagtaagcaaagcttggtccctaaagaaatgggcaatgactcaacaccactaagcaagaaaaggctagccctcaataagaggcaaaagcatggctcaacaccactagccagaagccaaaagctcatcggagcaacaaaaggattaatcggagcataaaaaccaattcagagcataaaatcaacacaaaagctaaaatcaaagctagttcctccagaaagaggcaaacggctcaccacaactagcaaaagctccaaaaggctcaattttcctcccccatgtcacaatactccaaaaaatctcccccagagaccaatagctccaaataacacatctctcctcttgatagagcaaccgggaaatctcaaaatctctcccccttgttgacaagtgaactcatcaagcataaacaaggatagaaagaaaaacttcccctcgacaagagaacttcccctgagaaaatgcagaaatgcaacagagagtaggaaatggagaaaatgcaggagcttcaggagtttacagtcaaagtgtaaaaatgttctaagtggtgttgtgctaagtgtgaagcaataaatgcacgtgctagcagatgctcaaattgatcatatgcacaagatatgtgaagtgtaagcattttgattcagttttaagcatttcaaaaaggtgttcaccacaaagacaacactaagcatatagtaagcaggaaatcaactaagtgtcagtcacaggtaaacaaggtgaactaccccaaacaacagtcactcatcatgctagaaacatacctaaaataaataccatatgaatatgagcaaaaggagcctaagc

SEQ ID NO: 69218 - DNA, 686 bp, Zea Mays
cgtacctacagccatccctaactctgtgatctagggcggttatggagcccttcctagggaccaaccttcgaacccctgattagtaatgggctcaaagccctagcttcctgaggtggtttttccgaaccctgccgagggcctatccttcgaacctttgaacagtattcctccttgcttttttccttcctgaggtgagttgcccgaggtagaagacgccttctttcggttaactactgaggaaataaaggaaagagggatagagtgaagagggcgtaccttttgaggcggaatgtgaaatgacgctcggcgcgtttttctcggagggggcacgaccattcaatgcgacgggatgtcctgtcagtcagccaatcgtttgcgacgtgcgtgtgcgagagattcgaaacgactgtcgtccgactattacgatttgcaccttggtggcttcgcccgtccctataaattcgcccgagatggacgcttcggaccgttacctttgttgctttagccttcttgctttacatgccatcttcgccttctgctcaaaagagctcttcgtctcctcgccgtcttcttcctccatcgtgatggccgagaagataagcgtccttcctcctcgtgacccatggcccatctccttcgtcaccaaagaggatttggaggcactggtcgatgctggtctgctccac

SEQ ID NO: 69219 - DNA, 851 bp, Zea Mays
gtcgcaccgccttaagtcattgccgacttaagccgattgctccgtttgtagggtatagtggtcaccctcggttaagtaagcgtgagcatgtcacaccgccttaagtcactgccgacttaagccgattgctccgtttgtagggtataatggtcactctgagtcgagtaagcatgcagattgacaataaacggttcgagtgcctttgagaatgaagtctttttattgatggtgtatttcccaattacagaatacaatgccatcccaatagcttttgaaatctagctaggggtaaaacttcttgagatgttctatattccatgagttccctattttcatgccatccatttgagtaagacgaaatgatccaggccgagtgacttatgctactatgaatggtccttcccatagtggcgataatttgtgccgcccctcccccgctagaattcggcggaggacaagatctcccactgcaaaggaccgatgccgtatggccttatcatgatagcgccttagagtttgctaatacctggctgactgaatcactgtattcaatcgttcttcttctagtatatcaacgtcctccagtctagtagcctcagcttcagctatgttttcaaagatcaatcttggtgccccaaacttgagatcagtaggtagcactgcctctgaaccataaaccataaagaagggagtgtttccatgcaaagctcggctgggttgagttcttaggctccagaccacatacggcaactctctgatccactttcctgcgaacttttcattcttgtcgaagactttctttctgagtgcttccaatatcattctgttggctctttctacctgcccttggc

SEQ ID NO: 69220 - DNA, 548 bp, Zea Mays
acattttcccccttaaaaagatgccgccacgcacaaggctaacgacacgcaagtctacgggaccaattggagtgcctcggcatcaactggctccccgacatgaaagcagcagcagtggaagtaatgaccccatcgaagatcttgaagcccgagtgagtcgacttcaagcagcgctgcaacacaggaccgatgcttgggtcgctgacggagatagaatcaatgaactaagaagggacatccgtcacctgcaggatcagcttgctgatcgagacttagcacttgactgggccatacagtctcgtttgctagcatgtgctaaggaagcaagggctcaggcccgaattaaagaacttagctcaacagtcgataacctgcaggtttactgcaatacgttgcatgaggaagtccatatactatactcacaactacaccctagtgtgcctgcacaccctgctgaggcggaagccggaccctctcacgttgcaggacgcgcgctgggtggggagttagacctttttgagccccctccttctttgaggttggttgat

SEQ ID NO: 69221 - DNA, 383 bp, Zea Mays
ggaagaatgaagagccggccatgatgccgaaggctgataatattgaagaaatagaggccgaaaaaacaaagatattagaagctacaagcccttcgacagaaataacagtgccgaaggcacaaaaatatttcacggcgactcccaagagaaaaaggatggtcaatgttctagatgtgctagagacaataaagtcttctagcactacaccgaagaagactgccgaagtatcgaaaacacaaattaaggcaaaaacatcaggagatgaagctataaagggccagaccatggccgaagctgggccttcggagcccgccaaagagaaatccttggaaatcggagaagaaatgaaaaaagaagctacaaagcaaattctgcctgagaaa

SEQ ID NO: 69222 - DNA, 819 bp, Zea Mays
tgggtgatgtgatgattgccgcagcgcctgcgcctgcgtggcaccatgctccatcacagtggattgtctagaccatttctgcatgtctctgttgtggctccgtaggccctgtccagtctacgatgaaatcagctaggacctatgatttgattgctatcgtgggctcgaaagtgatgttgtaccctgagagttccgccgcccactttgctattctggcaaatgcctccggatttctgagtaactctccaagacccctgttggaagtgactcgtactttatatgcctcgaaatagtgtcttagcatacgtgaagccatgatgactgtgtatgctattttctcaagctcagtcatgttgcactttgagcttgtgaggactttggagacaaagtatattgggcattggtgaaccttgtcgtccctttgccttttcttggactaataacgtgctgactacgctgggcgagggtgcaatgtaaagtaggagggggagcgtcgggtctagacttgttaatgttgccaggtcagatagataatgttttagagactcgaatgaagctgcttgttctgggccccagacaaagtctttcccgccgcataatgttttaagaaaagggaggcttcactcggtggaccttgagataaatttgttccgtgctgccagcctgcctcttaaccgttggatgtccttggtggattgcggcggtgccatatacatgatggcttggattttatttggattggtttcgattcctctgtttgacacgaggtaaccgaggatttttccttgtcgtaccccgaagatgcacttctctaggttt

SEQ ID NO: 69223 - DNA, 408 bp, Zea Mays
caaaaaggggtggggtggggtgagggtgaggatcctatctagtttacatgtttttaaagacaacacaccagtttccaacatgattcctcagcctgcaactccattggcgcgcttcgtccctacaacttcgaagcaagggttgggtgaatagagtcacaacccagaagacgatgtcatgttagtttttctgaagcatccaacaataaaggtggataaagatgctcctttgttggctcatgatagatgaggggggtctcctaggatcgagacattgagagactgttggagatttggatcccgatgttttgccaaaatatagaagcaatttggcaatggaggataatgtgatcgccatcttcttcttcctggtgacaaaggtcgcataggacattagagatcaattttttc

SEQ ID NO: 69224 - DNA, 793 bp, Zea Mays
ggaggttctgtcacagatatgatgctatatgggtgattgtggatagattgactaaagtagctcacttcattcctgtcaagaccacttataaaggttctcaactagtagagttgtatatggctcagattgtgtgtttacacggagtaccaaagaagatcgtgtctgatcgaggttcacagtttacctcaagattctggagaagctttcatgagaatatgaacaccaagttgaactttagtacaacctatcacccttagactgatggatagaccgaaaggactagccaagtattggaagatatgttgagggcttgtgcacttcagcatggtggaagttgggatgaaagtcaaccttatgctgagttctcatataataatagttatcaggccagtctgaagatgtcaccttttgaagctttatatggcaggaaatgcaggactcctctatactgggatcagactggagaaagatagttctttgggcctgaactgattcaagaggcagaagaacaagtctgtataattcgagagaatttgagggtcgctcaaaccaggcagaagagctatgctgataatagaaggagaccactggaatttgaggaaggagaccatgtgtatctcaaggtgtcaccacttcgtggaatgaaaagattcaaggttaagggcaaattgtcccctcgcttcattggaccattcagaatctttaggcgagttagggagatggcataccaactcgagctacctgataatctatctgatgtgcataatgtgtttcacgtgtctcaacttaagaa

SEQ ID NO: 69225 - DNA, 723 bp, Zea Mays
gggaaattaaaacctggtcgtgttccagccaaccatgatacttcttacgtgagtttgctacctcgatgctatgtatgattttctttgcgtttaatatcaattataactatgataactaatttttagtcgttttgtaccgaaaatatagattggtcaagtcgtttagtaaaacaacatatcacacatacttgcaaattattttcacatcataatgaaatatatatccatatgccaattagcaagtcaatttttagaatagttcatagccatcggttcagacctttatgtgaaaggatgttggctctatgtgtgcttatacgaaagaatgttgtctcttccctttcctataggagggtgaaataagttttactagcagcgttgtacctgaggtgccagtagcctcagtgtgcccgtcgctcctcaagatggcctcactggcagcaaaatgttctctgatgagttgactcgtgtgcttgactgggattgtactttatctcttctgccagctaagctctggtgaattcctccggcatcaacgttagcacgatggttcgcccaaccgagcatgtccccgatccacaaaactatatagttgggaacctcacaggtagattcatagttaacagtttgcttaaacaaactgacgtggttgtttgatctatgcaaaagtggcattggttggttttaatagtgaaatgtcatcttaaccatttaactagctat

SEQ ID NO: 69226 - DNA, 1182 bp, Zea Mays
gcgcaatagtcttctcgagccgagaggatgcctttgaacgcccgagtctcgctgagtacccatcgtatcaaaccttctaagtcaaaatctgaaacttttctgtctttggacaaagctccggcagtagagaaggtcttcaacatctctctgtggtatttgttgcctagagtgtgacagttggccactaagattcgataattttcattcaagctccttacatggtttatttcagccttcatgtcatccatctttacttgagcactgctaaggttgacagccacttcagcagacaattgcctcagcttcatcatttcaaattcatactcctttttcatctgctccatctcagctttgagcaatgcgatgcacgtcttctgttcagcatttgaagtttcgagcctctagatttcggtccggctctcaataaagtccttttctagtatcttgaaagatttctccttttctgcacaatcaaaccaaagcccagatacttcagatttaagctttaaaatttctttctaggcaactttgtattcaagttttctcctgtttttcaaggctttgcttaggaacaagccctgcaaagatacaaaggatgagatttttcatcaaaagcaacccgaagctcaaaagcgatggtttacaaaattaccttgagatgagtgtaagctagacaattagaaaagtcttcattaggcatagttgacagcattgcttctagctttgggaagccaacatgatcggccatatagcagcacacatatgtttccatgttgtctgggcagtggtacaaataatcatcttgcccaccccaaaaattgtggaccatgaagggtaccccaattgtttggtgaagccaacagtttcggccaactgctttgctgccatcactttccccgcggcgtggtgaaccctatacctttggcccccccaacacttggtcgaagtgcccgtcaccgagttgtgcgtcatctcgatggcttttctggcttcctcaacattagcaggccctttccctttctcctccgccaaggcaggcttggaggaacccttgtcctcggccactttagctaccaaaggggtcaccactgcagcagtctgtccaagttctcccccatctggaccagtctttccttcagcaggtggtgtcggggccttaggcaacagtcctgtgctgacaat

SEQ ID NO: 69227 - DNA, 495 bp, Zea Mays
gcaacgtattgcagtagacctgcaggttatcaacagttgagctaagttctttaattcgggcctgagcccttgcttccttagcacacattagcaaatgagactgtacggcccagtcaagtgctaagtctcgatcagcaagctgatcctgcagatgtcggatgtcccttcttagttcattgatcctatctccgtcggcgacccaagcatcggtcctgtgttgaagtgctgcttgaagtcgactcactcgggcttcaaggtctccgatggggtcattacttccactgctgctgctttcatgtcagggagccagttgatgccgaggcaccccaattggtcccgtagacttgcgtgccgttagccttgtgcgtggcggcatccttctaagggggaaaatgttattagtatgattcttagcatgatgcatgtataattacagaatcaaccttagtcgattcaaccttctatacattgcactcttcctatctggtctttaag

SEQ ID NO: 69228 - DNA, 852 bp, Zea Mays
ggggaacgaagggagagcgagcggacgaacaagctcagtggaatatgacgtgaagcgctagtttgaatggtgaaacagagggtaaatgcagttttcagcttgagctccaataaacaaaaatagagctggcactatacaacttttatataatatgctcggccatttgctaaatggtttaggaaataattgtctgtcaacttgctattgtcagtgtcctaattgcagccattaaatgatgtcaaaaccttgtcaaatggtcttagcttacctcaaacttttacacaatatttcttaaaaatttcttaacaacttttagttttggatcttctcaagttatataacaaaaattggagaacacaggatgtctttagggtcggctatagaatttgacttaagagtttttactggttttgtactgtttcttgacttgtgagctatgtttgattatgctacacctaatttcatggatcaactcatcaagaaagtttgttcctcataaaattctcttccacttttgttttggcctaccatcatatgaaatatttgtgatcaaccttttgtttggtcaaggaaaaatactctagaacacagcctagtcaaccatgactttgaaacacaatcaagacaaacattccatatgaactttgtcacaattgatctcctaagtcatctaggcatgtttggtgactagcacacccctttttcccaacatcacatgttatgcactataataaaacaagcatcagaagcaaataaatttagaacttctaactagtttcatcaagcaatacatgtgacaataatgatcaaaacagagatgatgctcatgctcatgattatgtaatgttttat

SEQ ID NO: 69229 - DNA, 746 bp, Zea Mays
cgcacttctaattcttctccacaaacgtccctggccatggtgcgctcagcgctgatcaccgacaccgcacgaactggccctggccggcgacggatgctcagacgagcgacaggggaagcataacctacccagggtgacccaggaacgtgcgttaatttagcttaaacacttgaagaatggtctgctcacgtgcatggcggacaccgtgtccacgagcttgcgttcccacacaaccatggtcgaattgagctaacggttgccagtacaagcttcaccagtacgcagagttactaaaacaacacttggattgaacgaaatcttaccagagcgggctggcctcggacgcgctgttcttggcggcgcggctgaccgatttggggaaaaacaacgtcgtggtgtgctcgggtgaaattgaggatggagcttcggcctatacgaccgcaagggactctagttttatcctgcacaatcaatttgggaagaaggggcagaggcaacgtgaatttggacttcttctgagcttcactggtggagatgaaaacacctcgtcgtggctccttgctcaatttataggcacggcggcccaacagatgacccccgaccacggatagcagcgcaagcgcatgcctaccacgtcggaaagagttacagtgagggagatggaggcatgggcgacaccgcggcaaaattcacaggtcacggtggccgccggtgaagactccggctgggctagggcggtggcgcca

SEQ ID NO: 69230 - DNA, 572 bp, Zea Mays
tgaatctgaaaaacctaggtaataggtgattctaaattgaactagaggaatatatagatttttaggaatcaattctactgttgtgctcgtttggttgggattccagaactttggcatcaaatctagcttagaaagctcaaccaaacacacccttagtaccccctccgcgatccgaaaaggttattcactctagatattgtcatggctaatagtgatactcgaaccaggggtggacctacacatacatgagtgaggcctcatgcccttctcatttctttgttgcaagtagtagagactagatttttaccataatatctcatgttcagcccaacttagatgcttccactctatcatttttatgttcatccttacaagtatgccttcactcacattttattctgggtctgccaacgcgcccccttacttagacctcatttccccccttttgttgtggaaaaatactgaagctaatggggtctcccgcgcggtgtatctgcatcaacgggccatgtactgtacataggggtgataatggatcgcgatccaaatgttcattcacaatttgttaggac

SEQ ID NO: 69231 - DNA, 685 bp, Zea Mays
gccaaacaaaaagataacttactttttaggggcatttatgattataaccctcactagtcttgaaattgtgattttatcccttgttttttcaactttatacttttacccttcgttttaaaaacgaagcgccgtcataccattgcagttaactgtgttaaatctgacgcgaaaagacaaaaacgtctatgtaatttattgtgattttacccctggttatactatgtactagtcagatgcacatatattgctacgatatcatacaagtagaatttgtttaataaaacacaaaaattatgtattctgttagttagttggattcttgcaagacaatcaacaacatgcctcctgaggctccaatcgagggatgataatagaatttgtcgaattgtttagggcagaagtttctgacataagattcatcaaagcgttcatgttttgtttcttgcaagcatacaatatcacatcttgatgctaatattttgttttggagagaataccatttttcgggtccattgatgccccatggtgttatgagacagaatcttccgccggtctctgtattgattaacgattgtattatccatgtaaatatgacacccacaatatgttattgacttgcacataatgcaagtcggagaaaatccatgttccatccataatggtgaatataaatagattcacaata

SEQ ID NO: 69232 - DNA, 1221 bp, Zea Mays
ataaatcatgccttattgaattatatgtttttttggcatggacaaagcaatcaatataaataaatatataatttatacttgcattgtcatgctgggatttctgtttgatgcatcaaatatatgcttgaaattcagaatcaaacttaggattgaaatgagaaaggaaattggaatgaagacacttattactggaattaaataaaggggaggaggaaaaatactagcatcgaaaatagtggcgtttatattcataaattggatcatatttgatactgggaacctgaacttcaaaataggaaatttgaatttgaattgaatattataaacttgaactagagaagagaatataaatagaaaaaaagaaaaagaataaatccctgcgtttgggctgagttccctgattcggtccactagcttcatccgacccaacttcatttcacatgcgtggcccacctcattctaccctcacctcacttgttgggctggaacgtgtttccccatcggcccaacacgctcgcccctcgctcgtccatgcccgtgaggccaccgtgggctggcacgccgggcccacgtgtcagtctctgttctccgtcttccccgcgcggaccccataacagtccgcgctcctcgccgcgcacgccgtcaccagtacgtggtccccatggccgagatctcctcccagctcccaaacgtggggactccaacaaactccgccgatctccctggtgttcggttggctatggcagctaatccgctcctcctgtgcatataagcttgggtctggcgcacctccattgatcgcagcggaagcgcagagaaaaattgagatcgcagccgcgatagatggggggaaacaagatgccgtggtcgtttctccgctttcgctggtgttctacgccaccaacctctgttcatgggcttccttgccagtgcaagccggacggatgccgcggcaatggggttgggcgttcggccaccgtcgtgccctccatgttctaccagggtgtttgcagggacctgggagtcttgcacaagggagtaattaactgcaagaagctccatcgatactccaattgttcagcgacgttcgtcaccgcggcgggtccatcttgcaccatggaccggctccaccaggacacctatgccagtaagttccgtacccccgtaatcgttaggacccaagcatccttttgcaccatccgtttgagagttcgaagcctt

SEQ ID NO: 69233 - DNA, 830 bp, Zea Mays
ctgatgtggaacttgctgacatgctgaaagcgctagagccattgtattatcgccttggcagatatccttgacggtgacgctcttcctaaaaggggttaggaagttttagaactttcatgaacttggggtgtgagactcgcaatcattatgaatgcaattgtcgtctgttttttgtttgtgtgatccctttttctttgcgatagacaagctttagggagcgcaatcaacgtcttctgacctaggtactgcctggtgagaggtgccttacctttcaaggtgtagacatatcggcagtccaactagcttcgttgggggtcatttgctggtgtgggccgctctctccctttagtgcttattacagacaaagaacaagggagacatgtgtttgtgtctttcccctctaatcccgtgagatgatggttcctaagtttcattgtttctagggctcccttcgccatggaggagtacgagggaggtaatgacacgtatcgcccttgattcgaggggaagagataaagtttcataaacaataagggtaataagtataaaattgtagataacaaagctattcgatgtcccttgttgatgaggacatagtgtcgttcactcttaggaccctcgagtgcctagagtgaattctgactatcatcgcaactagccattcaatgcttgatgagaaggatgacaaaaacacacaaggcccctacctggtataccaactgtcaatgtttcgaggaagcactgataagtaaatttacttatacacgtttaaggctcggatggtgtgctaggtggacgcaagggttatactggttcgagctgaatgtccc

SEQ ID NO: 69234 - DNA, 703 bp, Zea Mays
agagaggaccctaggtcctcgcttctagcaggtgaggtccagggttcattaggtgattggctcgaaagagtgccaacacacctttttggtgactccgctacggacaagggtgtctaggtccattaaaatcggccctcaaatggctggttccaaggatcgcaccaaagtctccacaagcaacatcatgaggccggattttgaggatttgttggttgatgagcagtgataatttgaagatcacataaaaagatgtgggggaggcaaaggataagttcctatctcactttacagtggctcagcaccagaaggtaatgaggcaaggagaaatccaacttgactccctctggcctccaccccatgatggcaatgtaagtaattcaagttgtcggtaccccataactagggtatcctctcctactgtgttaaggcagatacccgtgccattacctctaaccgtgtattgaggaatagaccattcgggcccatgggtccagacccgtttaacaggaccactggcctcgggacccgctccccgctcgaggacacgttcgatgttgcctcatgtcctaggggtcaaaatgctcagggctactaccatgagtctggaccccagcctgtggtgctcggacctccccgtctaacattagaacccctagtaggtggggcctaagacttctcgccagcatgcgctcttggttctgct

SEQ ID NO: 69235 - DNA, 326 bp, Zea Mays
aaactaaaatttaataacacctatttagggccatggaaccatgaataacttcagtaattagttgctggtgttgccacaactgtatggaagaaaaccaataacagttgaggtaatgtctacagttgttagtaagttctttattaacatgaaccaaatatgctttatgtcaggtggcactggattcaggaattgccaaatgtgtagctttttctagtttgtttcatacttttgcagactatgttcagtaactaaattgtagagttttataccttagtaaccaaatttcagagtctacatagtcctcaagtgctcacttattagagagt

SEQ ID NO: 69236 - DNA, 289 bp, Zea Mays
attttacataaaatttacttacgattgaacattatcaaattgcatacttgaaataaagttattaataatgcattgaaatagtacacttcactgatcaaacataggcaacactgctgtgagctagagtatgcattttcactggttttttacctttcccttgtttattttcctacaacctgatatgaggtctcatcatgcatccctgattcattaaatgtattgctgcagaaaatagttgcattaacagtttttggctgttctgttactctgttaattctgttgttagttt

SEQ ID NO: 69237 - DNA, 486 bp, Zea Mays
gaagaaagcaaccgagcaagaacaagtgaggagagcaactagagcaggcgggctatttaaaggagccgggagacgaccgttcgcttcgtacccgttcaccaaacggtcaaaagaattcaatagaggctcaagcctccaagaaatgagtcaggcatctgtcaacatttcacataacacggcaccggatggaatcaaggtcaatcgctcagacgcagcgttacacctccccatcgcatcaggttactattttaggactacacgatggacgtctttcgttgggcaaacacccattgggtgcacccatttggtgtaccacccagactctccgacattttctgaagcggtgagacctacaacatatacacaatgaatatacaacaacaagagagaagattggctaaaatgggaggaagtccagattctaccaagaacaagtccaatctgcagaggcattgaagtccacagtcgagtggtgtccagctaggc

SEQ ID NO: 69238 - DNA, 452 bp, Zea Mays
agagaagtggccgagcacaaattaaaggtctatcctcaagcaaggccgattcgacagaaactgcgttgtttcacgcctgacaagagagaagctattcgcaccgagttagctcacttagtggctacagggttcatagagaagtgttgcatcctgattggctagcaaatcctgttcttgtactaaaaaagaataaagtggattggcgcatgtgcgtcgactatactgatctcaacaaacactgtccgaaggatcccttcgggctccctagaatagatcaggtggttgattcgaccactggatgttctatgttgtccttccaagactgctattctggataccatcagatcagcttggcaaaagaagatgaggagaaaactgcattcatcaccccgtttggagttttctgctatacctccatgtcgttcggcctcaagaacacgggagcgacctac

SEQ ID NO: 69239 - DNA, 343 bp, Zea Mays
ataaattatgatacaatgtggtcagattctaggtttagttactgtttttgtgcaacctgtgtgacatctgtttactgacaactggacaaataggacatatcgcaatcggataaataacttggcactcttggtcaaaaatttgattttccaatatttagaatcgtgtatttttcattgagctaaataggtcccctcattgtattatgtttgaaaacctgttgtattatgtttgaaaacctgaaatgattatctacgttgtcctaaaaacatggttctgcaatcttcgcctaggattggattggatggttgccaacatgttctgcaactgcgcttttggatgtgc

SEQ ID NO: 69240 - DNA, 304 bp, Zea Mays
tgaggaggatgatgaggtgcaaaatgataatgacttagtaatccttgaaggcaatgacattaatgacgaggttgcgtcttccgatggtgttgagattgaaatggttgatagtgatgatgagagttatgatccagttaaccccgacacatatgaagattattttaatcgatgtaatgctatatgactttttatttcgcgtctgtttttaaatacatctttttatatgtgcttatttgtttactcttaattgcaggtttttggacaaatatggtcagcggtaattggctgagtaggaggaggaggg

SEQ ID NO: 69241 - DNA, 364 bp, Zea Mays
tgtacaatttatattcaatattatatacacctgagcatgatgtactactggttagacaacttcgtccaattgatttggaagaaatataggttcaaacccacccttcttccatcatggtttgggttcaaatcccactttttgcaccaatttttatcattttacactgagttgatttagaagaaatgtaaggacttttttgtaaaaagatgacgcagtaccacgctttaattatagtagagatattaattagctgcactttgatttggtctatatacgataagaccatagcagcttgttgatagtagtactagctgacgacgacgtgttccattccatagttccagtccgtgcagtaaaaaaaaca

SEQ ID NO: 69242 - DNA, 367 bp, Zea Mays
ttttgatgtagagagtgataatgaagatgccaaagatcggccatggaggccaagtcatgttgtttttggaaagtccactgttagacaagtacagattgaagcaatgaagggaaaatatttccatgacacatccattgtgagggttggaggagagaataccgttccccttcctgaagcaaacgaagtagtggtttccaagagttttatgaaggaggggctttgtttttcgttgcacaagatgctagttgaagtattgaagacatttaagatataccttcaccagcttactcccgaagctttagttaaagtgggggttttcatttgggccatgatgagccaagggctggagccagatgtcaagtgtttc

SEQ ID NO: 69243 - DNA, 641 bp, Zea Mays
ttccctttcatcatgacagtggagatggacccgaccacccttttcttctagcttttagggactccaagatccaactttgggtagcctccgagagcgcatcatgtgagaaggaaggaatactgtgactggtggtgaggggagatccgtagttacgaagatagaaccactatctgtgccaacccttgttggacgagaacatgtgaagagggatgtaccttttgagcgcattcctcacaggtgaatggtcacgcaccctatttgcactacttccattggtgtacccggtgtaagttgcccacaaagcagtttggtcatgaagaagtggaaccggagatgaaaatggggaacaatcccctagtacccctcacatagcgccacaaaggctgtcgtgtgttgaatcccattcggattgagatagttgagttggatcttgtcatattgcaaaagcctaaccaagaaaggatgcaacagcatcgcgaagcctcgctcatgaaaatggatgaatgacaccacaaaacccaatagtggcacgaggatgacatcctgcctaggaacctcaaagtccacctcgtgaagaagttcccaggcaacaagggcatctaggcgatttcactcaaccctagaacggttccagaacgcca

SEQ ID NO: 69244 - DNA, 564 bp, Zea Mays
ctggaattgacctggatgttgttggttgtacgacgaagttggtgctgatgtggttggttgaggtaggacccatatgggcggagagtggcttgccgaagcaactgaagctgaaggctactagattggctattggttgtggacatactatgggatgtatggagaataatacgaagtagtatggaggacctacttcgattgattctgtcttgcctaagctttggcaaattccttctgcttttgaattgtgacttggtaggttcctgttgtatgcccttatcttctccacagaataagcaaaatactcttctcggcagagagttgtatctccctccaaagattcttccttcccttccacctcttggagctggaagtatgaaggaacactgctgagtccctattgattgggagtgattttgttgcccttgggtatggctgtctttgtcttcactttggcttggattgtgaattgtcctgacatgccttggattgaatctttcgctgaagccccttgtcatcttggagtatctgaaggcttcttatctctttgtcgaaaatcattgtcac

SEQ ID NO: 69245 - DNA, 376 bp, Zea Mays
cgcaaagaggaagagagagccacggggaggcaccggagtgatctccagctcaccgtcggcgaggatcttttaccgtgtgtccttatctgcccatcctgagcacaagtcgggccggcaacggcacgaatcacggcggaatcggtcgtcggtggtgggtttactggcgatcttatttgtttcagttgtacactgtaccatggtgaacaccattcagagcacctgacagccagagttgagggtcgattttctccaaatttcacttagcaacttacccaagtctctgcatcaaagttgtagtgctacaatccatctataactttgctacaatgtgctcccacaaaaagtcactggatcatacttaaaattatgccccaag

SEQ ID NO: 69246 - DNA, 619 bp, Zea Mays
tgctacagcggatgttctttcccgtcagcctcaagtgtctgctacatgtgcctcattgtctcattgcacacctacatggctgcactcagttgtggagggttatgctcagtacagccccactaaggaattgttggccaaattaagtttacattcgggagtttttggaccattttctctgaccagtggcgtgattcgctataaagggcgtatctggcttgatggcaatttggagttacaacagcaagtgctgcaagcgatgcatgactctgcaatgggggtcattccgggattccagtgacatatcggcgattgaaacagttgtttgcccggcccggaatgaagtcggccattcacaactatgtttggtcttgctccacttgtcaacaagccaaaccggaccgtgctaaatatccgggtctccttcagccgttaccagttcctcctcaagcctggcacacagtttcactagattttgttgaaggccttcctcgatttggacatgcaaattgtattttggtggtcattgataaattctccaagtacggtcattttctacctttgttacatcctttcacggctgcaaaggttgctaaggtattcttggatcacatctacaaac

SEQ ID NO: 69247 - DNA, 418 bp, Zea Mays
cacaaaacggggaattgatttctatgatgcggctggctacatcaagcactacttggtgcagggtcatccaattagctcccaaaataatgtccacattttccaaacccaacacaagaagggtggttttgacaatgtggcttcccagttgaataggcacactttggtttaattgattagttgcaattttaccaccaagtgtggctatcataaatgacccttttgagtgagagaatggcaattgacatttagcactgaacttttggctaatgaactatgagatgcaccagaatcaaacagaattaaagcaggttgattataaaccaaaaagataccggtcatgatgggagctccctcaggtacttcctccagagtagtgaagttgagcttcccttgcctgacttgtaccttctgctttctt

SEQ ID NO: 69248 - DNA, 289 bp, Zea Mays
aaacaagtttgtcaataaaaactttcgacagcacctcccccgcaccagggggtttccaaaacctacaaataaaaatgacagcacgatggctgacatccacacatatacatcaaatgacacgatggccgacaatcacatctaattggcatccatatccaccatcacattatatagaaactattttactaaacacacattatctaacaccattcactaaacacataatatctaaaatcaacattataatagaattaacatcacttaacacacattatctaacatcatccac

SEQ ID NO: 69249 - DNA, 525 bp, Zea Mays
taaatccattcaatctccttccatctatatgaattaagattaaaatgaacatgtaaagagtgctaataaccttcccacgggaccttgcagaatactagcaataccgattaccgtaggagtcgatgaatctaaaagtaaccaaaatgtgaaagcatataagcgggtccacggtccaaaactccgaatcaacgagccgaagaacagcagagcagtcgtagaaaaaggatgtgtggaagcggaaagggcactgcatggaagccagcctgcgctgcttgtgccccggaatctgattcccaaaaagcacatagatcgagcccacacgggaatgaatcactcgagtgaagcgtccataaaagatcaggctcacaagttacaagtagtcaagtacggctgcaagcaaagcgaagcacaccaaagcgagcatcaagcagcgcctcgcacgctaatcccttcctttcctctgctggccgcccttaacagcactcggtcctcgctctccctgcggcggcctttttcacactctgc

SEQ ID NO: 69250 - DNA, 385 bp, Zea Mays
gcgtcatcaattttaaaataccatgtaagcttttgtggtcctctttcgactcctcttcacgttggcactccatagttgtgtcaaaccttagccagaactcaacgaacgataattttgataaatgaaacgattgaaaaaagaattttcactctctgagtgcgatgtagtcctaatgatgcctgagagaggtatgtccatcaagtatgatgggatccacaattaacgaatgagaaacctagtggagaaccattcattacccatgagctgaaatttagtgacaaaacaataccattgtgtatcaaattcctctatagtttcaaagccccatacacatgattttagtgtgtcccaaaactcttgatcctcccttagagatggactggcc

SEQ ID NO: 69251 - DNA, 467 bp, Zea Mays
ggctactaacggccaggtgttacaccttgtgttatatattcctgtacaagatacaataaatcccccagcaagtccaaattagcatatttgtttattgaatactattagactaagatgactagaccgattacgtagacgaaaaacactcttacactgtagactttgtttacatgactttgatatagaaggtggtgagagaaaaattattgatagcagattgtatatatggctgttcaaaatattgttttgcaatgtttacatggtagagtttgaaattaggctatctcgagcagactacctatcacactccctattttaaactccactatataaatagtgtcatctacaatataaaacagtgctttgtacgcccatttacacggtctaatggagttggccatagagatgagaatcagtaagccgcttcatatatagacttaggccgtctccagcaacctccctatctc

SEQ ID NO: 69252 - DNA, 796 bp, Zea Mays
taaaacttaaaccgatatggcaaccgaacgagctcaaatttttcccttctttcttcttcggcaccccccacccaacagatattggaaaggttttgttagccaggtattcttgcaccaaatctcaagtactaatgtgctttgacatgactctgaattccaattcggctaactgacagggggagccaagttgcatgttgcacaatggtcgtgtcatgtcgaagctcaatctcatgggactcatcaccagtcataagcttctccattttcttttcatcagctttcacataaaaccattcacttgtccagccagtcggccacttggtacgatatccaatcacaagagccttagtatccttttggtatgcaaaattgtaacacccgaagttagtatgcagtccatcagccctagccttagtttggtaatggagtttgtgtactctgcaaaatccttcgccattagcagtttttccttgacttcgtaaaacccatatgtacacgctgagtctgactataacatttggggttagttgatgaaggtagatttcaaacttctttaaaacttcaccgatcatttcatatagagggaaccgaagtcctactctgaagaagctcttaaaacaacgattttgtcatttcttggttcaagaaccacttcttccccagtgaaccgtatcagttcgtcattattttttccaaaatatcctaatttcttcattaaaaccaaatcttccgccttaactatggattttacaaacttaatgtggctaggcttgcttggactcaaaatgctgtcatc

SEQ ID NO: 69253 - DNA, 628 bp, Zea Mays
cgaggagaacgtcaacgaagaagccaacagtgttcagcaggactacttcatggggttaggtcctgtcaccgaacattatacatcaatgttcgagacagggcacttccccaacctactgtaggatgttctgcatgagttgggaacctacgtcttacccttgtacgagacaaggcgagtgtgcgagcctcctcgggtttgcttctacatcactcgcattcatgtcagggtgatatatgcaggggatagagggtttaggactttattagctcatgagtccctgacaccgctatccacctacactgctttggtcagcgatgctgctaggcggactctgtggtctctcagccacacctatcggcagctgctgcatgacacgaagtacaggcatcttcctctgcatcttagtggagggagctagaccagcattgttccaagtggagctggagaagatcgcctcaacaccctagctggtgtagtggcaggtcttaacaccgacctggatagtgctaccctggacctctctagggtacacttagagctggaagatgcacatgcaaggatcgcagccctggaagctcagcttgatggaaggaatccccctgaagttcaagtccccactatggcgtta

SEQ ID NO: 69254 - DNA, 542 bp, Zea Mays
tgtgttctcagaaaccgaaggaaccgacccggttggtaggggatgatctgcgtgggtgtatgctaatggttggttggtatatatgaggcgtaaccatgagaggatcttgacacacgcgagagcgggtggattgattggccgctgctggtaatggcaggcaacctgagtttactgggggccttgtctgcgctcatctgttcttcttcattcaatgaaaaggctgaaagcgtcccaaaagggatcaactgcatttacccttttccaccagccgcgtggaggtggaggtagagggacagcattttttcttcttcctattcttccttttcagcttcagcatgatgcatggaggagcaggaaggcaggatcacgcaacaaaggcaaaggctgggctggattgcctccgtcactctccgacaatccgttccatccatatcaatttctatcacatcatctcttcacctctccatggacatgtgcacatacatagtacttcctttttcaaatctaactaatataacaatataagaaatcccggtttaaat

SEQ ID NO: 69255 - DNA, 845 bp, Zea Mays
gactaaaaacaagaatgacttaatgtttcctaaaataacttaacatttaccggaatatgtaaatcagaaggggaaatgacttacagacgcatgggcccatgaagccgatatgtgtcatggagggagccgcacgggggaagaagccacgcgggtccatggagccgacgcgtggtgtggtaggagccgtgcgtggggaggttggttgcctcggtcgatcgatcggttggtgctggtctgttggattggtcaagaaccctagatatatatacacacgcacataacgaagttggcacatgtcagatgctatggtcgagcaagccaagcagcaagcatggaaggcgctaagacgaagtctagcaggacctgaaacacgttgcagattcggtgttttcgtgatgtgcgacactatagagtcatccagcggatatcggacgcggatgcgaaatagaggagactatggtaacatccacattctctctcctcctctagaccaatggccacatttgcgaaaataaaggacaatgtggttggaatacgatacctggaagagtactcggatccacgttcgcatgtgggttcgtttatcaaaacgatggtatttccgcattcgtggtccgatagttgctggactcagcctaacgtacctttagtgaagatggcctcgagcacgtggtggtgggtttgcttgacagccttagggctgaggcaaagaggacgccggcagcacgagagctgacgggatggtagcgaatctggctatgaggagaatctgggtatcgtagagattacgtacagaataagataagagtccataaggtttaggatatagaaagtgacgattttct

SEQ ID NO: 69256 - DNA, 432 bp, Zea Mays
gttacctcggattgaagatctatttgattagatgagaggagctacaatattctcaaagatagatctaagatcaggctatcatcagttgaagattcgaaccgaagatatgcctaaaacagctttcactacaagatatggactatatgagtttttggtcatgtcttttggactgactaatgcaccaacttactttatgaacttgatgaataaagtattcatggaacaccctcgaccagtttgtggtggtattcatcgatgacatactagtatactctcagaatgaagaagcacatgaagatcatctgagataagttctacagaaaattagcgacaatcagttgtatgcgaaattttcgaagtgtgatttttggctgaaggaagttgctttcctaggtcatattatcaccaatggaggaataaaggtagtccccg

SEQ ID NO: 69257 - DNA, 641 bp, Zea Mays
tttgtaggccactactcccttcgtttcaataatctggtaaggtcctacatatcttggagaaagcttcttctttgccccaaatcattgcatggctttcattggtgataccttaagatacacaaaatatccgacttcaaacgcaagtggtcttcgccttttgtcagtgtagctcttatggcgatattgtgttgtttccatattctggcgaataactcgaactttctcttcagcttctgcaattaagtcattcccatagaaccttcattctctggatttgacccaattgagtggtgtttgtaacaccccaagtattacttaggttttctcctcagtacccacattatgacctattatcacatgtgttttaagttggagcaaaaggcaccaatcttgaggagctaaaacttaatcaagtctttttcaccctaagaaccataccctgaccatatgaaacttaaggaagaaaggaaatgccaaaaccctaacaaccctttctttagagcaatggagcactgaaaagaaattcaataaaagaccaagaaaatcacattgtcatgacttgggccaattataaaagtggtaatacaacaaataacctaaaaaagatagtaagaatgttggctcaaaaatattttacaaaa

SEQ ID NO: 69258 - DNA, 752 bp, Zea Mays
agctttgacaattgtttttctttattttcctaaatgtttttgacaattttatcgaaaccaaacaggtcgtcggcgagtttggctggcctcagaatggtgtcaacaagctcttgtaaaaaatttagattttttggacacccgagcgaaaagttatgcccggtttaaggaaggtacctcaagttatgtttttgtaggcacgactagaaagcggcggttagggcaaaaattccctatctgcaatcacaacggttagggcaagtcaattaatggggtggatcgacttgtgatctgggtaatggtggatgggatagcggcgtatctgcaatctatctagggctggcgcggcggcggctagtgagggtagttgatctacgacgaagatacaccctaaaccagcaacacgactcgaccacgaacacgaactgaacaaagccaaactgaaaacgaaattgcaaaggctaaacaagggttctaggacaacagattttttgtatggcaattatctggagttataggatgaaaaacctaaactaaactagggtaagcctgacggtaatacctgagtctttgaataccacttgataggaacgggggtgcccgatctttcgtcaggtgaaggtaactatcgatttggtggtgatgtcacacagacgatccgacttctaatcaacacaactagaaccccgcaatcgcagcaccacttctcctctggttatcaatcgtgcactgcgtgattgacctcgccatgaggg

SEQ ID NO: 69259 - DNA, 394 bp, Zea Mays
cgagaggatgggatagcaagtacactcaaagactcaaaggtgataatagaacggaggggtgccacaaagtgcaaagtgggagtgggagcgctaatcgcctttatgggaatgcaattgagtaggtaggtgacagtgtgcagggccttagcctagaagcgagcgggaaccgaggcctggaacatcaaggagcacatgatatcattggtggtccaaatcatgcgctcagccttatcattcatggaaaaagtgtaggggcaagacatgtgaagctaaacaccgcgagtgagaaaaggagtgggaggaagagttattaaactcgcgctcgttgtcacactgaacagactaaatagtgtgaccgaactgagtggacacccaagcaaagaagtgagagaga

SEQ ID NO: 69260 - DNA, 539 bp, Zea Mays
agcgattgaaacttcagctgggtctactgaactagcaacaggtcgctgcttatttgcagggaatgaccctatagaaggtgccatttttttatgtatcattggatggagaagacctagctacatttccgtgggatcgtcctccaccaaaataagcattagattgctatttgcgccatgggacatcattataatgaattgcataagactttccacgtgactcctgctaaattttcccctctatacgcattgcttgatcaactagatcttgcaaggtacgatatgggaacatctcaacaaatctagaaatctcttcattgagtccacctagaaatcttgccatggttgactcggaatcttctctgatccccgtacacactaatagcaactccatctccttaaaatattcatcaactggtatcttcccttgatttaacaattgcaatcggtttcgaagatcatgctaatagctggaaggaacaaattgtctcttcatcactcgcttcatctcttcccatgtattaatatgtcttagtcccaat

SEQ ID NO: 69261 - DNA, 583 bp, Zea Mays
ctttaaaaaacgatgttaaactgttctctttttggttgatcatatagcatcgagttgtgttatgctagtgtgtttgagttcctgttagctgtctttgtgaccgtgtttgatttgcttctttgtaatgattgttggtgtattgtgtgacttctgtccacattgacatcagttactaggtaaaaccttaggtagttgggttctctctattctttatagtatgtcctagctcaatctttctgtcccttccttccttcctatatccatacagatgtcagaccttggaatgtcaactacaagtgatgtcactaagtgcaaagaatacattgtgttggcaactcctccagcaaaatctcagatggaacagttcaagaaggtgcatgcacagtttctgcaagcaacatctcaagtggcagctagactccaacaagttgatttagcagaatttatagcacctgagcagactaccggtaaccatatgacatcaacatcaccctcgatagttgacttaaaaaggtgttacatgcacaagctcttgtaatacagaatgtatcgcaactcacctcctcataccaacaagtgttgg

SEQ ID NO: 69262 - DNA, 377 bp, Zea Mays
gcaccggccgagatacgttgaaacggccacattgccgaagctagatgaagggacatctttcatggccgaagcagaacaagctgctcctgtcagcctgagtgccgaagaatcgactgaagtgttgaaggtgcctatagctgagccagccgaagccaaagaagaggcggccaaaaagccagagctagaaaaagtaatagtgctgccagaaatcttgagcccaccggcagaagcagaattgctgaaggttacaaaggctcccgccggaactcccaagaggagaatggctagcgtgctagacgctgtcatggaaacaacaagggcattgactcctcctgctgcaaaaaaggttgccgaagctgctacggctcgtgctgaaa

SEQ ID NO: 69263 - DNA, 563 bp, Zea Mays
cgaggggatcataatagggctagtttagtgaccacagaaattgagatgatatatttatttctaccaaaccagtctctagggttaatttggtgacaacagaatcatatggattggaaaaaaaattgagaagaaaatgaattaatttccttttcaatatcctccaattctcctgtaatcactggtagccaaattagcccttagaactcgtttggaggacagagaaataaaagaaatccatggaaaagatatctcctttattttcctgtccactaaatctgtccttagagcagatttggtggaaaaagaattggagggatccaaaagtagctgaaaaattcctctccacagatccctaatttttcctttcgccaaaccagctctaaatagtgaaggaattcttccttatggatccctcctatggtcaccaaacgacccttagtttatggcaaatccacccaaatttgtggaccgtcgcacatggtttgccgcagaacaattagttagtactccaacagcaagttggcaggcacacatcgtttcaagatggcaacatgctgatccca

SEQ ID NO: 69264 - DNA, 340 bp, Zea Mays
gggctctctggtgtgggaacataaggtgcaggggcctctggatcaagaactccagaaatcaatcgctctagcgttcccatcccaacgatgtcgatgaactcctctgggtcttctgcctccggctaagcttctataatgttctcatcatcttcatcggacaagtccgtctctcctgaggatacgttcccattagatatcttgtgctccaagtcctcgtcgtcatcatctagaataacaacttatgggaccatcggtgctacaggcaactcgggttgagcatcctgctgaagctcaacatccaagttctactggggcagatcctagggttgctcgacctcca

SEQ ID NO: 69265 - DNA, 532 bp, Zea Mays
ctggcattgaaatgtcctagataggatttccattttctcatccgatacattgatggggtacatgttggatttgtggtagtttaccttgagcccggtagcacccgcaaaggagttcaagatggcttccaggaagaagagctgttttaggcatgcctccattaccatgatggtgtcatctgcatattggataattagaaaatcttgccctccaccattctaagtggcagctttaggagtcccatgtccttggctttgtttgtaattgattgcaggagatctgctgcaaggacaaaaagcaacagagacagtggatcaccttgtctaactccacgcttaagtgaaactgttttcctgccaccccgttcagtaggatagacgatgttcctaagcccatgatcattttaatccagttgatccacttatttccaaatcccttgtgccggaagacttgaattatcacttcatgttctagcttatcaaatgccttttcaaagtccagcttaaggatgaccatctcttttttggtttgttt

SEQ ID NO: 69266 - DNA, 370 bp, Zea Mays
cgcgtgtgtttccttactagagatgaaggggccgataaggttgtcttcgcgaacgggctggtgcatggcggagcgtacacgttggtgctccaatcaccgttcgataagcacgcccaggcacacagaggtttgggggagatcctaccagagagctatggtcgaggaggagtccaaggttcacctttatatgtcgcggatgccaaatccccaacaaccacatgagtctgttaggattggatccgattcggccgttgagaagcacacaggatgagatttcgtggagagagggaaagtttgttatccaaatgatgccgatcccggtttccacgctgaaggaaatcacggtagcgacaccctctcattctaggcg

SEQ ID NO: 69267 - DNA, 461 bp, Zea Mays
atcatcttagctaactctagccaataaaagaacatgagtgttagaccaagacatcagaccagtagtggaaatggcatcagaccatatggtcacattgttcatgctcaggaggagcattagatcgttcctgcatgagaacgtcaaaccatctaggtgaagttcgacaatggatagtgaagtttcagagaaggaaacgggttattggactgtttcgatggtaagcattggattatacgccatagtgcacgacccaaatggtcgacaatgactagtgctaacatagtactagcggtgtagccattgagatgtgttgggccctaacacaatggtttgatgtgtacccaccgaatggtccgatggtatgcagagttggctattaagggtgcaacaactatatctcttcttaggggttataaataagaccttgattgatcatttgaggtgtgtgggagctaataaat

SEQ ID NO: 69268 - DNA, 401 bp, Zea Mays
atgataattggttggatgctatagaggcaacaagtgatgagctgcttggagcctactcgagggctgaagacaaagctatgacagtcgcctttggcgcccgaggaaaaaagaggctgaatagggtttttgatgttatcaggttcatctaccccgattactgctatcccacgcgaaagcaagggaagaaaaggaaagttgctacctcagcatcttctagtgtgtcgaggtcaaagaaggttaaagttttgacgcgtcgacccaggcgcattcagacgaccgatgtgccgaagctaagtgaaggggttgttcctgccacagaaccaggtcatgctatgccagtcgaggttagtacaaatctgaccgaagagccgaaactagagaatacggcagaacagtttaag

SEQ ID NO: 69269 - DNA, 946 bp, Zea Mays
tgagcatgttgcaccgtcttaagtcgttgccgacttaaggcgattgctctgttagtagggtatagtggtcaccctaagtcgagtaagcatgagcatgttgcaccgtcttaagtcgtcactgacttaagtcgattgctccgatagtagggtatagtggtcaccctaagttgagtaaatgtgttgattccaagtttaatcaaatcaaagtcaatcgacaaccaatagtttgaatgcctttgagaatgaaatcttttattgatgacggttctccgattacatagtacaacgttgatccgatagcttttgaggtcttgctaagggtaaaactttcaaagatgctctatgttccatgagttccccacttccgtccatccatttaagtaagccgatatgatcctggccgagtgacctccgacacaatgaatggcccttcccatagtggtgacaacttgtgccgtccttcccccgttagaattcggtgaaggaccaagtctcccaccacaaaggattgatgtcatatagccttatcatgatagagcctcaaggtctgctggtatctggttgactgaattactatgttcaatcgctcttcctctagcacatcaatatcctctagcctggtagcttctgcttcagctatgctttcgaataccagccttggtgccccaaacctgaggtcggcaggtagcactgcctccgaaccatataccatgaagaagggggtgtttccatgcagagctcgactgggttgagttcttaagctccaaaccaaataaggtaactctctgatccactttcctgcgaatttttcattcttgcgaacactttcttcctgagtgcttccagtatcataccattagctcttttcacctgaccattagctctcgggtgtgctactgatgcatacttgatttggatactccgttattcgcagaaatcaaagaat

SEQ ID NO: 69270 - DNA, 615 bp, Zea Mays
cgagcgtcctatcaagaggccaaagaagaccacatcagaagtgtgggatcactttgaaaagtatacaatgacagtggaggtcaatggtaagatggaaaagcagatctgggcaaagtgcaaggtcaaagggtgtaatacctagacaagcaaacatagggttgagggaaaatttggtacttcagatttttggactcatcttgctaattaccacagcataaagaaagggcagcagcatctcacaacccaaaaaatgaggcaggaattgccattgttcaaccatacaagtatgatcaagaagctagcgtgaagaagttctatgaagcaatgattgttcatgagtatcctttcaatatggttgaacatgaattatttcaagattgggtaaaatccttgcgtccaaattacccaatgaagtctcgtgtcacggttagaaaggagataatggaatattatttggataaaaagaataagttatatgaatacttgaaaaccattcaatgtcgttctagtgcaaccatggatatgtggacatccaaccaaaacaaggcctacatgtgtatcactcttcattgggttgatgaggattggaaaattcaaaagagaattattaatttc

SEQ ID NO: 69271 - DNA, 420 bp, Zea Mays
ttcgccggagccagagctttgcattcggtatcttcagcttcatgcacctttttgctcgttttacatgtttgaagctttttgaagagcagtgatttttttcctttgaccttcattagcattatttactcgaaatatcatctgaagattggttgtcagtttcgacctttggaattggaaaccttcttcccaacatgcggggaacaataaggttggttgcaatgcagagtttgtagctaccgccttacatccgcaagatactgtagtggagattaatcagagaaaaagaagggctagagacgccgagaacgtgatgacgacctgggaggggggaaggggcgtgacaaaaaaaacagtccgactttttaggctcgtgtgaggttaagggtgcaggagatgtgcgtctccgggaagagaactcaa

SEQ ID NO: 69272 - DNA, 652 bp, Zea Mays
caggggatgatatccgcataaggttgtcagggcttttagcgctgcggcctgagtggtgtcgtccgtcctgaacacgacagtctcggagtcaagagaacaccatcccggctgaagagggtgagactccagggttagccaaaccctgcaacgtggcacccgatgctcctcgtatagctacaccgtatacagagggggtgtagggtaaccggcggagcagagcacctcccacaagatggagggaaaaccctcgtggggaaggtagtcaaaattgaaacgagtctctcctccattgatgggggtgggtgaagtcatctgtgaaaagagggttagatgtaagtgtcatggtagtggtaaggagaaacgtgtgcccgggttgttaaaagaaggtgggttaaattagatttatctactccaacccatttcgttattcattattaacaatgcttgttaagttcataattagatgcattttttccttagcttctaatttcttcatgttttataatgcatgcatgcggcaaagaacgtcttctcatcgatcaaaggggtgcttctagggcatccctactattctaaggttggcctatatggcctacttatatagccacctactttcccaactattcttaaggccttacgtcctaggtctagc

SEQ ID NO: 69273 - DNA, 537 bp, Zea Mays
cgcaccatcggtgacctctacgcaaggattcacgctgatcatggcgattcgtgcaggactcgagcaggataatactgggcgggtgaaaagattggagggggagcggatttggtcgcggggtgaagcttatcaaccgcgcttgtagccgtgcgacgtggccggaccgccggtgtcatcgtggaaactccgacgacctcaattatgccatgccgtggctctttactgcacagtagtaaccatggcacgcctaggctcaccatctcagaaccgctgcaccggtgaacgccacaactgagccaccagtgaccttcttcctctccgaccgccagcacgccatgccaaaattaggagccacgtcccttggaaacaataaattggtgccccagcctgctccgctaagtaattgtgcacccagtgaaccagccctcacctccaatcatccctcacaactccccaatttgggattcccccaaatcagtcaaaaacaccaccgtgtgtgagctcgtcgtggccagctctccacaggtccaatcacac

SEQ ID NO: 69274 - DNA, 318 bp, Zea Mays
aaaagcctcaccatcgcgcctggaccaatatcacctatagcccactcagcctgcaaacctgcatgaccctgcaccgacaggtgtgtcccacttgtctgtctcccatccccgcattccagccttggtccagtattcgcatgggtaagaagcaatcacttccagtgggccatccccgtcagtttcttcctccctcgctcgatgttgccaaactaacgaatgtcgcggacttccctcggttagcacaacaaacccccatggacttcgggatttcctccaccaacgtcgcgcttccctgactccctcgcccggaaccataaa

SEQ ID NO: 69275 - DNA, 302 bp, Zea Mays
ctccacacccttaccgtgagacattggcaattttatcgacaagtgtgcaaggacatacatttaaatacacaattatcacaaatccactcacgttatacgatataacacaaccaagtacataacaacgttatcaaatacaagtggtagttcacgccactaatgctgtagcaatcaaatctcaaaacacactcatgtctaacttatttgttggtccgctattgctttctcttatctccacatcatttttattcgcactggatacaaaatttccggagtcccgattgtgtgtggcactatcccta

SEQ ID NO: 69276 - DNA, 411 bp, Zea Mays
tacacgtcgtccaggcatccagctcaggtcgcacgctccagccacgccatccaggcatccagctccatgccacgcgctccagccatgtcgcgtccagcggtccagcggctccagcagactagcacaacactcaggcactccttgttctcatttgttttctcagtctcttaattttctcagttggattaattagcatttttcacaattggattaattacccttgttcattgttcagcgagtgtgcctacaaaattggaaatgttgttttaataatatagttagctacacaactgaaaatgacttgtttgcagttttacttgtgatggaaggaggcagtgtacggagcaagggaaaagagccatgtattggtaaatcatcatctgctacagcctgtgaatgggtggttactac

SEQ ID NO: 69277 - DNA, 767 bp, Zea Mays
tacaaaggatatcgatctttcattcgtgatgacacgttgtaaaagcagcataaaaaaggagtatggggaaaaagatggtgcttttggacgacggctacatgctgtcaagcgtcctgtggaaacgaagacacgcgcgcaggcagagacgcaacaattattcacgcttccagcgtacgtgtaagaaccgagcgcatgcatcaatataatagacgtctaatataactcatgctgagtgtgttattattggtgagttcgatcgcgattcccggtgattgacctaatcggagcataattctgcatatggtgacacgtgtgtacgtcctgctccatccatgacgactactcatgccgagtgtgttgttattggctagcgcgcactacaacacaggatcgccctcttatttaatttcagagcaaacaattgcatactgccctgttattattagccaagctagcgcacatccaatgaccaagaagatgccacttgaagaattaagatagacaggcgtttttgggctgggagagagagggaaaagtgagattattcgttcttaattatagatagattcgtaatattttattaaaacgcgccatataaatttggaaatgaaaacaatataatgtaaacgatatatccttcatctcgaactcaaaaatattaatttcctccttcaactcaaaggaaatcatatctccactttcaacttcaattattgatcggaacattatcttttatagagggagagagagagagtagtatggaatgg

SEQ ID NO: 69278 - DNA, 816 bp, Zea Mays
gatctctagtacgccgaagccaaagaaggttaaggttttgacacatcgacccaagcacgctgaaacagtggaagaaccaaggcctactgaagggtcttctgcttttgagtcaagtcgccctactcctgccgaagctagaatggactcggccgaaaagccaaaactgaagataacagctgaacaattagaggtttcgagtccgtttcaagagacggaggtaccaaagatagcaaaaattgcttcagtaactccaaagagaagaagaatggctagcgtactagacgctgttatggaatccacaaaggcattaactcctgcttctaccgatgcacctagcgtggaaggcgagaatagaaagaaatatgtcgaagctggcatgacgcaggttgcagctgaggctgggcccttggctcccgccgaagcaagaccttcggaggctattgaaaagggtgttgaatcaaaaccttcggatgccacgaaagcatcgttactgttagaagaagagagggctaccgaagaatctgaatcccctgctattggagcatctactgaggaattggaatttatagtgcgtcatgcttcagggaaaaaattatcaaaagagcaaattgccgaagcgcaacattacgctagggatctgcagtaccctcgagggtccttggtgtatggtgaggatgatgaagatgacttcctttattgtctgtctgacaataaagagattcatgtctatcgggagatagcagacaatgtaggatatccgaagcttgagttaggtttgtctgcaatgacggaggaccaactcacagatagcctttc

SEQ ID NO: 69279 - DNA, 395 bp, Zea Mays
atttattcccacggaaaacggagatgggaaagaaatgttcccgcaaacgttcgtgaggatccccgcgtgaaaaatttttagtccgtgcggatggaaatgagaacctaaaatccaacggagaattctccattatatggagaataaagatggaaaataaatgtccctccaaatgtttgtggcccgtgggaaaaaaatttggccgcggggacagaaatgggaacctaaaactggacgaataattccccgtggatgtcagccgatcagtgcagaggaaacgtgttgcacgggagtggacgacgagagcaagtgctgctgctgctgcctctctgtcggccagttccttcgcgctttccgttccgttcccctaatcattcaccgacgtgatggggaggggg

SEQ ID NO: 69280 - DNA, 561 bp, Zea Mays
tgaagcttcatgttttcttatagttatactgttgtgggtgttttttgttgtggggcctcgtgaagcttgggggaaggagtctcctaaaatataagcagatctcaacgatttttcttgaggtatttcatgttattgtagtcagtcatattcttcatcctcgctgtcgcgagctgcggaggagcttgggaccagcatcagctggcggaagaagaggatgtcgacccacttccagaggtatgtgatgaattttggattataggaatttgttggtccattccatatgatatacaatgaactccatcattctagaattcatttgcatattaaatggtctgtatccaagtgtgattgtgaccctcctcaagtgggtatgattttctggtatgatttcatcatcagcatcagctggcggaagaagaggatgtcgaccggcttccagaggtatgtgatgaattttggattataggaatttgttggtccattccatctgatatccaattaactccatcattctagaactcatttgcatattaaattgtctgtatccaagtgtgattgtga

SEQ ID NO: 69281 - DNA, 357 bp, Zea Mays
gaaatctccccctaatgcctggaaaagctcatgattcaagcaagcgtacgggccataaatagattctcatgaagagattctaaaacttaatgatcgacggagaatgaattctcacatagatccccagttttctgtgtgcccatatatgtacgctgcggtggtgagattgggaacatacccaatatacgcatgggaaatctttcacggattcccacgtactaaaaaccataggggaatttgtacatgcagtacgtgcagttaatcacaagtcaggagcatgcaaaacttcctgacgccaaccataactagttggaagtgacaattcattattgatggtcattaatgatctgaaatttt

SEQ ID NO: 69282 - DNA, 418 bp, Zea Mays
gccctgtccactccactggcaggcgatgtgccgcctcagcatttaatgtgccatgtccactctgctgacgggcggcgaccaggccaacctataggcagcgtgcttgtctattccgttggcaagcagtacgcccgtgctacggcgtacactatgctcatcatcacccgcgcgttaccaaggaagcagcgcgggatatcaatactatgtgcactacgaacattatgacgctcggagatcttctaggcgacactggcattggatacttctatatgtattcccttcgttttgcccctgggcccacatgtcggggctcagcacccttgtacgtgccccccttgagctataaaagggagggcacatgacattacagggtcagacccaactgagacacacacacactcactcaaactcacgagtt

SEQ ID NO: 69283 - DNA, 577 bp, Zea Mays
cgtggaaagcttaattattagctgtgcgtggactagtgatgacacacgtacacgctatcgacaagttaagtacgtacgtaggactagaagaacaagtaagtaacattgatctcgtcgatcgatcgatcgccaatcaaaacgaccacgtgtgacgaggacaaaagcaagacgcatccatctccacagttaagttagcagccgccccccagttgacacaaacatgtactacgacaaaatagtttggactatcggaatctgagatgagttcgtttgttacgttattcctccctccctgccgcaagaatccacgtgatgagcactagtacatactagtagtagtaggtagtagctaataatgtattgtcgtatactcctatatatatagagagagaagagatggaataaacatgcattagttaccatgatgatgatgatgctgctgttgatgaagaagctgtaggggccgggagtgcgtgcctactgtactttcgaacgagaaaaaaaaaatgcatggcagcacacgcaaggaaagtgaagtgcatggaataaaaagcagaatgcgccgcccggccggctg

SEQ ID NO: 69284 - DNA, 431 bp, Zea Mays
cgttggtgaccggatcagcggccagggccttttccccaattcgacgccccggcgaacggcgccactcaccatacaccgtggcgccatcaccggcgcacagccacccgacgagcccgaagaccaaacaccctaccaatcgatgttatccgaagtagagacgggggcaaacttcatgggcaaggtattaccgacaatttcgtagcagaggaccccgaccatggcgtattgtggcccacggtggtgccaagaattctggtgagaaattctgcctccactgcttgccatacacgcacgggaggaacaccccgacgtccatcgcgccctagcatacacgtccaatcgcctaaccgaggcatggcaatcccacagcccactcctggcgaccacagcaatggcggacccgcctctctcactctctccttctctcctcc

SEQ ID NO: 69285 - DNA, 475 bp, Zea Mays
tataaaacccgagccattgttctccttcttcccccagtacgccccatcaatcacgtcacctctggtgcacatcgatttggagaaagccgggaggaagcaccaccgttgcggatctcccacgccgtgaatcctcatctcagaagtgtaccagggtcaccgcagaagcctcgcggaccgattccgagactaggctgcgtgagtactcccgtgggcgcctcaaaatttctcgccgatcctggttgtcaccgctggagccgctctgcaccgtggatcggcttcaactcacggtctgagatggtaatagccctcccctgttgttcgtatcatcttgcgcttcgtttaccacgaattggattgggtctggggcgccggaatggccaacgggcgctgctccggcggtgcaccgctgcatgagtcacgcgctccgccgtgggctgccggcagggtttgaagtgggttcataaccgttgatccc

SEQ ID NO: 69286 - DNA, 847 bp, Zea Mays
gtgcacgcggaacgaggcaatgagtaccttctcgggaattattgtggtggtaaaaaaccatttttattgtcgcggtggtggcgaaagttatgtgcatgacccggcacaccaccaggcacgggggttgtaggtcagtgagccgtagcaacaaaggtgatagcgggcgacctgacgacaagcgtgatagtggatgtggcgtcgttgtgcgccagccacggtcaaattgcttgatgtgagatcaccgttgtagccccacttgtgtttttgtgtttcttgcatcaccagacgtaaaacctagaaaccccctcattcttaggattaggcgggtgcactccgtcggctggagtttaccacccacactagtaattttctggtgttgttactaacttttctgcccattttcaaatttatcacgatatacgggaaacaatatgaaaaccaggtaatgtattatgaaaacggtactatgaatggtgggatatctttagggctgaaaaacgttaccgaaattctcgtaaccgaggccttgtaaccgtatcgttttcgtaaaggcaatattgttttcgtaactcagcgttttaaaatttgaattccaaatatctaccaacatcgtattgtagttgctaataagtagattaattatgaaactggacaaattttcgaccgattggcaatcgttttcatatagacaatatcgtttctgaacgttttcacgcctagatgtcttagtgatggttttcggattttttaagaaaatttgatattttcccttattcgggaaaatctagtaatttctcatatttcccatgtataggaaagttcgataatttcgaaaatcatcttattg

SEQ ID NO: 69287 - DNA, 884 bp, Zea Mays
cggaagtgctccttgcgctggagtaccagccttgaagttgcaggtggcaatggccgacggggatttggagggcgccgttgctgccactggacaaggcagccgcagccggagtgctggacagggagacagggactcagggttagggaggtaggttgcccaggtttcatagtaggctatcaactgggttgtgtcccatgggctgtgtcactgtggggctagcgctcggcctagcgcctggacggtgctggttatttcgggtagaatgggtacttcgggtaccgcgggttaatacccgattaggcccgaacttagttcgggtattcagtttcgttacccgctggagctgttcgagtaacgggcttcgggctaaacgggtacgtgtacgggttcgggtatttagggtatagggcttcgggttttatgcccagatctaagcaaggctatctgcaagttgatccttcggcattgtagatagaccaagttcaagctttggataacccattttatccattatttcccggcaaacatctatctctttgttatccagcaggcagtaaaggaaatcatcttcgtcatttcctccatatactaaggatcctcgaggatattttaggtcctttgtgtagtattgcacttcggtaattttctcttccaataattgtttccctgaagcatggcgaataatgtatccaaaatcgtctcgacaagatacttcagatataggcgatgttagcttgccccactagcttagttcccgaaggtccagcttcaacgtaggtaggagaagtgcttgcaggtagctacttctcctaattcttcaatcctgtcctcggaagccttagtagaagcaggagttggcaccttcgaagatttggtaacaatgt

SEQ ID NO: 69288 - DNA, 942 bp, Zea Mays
catcgtccaggacttcattcgcgcctgtaccacctaccaacgctataagtccgagcacttgcacccggcgggtctcctgctgcccttgcccgtgccacaggcattctggaccgacatcggtctggattttgttgaagcattgtcgcgcgcgggcggcaaatcggtgattttgacggtggtcgaccgtttcagcaaatattgtcactctatacctttggctcacccatacagtgcagagtccgtcgcgcaggcgttctttgcggacatcgtgcgcctccatggggtaccccagtccatggtgtccgaccgggatccggtgttcacatcggccttctagaaggagctcatgaggctcatcggcaccaaactccacatgaccacggccttccacccatagtcgaatgggcaaatggaggctgccaacgaagtgatcgtcatgtacctcaggtgcttcacgggggatcgccctcgacagtggctccggcgacttccatgggcggagtacgtctacaacacggcctaccagtcttcgctctgagagacaccattcaaagtggtgtatggccgggacccgccgtgcatccgttcctacgagctgggcaaaacaagggtcgcagccgtagccaagaacatgggggatcgggaggaactcctagaggacgtccgctatcgcctagaacaagctcaagcggtctagaagttctacaacaggcgccaccatcctatctcctacgacgtcggcgattgggttctcatctgccttcgacagcgctccgtcgcctctctatcacaagagaccaagggcaagctggaaccacgcttcttcgaaccgtaccgcgtcgccgagcgcatcaacgaggtcgttgtccacctcgtcctgcctccccgcgccaagctacacgatgtcttccatgtcagtctcctcaagaagttcgtcgagcc

SEQ ID NO: 69289 - DNA, 301 bp, Zea Mays
ctcgtttttgcactcaaatgtcctgactaaaaccattgtgtaaagcatgctaatgtgtggactttatgatgaataatgtgatgaaatagacaagctaatgtgtaaaacgatacaaaaataatgtgtacacttattttgaaactaagataaccagcggccagcctcacctaatgtcgtgtcgagtgctaccgtaatagctaatgggccatcccccaacagatttcactattccagagttgggccaccaccagggagcaggcccagctgcacggccagcaactgcccaagccacatcgcacac

SEQ ID NO: 69290 - DNA, 375 bp, Zea Mays
ggaatcgcgcaccccacatatgtgcgcgtacaacaatgagttgcgcaaattggaagagaaattcaaatgtttcgagctacaccatagctatagacgttttaacatcgaagccgacaaaccctcgaccatcacatcggaacgaaagcccgttctggatggggtcttcgcctccaacctctatgagcccatcgtgaagattaagcaatcagaggaggaattgggcaaggcgcctgacgaccaagtcgccctcgaggcctaggctcaagagctaatcacaatgaccaattggcaggactggcaccagcccctcatcgatcgactatcaagtgccctgctcgaagatgcaaccgaggctacgcgactctcttgcaaagc

SEQ ID NO: 69291 - DNA, 620 bp, Zea Mays
taggaaagctagataccacaggtgggtgttcagcggatccagatactactctgctactcgtgtctggccgcagctcctcctatttaggatcggattgggatggggattactgatgagatcgagaaaatacgaagacatcgatacaaacacaacatctaggcaagcaacaactaagtgagattgatcgagacaatgcactactgtttctatatgagaaggtgcaacggtgttaccttatttggattagaggcgacggatgcacccctcccaacgtggtgacgacgcggcgtggggcaggtggggcagctctatacacagctggtgtagtggaggcggaacccacggaagagggagaggtcgatggtacaaaggggatagtggaaggtggagatggaagcgagggtggcatcggggacgcgcgtgcagagggactatggttgtgggtgctgcgaggccatggcagtgtgagaggccgagatccacctgctgcgactagacctagggtttggagcgcaggaagggtggtcgtttagctcgaggaggggataacatatgaccatggattgagggctggatctagagggatgatgtacgagtttatttcaaaggatcatgaggga

SEQ ID NO: 69292 - DNA, 698 bp, Zea Mays
tgctccaggcataaggctaatgctcgtcaggtccctcacgagggtgtctcgtcatcggccaatccgggagcatcagccgggcatggggtgctactcataatagattatatctggaatgctataacctcaatgcaaacatgttaagcaaagtttatatacgtagaatggctgggatgatataatacttgcttaacatagtagattatggtattatgttttttgttgttgcaatgtgcggttattacctaaaaacatttaaatctatgtacattaaatctatttatagcctcaaggagggtgccaagagcgttggggcttgtcacatacgagagaggaggtgtggctgagcccctatagccggtatggcctgtggtatagccattgtacttgctgctgacttgtgccgggaggagggcgttcggttcatgtatttgcatctttgactacgcagagagccgaggtcagggctgagggttcggtaatgtacccgagcctgtctgatggggaaactgtccaggtcgtagtggttggaggagtcgtaagtatgacgaaaagctcctgataatacatcagctctgttgcttctggtgacgtcgggtgctctcctgttgctataggtgcccaaacgggcggcccggcacgggcccgttaggcccgacagataaacaggtcgtgcctggtcggcccatgtgccgcag

SEQ ID NO: 69293 - DNA, 917 bp, Zea Mays
tcgacccaacatgagccaccattgaagcagcagaaggggaaccaactgcgacaccctcggggctgaaacacccttgggggctggagaaccctcgggggctaaagtgtcctccagggccaggagtggattggcggcaaggcttactaacacagaacccctaggggactagcaggcttacttcaggcttacccctgggggctggaacaccctcggtcagcaaaccagcagaacgtgcttcatccgagcgagctatgtggacatcgataacttcaattttaggcaactcaaggagcagctcctcatgaatggactcttcaagtatgccatcgacaaccgacatagacagaccttggatgtccaccatccttgttggggcaacaagacttgaagtatcaatccaagccttggagcaccattcgcgctgaaccaaaggaagcacctcttcctcctcctcatcttcctccacctcctccactacatacctagtcgttttcaccacacttccaccttccacatcatcctccaaaccagcatccaccacatcatcaacaacgttcggcttagcatgggcagtcactagctgcgggaccgacaaacgttgaagtttcctcttgttcttaacccttgaggactcggcctaggcatctaactggcagaaccgcttgcattatggacccatgagattatcagccctcttcctgctagcactcgattgcttaggagctccacaccctgattcaagtcacgctgactcaggagattctctagccagcatgtcgagaacaacctcgatctcagagttagcggcaggcgaccgtatcatgatatgattctacttatcctcctcaggcagatcttgttatgcagcaactatggcctctatctcatccaaggaaaaccatactctatggcgagaa

SEQ ID NO: 69294 - DNA, 524 bp, Zea Mays
gtccggtcatgtcaggcaacacctgtgacctttgtggtgggctctgtgtaactcctgactgtccggcgtagggtgccggatggtctgacggagggccagacggttcgtgattgtgtgtggacggtctagctgtgctcagggttgactcaccattttagcgaagatggtggtgtcggtcgtcctggatatgagtccatcgacataccagaatatggctagggaaacccatttgtcgccgatgtgtttggcgcaattgtttcagcgcctaacttatatgataaaaaattaggcatgtgagttttttctaatgcatgtgtcatcctttctatatcctccgtgatacttttaatccaattatcaaaagaaattttaatagatggaatatcatcggctgacctggcatcacctatcgtggagagctgttgcagcacggctaacatatactcggcgtttatctccctctcttggacggtcttctggtggcagtctaccctgaagtgcgagaggtaccacttatctgtcac

SEQ ID NO: 69295 - DNA, 577 bp, Zea Mays
gcatagggattgtgggggcagtggttgtcctaggtattagtccattgacgtataccatataatgattgggtatgtggggggccatttgtaacccatgggttatgtatagatgtcctggtgctagcctcgtgtgatagaaaactagggacagtggatttctcaaatccacgtgtgagtttcttgaaggattcctccatcccccatgtactattttaattgatccctttgtgaatgtacgtattgtctaaggaacatgataccgtcatatttacttacagtggtggtcggaggcaaaagtaggagggacacgaggttgatctttccttgcttggtgatcttctagtgcccatctactatgaagtgtgacatgaatttttcctttgctgcttcatgagcctgatcgatgaggccttcaaattgtcgttgttcgtcgaccaacaaactctcaagtgtcgacctgaggatgttgttttgggatacatcagtgcgatctttggaacttgccaacgtggctgatctaatagatcagatcttttgtgtccatagaggagtcaccaagtatgctggtgccttttgg

SEQ ID NO: 69296 - DNA, 882 bp, Zea Mays
aacaatatcagcgaagacagagcagaagttcttctagcagaatattgtctgtcgcttcagagttccgtccgagttgacagtagacaacgataaacaatttgaccatcaggactttagggaattctgcaactccatcgacacgaaggcagtattcacgtctatctaccacccacaatccaacggggtagtagaacgtgccaacgggaaaattttcagcgctataaagaagagacttctagacgataaaaagggcaagtgggtcgagcaactacccgaagtcatctgggcactcaacacaatggagttttaagccactggattcacccctttcatattaatgtatggatccgaagccatgactctacaagagctaaagcacggatcacaacgaacaagcaccacaactacaccagatatcgacaagtcaacagcaaaggacctcctcgacggggatcgtatcaccacacttgaagcattgaacagatatcaagcacaagcgaaggcctagcgggacaacactgttaaccccaaagaatttgacgaagggacctcgtactcgtcagaaccagcagaacataatcccgaggtaaactcgagcctaaatgggaaggggctttcatcgtcaagaagaaaacgtccccaaacgcctacagactcacaacacaatccgacgaagacctcgagcattcatggaatgtagacaacctaagaaacttttatgtgtaagacaaacaattccaaggccttcgcacctttgtaacacctacaaatacgttattccagttgggcccgcactcttttcctcgcagggggtgaggtttttaatgaggcggtgccatgtaataaagcactaagaaacccccccacaaaaaacaaagagac

SEQ ID NO: 69297 - DNA, 469 bp, Zea Mays
cacgtcctcgacgacggcagcgcacggaggagctccggcgagccactgtaccggccgaatgaggcgatgaccgatgcgcccaagcggcggataccaaatccaagctaccccgagtaatttccacaagttaatcgcacaattagtgacctatcctagcctgcccacgagaaccgcgaagaccatgatcgtttggttgtgttcccgacgagtggtggtctcatagttcgaattggaggctcggtaagcatcacagggtgacaagtgtgctcaaacaagagagagtgagggatggacggacctagaaagggctggccgcggtgagcagtttcttgcgatggcggagagtggatttggagagaattccaaattcgcggattccagtgaacgaatgcggttgattcgtggtggctggacagcttactaccctacggaggtcggggaggggtcaatttatagtgctagcgggcgg

SEQ ID NO: 69298 - DNA, 454 bp, Zea Mays
cccatctaatctaatattatccaatctaaagtgagttattaacatgttagttaatctggtgatatgggttagacactgcttccacaaacataacctaacctaaattaatgtcacataccaacttgtccataaacaacaatataacctacatcacaggctgcctagtccatttgttccaaaagcaaaatacaactctgttcaaacctacctacctcgtgtaccccgtctatcctaactatatgtccttaactcggatggcaattccaagaagaaagaccaaagaagaccaatcacgtcaaagaaggataagcactcaagccttcaaagatcaagctaaatcatcagatgaatcaagatccacaaatcttggatggagtctttccttaccctactctttcttacccaaacctatctatgctttaaagatatccttgatcctgcataataatgtggc

SEQ ID NO: 69299 - DNA, 492 bp, Zea Mays
ccgtgcgccgtctctgcggagatcccgtcccggcgagctcacctctgtgtcccccgtctcgtacccattccaccgcctaccggtagtacacgggcgcgggaagccgcacgtacctcgacaaggaccggacggccgaggaatccgacgttcacgcacttcgccgccacggaatcttccctcaccgtggaccgaccttttcgccgcgacgattgctggtgagacacctcctccatgttctcctagtcataagtttggttttccacacgtgcttaactgaacttagtcaccggggcggtagaatatggtggagcaccggcgagatggccgccgtgagcaggggcgctccccaactcggctctgttggggggaagatgactggtctgccgtaggatggccactggacggagtagattagagcgcacgtaccggttggatcccgacggtagagatctgatcggatggatcagggcgactccgggatatttaaatctg

SEQ ID NO: 69300 - DNA, 569 bp, Zea Mays
atagaagctgacttatccctttgtcgcattaaattagagtcgcagatctccagtcggacaaccaggattagaagcctggatacccgttcggggtgagtgtataccgtaggatgatgatccgatggcctcgggcgcgtacagcttcacaatccattctaggcccttggatctagatcaaatggccaacacacgtcgatacccattcggtctcgtacattttgctaaagagccattgctctttcattgaataaacccgtcgtccaattacaattgtaaagaatataatttgtgtcctaatatttatatattagcccctgggttctttagaaccttacaccgccatccatgaattttagaataaatataaaattcaatctaaaatgaatttttagtatacaaacaattctagaaatcttagaaaattcatatcttgttcatttttactctgattcgatccgttcgtgttgcgttagctttgtaataaaattgcctattttataacaacattgattgtaacaaatcacatacttttataattagatatttatttaacctatatttagtagatt

SEQ ID NO: 69301 - DNA, 758 bp, Zea Mays
agcgaagatggcggtgacggtcgtcctggatatgagtccatcggcataccagaatatggctggggaaacccatttgtttccgatgtgtttgcacaattgtttcggtgcctaatttatgtgataaaaaattaggcatgtgagtttttcctaagacatgcgccatcttctctatatcctccgtgatacttttaatccgattatcaaaagaaattttaatagatggaatatcatcggctaacctggcatcacctattgtggggagctgttgtagcacagctgacatgtaatcgacgtttattttcctctctcggacgaccctctggagacaatctaccctgaagtacgagaggaaccacttctccgccaccttgagcacctgatcttgttgtcactggacctccttgtctattttcttcatgtcatcttctaatcttttatgctcagcggccgacaaattagtcagccttgtgtcgctgtttggagaagcactattgagatctttagaatcggtcatataaacctgattttttggatctgcaaccttgttgcctagcggagtcgccaaaaagtgtgttggcaccgatttgggcagcgccaatcactaggggtgtaccgcctggcggtgccctctgcggcggcgcgcacagtccgcggcttaagtccacggcctgggcgcaggagcgacgccttccccgctttgcaccggacggtccgcgcatagggccgaatggtccacgatggcacagggttgtcttcct

SEQ ID NO: 69302 - DNA, 469 bp, Zea Mays
gttttaatggataatctttccttaacctagtatactgggaagtttaatatttttaaacagtgtagatactagttaagtatgtctccaatttttctcagccctaatctaaaagtatttttatttttcctctggttatcaaggtttgggcagtttacttaattaaatccaaactataaaaagggttataggaaccatggtgtttatcatttttgctggatagttcatgaaatgcaggttctaacaaaatttgtttgaccaaatttggcttactacaattcaagttgaattttctaagtctactgcttatttgaaaaagaataaatctaaaggtttaagaaaaacagctttgcaccggggcccctagagttttccttaaccaaaaccttaaatccgtgcccctaggaaactattcactagagtcactcacatttccaataaccgcctggctttttccctttcttaactcgcg

SEQ ID NO: 69303 - DNA, 374 bp, Zea Mays
ctcagcgaaattgggttctgcttgcttctaagtgtatattaagctagcctttatagttttcaaagtccaaacccagctaccttttataaatacatgaaaataaaagtaatgttttagttgttgcttcttaagtgtaatattttaattgatcccctaccctcccaaaacacacaaagggcaaaaacgtcacataacacatgtcgtatgaaactaaaagaaggttggtatcctgcttatggttttagaacgtgcattgttaatttctacttgatcttatctaaagataactaataagggtttgattatagtatgtgtagcagggctttgcactagcttgccaagctgatcacaaccctcttttacctgtgcttcac

SEQ ID NO: 69304 - DNA, 505 bp, Zea Mays
gggcgggcggcggcctcctcatgatgtaaggaaaggctcgctcagctgatcccgggacatgaagaacctgaccacctcgtcgagaacaatggagcggttggtcagcggcgcgtgactcctcacgaatcactcaactactgaagcttctgcgagagctgataaaaggcaaacagatatgggatctgtcatcgctattccttaacaggccgtcgaggaccaccactgcgaaaggacatgcacggtctcaaatcctcgcccaattctcaagccaagaattatatgttggtttcgcttttgcagtggttcccgttctaccaaagcccacaagtggggctgggggcgaggccgaatggaggaacgcaggaattgtgggtgaggcccgctctactctgttactgtatcactggttcggggggcagaaaaggtagctctgcttttatgctaaacgcatgcaaccggcacgacgactttattacatggtgccttttgcacaactacagctgag

SEQ ID NO: 69305 - DNA, 582 bp, Zea Mays
atccctttggctttagggtgtccctagatttaagatgcgcttttagggtaactgttgtggctttaggacgctctaaagcttcataggaatgcactatggatagtataatgcatgactgtttagtcaaccaaaccgacatacgacacgaatgttgtcaactaatggttgagctaccacgggaagaacaaacatgacatggagttgaggtcgccgacgacgacgtgatgtcataggagagcctgagcaggctccctcctaacgaagacctcgtcgacgtcaccctgttaatgcccctgcatggcgtcctcaccatcgacgtatgcacgctccacctccatcccctccgatgttgcatcatctgccccgtccgccgccaataccgcctatcgagatgtcccttgccctcgttttcgagacaatatcgggcgtacaataccgctctcaactataggtgtacatttgaatcagccttgatagcgggtccgaagcacgaaaaaaacattacccagacatgacacgtccctcatataattagtgtcaggaaggcatggcccaatatactgggccatgcttgggctaagg

SEQ ID NO: 69306 - DNA, 587 bp, Zea Mays
gaaactagatcttatctcgtagctaatcttctagctagcagcgcatcattgtaacctcgagctcaagcaatacaacctcaccatcacacatgacaagggttttatgccttccgatggcctgaacctatataatttttgtgtcatgtcgctttctactcgaaccatcgacctatcattgatctcgtcgtccaccaaaagcacctcgtgatgtatcttgtggtgtgttgttggtgccaaacaccgataatggccacaactctaaccaaataggtaacaactagtaggcttagttagttaggattccattgcactatagaaccttagtagttttatgacaacacttgaatgaatttggaactatgtgaatgtggatcggctaagtttgatgtgtggaactttgtgatatgtgaatgagaaatgggatgtgtttgtggttgtgaatgtcgctttgtcgatgaaaatgtgtgttgtgaatgtgaaatgtatggggttgttaaatcaggatgtatgtgtttgtggttgtggatgtatgtgactttcaaatgtatgcggttgtgaaatctagatatctgtggctatgaaaatgt

SEQ ID NO: 69307 - DNA, 1078 bp, Zea Mays
gtcatgtcataaaggagtgtccaaataatcgtgtgatccttgtgactgatgatggagaatatacatcagcgagtgaagaggaagttgaagcaggaaatgaagatgacattgataaatctgaagaacatacgggatgtgaatttgagcatggtactactcttgtggttacacaaatcttgagtgttcaaatgaaagaagctgaaattggacagcgacataatcttttttcaaacgcgagccaaagtacaagacaaagtagtaaaggtgatcattgatggagggagctgtcataatcttgcaagtcgtgagatggttgacaagcttggtttgaagttgcagcgacaccctcatccatatcatgtccaatggttgaatgaatcagagatatcagattggttataaggtgaaagtttggtacaaggattattggagagtttgttgacacagtggagtgcaatgttgcacccatgtttgtgtgtcacttgctgttgggaagaccttggcaatatgaccgatattctcagcattgtggaataacaaatcagtacacactagatctgaaagggagaaagtatgtactcaatcctatggcccctcaacaaatcatggttgaacacttacaaaagaaaactgaaattagtgcagcaagtagaggaggggaagagcaaaagaaattaagtgccatccacaattcagtgagtgagtgctacaagccaaattcaaaagataaaaagaaagaagagggagaacatctagttatgctagccacaaaatctgagctgagagatgtgaggaacaacccatatcaagtgctctttgtacttgtgagcaaagatgttttgatttctcctaacgacataacatctcttcctagtgttgtggctgatcttttgcaggactatgaagacgtatttccacaagaaacaccggctggactacctccaattcgagggattgagcatcaaatcgatcttattccaggggctgcacttcctaaacgtccaccatatcgaaccaatcccgaagaaactaaggaaatacaaaggcaagtacaagaacttcttgataaaggttttgt

SEQ ID NO: 69308 - DNA, 464 bp, Zea Mays
ctcctccgagtcctcgacggctacaccagacaggtgcgctcgcgcgcacccatcgaaaacaaatctaccacctttcatagggtaagcagcacgtctacgagagtttagcagaactgccaagcaagtgcccacactcccttggaggcttggggctactgtcgggtatcataatttagggtacccagattatgtcccaaaacatacctggcacctgaatatctaggaaacataaggcaaaacgcgctccctgaggtcacgcacggtcgagtcacgattcacccaagaccttgattagcggcttcccaaaaccatgcctcgcccaagctaatccttgggcaaaggctacgcccgcatagatccttgactcacccgaggggccccctctgacaggaagcaaaaatttgcctcctcgagggcatctcggtcgaaggcccagcctcgagcccggcctcggccaaaagttc

SEQ ID NO: 69309 - DNA, 1147 bp, Zea Mays
cccacgacgacgacgaaaaccgaggacaggctgagctattcttgacgaccaagcacgatagtgtttaattgatcaagtctatgagtaacatgagaccctaagaatgctagaacatgaactagagaagcacgaactgatctgtggaaggctagccacggcgaggtgtcttacggcaacacaactgaccgaattgggggaaaactggaattatcgggctacagtgggtaatcggaagtgaggagcggtgcactggcttcgtaacaagctgacggagcacgctgaacactcaatttaaagggatcactcgagtgtttcgcgaatttgggatgggatgagcttgcgatcggaagggaggtgagtcaccggagcacagctaccgtggcgctcaacaaggtaaagaccctggcagtaaacaggttgtccactgcgacttcttgcgacatgataatgagcgtaagcacgtgaacggctacaaagagcggcgaactccggcgagaacacttcagccgatcgcgcgacaagtgacgcggtgaacagtccggtgataaggctccaactcctccctgcgctgagatattttacctcaagcagttatccgcgcgccacttggtacgaattgcaacgccgacgtggatcgcggcgtgggttcaccagcggcgagatgcactgaatctgaagatcttttcaactactgtaccatcaggatcttcttcagtcgttctgacagagcacattgaagggcgtttttttctcgaattctcacgtgacaaactgctaacacacctacatcaaagttgttgtccaatgtaccagctttaattttgttataaagacctcgatcaaacatccactagatcctacgcaaatcgatctcaaagttcatccaagttcaccgacagtcaagtttcagtattggagttgactaacagtccaacttcatgtccatttttctcccatttccatgtagctctagggctagatcacttaatcaatcttgaactactaacatagctctacaagtttgttgtaatgacctgtggcaaaacctccatggattaacagatacaaggtcccaaagtcagcccaatcacactgtttttcagagttaagccatatggtgcccttgagactttttgcaattaactcc

SEQ ID NO: 69310 - DNA, 347 bp, Zea Mays
ataaaagtctaggggtcacggtgtaaattgttccaagacacagtttacccacgccgtggaccgcgggttgaatctaataaactctagggactcttttgaaagacgaccaaggccgaaggggtatcgcatgatctcagccgctcgatctgattctatggcctggattagatctagcccaatccaaaccggtacgcaggcacagccgttagatcgaggattgatggcgtagatttaatgtatcgtgcattaaatcggaaccgcacgatctagatcgacgactcagatcaattcacgcgaaggggttaacacattctaatcgtagccatccattaaaagatcgacgatcc

SEQ ID NO: 69311 - DNA, 737 bp, Zea Mays
cacgaggcagttatctttgtgccttttctcatttggggattggccctgccagtttctcccttctttcgtggtcttctcgatttttattctctgaaccttactcatctgaatcccaaatatgtgcttcaaattgccatgtttgtacatctttgcgaagcttttcttggacttcttccacactttgcgctttggaaatacctttactattgtcggcccgagatggctggagggcagcatcagcttgttgtagtgctagcttggaacttcaccgaagcaggaaagctgagtatctcgatattccattgaaatacaacattaagggatggcgcttcgagtggtttactatggaaaatcataacaagtcacttcccgcttgatcagggagacaacccgatgtccgaacgcctagctggatagagattcccacagattcagaacttgctaagtctagggtgttgcttgtagagatatgtgcgttgagggacaaagcttgactactgaagctgttgttgtcgactttgttttcaagaatatttagcctttgaaagatagagtctaacttgtttatttgtaaattggtgttaatgaccccactcgaattactaataagcgaatatctgaggaggacatgttgagtcgagttgattcgatgttgaaaggcaaggtttcgaatgctggttctccccttttgtattctgcctggagtcttcccatgcaatggcccttttcagagttca

SEQ ID NO: 69312 - DNA, 729 bp, Zea Mays
gacaaggtgagaaaatgaatgtcagtgtttgtgacctgaccgcgcaccataggttcccagtgaagcttttggataggacagcgtcgttaatcgtgacgcgatggttcgtgcaagggcacgccggaatcactcacagagttatataggttcgggccgcttagaattacgtaataccatacttccttcagttgtggtttgctattgatatctagagtaaaggattataatgtgagggttgtggatgaggacggccagagtggtccgtgatgagatgagatggtagggggtctccctcggccttatatacacgaccagagagagttatcccattacaagttgtgattactatctacttgtttatctccttctttgtcgcagattgtatccctgcatattcagagtcttcatcgcctagctgcccgagttatcgctgaatgcatagcccttcggttgcttgtaactgcatcacctgacacattcgtgcttcgacgacacttaactcgaacgtcggtcttcatcagcttggatcacactcgcctgagttggctacatcctgctgacccatcccataggacgactcagtaggaagcccgtcatgcgacctatgatatgtttcagtgtccatgaggacccatgagacatctatcccccacaagccacctaggctcaagccaacttttgagagtagttgcctcgagactctgaaaaagaattatgtcctttgtttct

SEQ ID NO: 69313 - DNA, 597 bp, Zea Mays
gctttacccgtgttttaacatgttttgcaaatcttcggtaagccatcttatgaaggaaaggaatcatttcttctaaagagaatgtgacgtttaagagaaggggatgagggacaaattagataacttaaaaatctacttgttcaactaagatctctagttttacctaaccaaaacctaaacaagagagtaatatatctaaatgtgcaactacagttttgttatgtgtgttgctaactcaactgtaaaaaaagttatgtaatctaggttccaatcctattactagcctagcaagctaagcaagaaacgtaagcatacaatctagatgaacagtaaataaagtacataaacataattgaaagagatgaaaactttcgtcgatgactttgggtttttatcgaagtatcgagaagctcatgctcccctagccctcattgataccccttgaaaggatgccctcacaagggtcaagctctaagtcggataactccgtcaatagctataggtcgtgtttggttcggtttctgggttgctcctgtccgccagaagccaattgtggttgccaaatggcaagattctggcccagcttcttgggaaagc

SEQ ID NO: 69314 - DNA, 360 bp, Zea Mays
ttaaaacactaaagctaattggatgaaggaggagcaatggaaaatcgtaccttaaaatttgaataaaacaagttgccggtaatatgttgtcttctatagttactaatgtccctttcaagattcgggaatccgatactcttggccagggtattcacaatttttgctctggcgcggtcaggaatgcatcccaagatttcttcgtctatgccgccgaagagaacagatctaggctggtaaccaccagacacaacaaattctttcaattttgatatatcctcttcagaaagttgttggcctcgcaggtgccgtaagtcgaagcttctattttctgaagaggcttctttagtcttattctctttt

SEQ ID NO: 69315 - DNA, 392 bp, Zea Mays
ataatcaagagcttcagaaggcgcttcgggagtaggagtggcagctttttcaggcagaatttgttctacagcttctttttctgctgccttttctccggtttccaagtatttctccttggcgggctctgaaggcctagcttcggtgtcggcctggctctttgtagcttcgacttcggtcagctttgtctcagtctgcgtttttgaagcctcggtagttttccctagagtagagcttgaagtttttatcgtctccagcacatctagtacactggccatccttttcctcttgggggtcgttgtaagacctttttgtgccttcggcactgtcacttctgccgaagggcttagaacttctaatattttcgtcccttcgactcttgtctcttcaatat

SEQ ID NO: 69316 - DNA, 381 bp, Zea Mays
gtttatgcatgtgtaaattgtgtttatgggtttctagggctccatagagtgtatctagttatgtgaatctagctacattgcatcaatcatcaaaatcttcagcgggtcgttttctatgagatgaataactaaattgatcatttgtgcatctagattgtttgatcttgtgtttcactcatcaaagtgtggaggaggtgttgttgagcttctcaagatgtgggagaagttggacccgcctctccttcccttggtcgccttcttcttgatttctcctcttaactgcttgttgctagggaaagagggttccacaatatacaatcacaagcagcttgtggattcgtaaaccttcctctacatgatcttctttctagacatgtcctc

SEQ ID NO: 69317 - DNA, 774 bp, Zea Mays
gagattaggacacaaccctaggaaccaagtgctatcgggccacaaatgttgcatgagagcaggcaaatgacatgtcatgcctagttgtaggcctcgtgaaatgaggtcacatgtcttgagatgacctaggatcgaccctagccataactatgaacttgatgatgtcttgccaccatggttctgcaactatcgctctagttttaggtgatggggccgtagaggagggcctccacaacatctagaggtccaacgacgacaacaacgctatagctgaggcacctctattcccaccatgatgtccactgcagagattagacacaaagcttggaggctgcctttgcgaggctttagagtgaggttggaggtaagggtgaaaacggccggtaacggtcggaaaaaacctctcaccgttttcacccgcataattttttattcggtcggaatcggtaaacgggaaagtcggaaacagataacggcttgtaaattccggtatatcgaaaacggataaatccgagcaaaatagctcgaaattgattgggaaacggtaactataatcggaaaagctcacaataaacaaatcctaaccacacagatgttcattcacatccacatacaagtctcattcacaaaagtacacaaaacacaatcttgtccacatataattggtcatacactcatacatgtctactcttaaattttaacacacaacacataagtcttaaaacacgattgttcattcacattcacatacaagtctcaaccacacaaatatac

SEQ ID NO: 69318 - DNA, 483 bp, Zea Mays
tcaacgcttatataggcttgtaccaacacatatatacattgctaaagggggttattttgtagtgggtcattttgtagctgggtaaactctatccttcaggggctatatgttcttgaaaacaaagtcagcgaccacagcctcagtagttaggcattttcctttcagcgaacatttctcggcaagcagcaccctggactcggttagctctgaacctgtgggggactctgtccagctgggcatacggacatcgggctgtgtccccgatcgaggagggagggacttgttgtggttctctatggtaaaccactcaaggcgccatcctttaatatgttgtccttcagggggatatcaagatactctattttcctgccccgatgaagctttaagctggcaccaccaacatgttgatgctgtcctccggccatcccaggccgacagtggtagagatatttctagagcccgaaatgaggaagaattccaagg

SEQ ID NO: 69319 - DNA, 347 bp, Zea Mays
taactatgttagtctaagtgttagggatcatctcaaaggtagtcaaaaagaagtgaagtagtttggctcaaaaaagccaaacttgggccaagttaggctttaccgaacatgttcggtgctagcctggtcaactaaatgctcttgggttggctaaaaatcatcggatagttggtgtgcaccggacatgtccgatgtgccagacggccgatggctttcgagacgacgcaacagttggctcgataggcatatcagcacgctaacgataggaggtgagttgccggactgtccgatacgctaccgcctaccgatagtccggtagccatccaaaatggaaggcagccaatcac

SEQ ID NO: 69320 - DNA, 613 bp, Zea Mays
tccccaaacagaagacccacccactttcgaatgtaccgtttgcacgtgtagttttgaagacatccctcgaaacgtcccatcgggttttaccccctggaggctgaagacatcacgaaagacggcgatgtcctaggcatctcagccaaagatcaactcaaattacgagcacttcatataaaaaaacaatcacctacaaaaacaaatggagatacttgtagccaagaggcagcgaatcaacatgtaggccagagtaagacaaatgatcctagatgacgagcaaaaagctagagagctagagcaagaaattgctaacatgcagcgcgaagaccctcgccaccggtagccggtcggcacagctaaccaaaacttacaccatttcgcaccagttgccttccaagggcttaactacctatacgagcgaagccctctcacactgcagctctaggcctctccctggccaccgaattacatagcaagcacttatccaaagtacaatggtaacacagatccaacccagtacatgatgagctaccaggtcacagttgcgtcatctgggggacgacaccaccatggactggtcattcatcatagccctcgagggcctatctctaac

SEQ ID NO: 69321 - DNA, 436 bp, Zea Mays
agagagggcagcaggttgtgcgcggtcggcgtctgtgcctgggcagccggaggttgaagaaggacggcagatcgttgatctcatcttcaacggtcacgattagatggatggttaagagtgtgggagccatagatattagatggacggcttagatcgaatcctggcgtaccccttcgagtcattaaattagggccgtgaattccggatacgacggctagggttgagcgcggaagtgtaactcgcctggatctaatctggcgcgtctttttcggttcgggcggccaggacttcgcgatacctcttcgcgactgcagttttgcatatgaaccctcatcctttacgtaaatagaacccgcggtccgatgagcatggctgtgggttagctctgaatcttggaacaattatgaattagcccccaaactcctgagtattaatg

SEQ ID NO: 69322 - DNA, 872 bp, Zea Mays
atcaattgatgcgtttgccattctgatttcatcgagagtaccctttagggctggatcagtattagggttgtatggttctggaggaggagagagttcagccacaccaaaatataagtttttgtcagactcgaagctaaaataattacgaagctaaaacatgacaaatgtacctatacgcattttgcgctcagcggtttcttgagcttttctcacttcttctgaggcaagatgatattcttcttcgctttgtcagataccttcgtcggctatctcttaaccattgttcaaccaaacttcggaataaaatttcccgctaagggcagtagcttcggctgaaggcactttgatgttagtcgttgaaactgagaagtctggctaaattacagcattcgcatgttcacaaccagctttttcaagcaaagatactgctccccgagcaccgacacaggcacaaaaatccccctgctagtgagaacttcgtcaaatgcctcgatttcgccctaaatccatttgatcacaccctcaggatcaccacgaatgacattccactcagccgagaacacaccaacactagtaaaagcatttttagcttgtctgagcactgcatagcaatgttatagcattcctatttcacctgtcgaagctctttaacattcttttgaaccctcgatcgctcggtgtcagatatctcgcgctacgattgctccacgttgaaattttcagtaacttcatcaagcttctttttcagttctgttactttagatcagctataggttttgcatctgcttctttttctttctcaagtttggtcaaattagcttcacttgcctttaacctttgtactaaagaaagtaggattttatctttctcaa

SEQ ID NO: 69323 - DNA, 730 bp, Zea Mays
gtggaatttgccaaagggggagatttaggtttacaaaacaaaagactctttgttgtaggaaaattttcaaaaccttaaaaaagagtttgatttgcaaaacaaaagcaagtggtggctcatatgttccaatatgttaaaactcccaaaatcctagatccaacttagttctgaaattcaatctgcatcttatgaacctatgttgaatagcaaacaagttagcatcaatatttgttttggttgtgttggcatcaatcaccaaaaaggggagactagaaggaaaatgttctatatgccatttctagcttggttttggtgattaatgaccaacacaaccttgagatctaactagtttactatgtgtgtagttgcatgttcataaatgccaaattatggaattcaactcaacatgtagcttaaaaagaggcaaaataggccatattttggataaggtaagctatgactagttgacaagtttggataagttctaactgcccttaggaatgtgtttagcaccttagaagcttttggaagtgttgagcactatttgtcgctctgggcacagccggacggaccgaccctgaggactggacggtccgtccataggcgcagacagtccgcgaatagatcgaatcaggcgcaactaatccattttctgcatgagtttgtccctctgaacccacggttaatgttgggagacgtctaggaacgggtccagacctccccctatata

SEQ ID NO: 69324 - DNA, 647 bp, Zea Mays
agtcaattcatcaaagtcattccagcacttggaccttttctttgagtgcgagttgcttccaccagcatcaggatcagggactaactctggcaggcttgtggagcattgccagtccctactgcagagccagcgacagtatcgatatgaataggatctccatgggtctcattctcaccgaaaccaatgaagaacctagcatcctcaacctcattatagtcctcgagcctgcggtcctcctcctctgcagccgcgtcaaggtccatgagcctgacggctacaacggacacaagcctgacggctaggaggtttaacggctacaacgtacagtcggctccgtctacctcaacggctacaaggttcaaagcaacaaaatggaattaaatgtacatctaactatccacacgattacaagaattaaatggctaaaattaaacatacctttccaagccggagcaccaaagacgacggaacggagccgaggtccaaggagcagtcgagcagagcgaccagcaacagcaagcaaggaccagctgagcaccagagaaagtcggacatccggacaagttagaaggaggacgagaatgggaggaaaatgaaaacaaaacaaaaatatagatgtccaagcagccagtaggggcactactgca

SEQ ID NO: 69325 - DNA, 727 bp, Zea Mays
cattattaaatcgatgtatttttttgcttaaatgttacgtaaagaaggatgtacgagtccggccactcaaactgtaccggatatgtctactccagcatcccagcatgagacgcagttgacagacacacaggtacatgaattactattaatacaacaacatattcgtgtactattacaaagttgccctgatgaagttgacattgatccactggttcatacaattataacgaaacagaccaaaacacctacaaccccagtggtaatgtttttttattacttgtattttccttgaaggtttgtattcatcgttttctttaaataacatataaccattatatttttttcagggtcaacatggtgacgctggcaagaacatgccgaccaacacaaacgtcactcctcaagcaacaccagaatgctcattcaacataccacatacagaatcttgctcgccgatatttgatgcgacgccgcaaataaatatatgattacaccccctcgttgtttttctatataattattagtagtttactaaacatctaatccatttataccataattgttagtctcccggcagtgtccacccggcggcacaaacaaatctccccgacagtggcccatgttttgatcagactccatctgaacatgtcagctcagtaatatacattttaattataattgccaaaactatgcagagattgaaatctatatttcatatacctttttt

SEQ ID NO: 69326 - DNA, 452 bp, Zea Mays
aaaacgctagggcgccttttgagttatatgactactcattgtagtatgcagggcaatgggtgaccagcttgagggcgatgaggaagagcacatgaagtaccgagatatggttgtggattacattgtggtatgtgggataactttttgtaattggtgaactgtagttgtcctcatgatgtcatgaattagaggagggctttagattttaattcaacatgctaaaattgttggtgctccatgaaggcattggactatctatgcttttctaatccttcttgtgcacatctgcagaaacaccgtgaggagtttgagccatttatcgaggatgaagttccgtttgaagaatattgcaactctatgctaaaggatgggacttgggctggccacatggagctgcaagccgcttctctgctgacaagaagaaatatatgcattcacatggtgagttagcg

SEQ ID NO: 69327 - DNA, 301 bp, Zea Mays
agggaaagagacagattggctttaattaaggccatattcaacccaaagaacgcataatatcagtaaagactttgtgaaatcgcaaaacgttgggtaatggggtctcgacgccaacacgccatgttctctcatgtactcccatccattagcagcaacatagacaacaacagtgatgccaaactaacagggtcgtatggaagggaagataccactgccacatctccgcgaggaaggaggcagcaagcgcagcaatagaaccaatgagaaagcagcaagtacgcaacaccatatatggctaacc

SEQ ID NO: 69328 - DNA, 1371 bp, Zea Mays
ggttaaccttggagtaggataactcttgatctgtgagcttttggcttggggttgctgtgtcaagattgtagagttaagttttgtgagcatatttggttagccttggttgacctgttgttgtgtcaagaaataaagggggctgaacagagaaggttctgtcaagtaatgaagttcacgttattagaagaaaaatctacagaagactttttggtcactgccgtgtttcacttttgtgtaaaggaagagatatggatgaggtgaattgcaggggcggtccagactttaaccagtactgaaatatcccaggtgaactgaaagacatttattctggcaactttatctgttgtgctcgatgggggtaacaacaataaaatctaccctattcctgccttgctttgttcatgcgaccggcgtggatgcttggaatggagccacatactcgcgctcatgcaattgacagcctcacccagtttgacacctctatccaatctttgaactcagccatcgtatgaagcggcgctgtccatataaaagggtaaccgggggaaaataagaagagagaaaaggtagaatccttacccttgtagtaagtcgttgtgggtgacttcaataccctattgctgccttcattttcccccaagctataccctgaaaacactctagtctctagccgtgtagtttcgcgtgtctggtgaccacgtcatcaaagtctcagcctcgcgtggccaggcgtacatggtacggttctgcgcccctgatttagcgttctattgtttacgtttgttgctgaagctcatcgtggtggtcgtttgatcattgccgacctaaatctctcggaacgagagctcgacgccgcatattagccccatgaactgcccctgtgtcaacttatagaagtttggttagtctgacgctatctaacgtcagcatcgtgcctgacgtaacctactagtgctttccgttgcccttgatttggattctttcgtgctaatcattcatggacgggcgccgtggacatggaacctcgctatgtggggggggggggaggacgtcgttgtagggttcataagtagaattcatgcctgagataatttgttttaaggtttgggtaggtccaacagatacttgcgaatgtgcttgagctccccctcgccgttaccgaggcccgacttacctagagaaccagaaactagataatagacatatttaaaaccttaacttttgatactaatttagggttaaatcaaacttgagccatacttaatgttaaactataaattggccaactagaacttgaagaattctctaatttttagtaagcttattatgatccctttagatagagattatactacctagagtcatgagtat

SEQ ID NO: 69329 - DNA, 632 bp, Zea Mays
gagtttacgcgctagaatcgtgtcccgaccttcaccggcgatggcgccaccgcgctggtcgtcggcggcaccggactcaggtcggtgggaggttggttcgacctcggccgttggatgagaggctcacggcctagattagatgagaaggagatgaagggataaccctagatccgtaaacggacaatgctgattaaatgtaggataccggtttgggtgaagcgatctagcgcgtccgatcgccatcgggcggaccagaaccgtcccaccactttaaaggccgccaccgttggatttggatccgatggccacgagttcgtaccggttcatccgcggcaggttctaatcctggcctctggatttagatctgacggccagaatggcaccatacctcttcggcctggtattcttactaaagagaccctactatttttagaaatgaacccgtggtccattctgactattcgctgtgtctagggattcttctgcgctagcccctgatctttctgaaaatagacgcccagttcagaactgattcaaaatgaataaatgaatttgttaatacattttgtatacaaaaacaattgctagaatttgttaaatccctagaaaattcatacttactccaaattaat

SEQ ID NO: 69330 - DNA, 681 bp, Zea Mays
cagaaaacaagagatgagacgatcgagaggtcaaacgacgtgaaaacggcgtttgaacgataaaaagtgccataggaggtttggaattcgaattgaggcacgaaatgacatggaattgagccgatacttcacgaataggtttatataggtgaatatgagtgaagtgtgtgtttggtttgaatttaggcgaagaaaatgagatttgggcactcagctcggaaaagatcgctcaaaacggggaatttggtgaaattgaagcctagaatatcggattggcgtgaaatttggcgaatatgttactggagatgttgtgaaggtgcctgaaaaatttggtttcaattggagcacttttggctagtttgggcatttcaccgaacacgtggtgtgcaaggatttagggttttagggaaatggctatttgaggtgtgaaaaccctcccgaaggagctaggaacctgcaggaatgttcaaggcacacagagacacacataccacaacttggtttcataggaattcaaagagatttgagatttgcgcaaaaggtgggaagaaggggcaccactgggctgaatcagagagaagagaggggggtgaaggcacagctgctcaccagagggagaagggcagagcaggcacagtgtcgccggaggatcgtcgtcggggaggggagattgccggcgag

SEQ ID NO: 69331 - DNA, 551 bp, Zea Mays
cgggtgccagtacagctgcagaagcatcaaacatcaaacgaaagctgttggcgtccatctggtcgttaaacacctgtgattaaccgtctaacggtgtttttgtcgagacgtggacggtctacggccctaggacggatggtccgtaacttggaagcggctccttctttacgtacgtccgcgatgacgtagatggtcgtcttcttcgtagcagatctagatctcgcctcccggagggacctcgtcgaaaggagagatcctagggtgtgtcttggagtcggtatgtcacacaatacgtttctagttgacgtagagtcgaagagagatgaagatttgaggtagagtaagcctaaactagtgttactcataatgcagaaggtaaaaatgataagtagaattccaaaactaatttcgttacaagtcgattctcaaactaaatccgtagagatcgctaacaaatttcgtaagaaacagagaactataactacttttatggatgtatggactgtctgtaccgacattgcagaccgtctagaccgtggacagtccagcct

SEQ ID NO: 69332 - DNA, 349 bp, Zea Mays
tttggatataccccctgctattgtcaaccttttgcaggagtatgctgatgtttttccaacggacttaccaccgggtcttcctccgctccgtggcattgagcatcagatcgatctcatccccgacgcttctcttccgaactgcaccccgtaccgtacaaatccagatgagacgaaggagatccagcgccaggtgcagacgctgcttgataaaggttacattcgtgagtctcttagcccttgctcggttcctgttttactcgttccaaagaaagatgtgggtcatggcgtatgtgtgtagattgtcgtgctattaataacatcacagttcgttatcgatatcctattccac

SEQ ID NO: 69333 - DNA, 682 bp, Zea Mays
gccatttcgtgcaagaagcacatattatccgaagtggcattgaccagcgcagcgatagcctcggccaaagtcgatggtactggtggcgggttacgagtatcctccctaccgcgggaagtctctgcaccatcatgtgcgcgagtccgtgatggcatctgaggcaaagaaacatttggaaaatataacatgccagcatacaccatcatattacattaccaaaatgtaataattatacagactccattgtacaacttgacttcattacttattttacataagtataacatctaaactatattattctagtcttcgtcatccttggttgcttcatttcctgctgcaggagatcgttcgtcagcaaggttcatggaaggagggggcctaaaaaggtccaactccccatcaagtccttcatttgttgttcccgatggtccggctcccattgcagcaacatcggaaggcacgttcgggtgcagtcgagcatacaatacatgtacttcttcatgtaaagtattacagtacacttgcaggctgtcaagggccgcactaagctctgccacacgagctcgagcttttgctttgcagtcctaagcgatcgaacgcgagttgacggcacaatcaatggccgaatcccgttctgaaatctcatattgcaagcggttgacatcagctgacaatttag

SEQ ID NO: 69334 - DNA, 335 bp, Zea Mays
cgcgaaaagcgtataagtattattttttggtttttagcttctgcatttgtttttgtggcttcggattgattaatatttcctgcttcagctgaattatctccgccaccggaaccgttcgatcccctagctgatccagaaatgaaggaggcgctggacattataaacatggctgaatccattgtcgacgaagtcgtcaacaaattgctgaacgaagttgcagagaaagtccttaaagagcaatagattttattgtaataaacattttgaaaagcttgatgtatataacaaatgaaggaagattaggtttctactataacaaaactatgtaatatttg

SEQ ID NO: 69335 - DNA, 1440 bp, Zea Mays
cccatctccattcgtcccgagcgtgtttgcttgctacctgccaggcagcttttatatccaggcaggccatcaaaatcctacacgagaatcgttgcctgggctaggcaagttttcagtccttgcgcacaccagcagcagtgatgattattgcagttcggtatcaaatgtcaatccacattttcgtggtgccatgcaactccagagtttcctgattatttgattttcgcgcatttccaggtagccggaagtatctttgtagattgatgtggtgctaagcctactgcacgatctatcgcaatgctaaataatccataagccaatgcttttcttggtgtgctgaataatctactgatggtgatggttgtgctgaataaatgtatatcccttcatccttagtatgcatctgatatctgagcttcaaccactgatggcgctatcctagtccaatttttcttcaatggtcaagattattcctcctttcccatctaaatttgacaaatgaccagagcagcatctgagttggagggatagaaaaatctcagcgaaggaaggcttaacagccatggcttacccccctccctcttcattcattttgtcgttctagtcggttctctgattcaactgttgtatattatttatctttaattggctttatttatttatttatcctactggcgcaaaggcctgcctgcttgctttgggccgttcagtgggtgagatattgttctttgttttggactcttttcagatgcggatatatgttggcgggttcagggtgtgggttttccagctggggtccgagatttcagttcccggggggtcgcccgaaaggtgatacaccatacagaacctgtgctcaccgcgacctgaccacgtcaattagggatcgagcggcggtctccaactccggcccacaattcgtcgcacaccgaccacccttctcgctcagctatgctccgagaacgtgcagctacgaagatcgcactcccccacttttcgtggactaagtgccgatgaacagcaccacctcaatctcaatttatttcctttgttccttaggcattaatttgtacgagagatttcttgttctgtgacagtttagagagaattgacttcctgatctaatgttgtttgggccattctgaagcgatgggaaatgctagatgtgaaggctcaatcagggatcttgttccctacctataacctgaaacacaacatgcaatgaacaaactttatttctgaaaacaattaagttacaacatgcaacgcggggccggatccatccgccagtttccaatcggacggtcacgatccaatgccacgaaacggtattccgccaccgatcccagccgttggctacgcatccaacgaccctgattcaataggcagcacttaacctaatctcagccgtgcgctaggaaatcgacggcgcccgccaac

SEQ ID NO: 69336 - DNA, 346 bp, Zea Mays
cagaagttgccagaagccgaaacaaacaggcccatagttgttttggtgcttgataaccatcacaaagatttgaactaactagctaactagtttgtgggatgacatatccaaaagaatatagtcaatataaatgaaaaccgtagtaaacacacaagcatttgctagttttaactttagtcgcaaatactcaccagtacatacacgtctgtctatccgcccccaacaaaacacgcacgggactgggcacgttctttttccgaaacatggtaactgaccgtgtgtacaaaaggccttcccatttgtttacagaaaatgactcgatttccttaccaactccgcgtgcacc

SEQ ID NO: 69337 - DNA, 892 bp, Zea Mays
aaattttacaaagtctttggccctttcatgttgaggcataaattttgtttggcttgaattccaactccaatttttaggatttgattcgatgagaaaacctgatttgctaaaattataataaagtatttttaaaaaaaatagttggacatgctaattatatccttgtcgttattccaatataaatatgtttatttggatttattcatcggtgtggacttattttataatgatataatggatcactaaatattttttttctaaaaaaatgcgtactctatttgtgttaatgttatctttgaaattgtcttaatatttggagtatatatatgtatacgttaatggaatatgtgtaagattgaaaaaaaaacaaaacaaaacaatatgcgttcagcccatttatgattcaagctcatccgattgcctccctctctcttacatgtgggccttctctccttttcagtatctttttattccttgtggggcccgcgtgtaagagctccttcttctccaaatcatctgctcgcgcgtacgtatcgctgccagccagccgcgcacacagcactcgcacttgcactgctgtgctgcactgcatccacatccgtgcttgtcacgccgcagccggacgtctctctccttccctccattaattctggcgtttcacttctctattgcactgtaattgatggcgagccgccgacattaatggatttcaagagacaaccgtttgtgcaacatcaatatcgttaatttgctcgtaaatcttctccctgctcggcctataaagccactcctcgttgtgtagttctcattgccccgctcactctctcatgctgctcatctgcttgcctctctccgagcgtcacctccactgtccgcgcgtgcagttcgccgc

SEQ ID NO: 69338 - DNA, 970 bp, Zea Mays
ggaggaatcatagcgacactcttgacatggactttgaatctaaccatatccttagtatctaaagataggatatccacttcttcgacagcccctatagtagaacctaattcacatatagcctgataattttgcagctcctctggcacattttcggccacaacccacactgcatgcagtttagatttaggtttggcttgagaactccaatgtgaaacagaaattttcgctcccgacattttcattttgagttcagggaaattaatcatttcatcaagcttctcttgagaaggaaactgcatgaggaacccgacatgacacttggtggctttccaagtcttgccccagggaaagtgaaacccaaagtctttctcaagatcttcagcagaaatcaaaccctccataacagtcaccaaactgatgaaacttcttttaggttttctggacaagggtttcgcaaaatgggaagagtaaaaccctaatccatcagccgccatacccacaataggcatacaaggtttgttctgtttaggcaacacacatcgggcagtcatgtgggtttctttgtgacaaatgtcacaccacatggaccgaaagcaatcacgagcatggtggccatcaaccccacatttttgacaaaaaggacgacgcacaacctcaacctcttttttcagagccgcgggaggggttttgaggatacctgtgtgacctccctcgccagcagacgaagcgccaatgtcttccttgacgtcagattttcctagaatcggcttcaatctccagctaggattccagatcttgttccacgtttgggaaccttgaggattctctttctgattccaccggtcccagttagggtttcgccccttcggatccatctttgacactgacaccgcgcgagacagcgccgaccactcctcgtccacaagcgggggatgaatcggggattcaaaccacccaccgcggaagctag

SEQ ID NO: 69339 - DNA, 424 bp, Zea Mays
tagagggttgccaggagtaagtaccccggtcttggagtggaccgggtgttacatctttctagccccccatctccgccactaatatcgccattaagggctccaccttctctgtcgtactcatcctctttgtgacccactacctccgccaccagcatctctataaagggctccactttctccacccccaaaagagcttaaaaaccaaaaacaattttataccaacaatgatttcctcgttcgatccaaagaagccgaaaaccgctggtacaacaaaaaatttgtcaaggattgcacggagccacaccacatggagtattgatttggttgatcacgagttgttagcaaaaaagcatgagatgcgtaccataaagatcaagaagccaactgggaaggattacaagaatgtccctaaatattatgtgcc

SEQ ID NO: 69340 - DNA, 827 bp, Zea Mays
tttttttagatattatacattgtagatagagatagatgtgggtgtttaagactcattccaaggatgcaagctatccaccctcgaaccgaacatatggggcgcattgttcccctcttaagggctccaaccattcatgttcaatctctcgacatatggagggttgagagattcacctacatatgactggacaagaagatctcctcgcatgagcagtgtaaaccaacagtcatccttgacagcgtaggaagcaatcaccacgccaccagagttcttcgtgtgagggttccacgtgttcgaatcgaaggtgtgtgcgacaatagttctagtggagttgattgtaggggctagatgatgagggcaatgccggtcgagttgcaggactaacgttactattggttctccatgcgaggaagaaagattggggcgtcaaagacgaagaagtttatcctctgcctagccaaatcaactaagaggtcataattgtggtatgacatcccctgcttcatatagttttattgtggttttggctcatcaatcatgccaacgtagagagagggtctagggtcacgtgtgattgttgtcgattcatgagagatatagcaattgttatgattgttgccaattcatgagaaaaatagagatttcctaatgtctcctctcgactcttatctcgctctgcgctcacatctaccatggcgactagggttctgttatgtagccgatgtcgcctatcctcaattttgtattagattcagacgaggcatcagttcatcctcaacgtcgctaaaagggaaatggccttaaaccattttctatattaattttgg

SEQ ID NO: 69341 - DNA, 1050 bp, Zea Mays
aaaacagttcatcaaggctaactttggagctctgtaggtcgagaaattcaaagaatttgccctgggacaatgtaacaaagttgtagagccattgtagaagaacaactttgctacaggtattaagtcttggagccatgaggaatttggagataatttgatccgaagatgggctgtcaggcgaattttaactgaatctggcgcactgttcatcggacttcataaaagatctcaccggtgataagaaagccaccgcggttggggatgggtctgcagccacgctaaagatcatccgcgacgtggcgttaaaacgctgcggtggcaccgcccggttaatcagcggtcaccggaccatcgccgtggctctgcccgtgcgggtaagctcgccagcgcggttacagctccgcaattctcatccaattccggccattggcctataaattgagctcgaatcctgtttcttcaccacatcacgcacacaagcacttgagcaatcgactcaatttcaccagaagaactcccatagtccacaaagtcattctgccctgttcttcgcactgccgtgaagaactcctccgtggccagcactcctcgggtcagtaactccccgattgcttcctgttgtagcttgtttatagcttcctattgctctcagagccgaccaattgaagtttgtcagagtcccatcacaggaacactcttctgctccgtagaacgctgccgcgacaccctctctatcgacccacttttctactcttgcccagtccaaattctagcgtgtacataatctctggtgaacccgtgaagcttcctcaagcttcaatttggtcatccatgtcgtcggttgttcggaacgtgtttacccatccgatcacccgcactgtcgccgtgaaccggttgattcaaagccccgctagtgaaattgattgaggggaaatgggcgggaggggtacaatctggtgtctgccacacgggagccccagccgttgcggtatccggccagcgtaggctcgccggagttcggcctgtgctgttcaccgtcgtggacctcgg

SEQ ID NO: 69342 - DNA, 496 bp, Zea Mays
gcggaacctgtggctcccattcaggacccagggccctcgctgccaaagtgattcgtcagggattttactggcccgcaataatttgcactgccaatcgagtcacaaggtcatgcgaagcatgccagaagttctcccctcgctcaggccaccctttgcaattcaccaagctcatcgcccatacatggccacttcaacgctgggggttggacatcgtcggaccactgccaatagctcaagggaatctcaagttcaccttcgtcgctgttgaatatttcaccaagtggattgaggctagggcagtctccacaataacatcgaagaccgcccaaaaattcttctagcaaaacattgtttgccgctttggagtcccgtccgaattcacaatcgacaacaacaaacagttcgacagccaagacttcaggcaattctgctgttccatcggcaccaagcctgtcttcgcctctgtgtaccacccacaatccaacggtgtggtcga

SEQ ID NO: 69343 - DNA, 633 bp, Zea Mays
tgtggccttttcttctgttgccctttcttcaatttccgaaggctttttctcagcgggctctgaaggcccagcttcgataccagcttggattactgtagcttcaatttcggtcggctttgtttcagcttcggtttgcgcttttgaagcctcggcaattttccttgaaggagtagagctcaaagtctttactgtttctaacacatctagtacatttgccatccttctcctcttggaagttgcggcagaacttttttgtgccttcagcactgttacttctgatgaagggcttaaaatttctatcgcttttgtttcttcaatatttggcttttcagctttatctttatcagtcttcaactcagctagctcggctgagggtaccttcgacattataaccggctcttcagtcttctgtgtgggaggaacgggttctcttggttcagcagctgaagaagcctccccgccaaactcaggcaccacgaccggttcaatatagcgtggccggtgggtaagtaccttcatctttttacttgtagccttcggcacaggttcggccgaggcggccacagcagtagctttcctcttcttcccttgcccctgcagcgggtagcggtagtcaggatagacgaagccaat

SEQ ID NO: 69344 - DNA, 673 bp, Zea Mays
cttcaccctataaagataaagctgtcaacgatcgagatcgggtgaatgtcacacatgaagaatttagcaacttcaccgcgacgaggtctggacactttaagagcgaccacgagatgaaataataataattggaacacaacatggatgttccatgacaagcaagatatcattatcaaggtgcaatagcgtagaacagggtaataaggctagttatcaaggggttctctcaagttttaggttcggattttggggagacatttgcaccgcgatagcatatgactagccatacatgttctttcttgcatatgcatccacccacatgccattaaattacttcaattgaatgtagaaactgcattctgacatggcttcttaattaaatgaactttcgtacatgttgatcaacctagctcctagatttgaagaccctacggtatcctaatcatgtgttatggattgtccaatgtgatatataggctaaaacaatctctaagggcttgatatggccgtctttattgggacctcctcattgcaaaagggctttaggatcgacgtggttgacaccacactaatcaccatgaaaatgcataatgatatcttcatttatcatgttttatgttgatggtataatatttagctcgtcttggttaattgatatcgatggttagcgttc

SEQ ID NO: 69345 - DNA, 667 bp, Zea Mays
gccacgtgaagccgaggtgttgccggggtggtcatcaaataagttcagtgccttgatcgatggaacttgggcgtgtctaggatatgatttgggggtttagtactactaatcgcggctgctcaatatggttgatggtgaactaaggatcactgggtaggttcctgcctttccctccccggttgctctttatataggcagagaaaagatcaaaggggttggatgcttgaacttgcagcaaggacagctatgaactctagatgcagtcgtggctcccccaaacagatccacgcaggttcacagagtatggtcacgcaggatgaagtttatccgtggccaaaagagagggcggtgaagataggatggcactgttctggatatttgcacaggtgatatttcagtgatgagcaaatctgaatacccctgccagcacaccatcccaatcttcatcctattccgatgttggtcacggcaaggagggtaaatatcaagggtagatatttcaatgcttctgaatcttcaacagataactgatccccccatcttcagctagctatttctctcattttctgagtaagacagattaatcactgttaataaaacttgtttagtaatccaaggcctaccaattttctacagatttcatagacccaaacctcttagattagaa

SEQ ID NO: 69346 - DNA, 410 bp, Zea Mays
aaatcctacccccttaaaaataatctcgtcctcgagatttaggaagatctagggaaaaggtggggaaaatctatgtgaagctcttcctctctctcccacattgcttcatcttcaccgtggtgactccattgcactttacacatctttatcaccttattccttgtaactcgagtcaaagtatccaaaatcttgatcgggtattccgtgtaagtcaaatcaccctgaacactgagctcttccatcggtaactgttcctcagggacacggagacacttctttagttgagatacgtggaacacattatgcacatccgatagactagcaggtaactcgagttgatatgccatctccccaactcttctaaagatcaggaatggtccaatatagcgaggggacaatttgccctttac

SEQ ID NO: 69347 - DNA, 925 bp, Zea Mays
gcattcactcacagaaccaaggtcactttcatgaccattaatttttttgccaccaaggattgtggcctacagctcctcaccactatccctcaggtgcaagcaaagccaagagatcccaagggcatcttcagtggtcagaccataggaaggacgacaagagtggccccagaattatgggtcaatgtcgttcagtatgatgttgttcataaggctcgctaggacgacaaaggacatgggcaacatgactccaaaaccttggaggggccagacctaagcaggtttgccagtaagcaaaaaaatgggtccaggcccatgctcatgtatcaccatatgaattggggaccaatcgttaatatcgtttcacccaaagcctaacaagcgtacaagcatagtctcgtcgccatgacaagactcaaccccttgtccttccatgacctcctaaatacatcctctagtgatggctctgcatcaaagctagaaaacacccccaacaatccatccctccacagctcctatcgacaccaagggggacggtgcatcaactccgataaggggcacacctcattgaagaaaaacactctcccaagcaagaggtggagtacttgtgaaactgcattgagtagaacctaaggtggtatgagggaactatgggtgagaccgatgccacttatgttgcatgcctcaacgaccttcaacaacaagtcaaacgacactatcagcgccacgtcatcgaaatgggcacccattgccacccttcccctagtgacaacgacattgaaaggagcgatggatcatattatttttcataggccagctagaatgttgctaccgtggtagtgatgctaccgtcctaaagctagaaaacccctaggaaaaaggcacatacctcaagctccaggggttgatcgaacatgtggcacccaac

SEQ ID NO: 69348 - DNA, 469 bp, Zea Mays
ttttttgtgggggaaatgcaaaatacacgggcggccgctgcatgctgtattctaatggccagtaatcgcatccaaatcggcagcttcggcctttggatagactcgtcactcgtaggcatcagataattgtttttactcgcggcgtcgtcgatggtgtgtcgttcgtgatagcgtctggattatatgtgtggttaattatcttgcaactagtttacgtgggcctgcaagtcatcaccactgttgtcattttatttgacttttcgagattacaatgaatagttatgcatttcaaaaggaaaggtacagtagttcatttaatttgatacaataactgagatcgaaagatgtcagagcaattttatgcagtttactacgccggttcgtggtctctaaacttgtttggacgtgtcatccatgtccccaaattcttaaaacaaacttttagagaccctaaacctgtacagatccc

SEQ ID NO: 69349 - DNA, 369 bp, Zea Mays
gcgacaacgacgacctcccaaggcatgagtggtagagacagtggtgaccacaacgacggcatctgaagacgacgacctcctccgattcggcgcctctcgggcatcctccgacgacgaccacctccaatccgactccctcgaggccgtctctagcgatggactcacccgatctgtgtttatgcctttgatgatttttatacctattacctacacactttatgcatttcagtgaggattttttatgataataataacgacgcctctcatgtggcttgatttttacggtaaccacctagattcacgcacattttttacgggaatgtcaaacatgacatcacgctgaccattgtaacaatactgtgatttttt

SEQ ID NO: 69350 - DNA, 467 bp, Zea Mays
gacgaattgcttgcgccaataacctcttccctcttcgactgccaccgcgccaactccaaatcacgagccaccgtccccaaatcctataaattgagcacaccctcagctctgctatgtaattatgcacccaacacacccactcgtgcctccaattactcaccagagagcctcaatttgaaactttccccaattcagtccagagcaccccgctacgtgagcttgccgtggccagcgtgctacaggtccgttcatgccctccgctctcccattttagtacccttctgttctcctgatgctcctcgacccattcaattaagctagactgcgctagatcattgggaacacctctgttcatccatagttcgtgctgtcaccgtggacagtgtgattaagagctcagatcgtgcaattgatcgaggggaaacgattattaggtgttgaattaggagtcaaccaagttagagcac

SEQ ID NO: 69351 - DNA, 531 bp, Zea Mays
gttttgatgtactgctacgggtagaatttcctgaggtgcgcaatattctaggagtttcccacttcagttttgtccatctaggtaactcggtaggatcctagccaagtgacctctgcaatgatgaatggtccttcccatggtggtgacaatttgtgtctcccttctcccgtcagcacacggcggagcactaggtctcctattgcgaaggatcggtgccgtacagctttgtcgtgatagtgcctcagagtttgttggtgcctagcagattggatgacaacattcagacgttcttcctctaatatgtcaacatcttccagtttggttgcttctgtttcagttatactttcaaatgttagcttgggtgctccaaagatcaagttcgctagcaacactgcttttgatccatataccatgaagaacggagtgtttccatgcagggtaaggcttggttgggttcgcaggctccaaactacatacggtagttctctgatccatttccctgtaaacttttcgctctcatcgaatactttc

SEQ ID NO: 69352 - DNA, 549 bp, Zea Mays
ccacagcatcttcacagaagcacaagccaacaactgccatcagggcatcacttaacaaagacgatgaccagagcagcaagccagcaagcattaacaaacgagaaagaaaccaagaatagttcctatttttttactaaagaaccataaagaataccctgttgcgggtccaaacacggttcacgagtcctgattccccgcgataagccaaagcgtgagttttttcaagtgtccacacttatccaaaatgaaatacaaattcgcataggccgtgctactgtgctagcaagcaactgatcctagtcatacactgggcagcaggcagcgagcattccactccacgacgcaaccatccggcgccggtctccgttcgtcgtcccagtctccgcgccgtcccgtaacaatcacaacactgcaggtagtagctcagtttcagtggtcgccggcgagccactcgactcgagcgcacggccaaattgttggaccgaaatccggttcctccccaccgaacggctacgcatccgccatgctcgtcgccctcctctgcctcct

SEQ ID NO: 69353 - DNA, 455 bp, Zea Mays
tctaaagctttttaagtcaatcaaagacttggactttgcacatgaggtttataaaaggcttgaggattcttatgagggcacacctgcaataaaaatcaaagttgtataactttggagttatgtgcaaaattcaagatgtaagaagacgagagtgggcagaaaaatttccataggctcaatgtcattgtgaatgagctaagaaacatggggtacaagatgtatgatgaggacttttctcatagattgttgagatgtttgcctccaagctttgacacattagtcattatcgttttaagaggtggaatgaaaggagtaaccctgacccaagtactaggtgatgtggccactcaactactcaagacacatatcatgtggaaatagatggtggcaacaaagatgatgataagaaaaataagagtgtggcattcaaagccaccacatagttcaatgtcaag

SEQ ID NO: 69354 - DNA, 345 bp, Zea Mays
ctgatacttcgtcaataaaagactttctcctccacttcagagctgataaaaccgtatctcttcaaaacttattttgtgccttagcacaatttcactttttcgaagcattctccgaaggtcaacaatatgtccccttcttgtgccattgatgcaatatgacgtatgacgttatgttatgcaaaatgatgtgatgatgttatgctatgcgaaaatgatactttgtgccgaagacacacacacatccccacaatggaatacacaatctctttgtcgtttatttttttggcttcaccgcttatttttcggtgtatcagcgctgacttttcgctgtaagttctgcattcc

SEQ ID NO: 69355 - DNA, 536 bp, Zea Mays
cttcattcaaggacctgtaatcaatgcacatcctctttgtaccatctttcttctccacaaataacactagggctgcccaaggcgaggtacttggtctgatgtatcctttctctaacaactcatcaatctgcttcttgaattccaccaattctggtctggacactcgataggctctcttggaaataagggcggtgctaggtataagctctatggcaaattcaactttcctttcagggggcatgcctggtaactcctcgggaaacacatctgggaattttgatactatgttgataacttttgatggttaaatttcctcaatatgggcgatgacttggtgacaacttcctttccttggtccagacaagaccaactccactaacacttcctctcctgataaggacactaacttcaccattctcttgccacagctaagacttgcttgatatttggttagccaattcatccctaggatgatatctatagtcgcatcctggttacccataactattagatcagcgaggaactctatcccccca

SEQ ID NO: 69356 - DNA, 1419 bp, Zea Mays
tttaacttcttttcaaaaaaattgggtatcacaccgtagcagagccttcctcttcttcaacatagattcctggcagtctttttccatcgctgttgttacaacagcaccaatgttcttccataaggaaaaattttaaaatttcgagccaaataggatgtaaaataatcttcgcgggaggccaggggaatatggtctttttatgccactcaccctcggtcaccttcatcattcgcgaagatgattttagaggttaggagaagtcatgacctccccaggctcagcgcatgtctctgccaactcctcaacaaaacccttcgaggccctcgaaaccccagatgtctttgttatacctttcacctcaacaacttttctcttcctcgttgctgtaatcacaaccttcccctttgagcagcctttgtctgcccgggtcgccacctttttctttcctcattcatccccgacttcagcagagccctcctcaggatacgggccatagcgaaggccattcagctcaaacacatggttcaacctgacatttgaactctgtatatcccagcttcttgtcatctctgtccttgctgagtactttccaacaattctcattgcctccgcttctgcttccctgacgaaggtggccacatctcgcccctgcagctcaatagcgaaggcggggctcagcaccatcctgttctccaaaaagggcatcaggcgcagctttactgtacccaaatcccagtcatgcgcaagtggccataccccacacacaataaactcttccaccaagtcgcgaccgctgctcatcctagccgcgtgccaaagggcatctttgcctgaatcctcctttttcagcttaaactacgggaaagcgataaagcagtaagagcacaaaatagacgaaggcagcccaggaacacgatatagtagtaagggaaaaccctaaaccctaaaccaaaatcccaccagttaccccattattcttggtgcatggcacaatctccacaacttcacccgaagtcttaccagtcctcggcatgaaagagcaagtaccaaactgtgaaatcttgccactaatcacctttttctgccaatggaaacgataattcttggtaaagacctccatcgagggctccccgccgcacgaagtcactgcccacacaaacatcggcagtggcaccatggcattcggtgtaagttgatgaatccaaacttcgatgcgtcgcagcacttcgatgacaaaccaatgtgtgggcaagcgaagtccgacagtaaaaacgcttcaaaaacaactaacccccctacggctctcggacctcttcagctcccgagcgctccccacaccgtacccaaaataccctaaacgttgcatctcttgcacatgccctaagtaaatcctcaatgtcccaaactcaacagtatgcc

SEQ ID NO: 69357 - DNA, 346 bp, Zea Mays
ttcgacgaaccgaatgacaactggttgaaatgcattgaggctactagcgacgagttgcttggagcatataccagggccgaagatgatgctttgtcctcagcctttgggggtcggagcaagaaaagattaaacagagttttcgacgcgattggttttatgtatcctgattattgctatcccctgcaaaagcagggaaaaaagaggaaagatgccgcttcggccatttctactgtgccaaagggcatgaaaatcaaagttttgacccataggcccagatatattgaaacgactacaatgccgaaatttggtgaggagacatattctgctgccgaggcagaaccgactg

SEQ ID NO: 69358 - DNA, 553 bp, Zea Mays
ggtgtaccagccaaaatacttctacatgataaaaggcaacagagtactgctagggtaccattgatttcctgacctgaggtgttgagatctagcttgaggacaacacgatggatcgaggaggagaaaatcgtgctggtaggacgtctctgtagacggagcggcgtcgtgatgcaaatctaccgaagggatgagcaactggtggggcgacgtgatgccagcagtaaataatttcagagggcgggaatcaggcgcttgggcgcgggaagagtgagcgcacacgactagaatggcggcaacaactaaaaaacagagtatacgtgatttgaggcctaagcattggagatcaatattttttcgagccctaactgaaacaaaacattaactaatacgaattttagggactaattttagggctcagcgttggagttgctcttaggctggcgtaggatgtctagtctatatttcttcttatgattctcgccttgccaaaagaacctagaacgaaaaaaatcaattctctcgaaaacccctctagatacctcaaagaaagaac

SEQ ID NO: 69359 - DNA, 440 bp, Zea Mays
gttgaagatgatggccatggagtcgtcgtgtatcaacgttgcacccactacctggcgcgctagttgtctgtgtttgtgacccgaccgcgcaccacggagttacgcacgtgatgcttttgggtaggacgacgtcgttgattgcgactcgatggtacgtgcggaggcacgtcgtattgctcgtaggtttatacaagttcgggccactttgaattgcgtaacacactacttcctgttgtggctatgtattgatttatggagtatgaggattacaaatgaactttgtgatggctcggttgttgttgatgaggatggggtgagatgagatgattttgtaggggtccctcatcggccttatatacacgaccagaaagttatccctttacaagttgtgaccactaccttcacttatctctttctttgtcgcagcttgcagccctaca

SEQ ID NO: 69360 - DNA, 827 bp, Zea Mays
ttgtttttctgttgttggaattcaacagttgttatgattgcagaagtaaatgcagtgtgctggttttgaaacttttccctattttatgaggcatagagatcgccctaagatgagtgatcgtaagcatgtttatactaggtcgagtaggcgtgagcatgttgcaccgccttaagttattgccgacttaagccgattgctccgttagtagggtatagtggtcaccctaaattaagtaagcgtgagcatgttgcaccatcttaagtcactgccgacttaagtcgattgctccgttagtagggtatagtgatcaccctaagtcgagtaagcgtgagcatgttgcaccatcttaagtcactaccgacttaaggcgattgctccgttaatagtgtatagtggtcaccctaagttaagtaagcgtgagcatgttgcaccgtcttaagtcactgccgacttaagccgattgctctgttagtagggtatagtggtcaccctaagttaagtaagcgtgagcatgtggcacagtcttaagtcactgccgacttaagccgattgctccattagtagagtatagtggtcaccctaagttaagtaagcgtgagcatgttacaccgtcttaagtgactaccgatttaagccgattgctccgttagtagggtatagtggtcaccctaaattaagtaagcgtgagcatgttgcaccatcttaagtcactgccgacttaagccgattgctccgttagtagggtatagtggtcaccctaagtcgagtaagcgtgagcatgttgcaccatcttaagtcactgccgacttaagccgattgctccgtta

SEQ ID NO: 69361 - DNA, 469 bp, Zea Mays
gtttaagatccggagtttcatatatttctttttatagacaatagtgggtgattaggaaggcctgggtatatatgggtatagccaccttattatgtaggatatgagatgggttggttagggcaagaataacctggggtaagaaagtttatagtgagaagaactccgtgttggatggtaatgcatctgaagatcgagtttgacttctctccttccttgacgaggttgatcttctttggccttcaatctttggagttaccatttgagtttatagacatgtagatggacatgggtaggataggttttatgggatagttcaaactttcggatgcttttatgttgatttatacggattgtgcatgtaggtcaagtagtggtatatggccgagttaatatcagataccagttttggttaaaacatgtgtatagacgtagggtctaatctatttcaccaagattaactaacatgtta

SEQ ID NO: 69362 - DNA, 924 bp, Zea Mays
gcaagttgaacctagaagttgtttcttcaggtgctttaaattatatctcggtggagcccacattacaagagcaaatagtcagggcacagattgaagacaagggtgttcaggtcattaaggaaatgatcaagcagaaacagaaaaatacaaatgcttccggcaggacagcagaggaatcctatggtttggagatcgattggttgttcccaaggaccctgagctcagaaagaagatattggatgaagctcacatttcaaaattctccatgcaccccggcagtaataagatgtatcatgatctcagatccttatactggtggaccagaatgaagagggaaattgccaagtatatatcttaatgtaacacctgccagagaatcaaggccagtcatttgaaggtagcaggccctttgcaacaccttcccataccatcttggaaatgggaggacatctgtatggattttatcgtgggattgcccaacacctcccgataccatgattcaatttaggttattgtggataggttgaccaagacaactcatttcttgccggtacacaccaccacaggacggaaaagtatgcagaaatctacattgaccagataatttgtttgcatggaataccaaggactatagtatcggatagaggagcacccttcgtggcacgattttgggagcagttacaagaatcacttggaacccatgtaatacgaagctcagcataccatcctcaaacagatggccagacagaaagggtaaatcagattttggaagacatgttgagggcatgtgtgctacactatggaaaggattgggacaagtgtctttctttggcagaattttcttataataacagctaccagtccagtctaaaaatggcaccttttgaagccttgtatgggagaaggtgtaggaccccgctaaat

SEQ ID NO: 69363 - DNA, 880 bp, Zea Mays
cgaaccggctaccaaagacccagcggcatcggccgggccttcgcaggtggcggaataggggctagggcttttaggtgtaaacttttgtttttttgatactgaacctcggttgttgcgcaggttctgacgtttgggcatgcgcaagcaaccgctgctggcaatactgattttgtggcggcctcgactgtagtgcctgccaatgataatttatttggctctggatctgcgtgttttgagtctgatggtgagtctgggagttcgttttcctggacggaggagtcctcggataaaggcttggattatttttctgcgttagatgtggccgcagcggagtcttcgccgcgtgtggagggtgccggggatcttcctagtgcgagtactgagtataggcggcgaagggtggtgttgaaacacagtgtgggtgagttttcgcgaagtggtaggcgccgtcgtatggggatggagcgtggccgtctccgagtagaccgggttagtaaacgagaattgttgtcctcgccgattggggcgagcataggtgagggggatctgcgaaatctttttgagggtgaggaattgaggataatgttgttcaattacagggagatgagtatcatcccgaaggctgagccaatgtaatgtatgatgccctcgccgtgtgtatgtaactgtaatttgtattgtaatgtggcatgttggtcgtatttgcacgcctgtgctgatccggctgcacccgtgggcgacttttgtgcggagtatagattgacgtacttgtgctgttccggcggcacccttagacgacttttgcacggtgtgtctttttaataaaagacttcgattaacgcactttgttgtgctattccggctgcacccttaggcgact

SEQ ID NO: 69364 - DNA, 620 bp, Zea Mays
atagcgctgtgggagccaaagatgcagtcgcttgggttcctccgactgtatggccgggggttttctgggccagcggacggcgacatgaatctgaagcatatggcgtcccccatggaccggtcagggacgacgacgacgacgtcaacgacgatgagcgggtggccgtcgtacctgtcgtcatctcagctctccgggccgagatagcgaagaatggacacgggattctttctagcttagagtgtactgcgacgaatccattcttgattttgttctggtagtagaacaaaggaaattatctttgtatctacgaggtatttggtccaaatcaccacgattttgttgcattccttttggtggattggcttttccattggaatggatggtggagaagctgaaatccgttgatgttgtacgcaaaggtttttgcacgtccaccttttcaactcgtttcggatctgaacattcgaatctctagcgcaacttataatatgtttgaaataacccaagtttcttaaaaaacacgttgcttgcaaatagtcccttattatttcctcgcttcaacagacctcgttcggaacaaatacagtggaagggtggcttcacagttcggtaatcacgcg

SEQ ID NO: 69365 - DNA, 1106 bp, Zea Mays
cgtccacagccaccattaaaatctgaacagacaacacaaacacacaaacagagatgcacggttactactgggtattgggctactgctatcttccgggcgctgcagaggtaacaaagggaaagggaagggagactggaaataatcagagaagggagagcaagtgctaccttcagatgacgagctcatcttcaattcttgactagttgagtagctgacagacgccggagcactgacgccgctggacggctggagcacttggaggctggaccgctggagcagagacgtcggcaaggacagaggagaggagtagggttttctggcggctgggaaatgttctggcggctgggagggtttttgaaggggcggctactgtagatgggccaaaaaccagagggaagcccagtaccaaaagtccaaaactgcaacgaccaaaaacgaccagacagtgctcgaccagactactaatcgcccaggtcgacgattagtcggacgactaggacgactagaaaccctaatcacgtcgtcttcctaatcgcccacttctaggcgaccagcccgactaatcgcaattaatcgtgattagtcggacgacttgtaaacattaatatatatatatatactataatagatagaagttagaaactttgaatatagagtagagactagaattatgaaatatgaatattgaccagcatagtagcagactagcagtatgaattatgaaaatgcaaaatagaaatcaccagcaacagcaagtctacagcttacaggaccataaccaccaactatattagatgaaatgatcgccagtagcttcagcttcttctgcaacatccttctcatttcttgtggagtcttccatgcctgtataggaaccgagacaccttctttgcttggttgatgcaagtgttgaaggacttaatattcccaatgtcttccagcatcaaatctaagcaatgggcagcacatggtgatcaaaacaaatgatgaattctgtccataaggagcctccctgctgctttgaagtttgctccattgttagtgaccacttgaactacattttccctaccaattttgtcaatttgctgctctagcaaatctgccaa

SEQ ID NO: 69366 - DNA, 352 bp, Zea Mays
cacgcatcaggaagtggactcggatgtgtcttaatgcaagaaggctgagtcatagcttatgcttcaagacaactacaccggcatgaggagcactacccaactcatgatttggaattagctgcagttgttcatgcccttaagatatggcgtcattatctgctgggaaatacttgccatttatatacagatcataaaagtctgaaatatatctttacccattcagaactgaacatgaggcagagaagatggcttgagctgattaaagattatgatttagaaatccactatcacccaagaaaagccaatgtggtggcagatgcactgagtcgcaaggcttcctgtcattgtctta

SEQ ID NO: 69367 - DNA, 442 bp, Zea Mays
aaggcattaggtatgtcgagtgtaggatgcaaggtgcaccaaacgtgtttgttgccccgatttcagcccttcaagaggtaacgattggaatatgatatgggattacaaatagattcattggtcggccttagttggcatcccttcactccttacatttgagaacacctcttagggatagagaaacatacaaatatcacttgcatctggcggcaccttgcgacacttgcggaacaaattggattggttctactcttgttacccttggtgattgtcattacctagacagtctagaattcgtgggatcatgggaggccgttggagattatagtcggttatgatcatcattgtgtgtggggggcttgtgttcatctcccatgagaggttcccaaagagcaattatagtgaaatcgtgacttgttggagtacatgtttagtgtggttc

SEQ ID NO: 69368 - DNA, 703 bp, Zea Mays
cctgacccgaggcgaacctaaaccatgcctcaattgaaccaatcctgccctggattctcccacccacggcgacggcgaacaccgtatacaaatccaagtgttccggtcggttgagcgtggtctagctcaatgggttgagccgatgagcatcacaagcatgtgtgggtgttgaaacacggacaaggagagcgaagggcggacctggagatggtggtccacggcgcagtggctcacggtggtgcggatatttttagttgccccgacgttatctacccttcatgcgacatgaatctcccaggtgggcgtgaattgcaagacagatcaccggcgacgatgcactgaacctggcgatcttcgtcaggttactgtaccatgtgaattcccttcagtgcgcctgatagagcagattgagaagctccattctccatttttcatgtggagagctattgatccatctgcaccaaagttgtagctctataaaccagccttgattctgctatagcaaccataatcgaatactccctggatcctactcaaaatctcttccaaagttcatcctaggtcactgtgagtccaaattcagattcagagttgagtgacagcccgactttaattccatttatctccaatttctgtacaacaccaatgcttagtcacttaatcaaacttgtacccctaacatagctctacaagtttgctatat

SEQ ID NO: 69369 - DNA, 491 bp, Zea Mays
tttacgtagatgatgtggtaatcaaaacagagaactcggagaacttcatcgaagacttacagctggttttcaacagtctgagacggtatagatggaaggttaatcccgaaaagtgtgttttcggggtaccagcaggaaagttactcgggtttattgtcagccaccggggaatcgaggctaacccggataaaattgaagctatcatgaagatggaagcaccttgatcacaaaagaaggttcagcgacttactggatgtatggcagctctgagcagatttatatccagactgggggaaaaaggtttaccattttacaagctacttaagaaggtagataagtttcagtggacttcagaggcacaggaagctctagatgcactgaagaaattcttgacaacaccaccagtactgaagccaccccgacgagctacgtcaactcaaccagccgaagatctgctactgtatatctcttgcacgactcacgtggtaagc

SEQ ID NO: 69370 - DNA, 785 bp, Zea Mays
gttgcttggtttaaggccaattgaagtggctcatactggacgacaggtaaggctacagaggcatgggatgacatatatggggatgatactgatatcctcataccttcccaatctactagaactactcctacatctgaattatctattgttgctatatttgagttgtcatcacatcttgatagtgatattgtcacccagtttgactatgatttcaatcttctaaactggtggcagcggcacaagttgatatatcccatgctttttatacttgctaaagatgttctaactgtgtctgcttccactgtatcatcataatccacttttagtttagccggcacagtgcttgaagatcgacggcgatggctaactcttgatacggttgaagttctattctgcataaaggaatgagaacttgctgacttgcatagccagcacacagtggagaaagacaccaaagaacttgaagatgtttttgaagcaatgtacctagaagaaactagtggaggcaatgaatgaagaggtggaggatctagtggaactggtggaggccaagaaagaatatgtggaggatctggtggaagtggaactggtggagctggtggaactatgggtagatcttgaacagttgaggcatgatgaatgttgcatctgtcctattgttattgcttcttgattctgttgctattactactatgttgtaacttgtgatgaactattaaactcttgacttatattaaacatataggagctggttgtattcttttacttccttaggttttcttacg

SEQ ID NO: 69371 - DNA, 846 bp, Zea Mays
gttatcacccgcgatcgaaggtcttctaatgccgaagcacgatcatatggggcactgtattacgcccttcacgtcctccctctcactcgaatcatttttaacataaaaccattacttcatacatgagcccgaccactttttccaaaatgttggcacatgacacctcacatcagaccggtacacgaagctataacatctgaagttgttctggtactattccttcccagtggccctcgtttgataagacaactcgtgaatgttgcaaaaacaaacagcgtccagttccaacccctggcttctcatcgcccaaataaaaatttcgactttaattaaagcttcgggagtaagttgatgaaggtatatttcaaatcgatttaacacttcaaccaacattctatgcagaggagaccgaaggccaaccttcataaagctcttgaaaacaaccactttattaacttcaggaagaggaatagtgttctctcctccaaccctcacaatagatatatcatgaaaatatttacccttcattgctttaatctgtcccctcttaacggtggattttccaaacacaacatgacttggcctccatggccgatcttcggcatcattgttgtcacattctatatcaaaacactcgttgtcacttgagtctccagacaacccagctaacatctcatcggtaattttctcaacattggtcctctctatggcttcatagaaatcagcgagtgcaggatccacgcttttcttctattcggccattttggtgatgattgcaacacaaagccgaagcacaaaagcaattgcggtcgcagagttagaaagctaaaacgataaacccaaaac

SEQ ID NO: 69372 - DNA, 612 bp, Zea Mays
aaaagtttgtcgacgacttcgtcaacaacttcgttagcaatcttcattacatctaaagtccctttcattattggatcagcttcggggttgtatggctctggtgggggagaggggtcgattgtaataaatatatgatggtaaatttcgaaggtaaaaatgaacaacaaagcaaaaagtttcaaataaaaattacctataatcatggcgcgttcggtagcttgcttagcttcctcacgggcgtcgtgagattctttctcattctttttaatggcttcatcagccatctcacgaccacccttcatccacacatcggagtagaatttgccgcccaatgtagaagcctcagctaaagggtccttagtattgtcagctgagagaatagattctggctgggccacgaccttgacatgttcacacctagcattttctagaattgccgcaacccctcgggcaccggaaaaagcacaaaaatctccgtggtcgctaaggatctcatcaaaagcttcgcctttttcaccaatccattggataactccttcggggtcgccgcgaataaatttttgttctgaggaatacgcccccaccttcgcaaagctatcttttagcttcttc

SEQ ID NO: 69373 - DNA, 413 bp, Zea Mays
caaccgtggaaaggtgaatcacctggaggccgaagcaatccaggatgctcaggatgtggcagtaggtatgtttctagttgaaccctacccagcaaaagtattgtttgatactggtgccacacattcttttgtttctgcatcttgggtagaatcacataacatccccatagaaccaatgatcccacctttgagagttaattcagttggggggaaaagttcagtccgataggatttgtccgaatctaaggattgaaataagggggatagccttccccgctagcctagtagtcatgggaactcaagggttagatgtcatcctagggatgaattggctacacagaaatcaagccactgtgagttgtgataagagaacagttaagttggtgtccccatccgaaaaggaagtagtaacc

SEQ ID NO: 69374 - DNA, 557 bp, Zea Mays
gaagaattttccaccaactaagcttgcttcggccgaggggtccttcgtatcatcaatagataaagcagcttcggtttgcaccaaagatttcacatgttcgcaacatcctttctccaaaatagctgcaattcccctcgcgccagagaaggcacagacgtccccacggtcatgtaaaatttcctcaaaggcttcgacctcgctgctgatccattcaattgggccttcaggatcgccccgtacgaagttgtcttcgcttgaatatgcgccaacattggcgaagctagtttttatctttttcgcacattctacagatttttcataacatctttcttttgaggagcgaagttctacaactgttttttcccaataatttttccagtaatcactagcatcccggtcagcttcggcaatagcgcatttcaatttagcttcggccagttgcttttgaaggttttcaatctcgttcctttggacttcagattgggtcttgtagttagcttcatccccctttaccttgtctaccaatgtaagtagaattttatctttttccaaagctt

SEQ ID NO: 69375 - DNA, 568 bp, Zea Mays
attttgtactgcatcttagttttagcttcaattatgaacatatccgtataggttgcgatgctgctagtttccagccttgttgcagtctactattccaaggcaatgatggcccttattaatttaacaactgtttcttgtgtgctgctatcagtctggggttcatccatgaattatgttagattttatcaccctctcttggaatgttagggggctaaattagtaggcacaccacgatgcggtgcgtgaattgatctcagccaccacctgccaccttgtctatttgcaagagactaaattatcaacaatctataggttcacagcagatgctctaggagggccaaaactcaacaatttcagattcaagcctgctgaaggaaatagtggaacccagggaggcatccttttgctatgggatagtgacgtcttagtcctatcaatgtaactattggcgagttccacttatctacaagtatggcacgtaaggatcgccgagcctccttctccctaacagtcatctatggaccaacatgtagaagccgcaagcctgccttccttagagagatgaatg

SEQ ID NO: 69376 - DNA, 590 bp, Zea Mays
attacaaggtatggacaaatatgtacaatgttgtgtttggctcgtaattacaatcttttgcaaaaataatgcaaagagatcctaagctttatacaagaagtcacaaaaagaagcttcagcccagcaaccttcagaacacgcttcggcttactgatcttcggcaccaccatcctacagacagatgatggtataaggtaaatgcaagtgtcataaagaaaactcaaggtaaaagacaggtacaaggttcataccgaggtaagcaatttctgagtttcgtctccagcaagctcccgctcgcctttagcccaaatttgagtgataaatctatttccattgcttcgggcctcaccaggaatattgactaattctgtggtgacaggttgaagtttggcttgttcactattttagcatgcgtgcatccggccttcaaaaatgtagcagccgtgccacgagaagctaacagagcacaggaatcctcgtgcccagttataacttcatcgagcacatcaacttaattttcaatatgctcaaaggctttcgggatatcttcagccgaaggggcaatttcctcagagctagccccaaccgag

SEQ ID NO: 69377 - DNA, 455 bp, Zea Mays
agaaaactaaatcccgagagctcagggtgtttcttataaagttctggacctggttgtaatgttcctagcattaccatggacggtgagttggttatgataaaacagaggggctctttagcaaattatcgaggcagaaggagtatgagctgtttctggccgcgcgatctaagatggagggttctgattaattctattgtggacccaaagcggtacgtagttacagccgcccgatccatgactggtggccaggatttaaaacacccacgatcacccccaggtccgcatgatcgcgatcgaatgctccggatcgccccggccaaatcgttacgctaggtgtaatcgaggtagtccgcaccctgatcaacggcccagatctaaaataaccaagttgatttctaagcgcccgattcagatcggacgaccccggttgcatcaaccctaaccggtacacggat

SEQ ID NO: 69378 - DNA, 368 bp, Zea Mays
gaatttcgggaattaactcaaggtggaaaatctgtcagtgagtatgtgcacaaattcacagaattggctcgctatgcgcctgacgatgtcagcacagaagccaagaagatggctcgtttcttgaaggggttaagaccagaactcaagactatccttgccagccaagatttcctcagcttttcgcatgtctctaacaaggccatacaagtagaaagggctagggaagaagaaaagggtcacctcaagaggaaattccaagtcctccgagctcagtaacaggacaggcaccagagaattcaatcctttgggtttccacccaagggaccaagcttcaataagccagctggacccactccgtcacgtttcag

SEQ ID NO: 69379 - DNA, 670 bp, Zea Mays
aggaatgacgattgaaagaaacctcaaccaatagaaaatgtgcctagcatgttagtgtagtgaaaagaaataaatgtacacccttgaattcaaagcttcaccatgtaaaaaggaggctaaaatgtaattgcatgtaagtttatataggaggttgacctctataaatagatgaacagttgcactatcataacagtcgaccattcatagggtttttaattggcatcatcttgagttagtagatagctttcaaagaaattcgatatgtacccaacatttgatgcccacctcatgtgtatcgatcaacaattatgatcatgcctccacgatgggaaagaatagtcaacataacaaattgtttcaataatggcgaagggcaagagtaccatgatgaaggcaatcaacttgaaatcacacgaagatgacaagagaaaagaaatgctccaaagccattggccgagtaagatgatgttgatgtagaaattgaggggttagaagccatttaatgtcacatggaagtatagaagccaaagttgctttggacggtctagctttcaaaacagatagacgaagcattgaaagaactctatcacatgagaagaaatgaaaacaaagaacaaaggcaagaatacaatagatattagaatacaaacacattcgaacaagaggaaca

SEQ ID NO: 69380 - DNA, 420 bp, Zea Mays
tatatccccaagccctcttcttttcttccataagccaatgccaacacactactcatttccctacctctaactgttcctagtggcgaggagccaaagaccttacctaccgctcctttgccacctgtgccacattaatgtctctattttcatgctgcctagcatcgtcactccattgacccactttccctatatcatattccacaatgggtgctaccatatttgcctcttcaaacaaatattaagctaactagatttacataaaccccccatgcctctgccctacccaacacctcctccacctcacacgactgtggcagcctcgcacccacaacctccctctgggcatgtccaccgctaaggctggcatatctccaagaaagcaccaacctcgtgcctcgaaccctaacctcgttggagttc

SEQ ID NO: 69381 - DNA, 343 bp, Zea Mays
cttctggaggcaacgtggtgatgttctgctcgtgcgcgcgcggcagctaggagccctgctttctcgactctgtttctccttgcactaattcagtgagtgatttcatcgttccctcttcactgtcttgttgacggatccttgaattccatcattttctttacgcaacagtactttgttcagatcatcggtttgagttattacaaagacagtagggtttagtccagatatggtgctcttgggccttggctgtagaggaagcatcagcagggggccaagttgccccccagtctataattctatcgcaacttgggacatggattaaattccaaaggggggaaagatc

SEQ ID NO: 69382 - DNA, 875 bp, Zea Mays
cttgacaggatactccgtgtaagccaaatcaccctgaacactgagctcttccattggtaactattcctcagggacacgaagacacttcttaagttgagacacgtgaaatacattgtgcacatcagatagattagcaggtagctcgagttggtatgccatctccccaactcgcctaaagatcatgaacggtccaataaagcgaggagctaatttgcccttaaccttgaatctcctcattccacgaagtggtgacaccttgaggtacacatgatctccttcctcaaattccagtggtcttcttctattgtcagcatagctcttttgcctagtctgagctaccctcaaattctcccgaattatacggacttgttcctctgcctcttgaatcagttcaggcccaaagaactgtctttctccagtctgatcccagtatagaggagtcctgcacttcctcccatataaagcctcaaaaggtgacatcttcagactggcctgatagctattattattagagaactcagcataaggtagacttttatcccaacttcctccatactgaagggcacaagctatcaacatgtcttccaatacttgattagtcctttcagtctgagggtgataagttgtactaaagttcaacttagtattcatattctcatggaagcttctccaaaatcttgaggtaaactgtgaacctcgatcagacacgatcttctttggtactccatgtaaacacacaatccgagccatatataactctgccagctgagaacctttataagtagtcttgactggaatgaaatgagccactttagtcaatctatccacaatcacccatataacatcatatcctttcttggtgcgaggcaatccag

SEQ ID NO: 69383 - DNA, 417 bp, Zea Mays
gcagctcggtttcaaatttaaaatgttcaaagttattacaaaccaaagtgtcatatcagaattcagaattcaaatcttgacgatgtcgtcggtgacagaattttacctataattcaaatcttgaaagccaaagtttcaaatccaaatgttcaaagagtacgggctggagagtgcagatgtcgtcggtgacggagatcccatagtggagagtcatgcgtcgccgccggggtgatggaaaggggattagggttaggggattggggagcgagtaggtgccgacacgccgcactccagtgactagtagagacgaagatcttgctggtcggacgatcgatgacgaagatccgataccggcagtggcgatggtaaggcggtgatggagattggggatggagcagcggcgagtggagagtcaag

SEQ ID NO: 69384 - DNA, 521 bp, Zea Mays
cgggatgtacctgccccatcatgagcacgagtctgggatggcatatgaggcaaagaaacatttgggaaatataacatgccaaacatacaccatctttatttcactgcagaatagtagtaattatacatactccattatacaactcaactgccttacttattttacataagtacattacttagactatactactctaatcttcttcatccttagttgttccgctgcctgcttcaagagaccgttcatctgcaagattcatggaaggaggggctccaaaaaggtcaatcccccatcaaatcctccatttactgttccagatggtccagctcccattgctgccacatcaggtggcacgttcgggtgcagccgatcatacaatacatgcacttcttcatgcaaggtgttgcagtacgcttgcagactttcgagggatgtgctaagttctgctactcgagctagagctttggcttcacagtcccaagagaaagagcgtgagtttacggcccagtcaatggccatat

SEQ ID NO: 69385 - DNA, 610 bp, Zea Mays
ctgaattggacaagttcgtggtggttttcatcgatgatatcttggtgtactcaaagagcgaagaagaacatgccggtcatttgcatgtagtgcttcaacgtctgcgagagcactgtctttatgccaagttgtcaaaatgtgatttttggctaaaggaaatcaaattcttgggtcacactatatctcaggcaggtatagctgttggactcgataaggtgcaagagatgatgaactggaagccgccaacaactgtccgtcagattcaaaattttctgggattggctggttattatcgaagattcattccggatttctctcgaattgcaaagcccatgactaaactgttgaagaagggagccaagtttgtttgggtcagaagtgcgaagatgccttccatgcattgaggcaacatctgaccatagcactggtgttagcgcaacttgacagcatcaagccattcgatgtgtactgtgatgcctctggcactggactgggttgtgttttgatgcaagacaactaagtcattgcttacgcatcaagagcactcaggcctcatgagcaaaattatcccactcatgacttggagttagcagccgtggttcatgcattg

SEQ ID NO: 69386 - DNA, 358 bp, Zea Mays
cgccatcggatcgatgatcaacggaccgaagccatccacgccagccctcggtcgtgaccgctagatctgatcctaatgcccaagatttcatctagccgaatgggtatgcacgacgaaatctcagccgttaacacagaaatcggtggacataacgcttgcccccaaccttcacctccaccggtcatcagcagacagcagcgccagcatccctacgacggcgccacggtttccccacggtggaagtcgccggagttcttcgggacggtgccccatcgctcccctttacccctcaacaccgagattcgcaacaaggagaaagattttaacccgtcggggatacttaccgccattgaagggc

SEQ ID NO: 69387 - DNA, 681 bp, Zea Mays
ccgcctgacatgtttatatatcattcccaagggtagtggatggcctcctaatgccgaagcaagaccatataggacgttgaataatccctttaatatcctccctttcacttaggtcattcttcacgtagaaccattcctgcatccaggcccccgaccatcttttctgaaatgtgggaactgggtagctcgcctcagagcgaggcacgaagctgtaacaactgaagttgttgtgatattgctccttttcgatagccttcgtctcataagacagctcatggatgttgtagaaacattttgcatttggttccagtccctggctcctcatggcccatataaagatccccaccttgatgatagcttcgggagtaagttgatgaaggtaaatttcaaaggttttcaggacttcgaccagcaatttatccagagggaactaaagccctgccttcataaagcttctgtaaactaccacttcgtcagcttcaggcagagggacattactttcccctccagccctcacaattgagatatcacgaaagtacctccccctcattgcatcaatatgcccttgtttaatagttgatttcccgaagacaacatggcttggtctccagggctgatcttcggcatcttcattcccactttctacatcgaaactttcactatcgctggagttctcagata

SEQ ID NO: 69388 - DNA, 688 bp, Zea Mays
ggaaattgacggcaatgttgaagcatgtcagaaggcctttagcaccgtgtgtgctttcattggcatgagggatttgattcaagagcatatagccttcagggtatggcccttgtggagagctaggatatgccaaaggagaccactgccgattccagtgagggtggtctggtccgattgaagtataccttcagatttagggagaagtttgatgagccagacgatgactggctgaagtgtattgaagctaccagtgatgagctactcagggcatactccaaggccgaagataatgctttgtccacaactttcaggggtcggggcaagaaaagattgaacagggtatttgatgcgattggcttcgtataccctgactaccactacccactacgagggcaagggaaaaagggaaagactgtcgcttcggccaccccagctaagccaaagagcaaaaaggtgaaggttctgacccaccggtcgcgttatattgaacaggtcgtggtgcctgaatttggcgaagaagcctcttcaactgccgaagcaagacaaggtgctccaattgtgcatggcgttgaagagccaactatagtgccgaagatgcctacagttgggccgatcgaagctaaggatgataaggctgaagagccaaaggtggaaaaagtgataaaagtgccagaaatcctgagcccac

SEQ ID NO: 69389 - DNA, 551 bp, Zea Mays
cttttaccacgcaccttctgtgacgatggccttttcgtcatggaattgtcacaagaacaaggacaatgacaaaaaatcttatttttgtgacataatatgaatgtcatagaaggtcatatttcttgtagtgaattgaggtggtcaagctatgcagttatgcaggatatgaaggattcaagccgcggggcgccgaacgactatgcaggatctcgacactatgcaggattcaggtggctttgtgtcacagtgcttagcgacctgaaggagttgttgctggtcgcgatagaccacagcaacggtggcagtatcccttgcgcgcggagcagcaacctcaaccgcgcattgctgctcttccccctcacattcccatccccactctccctgtgagccatatcctttttaccaatttacatcgttgatttggttttatgaactcatattctcgcttttagatgcagcagcatgcacacacgcacaacaattttccatggcatgctttgatggaatatttcttgtattttatatcctcaatcccccatgcgttgattttt

SEQ ID NO: 69390 - DNA, 300 bp, Zea Mays
agctctttcaactctcaatcaatggctcaagcataacattgaggtttacgccgggatgatccttcccaggtatgatgagagttaagaacataaactcatctttcatgcaatcttcaggtggaaggttgtacggtatggcaaagacaggccaacatgagtaagacgttgcggtcatactgaaaggcgtgaaaccatctatcgccagcccaatacgaacattcctctcttcactagaaaattctggatcgaagctgtccagggccttccatgcgtcgctatcacacggatgttgcattaccc

SEQ ID NO: 69391 - DNA, 1163 bp, Zea Mays
cttctcctcctcccaatgactatcctaccaccaatgttcctcttcctactactcaagctccaagcactaatgctcctccactagcatctttccctcaatcataccctcctacatacttgtatggatagccatatggttctcctgtacatggaacatatggtgctctactttcatcccctcccccatttggtgcttctctcacatatggtggtcatcctccattgtgtcctcctacaagcaagacagtgcccccgagctaccgtagtgataccattttgaactacctcgcttactctagtgctccttaattgcagtggcgaagggactaaacaaagatggagtatgaaaggctagtaactacacatatatttttttgaattccacataaattttaggtccatgatagtttttgagttcatattttcatccatgcttgactactgcaattactggaccccattaatggcatcaataagaagggatcgaccttctagggccaaatagccaacacctacaactccaccatagaagctcatcgccatcgtaccctcaagcagttgaaggatcagtgttctacaagcaaccgaaagatcaccctctttaatggtatatataatagcttgtaaagggttcaattgagtggagcagatgaagttgtactacttaaagtggacaaggagtgcttctgcaacaagccagtgaaaccaaatccaagataaagcacatgtggcgcgcttttcgccatcaggcaagtggtgcgtgaggcataatgacaagaacttcggtgataggagcaaaagattccatctcaccttggatgatgattgtagctatcggtaccctgaatcaggggtaccctcttctacggtatgaaggcgctgcacccgtaccgcacctccaggtcatacggagagcggctcctgaccccaccacatgggcaagactaggggcaccacgtggcaaggaaagataatacttcccaaggtgcatcgatgggtacggacctccaaggaacgccggacccctgtacgaacgggtccggagctcccaggaggacatgttgggtccctcgaataagctccaggctccccccagtaaggaccgagtcttggcaaggtcccgggatgaggaggaccccggcatgggtaagggtccggtgctag

SEQ ID NO: 69392 - DNA, 443 bp, Zea Mays
actcccatagaggtgactgaggggccttcaacttcagaagcggctgctgcagaagacccagcccctgagggtggcgctggcagcaacccagcccccgagggtgttgctggtagtgatccagcccttgtgggtagtgcaagctgcaatccagcccccgaggatgttcaggcatgctctctttctaatgcctccatggatgtccacaccgggtcatccccaatccggtccgatggggcgacgacagtacatgcttctatggccttaactggtcaagttgccttagaggtcggcgagctagacgcaaggagcctgctatctgctggtggggctgaggtcaccccgagtggtgctctctagattgttcccgctgatcttccctcgtcaagccatgctctagctcctcatgccctgggtcttccactgtttatttccaatcttcaggt

SEQ ID NO: 69393 - DNA, 679 bp, Zea Mays
aagaggaggaggagaacaacaatgaggaagccaatgatgagtaggaggacaacttcgttgggatatggcctatcactgagcattacacttcaatgtttgagacgggacacttcccaaacctactataggatgttctgcatacgctaggaacctacgtctgatctctatatgacacaaggtgagtgtctgagcctccccgggcttgctactacatcactcgcgtgatatcagggtgatggatgcaggggataggggttttaggacaccatcagccgatgagtctctgacgccactatctaccttacgttgcttcggtcaacaatgttgcaagaagagctctgtggtctcttagccacacttatcggcagtagctgcatgacatgaggtacatacatcttcctctacatcttcgtggagaaagccagaccactgttgttctaggtgaagctagagaagatcacctccacacccttgtaggtgtggtggcaggttataacactgacctagacaacgctgccctggatctctcgagggtacatggagaacttgaagaagcacattccaggttgtagccctcgaagcttagctcagaggaaggaatccacctgaagcccaactccctgccatggctgtgtcctcgccctgcaagaggattcgctatggagaaccaggatctatc

SEQ ID NO: 69394 - DNA, 583 bp, Zea Mays
ggaagtcagtaccagcatcagaacaactaggcagctctccttcctgccccaggaaccaaccagaacaaccaagcaactccagcacacgtaggaggccgcacatgcttctattgtggggaaaaaaaccactgggctaagcattgtccaaagaaggaaactcagcagtcgccagcagtcaataccccagcaagacaaggagcaccacaacaagcacaaggaggtcgtcgttaggcttacaatcgtggaaaggtaaaccactttgaggccaaatctatccaggatgctcaggacgtggcagtaggtttgtttccagtcgaatcccatctagcaaaagtattatttgacactggttccacacattcttttatttctacatcatgggtagaagcacataacatccccatagaatcaatgtttccacctttaagagttaattaagttggggggaaagttcagtccgataggatttgttcgaatctaaggattgaaataagggttagatttccccgctaaccaagtagtaatgggtactcaagggttagatttcatcctagggatgaattggctatacaagaacaaagcc

SEQ ID NO: 69395 - DNA, 440 bp, Zea Mays
tggaaattgcccccacttgattcgtggggcttgtaatgtggtgtagcacagatcagtcgtggatttggggcgttgggtcaccgggatgccgcacgtcggtgagcatcgtcgtcgcctaggtgaaaaccattgaggtctggcgtcaagaggtaggagaacagtccttgatcattggattgaataggtacaattcagattagatcacaggacaccgcttcaaggtactcaacgtggtcattggtcgatgatctaagggctccggttagataatggtgtaggtcgttatggtccgttgatcacgggtcgaatggctattactagatactggttcaggggatgagaccttttaatctggggcatcagatcaggaccctacagccaggagggcgcatagggctaccattgtggcgttttctttaagaacccctgttattttaaca

SEQ ID NO: 69396 - DNA, 571 bp, Zea Mays
ggccacaattccagagaagtctagggtcaagtttgcaaatttccaaggcctatgtgtattcatcttctcaggcgaatggactacgggttcatttaaatgaagtctgagggctcatttgtgaatagcacgagtctgtggaggtgggatcaccctgagccatccgatcgagatccaaaggacagaacccaatcggtaacataatgaaccggtacgggacttgaaccgttcgatgcaagctcgatggcctagatccaaataggcacggatgaacatcatccgctctatcacagatcgagggattggatcgaagcgccaaatgggtaccaatgaatctaatcttgagtgcccattttttgatgaatggccaccgtcaatctcctacctcagtccgagctgagcgacagtgtcctgccccaaccgcggcggcaccatggccgcgacaccgaacctcgacgccccgagcaccaccccaacctttgaaagctttagcacgatgcagatttcatggcgagcatgaggcaggataccttaccgatggaagcacaacagacacatctggccacgattcaag

SEQ ID NO: 69397 - DNA, 644 bp, Zea Mays
tgcttttctatacatgtcatcttagcatcttgcaacgattttgcttactcagacagggtgtcctatctttagaggcatttgacaaactcgattagtgagtgctttttggctggttcgtgaaacaaccatcatagaatgacctttctaaggattgattctctctcgtagagtttgtggtcgctcgtatgggctaagattaagtggtatggctacattagctagctcgggtcgattgtggtggcgacatttggttttcttgatatggtggttttacaggccttcaatttcggggagaaatccctagatctgatcttaggttgttgtacctagcaatggtcttgttgaagtcgccaattaaattttgaggagccactctttttggtgaaaggctttagtttggtcttgactgattcgatcatcgcaacgacggtgcgtgcacatatcgtgtttctctttggagacattgttgttggagaggggacccaagtgttgtctggatagcgtgaagactgagttgtgtggtgtagttcactgcgatatgataattttgtcacgtttttttcctccccccctcttggtggtgtacaacctagttgtatagaggccggaagtcattttagtgtcttttatcatcttgatgtaat

SEQ ID NO: 69398 - DNA, 381 bp, Zea Mays
gtgaatcctaggtcgtgggaacctctcgaaaataggcaatcactcgacggagttcgacctctaccccaatccaccccacaccgtggctagccttacactgacggtaataaccagtgatatgctctcaatcaaatcctctagctccctaggacatgtagcaccccatgattcgttacttaatcccctcgggggttgttgattggtcgccggagatcttagccaccgtggtgccgctttggccatgggtagcaccatagatgctcttgcgccaggaatataggatccagttaggttcaccttgtctccctattcacaaagaatggtctaccctcgggatttgggccctgggtcgccgctcgatgtcacctcggtgggtcgccg

SEQ ID NO: 69399 - DNA, 837 bp, Zea Mays
ccaatggcggaggtcacccgcggactcgggaattccgttgctaccgcccggatatccctccatgggagtataaacgatagccccgcgaccctccccccctcatcttcctagtaggacggtcgtcataactgcgaggaacgacgtgagcagagaggggaggaaacgagataccgaacgcgccgccgccgtggaacttcgcgtgcggggccgctcgagacaaaagggttagcttgggatcttcatggacggtctggggaagtggtcgtcgtcacggcgggggagatacgcggccgataaacccggaatttcacaccggagcccggattcgtggtcatgccgccgtgtgctgcagctagctttcctctccgccctccgacgatggtaagcacctccctctgtttcgcaaaaatcctctcttcgtttagcgtcggtcggatcgggggttcgagcactagggcctaggatagaggggtccgttcatgggcgccgccacggcagatttgtgcgccgccgtgccctgtggctggggggagaagaaactcgtgagccatcggatctgtgatgaagggtggggagatcttgaccgtgggatctcgatcgtgggccaaagaatgatgcggtagatggcggctcggaaattcgatctggaccactgatctgttaacagacggatcctgttggatctcatttcataaaatcgtgaccgtaggattaggatcttacggctgtactggttcagatggacttgatttaatctcatacgtccaaccctgatccaacggtccaggatggcccataccccttcggtcgtagatagttgctaaagagccctctgac

SEQ ID NO: 69400 - DNA, 389 bp, Zea Mays
gtttaataaaaccctaaaacaagcttctcaagtaagggttcaatggggatttctgaaattcagaattctgaatttcagcccttgagctaaagaccaagcgtgttcaccttgatccctagctcaaatcctaatgaccccattgacaaaaattgtacctaactaatccctctgtcacatgccagaagatggcattgggacgtgagccctaaacacgacaaaacccaggatttgcctcgggctcgggcaggaagacagaccagatttcagggctccaaatcatggaaaccagtaggaaaaatcctatgacccccacacaagatcggtagcttatagggaggagaagaggttttgtgcactgaccaaggcaagagcaggctcagatgaatgac

SEQ ID NO: 69401 - DNA, 913 bp, Zea Mays
gtttttggaaaatccacaatcagacaaggtcaaattgaagcaatgaaaggcaaatactttcatgatgtgtctatactgagggctggaggagaagacattgtttccctaccagaaggtgatgaagtggtattcttctagagcttcatgaaagctgggcttcgctttccgctccacaagatgctggttgtggttttgaagatgtttgagatataccttcatcagattacccccgaagctcttattagagtgggagttttatctgggccatgatgagccaaggactggaaccagatgcaagatgcttttgcaatattcatgagttatcttatcatacgaaggcaactggaaaggaacagtatcataacaattttggttattacagcttcgtgcctcggtctgaggcgagttatcctgtgcccacgtttcagaagaagtggccaggttcttggatgaaggagtgattttatgtgaaaaatgacctgaaccagagggcggatgtgaacgacattatccagtgccctatatgatcactcttcggcatcagaaggccgtccaacgcacatggaaatgatgtgcaagcgtgtcaagctactttcaacacaatgtgcacctatattggtacaagagacttagttcaagagcatatcggttacaaagtatggcatcttgcaaacaagtgggaaattccaaaggaaaccgccgctggctccatccagggtgacatggtttatcggaagtatacttttgggttcagagatcaatttgatgagccaaatgatgattggttggatgctattgaggcaacaagtgatgaacttcttggagcatactcgagggcagaggacaaagctatgatggctgcctttggcgctcgcgacaaaaagaggttgaatagagtattttatgttattgg

SEQ ID NO: 69402 - DNA, 987 bp, Zea Mays
cttggcttcatccttggtgggaggacgaaagtcatgaatcttgattttgtctcctgaaatatctccatcagtaaatcccaggatgtgagcaaacctcctatagctcaccttataccagctgccttcaataaagaaattgagataaggaaagttatagggacttccctcatcagcaagcttaatccagagagtagaataaaattgtgcaatgacttcatcattccaatcatattggaatgtcattatggtcttcattctttttctctcacaggccctcaatgcatgtgtcatctcgggatcaccaatggcttcgcatccatcccagttaatataacgctgatggaggattggctggtgtttcttgggaagaatcacagaattatagaaatcaacatgttggagggtccagaaatgattaccatcgatcctgacatcacgaacacgtaatgtaggattttggaagcgtatatcctggagaagggcagaccctccgctggcagtgaaatcaataacttgctcattggcagagcgacgggcctgtgctctgtgaagcactaaccattggataattggtgcattggcagaagggagatcaatttcatcatcttttcctccctcatcatcgctggttgcctcccaggcttgtggattggccgcgggtcgagatcgaccggagggattccgtgtcgttcgaccgcgagccccatgagaccctgaggtctcaccacctggcagcacattgccagatccacgcccgcgcttggatctggactgtggaggagtttcttcacgaatctctagagcgtcgtcatctgagtcggactcaactacagacggatttctatgacgcaccatccttaagattaaacaaagaagaacatatggtgagagaggtaatcgatgttcaaggattttaacgaacacgtttgaggaaagacacgtatgatattgagcatgcacttcaaccgttcatgtgagcggtttaac

SEQ ID NO: 69403 - DNA, 624 bp, Zea Mays
cattatgatcgagtttggtactccgaagcggtgaattatgttggtaacaaatttcacagcctgcttggaggtgatctttgtgatgggccacacatcgatccacttggagaacttatcgatcacgaccaagacgtgagtgtagccctcgggtgcctttttgagtggtccgactatatcaagtccccatacgtcaaacgacgaggtgacatggatggtttggggtgcttgcgcggggcagatgggtttgtcgcgtgtagtactagcacccttcacagtttctcaccacctggtgtgcgtctgacaccgcggtggaccaatagaatccctgtcagaaggtgttccccatgaggctccttggggtagcatggcgcccacaaatcctaccatggatatcttccaggatctgttttccttattcgattgggatgcacagctgccttatctcgttatgccccttcttgtagaactcttcctcaatcacgacgaaggacttgacctaccgatgaagcctacatgcctccatttcatcgtggggaagcaaaacattgatcaagaagtcatgatattgtgccctccaatcggtcacaaggtcggcgagggggtccatctactccacgatggcca

SEQ ID NO: 69404 - DNA, 283 bp, Zea Mays
atcgtattgggcccatcctagttaacaggacttatgcagcccgcaaccttctctgttctcagcccctgtagagtcgtgcttcatccaccgtcgcgtactttgtgcacgcatgcgacgccgccacactccagaccgctggccatcgtgcactcttgtttgtcgtgccccgtcctctaggtctctatcctccaatggctcatcctcacgtccacggtcccactaggctaggacctatgccgccatcgctctaggtccaggtcgtcctcccgtccgcctgccccgc

SEQ ID NO: 69405 - DNA, 414 bp, Zea Mays
gtttggtttcgtgcagaggttaagcccggcgcacgagagcctgggccgccaggtacgcccgatatgatcttccccacacatgcagtcaagagccccttttttagcctgtgctgcatgggcggatgcagcccatgccccctgcatacaggttaacaaagaaaagcctacgcttagccaatacatacgaaggatctggccaagcgcgtccacataacaaaacacgcagatagagtctgagcaaaactagcacactggagtgtccatgtggccccgttttttactggcccctcgatctcatcccgacggttcagctgcctgcggtgcgggtgcttgactttgtcctaccgtttacttagcagaacacgtcctcttcgctgtaggaaggaaaatgcatcgtattctttgtgctgcgtg

SEQ ID NO: 69406 - DNA, 531 bp, Zea Mays
gtgatcggacctgtgaagggctgaccgcggcgagctcacacacgtggcgttcttgaccgatttggggtaaatctcaaattgaagcgctctggtggacgatctgaggcacaggctggtgtattgggtgcatgactacctagcggagccgatggcacactcaatttataggacccgagggcggtggctcttgaatttggcgtggcgcggtggtggccggagggagggactgagtcactggcacggtgaccgtggctgttaccgtggcaaggccttaggcaatagaagggctgtgtattgtgatcaattgcgacgtggtaagatggctaacagcgtggcataaccgcgaggaacgacgacactacggtgatggtcgcacggccacgtcgccggcaagtggatgagcgacagagcggctactgtgctccaagttcatcgacggcatgatcttttcacccggggaacgttatctgcgtttaactgggcgtgaatcgcggcgccggcgtgattccgagcgcaagatcaccggcggcg

SEQ ID NO: 69407 - DNA, 302 bp, Zea Mays
gagaaagttgccttgatccgcaagagactactcgaagcccagagtcggcaaaagagttatgcagacaacaggagaagagaactcagtttcgaggaaggtgattttatctacctcaaagtctccccaatgcgtggagtcaaaatatttcaagcaaaagggaagctagctccgcgattcgtcggcccctatcctatcatcgacagaatagggctagcaacttaccgccttcagttgccagaatccatgtcagatatccacaatgtatttcatgtgtcccagctctggaaatgcttgaaagtacc

SEQ ID NO: 69408 - DNA, 453 bp, Zea Mays
agatttcccaaataaatcaccacaacagcatacattggccacaactggatgattgtggttggggattttatatgtatgcttttagaacatctcggcattagggggaggaatgcccatatagtgtaatgcctcaatattctattaaacgcacaaaagtcaaactgaatatgtcgttcggtgtgtactcctgtgtatatggagtttgccagaaatcgttgaggagtaaccatattggtctgaatgcttctacctgatgtagatgtggatatacccgggattaatatcatatccacatttgacttattggtatttgatctattctcggggacgcctgcgaatatggttcattagccttagtcaaagcatatgttctgattacagattcacgtggtctgtgataactctcatccgattagttcaccatgatggtgatttgcctcacgaagaggttca

SEQ ID NO: 69409 - DNA, 612 bp, Zea Mays
ctcagcacaataattctcaagactcagactattctgagttggatggcgggttgtttattaaataccacgagggctcttatgcaaagtgctatggccaaaggggtatgaataactactggccgttagatccggaatccgcgcaccaaaaccacccacatcgcgaattaatctcagcctttcgatccccgatcgacgacccagaagtaacgagcccgaatagcttttctacttctaatctgggccgcccaataccggatccacgactcccagcacacatcgccatcctctcatcaccatcgcaggtcctggatctgacggttcccagcgtttcttcctccctgcgccctcctacttccttctctctctttctggcggcccgacgccggtagttcttcccccaacgcgacaagaaccagagcactggcgcgtcggccatgctccaccagagataacccgcccgacacctagcgtctaaatatctagcgtgaatcacggagacaggaagacatttcttacccaagatcacggtgttgccaggcgttgttccgcttcggcgtgcagcaggaggactctccggctagcctcatccgtggcggcggcaacacccttctc

SEQ ID NO: 69410 - DNA, 330 bp, Zea Mays
gcgagatatagaaacaagactcattgataaggagatgaggactagaaggttccagagaacgacatcggtgagtggctgagaaacacggagaagaaagagtagagaaagcggcgtcgtgcgacgctcacccagggataagaatgggctagcgtttctgcccacgactgatttttccgtataaataaacccgtctaaagtaactcgcggaatcttggctcttgatcgagatcatacgaccacaattgaagcggggggagcgccacgtgggtcgaatcgacggccttggcgcgtctagcgccctccaagcaggtcgaaaggccaaattaggtc

SEQ ID NO: 69411 - DNA, 798 bp, Zea Mays
ctcccctctagccatctagatcccttcacttgcctatcaagattagaaaacaatctatagaaaaccataatgggctcaaggcataggtgcagccactaatcacagccaataaggtctgatgtgctatctatctaacactatgatctgctggcgctgggtatacatgaactcttttggagttcattcatgcatgattctgtaaaccataaacctcctccttgcagagtctcccaaatacaaattctcctccaggcatgttgcctctttgtttcttaaccttaagtcactataaaatgtactgtgcatccaatctctcaattaggaatatacaacaaatgcaattcccatctgctctcaccaactaaatggcatggctctatcataatgacatcacatcttgcctaaggggttgtcgcagtggcaatattctaccggttgtgagagtaggtctcgactacgaaaatgagtaaatgacaaacaggtaataaggtagtaccacctgcaatgtggattgaccttagtaaaatacaagtaacaagcacaaactatcttggaacaatcaaaagtcagattctattttttattgggacttcaacatcttggacaacaccccaaatatgctttcagcgtcacattaggtaaaacggtatgagacaaaataacggataccaataacaaactataaggtgtactgttgagctcaccgttgcaactcttgagagcaaagacttatcagtgtagaaaaggtatgcgaagccttctgtacctgatcttcctactcttcctcgtaactgaagc

SEQ ID NO: 69412 - DNA, 675 bp, Zea Mays
ctcaaaggtgacgggttccggagacatgctctctcgatcgtagatgcatgtcgttggtcaggatgaagagaactacaatggcggtgtagatgtgagcagaggcaaaacctaacttgtgttgaaatgagtttggcgttggctgtaaggcaccttatatagggccgtgacgacgaaatgataagcaccctcgatctgatctgcacgttatccatgaaccgatagactcgtgttccgataacaactcagattcttatcgcgatcagatagtactctagacttaacaactaagcaaccaaaaaataaaacaacaaaaggaagtcgtgcccccacaaggatctcaaaggtgacaggttccggagacctgctctctcgatcgtagatgcacgccgttggtcggaatgaagagaactacgatggcggtgtagctgtgagcagaggcaaaaccctaacttgtgttgggatgagtttggcgttggctgtaaggcgccttatatagggccgtgaccgcgaaccgataagcaccctcgatctgatatgcacgttatccacgaaccgatagactcgtgttccgataacaactcagatccttatcgcaattggatagtactctagacttaacaaccaagcaaccaaaaaataaaacagcaaaaggaagtcgcgcccccacaagacaag

SEQ ID NO: 69413 - DNA, 318 bp, Zea Mays
tccggatcggatctagccgaaacaaccccggccatttcatctaagccgaccataaggagatcaacggccagcggccatcacctcgccgttcatcttcaacctcccgatgcagcagcgcctggcttcccacggcggcgagcccaccagagtgaatgccaaccggtcccctggtgaccaatacgcctccccgaactgttctacatgcaaaggaggtcgagggaaatacgatgatcgaggacttactagcgatttggtgccgcgacgactactgcccacggtacgcgcgacagcatggcggagttcccactccggcgaggc

SEQ ID NO: 69414 - DNA, 279 bp, Zea Mays
gatggagtatggtttacacttgtaactgtaagatattgtaacttcaaggcttataaagtagtttttgtggctagggggaggaaatagcattgttagctaccaccctggaggcctggacactatctcctagctttgttctcatgttctacatatatttctttttatttggttctgggttatgcatatcttggtgggaagcattagtttaaattaggtccaatttgctccataactcaaaactgtgtcaagatcggtaagatatcatgttttcaagttctg

SEQ ID NO: 69415 - DNA, 432 bp, Zea Mays
agaaagtaaaagccaatcaaacaatcagtttcaagaataaggaagcaaacaagaaaggagaatgctttgcctagtcgttcaaaccattggtctaaggattgcccagaacataaggacaagcaagagaaaacaacaaatgttgttattgccaacactaaaggtggagctatcgtgtatatacctttattacctaattggtggattgacatcgaggcaaacatacatttgtgtactgaaatttctttgttttcttattaccaagccataaggacatcctccatgttgatgggaaaaagttctcatgcttttgtttgtgttattgacatggtcaatctggagcttactttgggaaagactgtaactccgaaacgtacaacacgtcccctccttcaagaggaatcttattaaccgtctctcctctatgtaaagagg

SEQ ID NO: 69416 - DNA, 400 bp, Zea Mays
caaaaactctatttaatcttttcttgctccgacccccgaagttgaggacaaagcatcatcttcggccctggtatatgtcccaagcaactcgtcgctagtagcctcaatgcatttcaaccagtcatcattcggttcgttgaacttctctctatatctgatggtatattttaatcgaactaatccaccttcgctggacccagcagcagtctcctttggcatctcctagctatccacaagtggccacactctataggctatgtgctcttggattatgtctcttgtgccaatgaaagcacagacattgctgaaagccttttgacacgcttcggcatcactgtcaatcgccaccctcggtcttcaaaggctgaagcgagaccagatggggcgctggataatttcc

SEQ ID NO: 69417 - DNA, 808 bp, Zea Mays
tttgactagggatgctataacaaaagtgaaaatggtttgtagggctacaaatttgctgcagagcattggttgtgttgccatggaaaattgggagaaaatctgccctaaacatcgactgtcaggctgactgaagaaggttgcgatggtacaatgactaaaatagattgcagatgcatcccccttgccaccggtgatctttacgccgtgatttatgccatcgtcgcgattcgtgctcgctggtgaggggataaccacgatggagtaaaaatcttggtaccggatcagcttgggctcaggcgcggatgagattcaccgtacccacttgctcgtcgtgcggccgggatagacttcgccaccattgatcgctcatcgttgtgcgccacgtgcttaagcgctagcccacatcgcggtgaatcatggtatgcttgtctgatgatcgctggaggactgccacggtgaaagccactcatcccgagcgccagtacctcttttcccctccggccgccagcacatcctcgtgaaattggatgccaccgccgttggaggctataaatttccgcccccgtccgctccgctaggtagttgtgcaacccgtgcctcgaatcatcccctagaactccccaatttgggatttcccccaaatcaaccaagaacaccgtgccttgagacctcgtcgtggccagcccaattcaggtccgatcctaccctctactttcttgtttctgcacccttgcttgctcctgatgctcactgacccgttcatttgagctgagctaccgtagatcgtcgggaacacattagaatgtct

SEQ ID NO: 69418 - DNA, 466 bp, Zea Mays
gataagtgttgaagtaaaaattcattaccgaaggaagttacaaggaattaacgagatcaccaaggatgtgcaaaataaaatgaccgctcatggatcattaagaaacaagggtggtcaagggcatgtaaaatgaaatattttaaatagaccttgggatataaaggtaagcataaaaaagatgagagtatgaaagatttcaaggagatgagcatagcaataccaagagacaagaacttgccgaaagatagcgacttaacaacagaagaggaaagggtctcaaaagataggaaggtcatggacatataaacagaaatgtttaagtaggcagtagaaacttagaggcaagtatttgaaacaaaagtattaaagggatgcaagcatgtcaataccaaaggactagagttcgccagatggtagcaatttaatgacgaaagaggaaagaatcccaaaagacaagaaggttatg

SEQ ID NO: 69419 - DNA, 303 bp, Zea Mays
atttactaaaaatggtctataaaatggttggttcgaaggatcgcaccaatgtttccctaagcaacatcgtgaagccgactctagagaacctatgggctgaagatcaacaacaattcgaggactacaaaagacaactaatcaaggaggccgaagcggagtacctggacaatttcaaggtggatcggtatcagaagatcgtctagcaaggggagtgtgatatctcatctcttcgacccactatacccgttctcaatgttagtaaaacagacgacatccaatctcttaggcattatatagataaac

SEQ ID NO: 69420 - DNA, 387 bp, Zea Mays
tggatgtggcagcggcggaggcttcaccgcacgctgcggacacagaagatgtgcctggtccgagtactgggcgcaggcggcgaaggtcggttgcgaagcgtagggtgagcggggcggagggcggtcggcttcgtgtgagtagggttggccggcaggaactgttgtccttgcctgccgccgcgagtacaggtaagtcctcgcggtagactttgatttttcgcacttattgtgctaatccggctgcacccttaggcgacttctgtgcggctagtcttcgcggtagacttcgatttttcgcacttgttgtgctaatccggctgcacccttaggcgacttctgcacggagttgtcgcacgcgagggtggctagcgctgagcctcgcggtga

SEQ ID NO: 69421 - DNA, 535 bp, Zea Mays
agaagaaaaaacaaagaaggtatgagcaataccacaacaattagctgacgttgtagtttacgagtcacgattttccaactacaccctcttctttgcattcagctcaataccttgtcttattattcaccacattgtgtacctcaaactcatttttgattgtgtgttgtctcaaagccatcctaaaatcatgcattgtaggaaaagattcaccaacctcaattttgggattttctttgtcaaccactatgctagcttcacaatctgcatcatcatcaactagaatgtgtctcacgaatctcagcctcattaacttgttccacctgaggagcttcctgagcgccatcatccctaaatcccaaagcagcataaaattgatcatcaccaacaaaaatattagcatccaacatcatagtaggatcgacatccccctcagattgacttgcatttttggtgcatggcaatttctcccaacaacttttcctccactgataagctctttacataacctggtttcaattcaaactgtacaaccaac

SEQ ID NO: 69422 - DNA, 430 bp, Zea Mays
cgcgcgcgcggccggggacggatggccgggcctatacgcttgttgttgttttttttaaaaaaaaaatccatcgctgtggccaatcaatgcagggtctgtctcggaagggatatcgcagcctcgttgctaagatcccaagcaaaggggctgacaggaacaggagtacaggacgcaacgggcgagggagacgcgcccaccctcccttgtcctgaattattgagcaagaccagaccagaccacccgctctcttcaacctggcaacatgatgatcccagacaacacatggggggcgggccaagctccaagcaaaacgtctgctagtacaaacgtggatcagtcagtagcttccgcgaataatgtgttgcttggctggccacaggcaggggcgagcaatgggagcgtgcaccgtggcctcccgaatcgcgccgcg

SEQ ID NO: 69423 - DNA, 412 bp, Zea Mays
gtggatagtaccgacgcgtttgtgcgcggttgcgatggcagtcgcaaacgacgacgcatgggcctgggtgggcctgcttatatggttttgcatcgcatggtgttgggtatgacacccttatgtctttgcgatgaaattggacgtagattcttcgtcgggttttgccgacaagggcatcgaggtgggtcctcgatccttgttgtattggggaattagagcttagggcgcacttcaaaggcaaagagcttaagctgatgttgtataactatcgtgaggctggccttattctgacgaaggagccttgtagcccccgatgacatgtttgttttgtaactcaagaggcatgtctctgtgttttactttggtagtcctgaatattctcattgatcatcaacttggatgtggaatgctg

SEQ ID NO: 69424 - DNA, 732 bp, Zea Mays
tcgagggaagatgaagttgttgtgtttagaagcttcttcagggcagggctgcggttccctttgtatgatataataggagaagttttgaaaagatttgaaatatatcttcatcagctgacactgaatgccattgtcaggttcagtgtctacatatgggctctccgaagccagggcaaaagtgctaatgccgaaggtttctgccgagtgcatgagttgcactatcatacaaaggccagagccgatggtcttcacaaaaactttggatgttataattttgcataccggaaagacaccaaggctccggtgatccgctaccgcactaagtggtcaactggtggacaagcaaatggttctacttgaaggcagatgagaagaagagggaaatactcatgactatggttatgagtcctctgagattgagcttcgggatgacgaggccattgtgcaatatgcaactcggctccccatgccagctggccgaagttgaattcagagtggtggctgctgaaattagcactagggacttagtgcaggaatatctggtgaacaaaacttttccaacctctagcggctaggggatgccaaagaagaaggaaggagggaagaaatatgaacttgttcgactccccttccgcttcaagtttgaaaagcaattcaaaaaaccatgtactgaatggttagaaatgatagaaactatgtgtaatgaaattcttggaaattacacaaagaaag

SEQ ID NO: 69425 - DNA, 886 bp, Zea Mays
aattgtgttcctctgtctgatactattcttcgcggaatgccatgaagcctaactatttctttgagatataaccgggcgagggtggctcctccgaaggtagtcttcactggtatgaagtgagataccttggtaagacggtcaattatgaaccagatagaatcgttccctttttgggtccggggtagtccgatcacgaaatccatgcctatttattcccacttccacttgggcactgggagaggttgcattagccccgcgggcctttgatgttctcccttagttcattgacaagtatcacaccaagatacatgttgagctatcttctttttcattcctctccaccagtatctggttttgaggtctaggtacatcttagtagaccctgggtggatagaataggctgagttgtgggcttcatctagcaggatttctcgtgcctctccctttggtacacatagactgttcctgaaccaaagggttcccttttcatctgttctgagatccggggagttgttccttgctagccttttctgcaagtcctgtcatcttggcgtccaaacgctgagctttgcgaatgagatcttctagcattggtttaacttctatactgccattttccccaaacaagcattcagttgagccgattctctcttctagtcttccaggatgtttgttgcttccttcccaaaaggtttccggctgagggcatcagccactacgtttgcctttcctgggtgatagtggattttgatgtcataatccttaattagctctagccatcttcgctgacggaggttgatacctgactaggtaaagatgtactttagactcttgtgatctatgaatatgtgacatttgttcccaatcaagtaattgagagcaccta

SEQ ID NO: 69426 - DNA, 388 bp, Zea Mays
gtagactaaaatacttattcaattgggctaaacattttatggtagactccagtaagtgccaagtagatactataattttcttagaatttttggagtccgaaaagtgcctgttgcctttctagccttagtttaaaattgaattaattaggaattgttaatgcatgtaacttgataagatgttttggtgtgcctttgaagcatgataccttgctggtatgattgatgtgtgtgtatgtatacacccatatccatgtatgccttgtctaatgatgagtgatattgggatatagatggcatgttgttagggtacatgttcttggatgatgttgactactttgcataagagctttgcacttactctataaaatgagaagtaaaagatgttcac

SEQ ID NO: 69427 - DNA, 495 bp, Zea Mays
cttcactttcctttacataagatgctagtcgaagtgctgaaaagatttgaaatataccttcatcagcttactcccgaagctttgattaaagttggagttttcatttggacgatgaggagccaagggctggagccagacgacgactgcttctgcaatatacacgaattatcctaccagacgaaggcagttgggaaggaataatatcataacaacttcggatgtataacttcgtgtaccgatctgatgtgaggtgtcatgtgccaatatttcggaaaaaatggccgggtggatgaagcaatggttttatgttaaaaatgatttgagtgagagggaggatgtgaagggcgtgatacaatgctccatacgatcgcacttcggcattagaagaccttcaaacgcgggtggtaacaaagctcaagcttgtccgctggccttcaacatagtttgcagctacattgacaccagagatttggtccagtagcacattgctttaaa

SEQ ID NO: 69428 - DNA, 1040 bp, Zea Mays
cgacgaagtcgatggactggctgtagtgcaacgtctcggtcagagtgtcgtgaaggaagacattcttgacgtctagctggtgtaccgtcgtcccgagagagctcaaggcagaggacaatcatgacgatgatgggcttgatgacagggctgaatgtctcatcgtagtccactccgaggcgctaagtgaagcccctaaggacctaacggggcttgtaccaaaccagaataccaccacccttgagcttatgacagaagatccacttaccggtgaccactttggtaccagggggacatggcaccaagtcctaggtgtggttggccaacaaagccgcatacttatttttaggacagtgctagtggggatagcaagcatggttcgaaaggaggggactgccgagggagctagagtagtggcgatcgtgagcaccagctagtcaatgggtcagagaacaccaaccggtcgacatgtgaccatcgggtggatgtgacaagggttgcgttggatggcaactggatagtgcacactaactcatcacgggagcaggccagggtatgaggcgtctcatcaaaggaggggaccaatgttgtgggccatagatgctgctggtagacatggtcgagatcgacaaagcgagccaaaggtgggtggagaggctgggccgcacgtggcacacaccaaggcgatggggccacacgttgtgcaatcggaggtgattgagctatgtgaggcacgagctaaggcgacggggctgcgcatggcgcagatgtgcctaggatcgggtgtaggtgaagaggagggacatcgatgggatcaacaccacggagggaatcaagatcgagaggtggaaaggatctagcaaagggaaaacatcctcatcgaaaacaacatgacaagagatgataatgcggggtgagaagatcaaggcactggtcccctagtgggaaggagtggcggaggtgttgggatatcaagcgcaactagggatggtaatggatcatgatccaaatgtttcttcacaatgcatgaacccttaattaat

SEQ ID NO: 69429 - DNA, 619 bp, Zea Mays
acctcaggtggacttctcatgttgtcctcctatatagctcaacccaaatacatcagcatttccatgcagcataaatatatatattcattatatacaaatgaacaatgtttttttaatatatacctggttaccagctattattaatgttaacgcatgttcacatccagtcattgtgttacgctcatcctacaaaataaaatttgcttagtacattgattttatatattcattatatacaatacttcatgcaagcttatatatttatcttttacataccattttatggcacgtaattgtattgtcatcttccatcccatcgccagcattttttttatttaattctccttcttggtacaaataatatgttactatgcataatatatgttacaaatagtataacatttaaacaactgaaatattattaccttgtcttcctcagcatcactaacatcacatgactcattaaatccaatatctggcctaatcggcatagaatgccatcgagctcatccaacacatccatcgccttgtcgtaccctgcttttgacatacacgcctggcgaactactttcattgtttttgttaacaacattttctgtctgtatgatttagtaactcc

SEQ ID NO: 69430 - DNA, 451 bp, Zea Mays
cacagattgaagataagggtgttcaggttatcaaggaaatgatcaaacggaaggcagaaaaatacaagtgtttccgtcaggacagcaagggaattttatgctttggagatcgattggttgttcccaaggaccctgagcttagaaagaagatactggatgaagctcacctttccaagttctccatgcaccctggtagcaacaaaatgtatcatgatctcagatccctatattggtggaccagaatgaagagggaaattgccaagtacatatccgagtgtgacacttgccagaggataaaagctagtcatttgaaggcagcaggctctttgcaaccccttcccataccatcttggaaacgggaggacatttgcatggactttatcgtgggattgcccaatatctccagacaccatgattccatttgggttattgtggacaggttgaccaagac

SEQ ID NO: 69431 - DNA, 642 bp, Zea Mays
gaaccttgggagaggaggctgaccgtctcgttgggatccatgccctatctaattgaccgtctcctaacaagtctttaatatgtgtttccatgctctctgctcacttaaaaggatattgtatgattttaaattgcaaatggttctttaaaagctctgttaaaagggatattgcttaaaagttgaaagtccttaattgctatagttacattgctatatcggtccagtgttttggcttaataaccccctctatcattgcatctatttggacctgcattctaattttttgttctcttttttatgctctatcttttcatctataattgtttgtattttggggtcaagcacacatttgcaggaattgattctttcagcaaacaagtcgtgttatttcttaatgtctaagtgaatactactttctttcttctttcaagttgtcgttaccttttaatttgaccctatataggtgaggccggaaccatttaaattatttcctactacatttgatggtaagctacatgtcgtgcgctacatgtcagtgattttcaacatatattgatcatactttttttatgatggttcctatgtaatcttaatccatttccagttggatttagttctgggatatgaataatccactagccg

SEQ ID NO: 69432 - DNA, 428 bp, Zea Mays
cccaccaaaccctcgctcactcagaccgcctgccctccgccgccgccatttgcgccgaccgccgtcatcagggcaaggatcgcggaagcgagggtgattccggggttttgcggagggtttaagcccggaccgctctgttcgcgcatcgaggggaggaaaggatgagctggaagaggcagaagcaggataaggacgagatgaccgaggaatgctgcttcatttgcaaggacagcggccacgacctccgcgtatgtgactctaggtaagtcttcatcgtcctgtatacgtgtgactccacgaccccgatagctgtgtgagtgtgggtgggtcggttctgtgtctatcggttggctctttgggcgcgaaaaagactagaattcatcgcgattgctctttaaccggttgcgtgatttcgtgctgctggcttg

SEQ ID NO: 69433 - DNA, 1136 bp, Zea Mays
gaataatgttactaacttgtagacaattttattacgagactagcgcaactggaacggattaaaactgagttaaaacgaattaaataggaattaaacaagtttctggaattttctttataccaaaaatcctttcctttatcaattttattcattttattttatacttggacaacacgcattaataccacagagctcggggtgcgtctaataaaatttaggactaaaccgcacgactcttcccacagccccggacggcgggttatttttagaaatcccggaggggtcttctgcaaaacagatgagtgaagggggtatcgtgatatatccaccatccgatcgaaccttggcagtccagattagatcggcgccttcgcgaaccggtacaccactaacaaccctccgatttcaaattaacgcctgagatttaaaactctcagatctattttcaagcgcccgatccagatcagacggctcacatcggatctgggcggaccagtatacatagatctaatcctagcctttgctcagaagatcaagggttcacgacgctctgcccgaacacaacgccgacgacgacggcaaccccacctcagcggcggcgccattgccaggatctaccagcactcgactccacgcctaaacctcgatccgaaccgggatacacatagcaagggcaatggtatactactgaaacccgtactcaccagcggtgacgccgcagaagcctcctaccacggagttccctgtcacgcgatggagtttgaatgaccgcgaggacccccggttggtcttcatcacccgacaggctacgatcacgcgtggcccaacggtggttctccctggtatttcgacggcgcccgcccaatggtgtccagcgccatagcatgatcttcacccctcggtctcgctcacgacggcggggcgcagctgcccaggagctaaaggaccatgcaatcggtagatggcaaaaggaaattgagggcgctcggttttatagccccctggcccggccaaatctccaccccgcgcggccataacaaactcctagatagcaatttctctggcggttacaagaatctgagatctctgttagctgagcccaaatcacacgcgatgaaaacaatggcttctgacaa

SEQ ID NO: 69434 - DNA, 408 bp, Zea Mays
caactggtgggcgtacttgaggtgttcgcctccaggtgcggtgaagaggatcccttcccctgctccctgcagcttcagcgagccatcaaaatacattcgccacacttctgcagtttctggattatcaggtacttgctgttctgtccactctgatacgaaatcaactagtgcttgagttttgatggcagtgcgaggcaggaacttgatgtcgtgagatcccagctcgcaagcccacttggctattcgtccaatggcttccttgttgtgaagaatgtcccctattagaaaaccagtgactactatgactttgtggtcgtcaaagtagtggcgcaacttgcgggcagttagaagtactgcatataacagcttctgaacctgaggatactttttcttcgaggggcctagaac

SEQ ID NO: 69435 - DNA, 476 bp, Zea Mays
cccggccgaacgggtatacacgatctaatcctagccgtacgctcccggatcaatggatcccggttgtcttcttcactccggccgacggacgcgagggatgagagcgcctagggcggcggtgccattgccggccaactccaatcccacgacccagattttccagcgaactaaatttcatgcaagaggttctacgcaccgcggggccatgattagatcgggtgactcaccacagttgtagaggtgaaggcgaggttgcatatggctggaaacagatcgacagctttgcatcttcgacgagggatcttgcatccccagacggtcttctgcatggaaactcgcacgcgcacgatcatgatctcctgctatccttctataccacatgccgcgctcagacctggccgtgcacgcgaggatcgcctgccgcgacgacatacccttctttgtctttctctcgctccgctcgaggaaggtttagc

SEQ ID NO: 69436 - DNA, 467 bp, Zea Mays
tacttagggtcctacaaaccatcatacattagaagttggggtggtctatacaaggttggccatggtgtagcttgcaaatccactgctagaggggaagtgctgtcatagacgaaggcgtcatggttttggcctgctcatcttttcatgccatacaccatagctctttagatgcttcgtcgatttgtcattgcagctaggaaactcaaagcatattctcccttcttgcctcaacttgttgttgaatgctatcagacccggtttttgaagacaaaccaaatgtgcaccatgtaatccagatcgcgtacacaaccactgcacaaatgacataacattgttcaatgctcgaatcataagatatagcttaacattaatagataacagtctaatacataaacattatgcaataacacttacgtattaatggaagtatagggaaacaagggagaacatggccctccacagacatc

SEQ ID NO: 69437 - DNA, 728 bp, Zea Mays
cttgagaacgggttatagcagataaccagataacggggcagaatcaataggggatcccgagattcggatgataaagccaacatgattcacaagaaaaagggttactagatctaggcaaaaggagaggtaggaaaacaagatctgctaggatgagcagcagaaatgctatgaagattcgagacaggatttatggaaagaaacatggctcggacatggcttgcgcaactagacaccaaatgattttttttgacacaacaagtgcacaaggagacttgggttggtctagcggtcaagttgtggtggtctatatgttgtgcaagtgtaaattcaagggtaaaacactcgagggtcagaaaacaccaacacaagcatgtgatttgattttttttaagggtttcacttgctgaccactaggttgtttaaaatggggggggggtcttttatggggaaaacaggcaacaatttttattggttagaggcaaaatggactaaatagttaccgtacctcctagaaagcaaggtaagagaaacacataacacgacgtagtcaagacttaccaatctagcacaaggtaaaacatttcttatagttcctaacataacagtacaacacattattcacaagtttttattattggaataaggtgagagaagcatgtgggtgcacaagagacaacgatgcgacaatcatgatgcatgctcattctagtcgtcttctcagacctaac

SEQ ID NO: 69438 - DNA, 726 bp, Zea Mays
caacactaagagagagcttggtacccaaagcactgtgaagactctcccagaatttggatacaaatttggagtctcgatctgaaacaatggacttaggcaccccatgaatcctgattacttccctcatatacaagggaaccaactctgaagctgaatttgtggtcttcatgggaataaagtgcgccgacttagttaagcgatccactacgacccatatagcatccctgcctcgaggagaacaaggtaagccaaccacaaaatccatggtgatatgctcccactttcactctggaatttctaatggcttcaataaacctacaggcctcttatgtttggccttcacgtgctgacatacttcataggcgaccacatacttagaaacatcaaccttcatcctcttccaccagaagttttatttcaaatctctgtacactttggtttcgccagggtgaacggtgtaaggcgttttatgagcttctctcaagatatccaccttcacctctgatttctgaggcacacaaagacggcccctgaaacgaaccaaatcattctcatcaatggtgaattcacggggtttaccatcgctgaccctccttcgagcttccggcaacaaacgatcctgctgctgagccacatgcactcactctaaaagggaggattgaatgagcatctgagtctcctctctagcggtgtcgacatagcataaagcgacccccatacggtcta

SEQ ID NO: 69439 - DNA, 587 bp, Zea Mays
tagtattgatgtgaggattacaagttgagagttgtgagtgttgtaggctaagatgatatgttagcagggggtgtgtatgagatcagatcccctaagatctgccttgggagggattcctagcctgccttatataatctggcatggcttgggttacaagtaggtttccttctttatctcctaatcgatttatattttattagagtcctcatcttgtgtaccttagagtcctcatcttgtgtgccaagtgcatcctgggaccgagttagtcggtcagtccatgtcaagttagtaggcccatgtcaagtcaatgggcccatgtagaaaatatgcttcatgagggcctaggggatatctatcccccgacatccgcctcgtcaattcaaggtcaaaccaatgacattgtaatatcactggagcaagaggtttggaaccatgaaaatttagttcttatatttcttcaattattccataatactcgatctcgtgaagcccgggcataaagactccaaaacatgtggtttttcgattgggcctactttagtcgtagcttgttgtgcggaaacagtatccattgacatcatacctag

SEQ ID NO: 69440 - DNA, 575 bp, Zea Mays
atgaaccagcgcatcctgactctggagcagcaggtggagatctaggataacaccatcgatatcttgtagatccagctccacgatgtgcaggaagagcttgtagaggccaacgatcaactggaaattcaccaccaagacatggaagctaatgagggaggcatcgagggagaggaggatcccgaggaaatagagcttgcttccagaccgaatgtgactccctctggagtgtccccttcatctgtatccagcgtttcctttaccaatcattgttagacgggttagttttaacatgttaggaggaagggaaaccacgtaagcttagttttggtaccaacttttggactaggctttagggtggatcccctaaaatgttgtaacccaggaaaacttttgtgaacgatgcaatgaatgaatgaatgaatgttatcctcgtttggttcgatataatgttatgtcatttttcttctcatgatataaagattttgtttggaaccatgaatcgaggtaacaacgacagaatttctattttcagatggcagctagacctcgtcgcgggcagaacgagcaagttcccc

SEQ ID NO: 69441 - DNA, 813 bp, Zea Mays
catatgcggaccccagttctacgacccctcgtcatgcgcctgacatacgcatgccctgtactcgcttagcatgaaaaagagacacacattgtttacccacgctaaccacgataagtcgataaggcacatagtcatcaaatatcgtcttgactgacgccaaggcacgatgggagtgtcggagactccacgtcaacaggacgaggcagcccccgactctgtgacgtgggactgaccaaagttcgctatagggagcctgagcaccagtggcctactacccacacgatgggacatgatgaagcgacccgccatacctgtcatgcgtttacgcgtgtgtgagaagacgacgtcagaggaactacatcagagaaactcccttagataacagatcccaccctgcttcaaacaactagacctgatcacgggtcacccgactcgcccaacccgacccaactcgaccaatacgatggacaggcacgagccatagtttttgacccacaacaatccacgggtcggtacgtgccgtgatttttgatccaaaatccaacccagcccgaaaaactgacccgacgtgtccaattgagaggcacgtgccaacccggtccgacactatgcacgagtcgtctgcgagccatgccaaacgacccacgatccgaccttgacccgacccaaattcgacacagcttgatgtttgaacaggtctacaaacaacccatctctttgtaaatacctcccccttaactataaaagggatggctaaacaggaaccggacaaccaagagagttaggagcaattgatagctgttctcatcttcc

SEQ ID NO: 69442 - DNA, 343 bp, Zea Mays
aaaaaaaccctacggccgaggcaagcttaattggcggaaagttttttaccgacatctgggaaaacggtgggcgagagatggctcacgaaattataaggaaaagtgaaaaagatacccacgaagctagagaagcagcaaaggcagttgaaaaaactgtagaacttgaaaggcggataggtattgtctaactgcttttgactttatgttttattattgtgacttcgaacttattcatgttttatatcgcaaccgaattatctcctcccccggagcccttcgggtcacaggccgaccccgaagcaaaaaaggaagatgaaattactaagatggccgaagctattat

SEQ ID NO: 69443 - DNA, 468 bp, Zea Mays
tctttgggcctaaattgattcaagaggcagaagagcaagttcgtataatttgagagaatttgagggtggctcaaaccaggcaaaagagctatgctgataatagaagaagaccactagaattcgaggaaggagatcatgtgtacctcaaggtgtcaccacttcatggaatgaggagattcaaggttaagggcaaattgtcccctcgctttattggaccattcatgatctttaggcgagttggggagatggcataccaactcgagctacctgataatctatctgatgtgcataatgtatttcatgtgtctcaacttaagaaatgtctccgtgtccctgaggaacagttaccaatggaagagcttagtgttcagggagatttgacttacacggagtatcctatcaagattctcgacacattgactcgagttacaaggaataaagttattaagatgtgaaagtgcaatggag

SEQ ID NO: 69444 - DNA, 1069 bp, Zea Mays
gccatttgcttcggtacgccaagacaaggtaccggacatccttccagtatttgaaggtgtagcaaataaagctattatgaagttgttcctttccagttgccttcgtctggcagttgagttcatgaatgttgcagaagcaatcagcatttggctccacaccctggctcctcattgcccaaataaaaattcccatcctcgttaaagcatttggggtctgttgatgaagataaatatcaaacttcttcaagacctccactagcatcttatgaagaggaaattgaagtccagtcctcataaagcttcagaataacaccacctcatttttttcttagggtgtgggacagtcaacatggcttggtttccacgactggactatggcatcatcgatatcttcttcaaagtcaaactctttgctatcgtcagaatcatcagataggtcgaccaagatctcattagtaatcttcttagcattacacctctacatgtcatcatgatatgcaacaagagcaagctactcacttttccatctaaaaactcacaaagctcgaagctacacaggcaaaggcaagcttcggagttttagcaaatggaatggctagcaaaagcaaatgaatgtcgtgattggtgaacatgacccccaacttattttatacacaataagtgcaggagaaaaattttaaaacccgacctttcactgcaaatgggtaccccttggcactttcttatgaaggcatgttttcagtaattcattttttcgctaacaagcttaggaaaggtgtttttcagaccttcggctcgaggccttcgtttattttgcggtctaagctcgttatgaaaaatgaattgataccacgaggggcaattgttgggggtcttcttcctctgaatgtccccaaaacactaacttaacaaatattttctagtctgtttcaagtgttacaagtagaataccaaaggtcatcttcggctagagctgctatggacacaagacaaagctatgaggagtcctcaagacttgctcaacaaaacagcaagagaaaaggacaacactacccttagttgttcacta

SEQ ID NO: 69445 - DNA, 836 bp, Zea Mays
aaggggttaccgactagtgtattcctaggctttcggtccagtctcaacatatgtataggatagagttgcgactgcggggggtgttaaaatacccgttagggtttggaactctccctgtgtaattaccctctcgccccctctgtaatgggcctggcccaactccaagcctattaatatatcaccccaccctattctagggttagggtttccaatacccaggtacaacgagttggcccaacatgatgtggtgcctgatgaaattatggagcgacaactagttaaaaaagggggccgggctgttccacaagttcttatctgttggagcaacatttgtcgtgactcggctacttgggaagacttgtatgtggtgcgccaacattttcctcagtccattgcttggggacaagcaaatgctcgagagggggcagatgtcatgcccgacaaccagggtgacagccaagaggagcactgatgaaggggagactgacagagtcaacgagagcctctggactcgagggcgtaaggtgtggtgtgccggttgaggaatactggccaggtgtgggcgtcttgggtgagttgtaagccgtggtgtcgagaggggctaaaagctgtaacagaactggtgatccgattatcaaacaacagaatgcactaccacgaacctcgacgttgtccctcacgacgacgacggcgattttctagcgctctcgtcccagtgatcaccatcgacggccacatgcataacaaaaggaaaaacagattttattttgggacggagggaatatataagtgatttgtttgtcttttttatggagcacaatctgtacctatgtcgg

SEQ ID NO: 69446 - DNA, 528 bp, Zea Mays
atttaaatcggttatgatttttaccttagcatctccctttgccatgagacgatgaggggatgagaaaagtgaaggggcttccttgatggcaatttcgacattaagcttggatgaggtgtcatcatcgtccgagctagcatccgaatcccattcaactaggtaggctttgccatctttcttcttgttgtagaatgtcttcttctgcttatcatctccatctttgcccttcttcttcctgttagggcaattcatggcgatgtgaccgggttccccacactcaaaacactttctatcattgaaagcatttcttcttgatgtttggcctcttctaggttgacccctcttattcttcatgaatttgttgaatttctttacaaatagagccatatctccatcaccctcactttcattttcttcatcattactatcttctgtttcaattgccttagaagctttagctttgagagcgattgattcattcttcactttctttgccaaacttatagcatcgacttgagatttcttgaa

SEQ ID NO: 69447 - DNA, 531 bp, Zea Mays
tccatggttgggttgggtggtggtggtggcaactgctgaccagcacgttgattacgtgtgtttctaggacttgggcgatcgttcaccatctggttggttagaaagtgcaaccttagataagtgaagagtagagaaaaattctagggggaagatcttttactaaagttaagactatttgtaaattttaaatgttcttatggccatcattccataagatcattgcactcaagcaaaaatccaaatcaaacattatgcaaacatcaccatcacatgattgttattaaaatcatgatatcataaagagttttgtcgtctaacgcaaaatcaaacttattacaacatgacttataaatctagagtagcctggtgatagatcctgggtctccatagcgaatcatcttgtagggcggggacacaactatggcagggacttgggctttgggtggatttattccatcgagctaagcttcgagggctgcaatcctagcatgtgcttcttcaagttctccatgtacccttgagagatcaagg

SEQ ID NO: 69448 - DNA, 412 bp, Zea Mays
acctgacgtcctttctctcctggcagctttgatgtgaagcatagcatacatagtttgagaaacatcaaaactcaccttgtgttttcttgcccatcctgctgtgttctcttcctgagaagaaagagaggactcacatggaaagttttatatctgctgccctgggtgaattgatgattagatccataaatttcatcatcaacaagctctcgaagccgccggcactggccatggaggaaagcctacaaaggactcttctccgagcacaggccatcgacgaggaggccatggggcggcacatcacaaatcaagctatgatccagcagctaagcatgctgagagatgccatgcaccgaggctcttacgcactcgacgccttcaggtacgagcctcactatggcgaggatgacagcga

SEQ ID NO: 69449 - DNA, 648 bp, Zea Mays
acaagtttctgaaaattccaggtatgtggtgtctctggggcttggtattaacctctgccaccctgctgataaatttgattcccagccatttctcgaagaaaacgagtgtcatcagcagtggcaataattaaggcagcgatagcctctgccagtgtgggaggtataggtggcgggttcggagtttcctccccaccacgggaagttccagccccatcctgagcacgagttctggacgacatctgaagaagaaaacatatttgattattacatgccacgattacacaacctctgttacattattccaaacttgttctaattatacatacttaacttatacaactcacttttccttatttagattacataaggaaaccacatactactacactaatctagttatccacgtcatgggttgcttccgctccactgctagcttcgggagaacgatcatccgtaatgttcatggaaggatgggctccaaagagatccaactccccataaggtcctcagtcagctgctcctgatgcaccatctcctatcgccacaacatccggtggcacattcggatgcaactggtcatacaacacgtgcacttcctcgtgcagagtattattatacacttgcaaattttccaaggctacacttagc

SEQ ID NO: 69450 - DNA, 388 bp, Zea Mays
cccaaagttcctgatctagaggctcctgtacctgaggctcccacaccagcaacttctgccttggaggatcccccactagaggaccatatactagagcactcccttcacctacgatggaggagggtcatccactacaatagtgatctcaccttgcaattttgccgcatgttctgacacttgatcgcaacatcgagaatgggcaaagtcttggtcaactaccattggggtgcaacaacagcacatcatcggacactatccaaagtggttcatttcaaacaagatcatgaggccgaatggatatggaggttggatggtggtatactagcactatgccttggctgtttggggcaactatgaggccaggatcaacaatgtggctcgagggtca

SEQ ID NO: 69451 - DNA, 948 bp, Zea Mays
ttggttatcggctgtccacagatcagttgtaatagcaacacgacatctaatcttttgcaagaaattcctagcttttcttctctccaaccagtaaaagctcattatatctttcctaatagtgttcctagttcccaatttgaacaaaggttgcaacgaactaacaaatttacggaagccatgatgatccacaatggatagagggtattcatgcaaaacaatcatagaatataatgcctttctagccacttcttgatcaaaaacatagttctctacagctacttttcccttgtcaacagctccaaatctcaaattagtttgcagtttatcacctggtttctttcgataaatgcaaattttcaaatgagtacgaaggtgatttgtaccatttcttgtattagctgaaagaagcttcttgcaaaagttacacctagccttccaaactccatcatcatcacatactcttgtgaagtcttcccaaacagtcgaagtgagcttcctttgtgatccatgagatcgagtagcagcaacacctaatccatcttcaccttgaccatctggcacatcaacaacctcaatggagacagctgctgcaatcgggggaacagacgtttgcgacacttgttcatgttggctgctattggcaggggttgccatcacaactggtcagctgatattgggctgcagaaatgaggaatacatgaatcatgactggaatggctaaataacttcagagctagtagtacagattatagaacaatacagaaaacaatgatggcagaatgttgtgttctctgtaacagataaataatacagaaaactgactctagttgctgagcacaaacagataaataataccttggtccttagagcttggacggcgctgtgccgctggacggctggacggaccggcagagtggacgctggagtctggattggctggccgcagtc

SEQ ID NO: 69452 - DNA, 619 bp, Zea Mays
taggtacactgctgtgccagtaaccgttggattcggttttaacggtgaagattttattatcctagatctaaccctggccgctggatcagagatccacgacccagatcaaaagatatcatggctgattcctaacggtccgatctagatcgagggtccggattcaatctcgaagggggtatgcccgggatccaatctcagtcgtacactctacatcctacggctcacactgattcacccccatcccaccctttttccttggcccgcatagcggcgacgccgtccagcatggcggcgccatggctgtgcatgctcagcaacggtcccaaggccaaaagtccaatcggagtagtactacgcgaggcggttacgatcacgagcataaagagataagtctcaccggttatcgcggcgtggagggcaccggccacggtgcagcacggaccgcggcggagcagaggcatcggagagcaattccagcggctacagggtccttccctctcccctgacgcccccataagcttccctgcatatcgccgaaccccaccgtacaccaatcgagcccccagcaacggtatgtctccaattagccgacggcggcgcgacgacaacccatccaccc

SEQ ID NO: 69453 - DNA, 538 bp, Zea Mays
gttcggtctagcacggctgataagggcaaggacaaggagaccatcattggcgatacacgagaggctgatgaaaacactaaaatttcttgcaggaaagtggtgacaaaagacccatgatggagaagagtcattaaagatcaccatcacgacctccaatgccgaggggcagacgcagtgaggcagacaggtgcgactcttgttctgcgcatcgcggaaggtccggcatgtaggcgcggatggtccgggacaccccccgaatagtccaagtcaagcgaacggtctggcagcgcccaggagcaacaacgtacacgtacctttaaacctcgacaaccagaaataggtacatggaagacaaacacatttaaggcatctggtcgactggtcaaagcgcgcccaacctttgattcattactatctaaatatgtgaaaaagaaggttggcccaagcgacctcgctttacccaggagcgacgacaggtaataccgatcgggtcatctcactaatcggaggagtcaacacatcacgatattcatctaag

SEQ ID NO: 69454 - DNA, 400 bp, Zea Mays
agtctttactattaggtgccccaaggcgtgaggggctccaatggcttgtatgatcaggtgtcctggggcataagagggcctagaggcttatactattaggtgccctagggtgcgatgtaacacccctagtgttaagcatgctcatacatttcatatgcatcatgaaagaatcatcataagcatcattaatcattcactacttacatcagaatcttgaattgttactatttgttggaagagaattcatgtttgaactaataggaagcctatgttctataatagtaggttatcaatgagtgcttgtgtgtataagtaaacccacttaaagaatttaggttggttatggttactcttcaactcttgatttcatgtggtgatggtttcttaaactatatgtaat

SEQ ID NO: 69455 - DNA, 461 bp, Zea Mays
caggcaggcagcacatctgctaaactacaaggagatctgtgccgggtctggagtactgaactccatccattaagataatcaccgggatttccgtatgggatggctctgaagaaatgaaatgatcactagacgtttcaggcgtcagtttctgttcttgcccattcagttcgcccaaaaactcccatcaggggttacgttaggttacgtacgcttcaggcacccgtttggaggagcctggccctgttccgccacgccagtggcctataaactactccgctgccgatgaccatccttgttgaagagcatctgcaggcttcttttcgtttgccaactccatgcccacaagctccaagaacggcgccgggtcttcgggaaaaaaggtaccgtatccagaagcaaagcctctcgcgtcttacccatggcgcgtcgttcgttcggtacaaatcccgcgtttccattac

SEQ ID NO: 69456 - DNA, 413 bp, Zea Mays
gatttatattaattaaaattgacctagaacacagattatatgtttattatacaaaccttccgaaaatcatatcgtttcaaccatagtccaaggcaaatgataaattaatcttatcttaggatccaggggtcaatatcatagtccaatgcaccaagattacatgtctaggcataggtatcatagcctatggccctcggattatacatttcaatgtcataagtcatagcaccgaggtatcatgctattgttagcctagaggacacaatgattttagcgtcgacctcaatacaaaggtctagaccttatactacatgtcatcctcttctctcttgtttctctctcttctactctaaccctgaccacacagaactcccctccatcggtcgtggcgccacgccctctacctatcagag

SEQ ID NO: 69457 - DNA, 1360 bp, Zea Mays
attttagtgacgaattgtaacatgaattgtaccacaattcagcagagtctagccacttagaccactaagaaggtgtctgatgcactgcacaccttaaaaacatttccaagcattggttaattctctcagtttgtccatctgattgtggatgataagctgagctcaagtgaagcttagttccagcaagtctaaacaactcttgccacaaagtgctagtgaaaattttgtccctgtctgaaacaattgacctaggcagcccatgcagttttacaatatgggtgaaaaacaattgggcaatctgtgatgctgtgaaaggatgcttgacagggatgaagtgggcatatttagtgagcctgtctaccaccaccaaaatggcagtatacccacctgatttcggtaatccctccacaaaatccatagatagatcttgccacgagtgttgaggaatgggcagaggctgtaatagccctgggtacttacaatgttcatgttttgcctattggcaaatttgacattgtttgacaaacagctccacatcagtctttgtcctggccagtagaacaatttcttaagcctttgataagttgcaaacacagcagagtgacctcccatcgctgaagaatggaaagctgctatgagcttagtgtgaaggcctacattttgtccaacaacaagctgttgttgtctatatatcagtccattgttcaaagagaagccctgagcattaggactttggacagcaagttccttcagcaaatcttgtgcatgaggatccatctcataagacttcagaacttcttgaatccaaactggtgtggacacagatatagcagtcaactgaatttctgatgccactctagataaagcatcaacagccttattgtccacccctcttttatattggactgaaaactgtaatccagccaacttagacattgctttcttctgtaaatcagtggccagggactgatcctacagatggctaagacttttgtggtcagttttaataacaaataccccttttgtaagtaacatctccatttatccacagccatcaaaatagccaagaactccttttcgtaggttgacagcttactattctttacccccaaggccttgctgtaaaaagcaataggatgacctctttgagacagcacagcccctatgcctttgtcacatgcatctgtctcaatttcaaaagtgtcatcaaaatttggtaaagcaagtacaggagtggataccatagcagattttaattgctcaaatgctatctgagctgcaggaggccagttgaatgtcttctgttgtaacacaacagttaatggcttagctataacaccatatcctttgacaaattttc

SEQ ID NO: 69458 - DNA, 611 bp, Zea Mays
aacatgtaaaggcatttggtgattctcatctagtcgtccaacaggtgttagaagaatatcaatgttttgatgatactctaaatagttaccttgaaaaatgttggagcataatccattcttttgacgaattcagtattcgacatatctctagaattgagaatcatagagctaacgatttggcacaaaatgcatcaggttatcggataaagagagggaaatttcacaatactgaaaatctgataaccagtgcaagaccaaatccctaggtcgcggaccgtccgcgtgaagacgccggaccgtccggggttaccaggaaagttctcctaatcgattcggctgataatgaagccgatgcaagagattggaggatgcccataacaaattatttacgaaatcccaatgtcaggacagataagaacattcggcgtacagctttcaaatatgttttgatgagtgatgagctttaccgccgaatagtcaacgacgtcccgcttaagtgcttgggcccagatgatgctatattacccatggccgaagtacatgaaggaatttgtggtacccatcaatcggctccaaagatgaagtggctattgcgaaggtctggtttttat

SEQ ID NO: 69459 - DNA, 668 bp, Zea Mays
ggccatctaaaaccggatttcatcaaaccggcttaaagtcacttagatcctcgaacttaacatattgtgtcatttaggttccataacttgacattctatgtcacatgggtcatcaaattttcattagtgcactctaggcctccagcgtggcacccgacgctagcatccagtttgactaaatccgattttggatgaccgatcaagttcgattacctattttgctgatttttaaagtttaaagacctaaataacacagtgcgccaaatttatgccactgatacattttactcttttataaagttagacttatctacactatttttaacatatagatatttttataagtagatgcatgatatgactcagcgaggaagactccaagcctccaagaaagtagacattcaagttagatatttttataaaatcacgcaaaacaatattttatgttgtaaactacagtttgcagtttgaaataagagatatagatgaataagttgctgaagatagcctaaagatgtgacagacgcacaaggttgcgctttaaaaatcaaacattcatataaattgggatatgaaggccgcactaagggtgtgtttggttgagaagtcaattggaatggagtcattcattctatgtttagcaagcagaacaaagtcgttctattttt

SEQ ID NO: 69460 - DNA, 593 bp, Zea Mays
cccttggggatcgtccagctcaaggaagaagaatttcgggagttaactcaaggagggagatatgttagtgattacatccacaaattcacagagctggcttgctatgcgcctgatgatgtcagcacagaagccaagaatatggcccgtttcttgaaggggctgagactagaactcaagaccatcctcgccagccaagatttcctcaatttctcgcacctctcaaacaaggccatccaggtggaaagagcacgagaagaagaaaagggtcacctcaagaggaagtttcaagttctctgagcttagtagcaggacaggcactagagagttcgatcttttgggttacctcccaaaggatcgagcttcagcaagccagcagggtccgctccgtcatgtttcagccagcctggtcaaagttctctccacaccccatctgttgcaagcaagccaacctccagccaatgcttgttggcactgtggagacccagtcactacaaaaataattgtcctcaattgaagacatccgtacctacctactccaactcggtgaatggccccaagaatgtttcagcacccgcctccaagacaccctccac

SEQ ID NO: 69461 - DNA, 511 bp, Zea Mays
gaaccaatctctgaagtctgaactcttctctgattgactgcaccttcctctgttcagtctttttttcacacattctagacaagggcaggccaaactcaactgagcaactttgctctccaactatagatcttcaggttgattataatatcccagggccaaaaacatatggatcataagttataatgccctaaagtcaaccacagttcactgaattttagtttcagttagcagaaacttgagagcactttactgcaggttttacacagcaccaaactcaatactccacaagaaacttgttcaccatacatagctcttcaaatttgctatagcaaccttgggccaatgatgtatggatcccaagatacagggctcgaagatcaactacttacactgatttgccaatttcagacaactgaaaacagctatagcacaaaccaagtatgacatatcatactcaaaggcattttactcacaattctatacagtagcaagccaactctttgcatcaaat

SEQ ID NO: 69462 - DNA, 426 bp, Zea Mays
cgccgtgggcggaagactgagtatcttgagattcccctcaaagatagcattaaggggtggcgtctagagtggtttatagttgataattatggaaattctctcccctcccggtcggggagacagccagacgttcgcactccgagttggactgagtctcccacagatcaggaagtggctgaggcaggtgtgttgctggctgaagttggactgctgaaagagagaggactaactgccgaagctgtggttactgattttgttttcaagaacattcagccactgaaagacagggcctatccggcatatctgtatagagggctagccgactcgactcgggttaccaataggagaattccttctgtagatttggtaagccgacttgagatgattctcaggggtaaggtttcaaatgttggtgctccagtggca

SEQ ID NO: 69463 - DNA, 1757 bp, Zea Mays
cgtttgaaccaggaaatgaaatcgggcaatccatttctcgcaccctttctaagaagagtgtcatattcctttggagtggggtcccttgatcgacgccagaattcatgaagaaattgttccatgtatgacgtcacctcttcaaggttggtcaatacatataacatgatatgacaccactcttcatgagtcagagtcttggtggtcgagccacttgcgcttccgagttggcctcgaaatatgctaaggttcgattcattgccgccatcattgtaacgaggggatggattatgcacgctcggcagtttgtcaccataataagttgttgtgaagtttgacacctcctctagaatgtatgtctctgcaatggaagcctcgattttgcatttatttctacatttctttcgaatagtctttagacatctctcgattggatagcaccaacgtccctgcatgggccccccattcgttcctcataggggagatgaagaatcaaatggtgtattggattgaagaagctgggtggaaatatcttctcaaacttacacagtaacacgggtgccaatctttccaagtctgcaaccacggtccgagataactcttttgcacaaagctgacagaagaaatagctcaactctgaaagcgctagccagacatgctcagggacagcctcgaaccatcgcaggaagaatccgttcaatccatatgtggaagtcatgactcttcatccctaagactcgcatagtagataagttcaccccctactcaggttagttgcatacctatcagggaacatcaatatcttgatccactgaagtacttccttcctttgggccctgcttaggatgaaatcggccttaggccttctccatgtttttccatcacatggtggcttcatctcttggtttggtctgtcacataacgctgcaagatccactcttgcctttacgttatcctttgacttatcaggaatgtccataattgttgcccacagtgcctcggcaacattcttttcagtgtgcatcacgtcaatgttgtgtggaaggagcaagtcgtcataataggggagccgagtcaagccagacttatgtgtccacatatgctgctcaccatatcccacaaaaccaccttctgtattggccacgtacccatctatctattgacgaatttcggcaccagtcatcgttgcaggtgggcggtctgtcactacgacacctttcgtaaagttcttgatgtctaagcggaatggatggtcaggaggaagaaattgttgatgtttatcgaaggacaaatatttgccaccctttttgaaccaaatgaacctaagagcttccttgcaaactggacaagggaacttaccgtgaacacaccaggcgcagaatagcccatacgccggtaagtcatgcatggagtactggtaccaaacatgcattctgaagtttgtcttcgtagctcggtcatatgtacataccccttcctcccaagcacgtaccaattcatcgatcaaaggctccatgtacacgcccattttattccccgggtgtcctagaattatcaatgacacaaatatattctacctttgaaagcacacaccagggggagattgattgggataacaaacacgggccaacatgtgtacggggcagcgctcattccatagggattgaacccatctgtggccagcgcaacacgtacattacgagcctcttcgactttctcacggtgaatggcatcaaagtgtttccatgcttcaccatcgg

SEQ ID NO: 69464 - DNA, 350 bp, Zea Mays
tgcaaaatgacattaccacaataacacaagttcaactaataggaagtcgacaaccgcaaacaaagtggaatgagatgtctagtagtccccaatcacaaacatagcacaaaagcaactaaagtggaatgcaatgtccacaaccacaagcacacaagtgttactcaagcactcaataaccatcatccaaatcatctaaaccaacatcatccttgtcttgctcaccaccacagtcaccactgttgtttgttgcttctttatcatccatgtcaaggttgtcaagcacaaaattttcatcgtcttcattctcttcacccacatcaagaccattttcatcatcctcaagaattggc

SEQ ID NO: 69465 - DNA, 507 bp, Zea Mays
gtttatttatatgttttacaaaagtcttaaggacggtaggtaggattttctagaaattcagggtttaaaaagtaagttccatagactcaggcatatgaattcactcaacctgaggatggtgggttgaatcagaacaagtcgaggggctcttctacaaaattgccacgctgaaggggtaaggacccatctgagccgtccgatctgtttacagcggacgagattagatcgcgtagcgttatgaaccggtatgcaatcatacccgttggatctgtgatccacgacccatattaaaagaacgaaggggtatgctcatcttttaatcccgaccgcagatccgacatcccacaacacatatcacacgcaggcgaaggggcatggctgcgtcaatctaggccgcccgtccatatctaacagctctcagctcatctccctctcttactagcaatcctggtggcgccataccggaactgcggcggccgatcaccgggagccgcgcaattcaacgcc

SEQ ID NO: 69466 - DNA, 308 bp, Zea Mays
gtgtaagtacatgtcaggatcagtcatgcaagtgaatcctgttctgtcactgttggaactgtgtacaaattcaccaagtatactcatctatcagcttgttgccagctgatcgatccaattaatatatttcagatgaactgaaatttgggttttccagctggaattcgcattgtttcccaaaactcatcaataacatgcaaacgttttcagttttaatggatgttctacgcagccacttcacaatattattctgttttcggaacttgggagtgatattctgtactatttacatattaataactgaatgt

SEQ ID NO: 69467 - DNA, 549 bp, Zea Mays
gttaattaggaacagagccatcgtcttgttgtcctcctaactacccattgatttcatcactagtggtacctagtgttttatcacatggtttggttactctatcctagcaattggttggaatgaaagagttagtagtagctagatggaagatgagttggttttctatctcaatgcttcctcatagataatacaatacctttgaatactctcgggtgaaagctacaatggtttcccaatgattgcagagtaaaacctgttaggctaagagatactaacacctacgcattgtgtgcttgatcctcactctaggtcgcatcgatcctttaataccaggtgcatactctaccttgtttccttatgctacttttcctgctatgtatcccatacatctactccaacaatatgaaacactagctcctgaggggaactactccaccccacatgcctaatttctacatccttgtcactgggtggttcttataggtacaagatcttagagcctttatgtaatttagtactactttacatgagtcctttatcaagctcagt

SEQ ID NO: 69468 - DNA, 574 bp, Zea Mays
cctcacctgttatagatgagttgttggatgagttacagggagcgaagtggttttccagtttggatctcagttcgagctatcaccagataccaatggatccacaggatattccaaaaacagcattccaaactcacaatggccactttgaatatagagtcatgccacatggtctcacgggaggtccaacaacatttcagttgaccatgaattcagtgctcgcaccttttctccgcaagtgtgtggttgtgttcatagatgatattctcatttacagtccaacctggtcggaacatttacaagaagtttttgccactttggataagcaacaatttaaggtcaaattatccaagtgttctttcgctcagactaagctcaattatctgggacatgtgatcagtcaagagggagtagcaacagatcccgccaaaattgaggcagtacaatcatggctagttccgaagacagtcaaagagattcagagttttttaggcctagcgggttattataggaagtttgttaagaattttggaatcctcagtcgaccactcactaatctgttgaaaaaggacaagta

SEQ ID NO: 69469 - DNA, 1140 bp, Zea Mays
aattgataataactcatgttgttttggtttttttagaattctagggcgcagcccctgtcttagtattacccaaaacagaaaatggaactagtataatcagatatacatcctaatttctaaacttcaacctaaacatgaacgaaagacaaggtgtcttcctatcatttatctctaaacatgagggatcgtaactgcatgaccactcgaatatcaactacaaaatatatctaaaactccctctttaggctagctatctcctacaaaatatatctaaaattccctctttaggctagctatctccagtgtttacccatccttgtacctatattcaaatttcaatctgcgaattgcacaatctacagtgcaaaacagtgtattagatgatcatatgagtgaattgttagacaccgtcttatggtttgccagtaaacaggaacctataggattgtcaggacgcaagtataatatgtagagaaagcactcacatgaacagaggcgcaaaaatgtaacacctgcagaagtgtgtacaccatacatgaaacttaaaactcttgaaaagatgaatagttgcataataacgttgaatttaagagcaatggacaagatgtcgaacttgagaaaatagtataaatacacgtttttacacaaactccagattaaaaatataaaaatttaaaagcatgcgagtgagaaaaagctagactaaaaataaccaacaaaggctaccctcttgtttcattttgctctcaggaaaatcactccaaaactacataaaaaatgttatcaagataataaaaaatcgttggaaaacagctctgctttttcctctcttcctcagatcgaactagacctaagcatgttgaatagtaataattgatacatgaatgtagaaagcactaaaaacattaggtcattcaacaatagtcaaaagaaggccctgtttattcctacccctttctaaaaaccgcagattactacaatttggctccggcaaaagtagatttgtccacccagtcattgcactataccgccattgcaacctagtaatatcatcctacattcggtgcaagtcattgctctgcggagtattattaagcatatagcatatcacatccacatgagtaacaattgcaaagaaat

SEQ ID NO: 69470 - DNA, 508 bp, Zea Mays
acggaatgggctccaggaacgcggtggcttccctcgccaagcaggcgacttgccgtgagcagaagaggcgaccacagtgacgatcattagaaccgtcgcgcccgccaccagcttcctcctagcagcttccatctcgtctcgtctgagcctctctctgatcagatacttgtagatgcatgaggcacaaagctcggcaaggagatatatagattttacaatttgaaagtaacgtggtcacgcgtgcgatgcagaagaggtttgaggtcgctttcgagatgtgacatgaccagctagggtagctcttccagatcgagttatagtctgcaattacaatgaattgaaaggatcatatgctgacatcagaccatatgaaacgttatttataacacttgcaattcactgataaaatcgttaggatcgttattagatgagtcatcatgagtaaaagtttttttaaaaaaaaaagtagcacaacatcttttcaaattatgaccatttaaagactttg

SEQ ID NO: 69471 - DNA, 1077 bp, Zea Mays
ctcactggcgatcgactgaggatgattcttggcggatgggttcgtgatgatccaacagagctcactgcggggtcaatttataccaagtgaaagtggtggccggggatttgagcgacgacgcgcggcggtcggagaagtaagagttcactggcgcgcgattagtgtcctattaccgtggcagtcattccgacgagccacagagagtcacaagggttcacagcgatgtggtggacaggtagagacacgcggcggacggcggtgatggcttaacggcggtgagaagcttatccaagggatcagtgagcaaggggagaggcacggcggctagccggagtggcgtctagctcatcgacggcgatgctttttcaccccgcgatgttatctacttgtcacgagcacgaatccagacgctggcgacacaaatcgcggtggaggtatcatcggcggtgagatcactgaagcttatcttcttcagttactgtaccatggcattcctcttcagtccatctgacagagctacttcagggcaattcctctccagatttcgcatgacaacttcatcacccctctgcaccaaagttgtagggctacaaaccagctataactttgctacattgtgttcccacaaaaaatcactggatcttgcttaaaattaagccctaagttcatgtaatcctactgtcaatctgaaattcagactttaacaccctgacagcctgactttgagtgtgattatctctaaattattcataacaactgtgcttacactcttaagcaaaattgttctcctttaataggtctacaaatttgatgtggtgacctagggcaaaaacctagaatttgaaagctacaaagctccaaagttgagcccatgtcactgattttcaaacttaggtgtatagggtttaaggggtgctttttgcaattagacccaaatcttagggtttaacttgcaaatccacatatttgtgatccatgtgacttaggacactttattatcatggtttttgcactttagtccaaaagtgcactgattttgcacttagccccctagggtttaggtttagggttttctag

SEQ ID NO: 69472 - DNA, 960 bp, Zea Mays
tgcacagtggaaaactggcatgatttattattttcatacaattgatgtaaaattgtggtggatcataagtgtaggcttttataaaccttttgatgagaacacaaaagagctcacccaagccaaaaagaaatgcttacatcttgaacaccgagctactaacattttatattaatggataagtgataaggtgtttaaggaaattatgtatatggagaccgctcatgatatttggacatatcttgatgacatatatgggaggatctctagcgaggatgttgagcacatccacaacaccgtggttgtgaaagattgctccaccttatggtcaagtgatgatgatgaaagacacaccacaagttcacttgataatgatgattgtgttggctctaactcaagtgatgcaaattatggttctatctcaagcatacttgatgattatggtgattgttcatgcccggacaatgatatcgctaatacaagcccatccattacatcacattgcttcatgtcacaaggtaatatgaagatatataatgctaatgtgactaatcattcatattcatatgatgagcttgttggtatacttgcaagcatgaacattgctttagaaattgagaaagataaaacaagaaacttggaaaatgaaaactcatttctaaagtattcatgtgaacaacaaaagcatctactttatgttgttacttgttcacatgaggagctaaaattgagtcatgaggaacttagtgttgctcatgaaaatttgatacaagagcatgcttttctcactaatgaattttctagtaaagaaaataaaactagtgagaattcatcccatgaattatatgatcaattgaaaaatgttgctaatccatgtgatgaagacaagaagcatgtatccacctcttgtgatgatttattagctatgccatgttcttcaactatagattattattattcttc

SEQ ID NO: 69473 - DNA, 846 bp, Zea Mays
ctctattcagtcttcttttccctcgagcgccgaaggcaacagtcatggcctcgtcctctgccttcgagtaggctcccagcagctcatcactggtcgcctctatagcatatagccaatcatcatttggctcgtcaaattggcttatatactggaaggtgtacctaagataaaccaaaccaccttgggctggagctagcaacagtttccttcgacatttccaattcattcacaagaggccatactttgaaagcaatgtattcttgtaccaaatccctggtaccgatgtaagtacatacggtgttgaaagccattaggcactcttgcacctcattcccaattgcaattgattgtcttctaattccgaagcgcgaccatatgggatgttgaatgatgcccctcacatcttccctctgattctgatcattctttacgtagaaccattgcttcatccaagagctcggccacttctttcgaaatgttggcatgggataatttgcctcagagtggggcacgaagctattacatccgaagttgttatggtattgttccttaacggtcgcctttgtctggtaggataactcatgaatattgcagaaacacctagcatccggctctagcccttgactcctcatagcccatataaaaacccccactctaataaaggcttcgggggtaagttgatgaaggtatttcgaatgtcttcagaacttcaaccaacatcttgtgcagtgggaagcgaagcccagctttcatgaagcttttaaagactaccaccccatcagcttcggaaagagggactgtgctttctcccccgccctcactatagaaatatcatgaaaatatttt

SEQ ID NO: 69474 - DNA, 562 bp, Zea Mays
agtcgtctaagggtgcagtcggaatagcacaacaagtgcgttaatcgaaatcttctatttaaaagacactccgcgcaaaagtcgcccacgggtgcagccggaccaacccacgggtgcagccagaccaacacaggcgcgtgaatatggccaacaggccacatcatacaaattacagttacatacactcgacgagggcatcatatattacatcggctcaaccttcgggatgatacccatctccctgtaattaaacagcattatcctcaattcctcaccctcaaaaagatttcgcagatccccttcacctatgctcgccccaatcagcgaggacaacaattcttgtttaccaatccggtccactcgaagacgaccatgctccatccccatacgacggcgcctaccacttcgcgaaaattcacccacactgtgtttcgccaccacccttcgccgcctatacccagtactcgcactaggaagatccccgaaaccctccacacgtggcgaagtctccgctgcagccacatctaatgcaacaaaataatccaagccttcatccgaggac

SEQ ID NO: 69475 - DNA, 547 bp, Zea Mays
atttttcttgtcgtaatctttgtaaaagaattaaaacaattgattttatatttcaaacatgtgcaaataagatgaatatggttaatggttgagctgctacaaagaataaacggcgaatcaattggaaatggtggataggacgacgacggacaactttggctgctcaataggagctcgcaccgaacaagactaggcggtgatgtttctgcaaagcggcggtggttcgggacttcagatgtggacgacgagcgatgacgtcaggagagtctcgagcaaagatcgagaattatgttaaggatgatggacaataccatcacttaccaagtcttagctggtttagatatctcaactcagcaaatatacttagttagagttcacctaacaactagtcgaggctttagctatgctatttcgaacccctataataatctaagttgctaacaattctctctctatgttccaaacataccattggatagcgccggtgacatactttaaaacatcacctaccttatatttagagggtatttagttagagggactaaag

SEQ ID NO: 69476 - DNA, 981 bp, Zea Mays
attttatcgagacaagaaatacgataaagatcttaacagaatcggagtcatacttgtaaaaatagagttggactcgtgtacaacttggtcttcgacttagttcggtcatgaattcagtaaccgactagatatgtaccatggaacccctagggcatgaggctatgagccataggatcatcagatccaaacatacaccaacaaatccatcacacaccgaagatccatattaacaagggattagctactttacaatttcagagtaacaaatagagccaaactcatagcacaggggaacttcatatcacaaatggaggcattgaattgatataaaaagctaaagttctaaaaagtttgaagtgctgaaacttcaaagccgctaactagtgaagcaccgaagccttccggggagagaagacatacacgacacgttagggacgtaaaatgacgaaattatacaactacctctatatgtaacacttatgtaatagaaaagacagaatccatatgaagatgtataatggatcaaccatataaatagataaacaatatatctgctatggggattggcattcttgtatccctacgcctgtatatcccctgtttagagaacctccgaaggtatatgatgctgaagattattgttgtcttgtctttcatcatatatcgagtctttccctaggatattattattcgcaatgtgcattacatggttaatcgattgagagaacatgcatctcacctttagctgataaacgataatccatgttttacacttcgtagctactcatgagtttcgatatacaaatttgttttctggactacgtaccattccatcctcttaggagaggagaggaagtgtcctcgatttaattatgttgtcattttgtagttcttcacaaaatctcaacaggtaccaaacacattgtttccacaagacatattttagtcacaacaaatctatattattattaatcactaaaa

SEQ ID NO: 69477 - DNA, 659 bp, Zea Mays
gttcacttatggtttagccgattttcattggctctaacattacaggagtgaagccttccctacatacacttatgaattggtaatctaaaaatcaactcttgtcaaacattttgtagactcataggtccaaagtataggggcatcatccataacaatacaagtcgatgagtctgcatttattgtttcaatttcatcacccacccattgtattaacatttgatgtaaagtagaatgtacacattgattagcatgtatccaatctatacctaagataacactataattgctttatacttcaacgacgaagaaattagcggtgagggtctttgtcccgatggtcaattcaatgaacatgacacccttagcttcgatcggattcttgctcccaacaccgatgagtgtcatattggtcctgatcagcttgctatcctatttgtcaagcttttggtacaaggaataaggcattaaattgactgtcgctccaccataaaccaacatcctagaaatcagcgtcccattaatatggtcgcacacatagtgcgaatttaaatgattgactgaatcctttcgtttggtgaagaccacttccataggaccaaaatcaaactgcgcaaccataggttcattattttttataatatcgtgatcgactgaaaatg

SEQ ID NO: 69478 - DNA, 307 bp, Zea Mays
ccagttcctcccacgttagccgaggcgatcaccgccttggtgaatgccactgccgataatacccgcttccttagggaaatggcgggtcagcagcagttccagcagcaagcagcaagaggttatccgcagggtccccgtgagaccacttatctggatttctcggaaactcgtccacctctattcgtcaaggcagaagacccgctcgaggccgatgaatggatacgggtcatagagcagaagtttggccttctacgctgttcggaagtacagaagccattgtttgccgcacaacaactccgtggtcctg

SEQ ID NO: 69479 - DNA, 456 bp, Zea Mays
gctggacatagtctatcgtgtcacatctaatgtttagacacaacacagtgatcgaacaaggctgggctggcacaggtccgatggctaatggtgaggccttgcccatgacgaataaaaaccatacatatcgtgcacagacctcctgacaagctcaatctaattggacatctatgggtgcagcgtgagatcatgatgcatgttgctttgtcatgtacatgacacatagacgcactagaagaccgggatgctctgtcacactaccctatgagaccggttctaatccaggagggctacatctagtgccacataacctctcgatcggtctaaatgagtgatggcaatggagatccgatcttcgatttcctgtggggaattcctctattagaagatggatatgagactaatttagtccccgcgggatttaaattgggaaaaattaatccccgcccccgttcc

SEQ ID NO: 69480 - DNA, 894 bp, Zea Mays
gagccctcacaaaatctagagcccgacccaaatggaggcgcagctcctctagcctggcttccaaggctgttagaagagaaagagataagggcaaggagaacatcgaggattctaagaagcaggggataagtgccttaccagccgcgcggccatcagactaggtaagttgagatcggagcagctcgacctcggcctcgacagcctctagcgccgtacgaaaaactccataactctccagagagaccaaagggagaggtgacaacagtttcgaccacgacgagccgacagatgacccctcggtggaccccatttgaagcaagggcatgaggatgaaaatcccaaaggtaacgatagacaaacactcgcttaagccccgccttaagtaggaacaggccatgcccaaagatggcacacttcaccaagagatagccaccacgactactcaaaaggtgggaagacagacatcactcgacccacggaaaagaaagaaaagcccccaaagggagacactctccccttgggactcgggggctactatcggggatatgatcctcggcccttggggcccatcggtcagggagctcactaagggaaagcctttggccactggggcccgttggtcagctgaaataggtggataatgtctaccctagaagcacccaccctagacgagccacgttgcactgagtccagggtcgggtgcggcagaacctgacacgggagctaggcgtgtcggagagaagccacttgagtggatcccgtgcctagcccaagacagacctgtcataaatgatcagtcgccttaactatgcctagcaccccgccacaacggaggcgccggtccgcctcacactcatgacctacgaacccctcagactgcgacgcagttatggc

SEQ ID NO: 69481 - DNA, 286 bp, Zea Mays
caaagtgcttttccatttaattcaaggatgtcagattcacctgagctgagcaagacacaaaaccatacctgacatagcagagtaggacgcctcacctttgtgtcaccgtaggttgagatataaacaaactccttttccagctagatatgaacaaactcattttacttttaattcaactatctcagagcaggacgcctcaccgccgtgtcacgggaagttgaggaagagaccagtggcacttaggtcggcgaacccagcgctggcccagcatgcacctaggtcgaac

SEQ ID NO: 69482 - DNA, 586 bp, Zea Mays
ttctactaagatttttcgacttggggacaccggttactaccactggcatgtgttaacggaatctgtttgtacaaattagtgagcatcgcaggcttaatcattttctactagtgctatgaccaatattatttggataatccatcattcctcatctctccacctcccccttcccctccctctcactcgcgtcgttgccgtcgtcagtccctaccttgcttcgccatcatcgccaacccttccctcacgctactggcccctccccctacacaccccacgaccacaacttcccctcccccgcactcgcgtcgccgctagctattccaccgacacctccatcgattggagccaccgttaggtgctctactgtaggcatctgatcgatggtgatgggatcatgataaagctgttggatggcttcttaggtacgactctgaatttttattggaatccctctctctgatcatggtcttactggatacacgggtggagagctatgctagggtttggattgcagctattgtaagccggtcctaattatctttgctactattgtgctttatctatcaatcaagcgatctgattgtcg

SEQ ID NO: 69483 - DNA, 521 bp, Zea Mays
ttacttggtgcatctatatgatgacctcaagtgtgtccttcggacaacacatgaccattaagtaataatgtctcaagcttgagcacattagcctccacactgctgaatttaccaaacctgcttacaatgatgattgtttgtcttggtattcagaatgatatccataaaggatatgatgaatctatgatagattcgaaaatttcagatcattaatgaccatcagtaatgaattgtcatttccaactggttatggttggagtcaggaagtttgtacgctcctgacttgtgattaactgcatgtactacatgtacaagttcccctatgtttttttagtatgtgggaatccatgaaagatttcccatgcgtacattgggtatgttttcccaatctcaccaccgcagcgtacatgtatgggcacacagaaagctggggatctatgtgagaatttattctccgtcgatcattaagttttagaatctcttcatgagaatctatttacggcccgtatgcttgtttgaat

SEQ ID NO: 69484 - DNA, 1201 bp, Zea Mays
ggagattgttcgacaagggattgtgtttttgaattagagtattagattagactgacgaaggatgaacggtttgtgcgaataacgagatcaaacctttcgaaattatgacagcatttttttgttcttccagttccactcaattaatatcatttgatgcttattaggtctgaaaacattgtactacagtttggccaggttgcccagttattataatcaaaatgcagtgaacgtgtggtagtggatttttttgacattgatacactgaatttgtgtaacaattgggaactcagtaactcactagttttgggggtgtggtcgctttggtctaatgtggtcctgttggtatgtctgatgtttgatactttaattaaacgccagacatgcatgcgacaataatctttgtaatggtatttgatcggaggtagaagtgatgtgattaatgttgatgtttgtggtggtgattgtgtcctgtggccttgagatcaatcttggtgggacattttaaatgaatgattgtgccttggcttatgtggcaatcagatggggagcagttgttaacccatatgttcatggaatatcatgtttcatatatttttctacatgaggtcttttttcccctcatgtattgttgtttgagatatcagtagttttattttttgagctagtttatgtgtttacaaattacaatctgtagtgattatgttttttactggtggacttagattagcattttgcataggcagtcatctgttagggtaaatgtgctcgatggctttagcttttcggtatgtcctccaaaggggaggatgtcatcaaattgtagagcaaccaaatctctgtgttgcctactctgttgtagaattgaatacatagcagcttctattaagagtgaatcacatcataattttgtaactcacctgatcttgatgtgtggttgttatgtttttacagtgtatttaatcttcatccatgttaatatgaagtctgcatttgttatactattctcaaactactccatccgttccaaattgtaagatgttttgacttttctagattcataggtttttctatgcacctggacatatagttgctagggatcaggatctggtgggttgataggattgcagatcctgccatggacgtggtgcaacaagtaaggatggggcgttggggaggccaaccacagggctttgcccatggc

SEQ ID NO: 69485 - DNA, 748 bp, Zea Mays
cccctttctattctttacaacccgcgatccccgacgatgaacggcgacaggccgagcttcggcgagctcgtactggccagaataggcaacgactaatcctcccctttgcttgacaccaaattcaaccctaaccgaccatttcccctcacttaattgcaaggttcgagctcttaatcacactgcccacggtgacagcgcgagcaacgaacaaatcgagatgttcccggtgatcctacgggttctaactcaattggatgggtcagggagtatcaagagcacaccagagtactaaaacgagggaacagagggcatgaacggacctgtagcgcgctggccacggcgagctcacacagcacgatgttcacgaccgatttgggggaagtctcaaattggggagctgtaggggatgattggaggtgagagctggttcattggatgcacaactacctagcggagctgatggcatgctcaatttataggattcatgagcggtggcggctaatttggaggagacgcgcggcggccggagaggggaaagagcactggcgcaaaggaggcatggtgttcaccggcgcaatggctcaaagattgtactcttaagtgtgacacggttactaccgcatagtaacaagccatagcgtggcacaactgaggtcaccggagtttccacggcaataccggcggtccggccacgtcgcaacggctacaggcgcggtgataagcctcccccgcgaccacatctgctccc

SEQ ID NO: 69486 - DNA, 482 bp, Zea Mays
gaaaatgctaggtgacatctagactctgggtatcaagtttcaccttcaatttagtatgacaatcttcatttgatatcttggacttatgtcacaactataccaacaagagcgtgcaaatgaattctaaatccaacacaagtttggaaccccccccttgaaaaggtaaaacaaaggtacatcacttcatgccacttctacattactttttttgtcatctaaggatccttttcatgatagtgtgttcacatcttgcttaaatcataatttgtaccctttatattctttgtatcctttttggagatttatgacaaagggggagaaattgtgcattaaagcttacctttagtcttacctttagtcttatgtaactaagtgtaaaaagacttttgaaaaaggggagaaataattaacaaaagggggaatcataagaaaaacataagatgtagaaaattgatgagtgcatactatgtcatgagcatcac

SEQ ID NO: 69487 - DNA, 536 bp, Zea Mays
cagttactgttttttagattttattggatggtgtatttaatcctctaaactatatagagtatatgttagatgcattgtgtgtgcttatctatgtattggacctaggcccacttacttattgtcgtggtttcgtaaaccgagggacaatagatttatgtttagtgggggtgcaagcgttgactcactcctaatggtgaatcacgaggatccgagctaagcaactgaggcacatgggctatactggttcaggtcgtggccctagtccagtctagcgctgatcggtgtattgctcaggagcgtgttacagtaagtgcttgtgtggagaaagaaggttgtcccgcccttttatagctcaagggtggactttacagttgggccttgtattctactcgaggtccttggcttgttgcccttgggtcgctctagacctcctggtgttgtctgtgggggcgtgcactgccatactcccgatacagtgttctgtcctgtctgctctccatacggatccctgtagcttgctcggtgtcaacattgtg

SEQ ID NO: 69488 - DNA, 360 bp, Zea Mays
catcaacctccttttcaatacatttgagtgccctgggtatatcttcggcagagaggctggtttccttagatgcagctccaactgaactgaaaatgcttctcaaccgagcagtgcattggcttgcaaactcaaagcatctctccttcagagccttcaacacaacattaagcttcgtatttttctcagtctcaaccttaagtgttgttttcaaagtttcattttcctgattgaattgattagagttttccttcaaaagtgcctgagcatttgccacttcttcacccaacttcttgttttgagcttgcgcttcggtaagggacccttcggctgaacatagcatttcgtctttttccttcaaag

SEQ ID NO: 69489 - DNA, 758 bp, Zea Mays
catcggccagttggcaaagtgaccctaactacatattgcacgagggtcaagtcatactgaagttcagctttaagggactcattaccatgctcatgagcttctccctcttcttttcatcagccttcatgtaaaaccattcattcgtccacccagtcggccatttagtgcggtagccaatcacgggggcattggtatcatttcggtatgcaaaattgtagcacctaatgttcttgtgcagaccaacggctctagtcttcgtctgataatgaagttcgtgcactcgatagaacccttcagcattaacactttttccttggcttcggagagcccagatgtaaacgctaagtcttacgataacattcggggttagcttgtggagatatatctcaaatttctttaaaacttcccccaccatatcgtaaagggggaaccgaagccccgccctgaagaagctcttgaacacaacaacctcatcttccttcggctctggaattacttcttctccagcaaagcgaatcagtccatcttcattttctccaaaataacccagcttcttcatcacaaccagatcctctgcttttactgttgattttctaaattcaatatgactaggtttggttgggcatagaatgctatcgtcctcttcactttcgttaccactcccgactttggccacaacttattcagcttcaacgttggaggtaccttcggcagtagccccccattgcacaaccagacctaaccgcctcatcatttct

SEQ ID NO: 69490 - DNA, 764 bp, Zea Mays
atataccttcaggtttggagaccaatttatcgaaccagacgatgactggctgaagtgcatcgaagctacaagtgatgaactgcttgggccgtattccaaagtgaaagataatgcattatctgcggccttcggaagccagaagaagaaaaggctaaatagtgtttttgacgctattgggttcatgtaccctgattaccgttacccgccacgggtgcagaagagaaagagtgcaacttccgggaaggatgctgcttcagctgctccaagcgagcctgcgccgaagaggaaaaaggtgaagcttcttactcaccggccgcgatatattgaaccggtcgtagtgcccgaatttggcggtgagacctctttggctactgaagccaaggatcctgcgcctacgcagaagattgaagagccggctgtaatgtcgaagacatccttagccaaattagctgagccaaaggccgataatataggggccgaaggaacaaagatatcagaaattacaagcccttcgacagaagtgacagtgccgaaggcacaaaaaggtcttacagcgacccctaagaggaaaagaatggtcaacgtactagatacgctggagacaataaagacaagctctactccaaggaaaactgccgaagctccaaagacgcagtctgagacaagagtaaccaaagccgaagctgcaaagagccaggccgagaccgaagctgggccttcagagcccgccaaggagaaatccttggaaatcggagaaaaagaaa

SEQ ID NO: 69491 - DNA, 446 bp, Zea Mays
atgcatgttttggcttgccagggtcccacaatgatgtcaatgtgttgcatcgctcacccgtatttgatgacctagcatctggtaatgccgtcgaggttaacttcacaattaatggcaaccaatataatatgggatattatttggcagatggcatctacccagactgggcaaccttagtgaaatcagtatcccttccccaaggtcggaataaacgtttttttgctaagaagcaagtagaattcaggaaagatgtggagcgagccttcggggtgttgcaatcacgttggtctataatgcatggtccagcaaggttttggacacctagggaccttaattatattgtgtattgcatcataatattacacaatatgattattgaagatgagagagagatgacccgactagcgaatgaagagtacatcggatcatcaaatccttcatatggc

SEQ ID NO: 69492 - DNA, 596 bp, Zea Mays
cagaggtcttctgtggtgtcggtgatgaagcacaatccgttcagcttgtcctcgacccgcctctcagtctcatcatcgctcgaggaagatacatcgtcatcagtgttgtggtcgaggtcgctaagggaggcgaggaagtcacgctccttgatctttgccttctaaaggtacttcttcttgagcgcctccttgtcgaatccctccttggacttgttcttgccagaggagtacttgcccttgagctgaccagagtgatgatttggtaggccggaatccgccttgcctttcttggtgcagctagcaacgaagtggtcgggatcgccacagttgtaacatccatccttggacccaccacgccgccggctcatacggttgttgtggaaccgtgtgaatcgactgaccacgagtgccagctcctcatccctaagactctccacctactcctctgtaatagataacaaagaagatagatcaaacatagcgggtgaggagttagaagcagaaccacctctagggactaggccatggtgggtgcaccaaggttctcaatattggcccaagtctggtggtcaaactctgcggatttgagattgttg

SEQ ID NO: 69493 - DNA, 369 bp, Zea Mays
gacagatttgagccatcccatcaaaagccgacgactcatattataatgtgaatcatgctgaatcggtatgctatatggctcgttaggtcggagatcaacggcccgctgcgctccacgcctcgatcaaatccgagccctagatatctagatcagcgccttggatttaaaacaacgaatgggtattctatgttctaatatcgatcgttcgtttctggatcaacggacaccatgctctcactaacctcccgaccacccttgcggcggctcatgtgccgcccgcggcagcggcgttgccggactacatcagaccccggccccacgcacaaaacattgattcgagggatgataaacgcatagtagtcgatggag

SEQ ID NO: 69494 - DNA, 319 bp, Zea Mays
atatgcaaggtttgctgataaggattttaaaacaaaattccaatctattatacatcatcctttaactcctcgtgagtttgaatgtgccttggaaatgatgcttgaagaatacaatctgcatgaagatatgactctacgcaagttatatgaaataaggaaagaatggataccatcattttttaaaaatgacttctgtggggtaatggtgtctacacaacgcagtgagagcatgaacagattagtgaagaaatcacatgtagatgcgaacacccctctgcatgagtttgctaaacaaatgatgaaaatgttgcatatcagg

SEQ ID NO: 69495 - DNA, 344 bp, Zea Mays
ttcatttaactgaactcctccatggtacagtgctatcgggaggatcagaccgccagcgccaaaagatctcgtcgctggtggcccgtcgccgttgatcgattgcttgccgtgattcgtgcgccatggccatggataagcacaacccagtaaagatctcggcgtctgatccactcgagctcggttgcggctaagcatgccgtactttcccccagttcgtcggacgctcggataaccctcaccgccgtcgtactgtcgccgttgcgcaccacgtgccttagcactggctcccgtcacggtgaatcatgcggtgcatgcccggtgatcaccggagcacctgccacggt

SEQ ID NO: 69496 - DNA, 874 bp, Zea Mays
atacgtgtgctcgatcgattattcatcgacaaatcgcttctcatacattgaggagagatgaatgccaagaggctgacgccggttctgctcgccgttctattgccatgcctatgccttatgttcgttgcaaactgtagtgcgttcatgtttacttcacccatatcactcgttttgtactttttttgagaggaaattcgtgatgcgatgaagtgcagcaactgcaggcgacgtgggcataccggcggcggctggcggtctccggcggctaccggacggagagaagagcaacaagatacacatcatactgtgtgtgaagtcccattgctacggtcccgtcaagacatgttactgctgcaacacactcgttaatgtaacgtgctacacagatcagcaatactgctggagcgtgtgtcccagtagactccaagggatgatccctgcacccgcgccagcgccattgccatcgccaacgggtcgtcgcggcaggttctctcgagcctcgacttctccgacgagtaacaacaattcgtgaaattatgtcatgcctgacagcgtgagcgtaggatgatgatatatatgcagcaactttaatttatatgcaacaataatggacgggaacatttttgggattcagattcagagcttgtttcaattaaggatctattgcgatcttaggctagcttgtttagcaggctgtacgttagtcctcactcctcaaggtggtctttagaaaaataaatcctagcggtacaaattatcaaaaaaaaggagagagagtacaaaatatactgctgtcaatttgttagacgctaatagtaacagataagaataattattggctccaattcactacagaaaacacataaatcttaag

SEQ ID NO: 69497 - DNA, 466 bp, Zea Mays
gtaaatacataatgcattttttctttgggtgcactatgtacttgttgtatgctgacgagccttgcctgttttttcagcaatagggcatatttcacacagccagaaggtaacttacacagcttaactgatgtttgtttcacatgcaatgcaactatgagtgccaacaactcgacacgaaaccttgcctgtttgcatgctccatcagttgaaacttctctgttattttttgtccccttttgtttctgttgcaacagcttttggttcctgcaacttttgtcatgaaagaaaatagcaaaatagagaggaaagcctcatatttgttttatctgacatcgtcttgatctgttctgttctcatatttgttttatctgacatcgttctgatatgttatgtttcatgtaatgatttaatttttaatcagtttgttgcggagaagttttagttcctttatttgcgttgccatgag

SEQ ID NO: 69498 - DNA, 520 bp, Zea Mays
gccaaaatgacattttgtagccttccacattttcccccatgggaaatggaatccaaaatccttttcaaggtcttctgctgaaactaaaccctcaatcactttcaccaggccaatgaaaaccctctttggttttttggacagtggtttagcaaaatgagaaaggtaaaaccctagaccattagcagccataccgactatgggcatgctaggcttgctttgctttggtaaaacacatctgttggtaacgtggctatctttgcgacaaatattgcaccacaaaacattgaagcattctctagcatggtggccatcaaccccacacttctggcaaaaagcatgtcgaacaagctcactttctttcttcaaagcagtaggagtaatgttagggttacctgattgaatcccttcacccgaggaagaagacatcaccttcatgatgttcagatttcccgggcgccggcttcaatctccaactaagattcatgtttctgttccaggattgagggccctgggggttctc

SEQ ID NO: 69499 - DNA, 684 bp, Zea Mays
tcgacgaattcgcttacttagatgacgcgtcatctttagatggatcctacggattgattttgtgtgccaattggcgtgttcgcgaataagtcatcgtagatgtgcttatctatggggtgttgtgtctgtcatagagtttgtggtcattattataggctaagactgagtggtatgccatcacgagctcggtttgggggtggtggtggaattttggatctccgatatggtagtactgtgtttattgtttctttgatttcagggagaaatatctaggtctgatcttagttggttgtacctggcaacggtctcgctggagccattgtttgaaattcaaggagttgttttctatggtggaaactttggttctggccttaacttattggctcatacaacagcggtgcgtgagcgtatcgtattctctttggagatgttgttgttggagagccttcacgggatctaagtgttgctttgttaggggttggttctgaagtctaagttgtgtggcgtcggttattgtcactgtgacatgataactattggtatgtcttttttttatttttcgtggctgtgtacaccctatttgtgtagaggccgtaagacttcttagtgtaattgtatcactcgatgtaattggctaagattaataaagcttccttttaaagaacaaatgggtaagacttctta

SEQ ID NO: 69500 - DNA, 847 bp, Zea Mays
ttgcactaatccaggccggagcacgtctgctcatgacgacgataaaatccgagaagaagctacggtgttccaggcaactcagtacgttctagttcaatcaatcgagtctacaagaaataggagatcctagagatgctagaacattcaacagaggggtatgaatcaacctgagacaggctaaccatggtgagagaccttcacagcgggattccgaatgatttgagggaaatggacaattgggcggctctggtggacgatagaaggcaagagtgggtgctttggatgcgcaatgacttagcgaagctcactggggcagcaatttataggatctatcggcggtgacatccaatttggaagaaatgtgctggcggccggagagagggaggagtcaccggagtcacataacgtggcatttactagggtagaagcctcggacgatgactaactaactcacacgacaccttacgaaatggtaatagggtcagtagcgtggtggatttcggtgaagggtggtcatgacggcaatggccatgcggccacgttactgggcaagtgggtgcggtgaggccaaccatagtgcccccaaactcatccgcggggaggatcttttcactaccgagcgcaatccacttatccgaggcacaaatcgtggcagccggcgcgaatccaggcgtgaggtcaccggcggcgaggggtgatgcatctaccgatctttttcagtactgtaccatgggaactcaattcaggcgcctgacagagcaagtttcagggtcttgatctcaaatttctatgtggcaattcatcaatccctctgtaacaaagttcttgtcctataatccaacttcaa

SEQ ID NO: 69501 - DNA, 565 bp, Zea Mays
gcgcgaccctgctgatgtcgagtagctcatacctgtagaaatgaggctagggctccgcttgaaggcggatgtaataacttttgtttttgtaagatacttttgggaactatcaattaaacaactcttatctgtatggtacttgttcttgctgtgtgtggcgttaccaactcctctcctggtacttgacccccctgggatgtaggctcgacgtgtcgaggctggataccagcatacctaagaaagagttggtgacccgaccccctaggaggtagtctcgactgggacctggacctgcacacaaccttggctaggaagctttagtagtgcacccataggacccactaactggtatcttttatcctttgattcacgcaacaggacctgcaggatttagaccgggaagccaatccgtgtgtccggaccccctagatcacagctccgaatactagggcacctatcgcatagtggtggagcgtgtaggattagggtacgggaccaggctaagcggctacacagctccggaccaccctaggggacgtgtgtccgttctatagaaccggacccc

SEQ ID NO: 69502 - DNA, 507 bp, Zea Mays
tcaggccagtacgtgaggtgaccggacggaatagacgacgatgggtacgtacgtacgtacgtatgccgctgggctgcgcgactgctaacgctactactatacgcgatgatgcccttcttgtccggcccatggatttatcaggtggatggatggatgccccttgcgagctgcgacgagcgcgagtgggcaacggcgccgtcaagcgcatgcatcccccctctcccccgcggttgtatgagacttggaggaaggcgcggcatgatggagatgcaaatggggtcgtttgtcttgtttgcctgttcgccgaggaaccgtggtggactccgtgattgagctgtgtctctctgtgtgtgtgcatgcgcatactgcacggggtcgatatgatgcgcatgcatatatatgcacgacagagatggcagacgaactcatcacgctggtggtggtctgatagatacatggacgcagactccccgcctcccgtacgtcccgttcccaatcaatcaggat

SEQ ID NO: 69503 - DNA, 543 bp, Zea Mays
ccaatgcttactcgatccaattatgcggagtgggcgatgttgatgcaaattaactatgaggcaatggagatttgggaggtgatagatccgggcacaaatccaaaacgtgctcaagatcggcaggccatgggtgcgctgttgagatcagtacctaatgagatgtggggtacccttggtgctaagaaaactgctaaggaagcctgggaggcagtcatgaccatgagaattggtgctgatcgagtgaaggaggtgaatgtgcagaagttgctgaaggagtttgagaacatagaattcaaagaaggtgaaactgttgaagactttggcatgagaatcaccaatctagtggtaaacatcaagtcactgggtgaaacagtggaagacactagagtggtgaagaagtttctgcgtgtggtcccacctcgcttcaaccaagttgcagtttctattgagatgttttgtgacatgaagactctcacagttgaaaatttagtggggcgccttcgtgctgcagaagatcggttggaagacaaaatggagcaagtc

SEQ ID NO: 69504 - DNA, 475 bp, Zea Mays
gaattattagctttcttgatggtaatgccggatataatcagatttttatggccgaagaggatgcgtctaaaacggccttcatatgttcaggcttcattggtttatttgaatgggttgtcatgacatttggtcttaaaaatgctggtgctacttatcagagggctatgaatttgattttccatgagttgttaggaaatactgtggaagtctacattgatgatatcgtagtcaaatcggttgagtttagttctcacatagctgatttacgcaaaaccttgataaaatgcggcggtatggtttaaaaatgaacccacgtaaatgtgcgtttggagtgtcggctggtaagtttttaggatttatcatccatgaacatggcatagagatagaccctgaccgaattaagtctattcggaatgtggggcctccgacctgtaaagtcgaagtgcagaggtttcttggcaaggtgaattatttg

SEQ ID NO: 69505 - DNA, 1544 bp, Zea Mays
aacgctttttggttccttcattttattttattgctgagtacaggagtcttttatgatcttaggaagcaaagtttttagctaatatatcagaggaacctctctactctctctttcatcagtccctttaaaacctttttctatgttgtccttgagacttcagaaattatagattattttgcctcattgccattttgagtcacttgtgtatatcttcactacaaggctaagaaatattctagataggactcattaggcaaaattcttccagatttctagatagtgctaagcgcaatccttggtatatcactacagctcctaagttctgttggcaaatttgattttccaaccgaaagattgcgtgggcaatgtcagaaaagacaggcaagcacctataatcatttctatctgcagtatgccagtatgggtctttaatcatttctatcttcttgtgtcttgctattgtctctgtttctgctatccaggcgaatgtttttgaagaactacttctcttctcagcatctcttgagtatgatacaagcaacacataacggatagttctctctaagctaaaaagtacataggcaagtgctctcatccatattttataccatttcatattaatagcaataagactatcgtctttctaaaaaataaacaagtgtttcacctttctcttcgcaacggactgattaacagtattaatttcattgtatgtatgcattgttaaatattccaccggttcactgatgaagaagtctatatgagaagttactttgcagtgtgtttgatattctggaagatgggcaactcgtagagttctttttttctttattcactacatatcattgtatcttctctggtatgctttaaaaggatcacaccctgctaccacatagcttatttgttcatggacagcagtgttccatcacgagttcttgaatgtactatctaatttgactaccaggaggctgatgagatactgggaaaaagaaagcaaggtacactaaaccctcgaagtcagaatcgctgaagaagggaagactggaaataacaaagcaaggtgtaccgcaatgaaccaaaaaaccaaagcaacataacaaagcgaggaccggtggaacgattacctcaaatcgctgaagaagggacgactggacgatttcgtgaccggtggttgttcgccaggtatccaatgcggcagatctacacgagcggcatgaacgatgagcacatgaatccggtgccgaaacggaaatcaatcgaaacaaaagaaacagggatcccaagaagaggaacggacggcggcgacggagtcgacgagaagaaaggagcggttgcagttagggggaaaaggaagacaacacagcagaggggcttcatataagagattgggagaaagcagcggcatgggcgctgcggtggaaggacagggcacagtgagtcgacgctgttacggatacggagtacgctgagagggacgacaagtcgcggatttatcggattttgaaatccggtgaacagcatcacagggtatgggcacgcgaaac

SEQ ID NO: 69506 - DNA, 723 bp, Zea Mays
gttttttaaaaccacactttataatattatagtttattgtgtattatgatacaactatgatatattttatatcaatatgatactcgacgcagtattttgattgcagtgcaagaggggaggagacgctggagactcaatactttcactagcctcgccattttaccttgcacacggacacacggttggggtcagtcttagagatggaaataaaagtgcggtagtgttttttaaaaaaaatatagttttcaaaaagtttaacaaatcgtatgtccctgccttcccaggattcttggacggctggatccgaaaaccaagatcttgtgaattcgttcatcccaccgacacaggcactaaactaataacacctctctgatctaaaccatacttgagttgctcagttgacttgccacacaccaggctgttgatccgtccatgagaccgctgacgtgcatgcttattctaaacattaatcgggtttgactctgttcgagttcctggatgcccttgatcaatctttccctgcatgccacatgagtgctatatatctagagctagcaaagcagcattgctggggatcttaacaagattcttctgttgtggtacacagataggagttaggacactaggcagagtataacataggataaggttacgctgcgcatcacttggctttccaagatccctttgtcaacaactagagattttaatgccgggaccaatgat

SEQ ID NO: 69507 - DNA, 804 bp, Zea Mays
ttgactcagtcggtggtagatttcaagccgatagcatttgtttgaatgtaagtgtggaaataagggggatagtgtttcccgctaacctcatagtaatgggtactcagggaatagatgtcatcctagggatgaattggctagataagtaccaggcagttatcagttgtgataagaggacaatcaagttggtgtccccactaggagaggaagtggtgaccgagttagtcccacctgagccaaagaaaggaagttgttatcagatggctgtcgatagcagtgaagcaaacccaattgagagtatcaaggtggtgtctgagttcccagatgtgtttccaaaggacttaccaggtatgccaccagagcggaaaagttgagtttgctatagagctttttcttggaaccgcccctatctttaagagagcttatagaatatccggaccagagttggttgaacttaagaagcagactgatgagctgtcagagaaaggttacatccggccaagcacctcgccttgggctgcccctgtcctatttgtggagaagaaagatggcaccaaaaggatgtgtatcgattatcgagctctgaatgaggtcaccatcaagaacaagtaccccttgcccagaatagaagacttgttcgaccagttgagaggagccagcgtgttctccaagatagatctgaggtcaggttatcatcagctcaggatccgaccttcagatattccgaagacgacattcattactaagtatgggttgtatgagttcacggtgatgtctttcggtctaacaaatgcaccaaccttc

SEQ ID NO: 69508 - DNA, 699 bp, Zea Mays
cctaagggtgcagccggactagcacaacaagtgcgcaaaaaccgaagtcttcctccaaagactatccgtgcaaaagtcgcctaagggtgcagccggactagcacaacaagtgcgcaaaaaccgaagtcttcctccaaagactatccgtgcaaaagtcgcctaggggtgcagccggactagcacaacaaagtgcgcaaaatcgaagtctccctcaaaagactatccgtgcggaagtcacctaagggtgcagccggactagcacaacaagcgcgcaaaatcgaagtctctctcaaaagactacccgtgcaacgaccgactacaagtgccgccggaccgacataataaacacgctagacctagtgcacaagtcccctacgggcacgaccggatcagcgaaggcacacagcctcttcatacaaatcatagttacatacgtacagcgagggcatcacacctaatattggttcaaccttcgggataatacccatctccctatagttaaacagcattatcctcagctcctcaccctcaaaaagacttcgcaattccccctcacctacactcgccccagctagcgaggacaacaattcccgcttgccagtcctgtccacacgaggatgaccaccctccacctcactcactctacgcttcaccaaagcccttcgacgcctacacccaacacttggacccggaacttca

SEQ ID NO: 69509 - DNA, 564 bp, Zea Mays
gacttaccggcatatgggctattctgcgtctggtatgttcacggtaagttcccatgcccagtttgcaaggaagctcttaggttcatttggttgaagaagggtgacaaatattcatcgttcgataaacatcgacaatttctccctcctgaccatccattccacctagacatcaagaactttacgaaaggtgtcgtagtgacagaccgcccacctaaaatgatgactggtgcagaaattcatcaacagatagatgggctcgtggccaatccagaaggtggttttgtgagatatggtgagcaacatatatggacacataagtcgggcttgactcgatcccctactatgacgacctgcaccttccacacaacattgacgtgatgcacactgaaaagaatgttgtcgaggcactttgggcaacaattatggacattcctaataagtcaaaggataacataaaggcaatactagatctggcagtgttatgtgatagaccaaaccaagagatgaagtcacctagtggtggaaagacttggagaaggccaaggccaattttgtctctcagca

SEQ ID NO: 69510 - DNA, 1265 bp, Zea Mays
cagaagtggtcgtcagtattattggtcgaacttgagatcggatttgagctaaatctagtaggaattcgactaggactgctataacaaagatgaagatgatctataggtctacaactttggtgtagaaggatgatgaagtcgtcatgcaaaacttggagaaaatctgcctcaaataggttctgtcaggcactctgaagatgattcccatggtacagtaacctgatcaggtcaggttcagtgaacttcgtcgccgacgaccgtcgcgctgcgattcacatcggtcgtcatgattcgtacgatgtgacttatggataacggtgagcgggtaaagatcttggcgcctagatcaacttgggtccgatcgcggataagctccccgtaccacttgctcaccgaccgatcgggataagacctcgccgccattggccgattaccgccgtgcgccacgtgctaaagcgttagaccacgtcgctgtgaatcacgtctcgcatgcacggtgatcgccggtgtactgccacggtgaaagccactaacccgagcactagtgacctcgtcttcctccgaccgccgcacgtcttcatccaaatcctcggccaccgcttagcgatcctataaattgatggtcgggtctgttgcgccatgttatcacgaagccaacgcaccagctattgcctcaaatcattcaccagagaccgcgaatttcttacttcccccaatcctgtttctgccaccgcggagacaccctcgccgcggccagcttattcaaggttcgttcaagcgctctggtcgattgttctagcgtccttaggtcctcctcaagcttcacgactcctttgattgaactagaccgccctgggttgccgtgaacgcccgtgttcttccgttgcgcatgcggtcaccgtggccagaacaaactgggtagccatttgtgaaattaagtgggtggaaacgctcattagaccttgaattcggtctcggctaagatagagtgccgatctttgagtgtattggctggtacatgagctcgtcggagctctgcgcgacaccgttttccgtcagggactcgattcgtgaaggaatagaacttgagggacctttttgcacgatgtcagtgactatctagaatagtgttttggattttttcgggttatgccaaaagctagggactttcttgcaaaggatacacgtgggcgcgcgtgggcgcgttctaacgaagttgggccgacctaggccaaattcgatcgagaactattcacaccttttat

SEQ ID NO: 69511 - DNA, 519 bp, Zea Mays
gaacttgtttactttatttctggattgttatctgacagaaaagctcatgtgagactcaatggtaaacacttctgaccccataggacacaattgctgccccttagagaaatttgagatgccttagaccaaaatttgaaggatatgcctggcggagttgtgagaaggttcaacgtagcttctttgtaaaatgcagaggtaatgcttgcctcatttatttcttagcgagaccccactcatgggagccatcagcactgagattatatgggcatgggcgccagatcaaatggattaatcacttgttcctgtgtgaatcataacatgacgttgttcagttcacaccattgctagtggttcaaagtctaaccttagtgatgcttgattccattagagatatagatgtaggtgtactttcctgtatgcggtgatattatgggttgaatagtgttttggatcaagactccacatccattattccccctcaagtactgcttatgcagagttgcagacgttatgttctca

SEQ ID NO: 69512 - DNA, 387 bp, Zea Mays
gaggcgccgaagatacaaaaagatctggcagcaaccccaaagagaaaaaggatggctagtgtgttagatgtgctggagacgataaaaacttcaagttctactccaggaaaaattgccaaggctccgaaagcacaagttgaaaccgagacaaagctgaccgaaaccgaagttacaatgagccgggtcgatgctgaaagtgggccttcagagcccatcaagagaaatcctcggaaattggagaaaaggcagcggaggaagaagctatagaacaaaatttgcctgaaaaatctgccgctcctactcccgaagctttgaaagagaacactgagtatattatccgtcatgcttcgggaaaaaatctttctaaagaagaaaagcaagaagctc

SEQ ID NO: 69513 - DNA, 516 bp, Zea Mays
aaatttttgggtcatcgtggataggctaaacaagacagctcatttcttgccactacataccacccatagggcagagaagtatgcagaaatctatattgaccaaatagtgcgtttgcatggaataccgaggactatcgtgtcagacagaggagcaccgtttgtagcatgtttctgggagcagctgcaagagtcacttggaacccatgtgataagaagctcagcataccatcctcaaactgacggccaaatggaaagagtaaatcagattcttgaggacatcttgagagcatgtgtgttacattatggcaaggattgggataagtgcctttctctggcaaaattctcttacaataacagctaccaatccagcctaaagatggcacctttcgaggccttgtatgggaggaggtgtagaacaccactaaattggtgacaagcgggaaagagggaaatatttggacctgacctggtgcttgaagccaaggataaagtcagagtcattaagaaaaacttgga

SEQ ID NO: 69514 - DNA, 452 bp, Zea Mays
aatataaataaatataaaatttatacttgcattgtcatgctgggatttctgtttgatgcatcaaatatatgcttgaaattcagaatcaaacttaggattaaaaagaaaaaaaagaaaatggacaaactggattctgggctgaattccctccccctcagcccattcctctcaccactcgacccacgaagataaaagtgccgacatgtgggccactgccgtcagtcgctcccccgcgcctgcgtattccctctctcgctgatgttgcggggcccactgctcaaatcccctcaccaatatgcgtgtgttcccagtcctgtgcctctatcgtatgggctccatgcgttagcctgggcatatgtcgctgacgtgtgggaccccacggacaggtccatcttcgtcctcccaaaatcctaccagaccaccgctcgtcgcgcgccgttgcaacgaccgcc

SEQ ID NO: 69515 - DNA, 703 bp, Zea Mays
tgatgctcaactttatttggatcttgctcctgtttctagtgttttacagctcgtagtcatgaccattatttattaaaaagctatcattttgcgctatattaggcgaagagatcaatggaaaggatctaatggattccgatcataaagatgatgccaacctcgcaaatgccatgctcccccacatatagatccggcattgcatagctactgtttggttgcatcactaggtaataggtttcaaataaggcaggggctcaaacatcatgcaatcaactaatcaagcaatcaacgtaaactaaatccgaaaatgatagtttaaacaaataacagttgtaactacgactctacgagcaataaaacaataggtacaagaacaagtataagattcaagtaaccctttttctcgaatgtgcagaagagttgtgtatcattatattaagaaaaataaggtttaaaatagaccgatacaagccgccggtaaaagtgcggaaataaaataaaataaaaaggttacaagacagcaaagagaacccgacccacagatagaacaccaatagatagattgtatttctagaaagagatcaagtaccagttttgttaattttcaatttaatatgaattatttatgaattttcgagaatgaaccatatttttattattttaggaaaacacatatataggtaaaccaccttgaaacatggtc

SEQ ID NO: 69516 - DNA, 6195 bp, Zea Mays
ttaatgcaatattaccttcaccagtctccttaattagcacatcacaatcatgttgcagatgtttggtgtggagatcgttagaaaagatgacagttaggggttttcctgcagattcacatgcactggcttcccgactgacgctcttttcaacagctatagggctcactgcatatttttcttcatgctcttcaatagggaaaaccaaagacgaaacatctggagatttagcaagtttaatttagtgaattgaaaatcttgaagcaagattactaagcaagatctttagaaaaaaaatagtgaataatcagttggcacaggtggatttagatgttcagcatacatattatcttcactcatcaatgttgcggagtttttattatggatacaggattaattcggttgtacctttatcagtctcttcagctattctgtcattatcatgctgcagagttttggtgtggagatcagttgatatgacgttagctaggttcttttcctcaggctcgttggcatttgcttccaagctaactctccgttctccggacacattgctttgctcttcatggtctgcaacagtgaaactaattgataaaccatttggtgattttggaacgacaaagtcttcctttcagtatataacatgacaataatggacaaagctaatgattagaattacacgtagccaacaatttgacttagaactcagtatgtttaaaattggtaaattaaacacagtccatacccggatcagcaagttcatcgtttaacttaatttctaggtcagtctgggcaggattaattcggttgtacctttatcagtctcttcagctattctgtcattatcatgctgcagagttttggtgtggagatcagttgatatgacgttagctaggttcttttcctcaggctcgttggcatttgcttccaagctaactctccgttctccgaacacattgctttgctcttcatggtctgcaacagtgaaactaattgataaaccaaaactctgcagtatgtttaaaattggtaaattaaacacagtccatacccggatcagcaagttcatcgtttaacttaatttctaggtcagtctgggcaggattaattcggttgtacctttatcagtctcttcagctattctgtcattatcatgctgcagagttttggtgtggagatcagttgatatgacgttagctaggttcttttcctcaggctcgttggcaggaacaggctggtcattacaattctcctgagctaaaacatctgataaagggaaagaatacatttaaaaaataaatgtcagatacttaaaagacatcaaatgacaatgaaacatatgcctagcttttgcagatagaataaatataaagcctattaaaaacaattagaattacaagtagccaacaacttgacttagaactcggtatgtttaaaattggtaaattaaacacggtccatacccggatcagcaagttcatcatttaacttaatttctaggtcggtctgggcaggaacaggctggtcattacaattctcctgagctaaaacttctgagaaagggaaagaatacatttaaaaaatgtcaacacagtgcaaacagcacaagttttcatcaccatctccgcagatcagtaacaagttgtggaacaagtattaatgcaatattaccttcaccagtctccttaattagcacatcacaatcatgttgcagatgtttggtgtggagatcgttagaaaagatgacagttaggggttttcctgcagattcaattgcacttgcttcctgacggaagctcttttcaacggctatagggctaactgcatatttttcttcatgctcttcaatagggaaaacaaaagacaaaacatctggagatttagcaagtttaatttagtgaattgaaaatcttgaagcaagatctttagaaaaaaacagtgaatgagagctggcacaggtggatttagatgttcagcatacatattatcttcactcatcaatgttgcagagcttttattggggatacaggattaattcagttgtacctttatcagtctcttcagctattctgccattatcatgctgcagacttttggtgtggagatcaattgatatgacgttagctaggttcttttcctcaggctcgttggcatttgcttccaagctaactctccgttctccggatacagggctttgctcttcatggtctgcaacagtgaaactaattgataaaccatttggtgattttggaacgacaaagtcttcctttcagtatataacatgacaataatgcacaaatctaataattagaattacacgtagccaataatttgacttagaactcagtatgttgaaaattggtaaattaaacacagtacatacccggatcagcaagttcatcgtgtaacttaatttctaggtcagtctgggcaggaacgggctggtcattacaattctcctgagctaaaacatctgataaagggaaagaatacatttaaaaaataaatgtcagatacttaaaagacaataaatgacaatgaaacatgtgcctagctgttgcagatagaacaaacataaagcctattaaaaataattagaatgaaagtaaccaacaacttgacttagaactcagtatgtttaaaattggtaaattaaacacagtccatacccggatcagcaagttcatcgtttaacttaatttcttggtcagtctgggcaggaacaggctggtcattacaattctcctgagctaaaacttctgagaaagggaaagaatacattcaaaaaaatgtaagatacttaaaagacaacaaatgacaatgaaacatatgcctagctgttccagatagaacaaacataaagcctattaaaaataattagaattacaagtagccaacaacttgacttagaactcagtatgtttaaaattggtaaattaaacacagtgcaaacagcacaagttttcatcaccatctccacagatcagtaacaagttgtggaacaagtattaatgcaatattaccttcaccagtctccttaattagcacatcacaatcatgttgcagatgtttggtgtggagattgttagaaaagataacggttaggggttttcgtgcagattcacatgcacttgcttcacgacagacgcacttttcaacagctatagggctcactccatatttttcttcatgctcttcaatagggaaaaccaaagacaaaacatctggagatttagcaagtttaatttagtgaattgaaaatcttgaagcaagattactaagcaagatctttagaaaaaaaacagtgaataatcagctggcacaggtggatttagatgttcagcatacatattatcttcactcatcaatgttgcagagtttttattatggatacaggattaattcagttgtacctttatcagtctctttagctattctgtcaatatcatgctgcagacttttggtgtggagatcagttgatgtgacgttagctaggttcttttcctcaggctcattggcatttgcttccaagctaactctctgttctccggacacagggctttgctcttcacggtctgcgacaatgaaactaattgataaaccatttggtgattttggaccaacaaagtctccctttgagtatataacatgacaataatggacaaagctaattacaacatcacaaaatcaatagggtattaatatgccagctttccagcatccaaagaagatcaaaaaataataatacaattgtgatgccatataacttaaacataattaaagcctatagatttggctatgcagagaataaattaacaactagtatgccattaccaccaaatgttgacctcaccttcactcatcaatgttttgtcctctgagacaacacaattgtcagagactaatcctgtgatgcatgttgattgatctaatttcccacttcttgtttcagataaatggtcatcaacagtttgagtgacagaatgttcctgaggttgcttactcttatcagaactttgatttgcatcgtcaccagattctgacccaggtatcaccacagctacactctgcactgtgcaaatttcgtcactaggagctactgttacaagcaatggacctgaagagaactcttctcttgcagcattaacctgacaaatttcttgaactttactactagactcattattatattcaagtgtgtcctttgtttcttccatgataactatgtcatcatttgccaccttgaaaggcatcacttcttctggagcagttgttcgtctcttctttgaagaccttctctttgaagttgtgcaatttgatgcctgctgcgatccttctgtgttatctttttcattagagatctgtgcattctgatgcttccaggaaacattagctgaagatgatatttccagcaaaaacctactgcgcttcctcaatttcaagccttcttcaccaacttcaatgtgatccatgctgacctcttcaactgcattaagggcatgagatttgtgtgttgtcctcctcgtaggatttttgaacttttttccttcatcattattttgtccctcaagtagcactgtagcgatagatctccttgattgcctaatagaatcttttactttctgttgcttctcaccatcttgatatttaccactttgcaagttctcatttctagccattttatggtgatcttgcttctcattatgcatgtcaggaagaacagacttccgtgttgatctcctaacattcatctcagcattcattttgggtgctagaagtccactattattctcaagcatatcaggcagcacagatttgcgcgatgatcgcctagtaggttgcttcacaacaaattgtttatccacatctttgcccttaccaatttgaattccttcaccaacagctttaatatttttaactgggattacaggcttccgcgttaatatcgcttcatctgtttccatgttcttttcggcaatgagactcttctctttctcatgcaattctgtgataacagatttacgtctcagccccctagcaggtcctttagttgctggttgcttcgccacatcttcactgttagcatattgagtctcttcaacaatacttttggtatctttaacctgcacaactgatttcctcgttgatcgcctaacatgtgcttcagggttctttccttcaattacatccttctctttctcaagtgcagccaaagcaatagatttacgtgttgaccgtttaattggttctttaactgctggttgtttctccaaatcttcagaatgagaattatggtgtgccaatggctgagctgtgctcgagtctttggccaatttgatgtttactgaatttgcactattggcctcagaatagtttctccgtgaccacctcagtagaggggacttactggtagcaggaattttttgacctttatcctccggagaagatgcaacctgttgatgcctacgagtagacggacgcatcttgttttccaactgcctggtagtgtgagtttcgtccacgacgctgttgttaacgtggacaattttgttccttaaagacctggtggcaggaaaatcacttctgggcacatctgaaagcatagtcaactctacagttgtttgtggatctccagtcttcctcctcttgttctcaaccacagtgggtggcaccacaacaggtacgattgagcgagaccttgtagtcctagctgttacttccaccagagcggacttctgcacatcagactcagctgcattctgcctccctctcttcttctcaacagcaggaggcaatacagtagcagaccactccaaatttgaccttctcgtaactctagcctgagcgataacagcaacgccctcgtcattctcctgattcttgcgcttgggcttcctgtcaacagcaacagcctctcctgcttcctcagcctcggcaggattgaacgaattcctcctggaccgcctcactgggacatcagcgcccacatctgcagaaataccgtcttcagcagcagaatcagtaccggctcgagcagacttcccccttgtcttggcaacgaccggcgaccatatgacccgagacctcagtctcctggccttccctacctccgccccaaaagtaaccttcttggcctcggtggcacctccgcccgtttgcttcagacaccccttcctcgccggcactccggcaacctcc

SEQ ID NO: 69517 - DNA, 518 bp, Zea Mays
ttttgggagcccgctttcatagattgaggagtcttctgaggaagatttagactactttgccacgttggatttggccgcatcagagtccccgccccaatctgatgcgcgcgaagagtctgcttccccagccagggcgatatccaaagaccaccacaggcgaaaggtggtgtcgaaacagagtgttggtgggatgtcacaaagtgggagacatcaccggatgggtatggagcgatcccgtcttcgactagatcatggtagccaacacgatctactgtcctcgacggccgggacgtgtattggggagggggacttgcagaatctatttgagggcgaagagttgaagatgatgttgtttaattttcgggaggcgggtcttatctgaaggcagagctgatgtaacatttttgctggcctcactctcgtgtagcgatagggagtgaaaacgctgccctcccccgcttcccaatagagagggagggcgacaaaatatgatttgtattatttgtgcgatgtggccg

SEQ ID NO: 69518 - DNA, 583 bp, Zea Mays
aggatctagggtttcttcccgatttcatcggtgcccattctttcccacatcttgcgtcgttcctctctcgtctctggtctctttcgtgttcgttgcgttccagcttcagtggtggttggttttcttcttcgtttcttctgcctgtggtcgacgaggagtggccccttccgggtcgctcttctgctgctcttcggatggatccaaagaaccgaaaccctagctaggagcgttgggggcaaaaggatgctccacagggatcgcaatcgtggggcaagaaccggaatctcagctggcgtttaaagccggtcgctggaaaacccgagaacaaggaagacatcctaacttcttcttccggtgatggtggccattcaggtatcctcaaaacccccctctcattctgaaaaaagagaatgaaatcgtgcgtcgtttttttctgccaaaaatgtggtgcagaggggcatcatgccagtgattgcttcaagtctttatattgtgacatctatcgcaaagaaactcataacacaacgagatgtgtcctccccaagcaaaacaaaccctgcatgcctattgtaggtatgtcagt

SEQ ID NO: 69519 - DNA, 401 bp, Zea Mays
cgacaaccaaggttctcaacgaaggaagacctctgaggggaccccgtttcagtttgctgctcaaaagatggtccagatttgctcatgcgtcctcatcgtcgatggctgagttggttgatgttagattaacaggcattccccaacatgcttggtgtagatctacaactgaacagttgctcagggactcatgttgggttgaagcattacattcagaagctatggaaatgagggatttttcagccttgatggtgaaaacatggtgttttgatcctgaaaaactggttaggaaaatggatttacacatcttggaggctgggatagatgatcaggaaaagagattcttaacctataagatctccattgatatccttccacctaagaccctacagatgacatcggct

SEQ ID NO: 69520 - DNA, 469 bp, Zea Mays
tcagcttgctgatggatgagcctcctctagctctagcttgctgatggttggcccaaaactcccatggagcatgtgcttccctggctgctaccttggcagaagtcttgttacggttgttataaaaccagttgagcacctggatgcatgcatgtccagatcggaatgaaaccgcaggttcatgggagagggaatttgaaattgatatgtggaacggaacatcgtcgatgcacatacctgctttggcttgacgggaaccatgccagcacggcgccggaagcagctaaatttcagagcgagctcatccatgaggatgtgatccagcctgcgattggtgaccgggaacaggcgctcctccatctctttcacttcggccggcaagaatcggaacggtccctccatcatcccgctgctgcttgattgccgccgatccatccttctccaaatgacctgctatgacggctgctgctcc

SEQ ID NO: 69521 - DNA, 622 bp, Zea Mays
ctttacctcatccacgcaccaaagattaacttttggtcaacatttttttgggatattacagtacccacgacgaagaagaccacggagcagcttaccggcattggtagggttccgacgaagggtctagcgaggatggggagcctctggcggtcacgtcgaggtacaggttggcgtccctggagcccggagctggtctggccacggatccaggcggcggagctcgtcggtgatatctgcaccggccataccacggcggtagagctcaatcagaccacatagggaggttcactgagtggtacggagcgtgtgcgtgcaaggaatcgacgaatggatggttagattacctggaccgagggaactggcggaagggacaagtctgacgaggtgttctggcttttctggcgaggtatcgttcggtctaagtggctaggaagcttcgctagcctctagggaagttgcccggggagctagactggacggggttaggctggagtggtcggtatgaggtggtcgacacgtcggcaagcttgcggacgtcgccgtgctcggtgttctaacaattaccggcgtccagtcgccagtaaaaggtatggggcgtgcgggagggcaaggccgggggctg

SEQ ID NO: 69522 - DNA, 397 bp, Zea Mays
tcatcgctcgccagggcttggcttcctggctctggcaatggccgccctttggaagctaggtagaagacgaacccaggcccctcgatttcgcagtgtgcggctacgattagatcgtgccgtaacggttcgtttggacgagggaaaaccatagatcgatgatcgtggggctgtgggtgattcgggtttcatagaatccggttcatcagatcttaatccaagggctgtcctcgcgtatcacttcactgggggcgcgatctaatctagaccgccaggcgtggatccaacggtccaaaccccaccgtacccctttgcgatgacgttttacaaaatataccttacgattttagagaataggacctgccgtcctcggcgacagtaatctgagtctagggaataa

SEQ ID NO: 69523 - DNA, 876 bp, Zea Mays
gaccaagggaaaaataggtagaaatttacaactcttagatcgagatggaagagaggacattttgaagggctggtataagataaacatcagtgtaagatatggtgatgtcgaaggtaaagatgataataatgaaaagcataacaaaggatagcgttaaggcaagactcgtgaagtggtgaagtggagaaaacaatcaagggtaagataggtaaggtcccaatagaagggttgaagtaaaaaattcataaccggtggaagtaacaaggaaacaatgaggttacaacgaatgtgcaaaaataaaaatgaccgctcatggatcgttaagaaacaagggtggtcaaggacatgttaactgaaatgtcttgaatagtcattggggtatgcaaggttccaaggatacgggcataccaagacaagggaatagaaaaaaaaccaaaggatgacgacttaacagtagaataggaagggatctcagaagacaagaaggtcatggacatataaattatagtgtttaagtaagcgagagaaattcagatgtaagtatttgaaacaagagtattgaaaaatctaggggtacgagcatgtcaataccaaggaaatagagatggtcaaatggtagcaattcaatgacgaaagagaaaagaatcccaaaagacaagaaggctatggtcaggggcatctacaaagatgtcgcaagcacaagagtgagatgagatctaatagattgagagaaatatagaccatactagaataaaaatacttttggcaagggggggcatatttagagcacaacatagaattagtcgaggtgactaatattttgaagcagaatcaaggatgaggtgaagtaataatcaataagtccttaaaacagcc

SEQ ID NO: 69524 - DNA, 489 bp, Zea Mays
cttagatcaatcgttgcaaattacagtacacaatcgacaaaacaaaatcgctgcaaacaaaaactaagattgatgttttgttggataaatggctccattatcgatagctcatgtaggatgttgtgatgtgcctctagtactgtattgtaatctggtgggaggaaacattttcgtcccattctcctgcttccatatagtctaccctcgtgtcatgacggaggcaaatctattgcaacctggtcttttaggatactattgcagaatggacctctgactcaatgaccccttcaatacagtacccatctatcatggatgcctgaggatgagcactggttgatacacaaccattcagtattgacatgaaacgctcacacgtccatatttcatgcaagtacatgagacctaatgcctctatttgtggcaccgagtgcaccacaaggtgcaccataatatcaaagaatgatggagggaaaccaaactgtgatattg

SEQ ID NO: 69525 - DNA, 599 bp, Zea Mays
gaggaagagacgaacatagacctgccaccgtactggatcaggatattaacattactatgcatggggttgtttggtttgtagggacccctatacacacatgcgcgatgaggatttacagaggttcagttcgtttgagcctgagttcctacgtcctctgtatgagtgacatttagatgtaagtgtgtaggcatagttgacatatgtgcggtgtgtctaagctaccaagtatgaagagcaccagctaccccttgtgatacatattgttgagccgagcgatcgagggagctcacgctcaaacgatagctttttctatgtgctagctcgttgaggaagtgaagttcagaaaggtgaaggctacaaaacccaagaggggaaaagcactttttattctgctctacaccttactgttatagcataagagagaagagagttatatctctctataggcacgggatcctacccataaacatgtgcaactactcctaccttgtcatagttattgtaccatatgctaagcacctctaacatgccacaacatcaattatgacatgccgtaatggagggtataggtacctatgtctccgagtactctgtagttg

SEQ ID NO: 69526 - DNA, 603 bp, Zea Mays
cccaaatgtccaaaaagatttggttcgagcttgtgcggaggagacaagtgaggctattaaagctgagataggtggtcatctatttgcagtgctcgttgatgaggctcgggatgcatcaattaaggaacaaatggttgtggttgtaaggtatgtaacatcttttactttacattttgttgtttttagttctttactaatattattttccttgcttcactttgatgtaggtatgttaatgataaaggccatgtaattgagaggtttcttggtgttcaacatgttcctgatactacatcatcttcattaaagatagctctggatgatatgctagcaagatatggtttatctatttcaagagttagagggcaaggatacgatggagcctcaaatatgagagggcaatttcatggattgcaaagattggtattggatgaaaacccatatgcattttatattcattgttttgctcatcagttacagttggtggtagtttctattgccaaatgttgtggctcagtatatgatttctttaattacatctcattgattgtcaatactgttagtgcatcttgcaaaagaaaagatcaacttcttcagagacat

SEQ ID NO: 69527 - DNA, 447 bp, Zea Mays
agagtatgaaaggattcaaggagatgagcataccaatgccaagaaacaagaaattgccgaaagatagcgacttaacaacagaagaggaaagggtttcaaaagacaggacggtcatggacatataaactgaaatgtctaagtaggcagtagaaatttagaggcaagtatttgaaacaagagtattaaagggatacaagcatgtcaataccaaagaactagagttcgctagatggtagcaatttaatgacaaaagaggaaagaatcccaacaagacaagaaggttatggttagggggcatctacaaagatgtcacaagcacaatagtgagatcagatctaataaattgagagaagtatagaccatactagaataaaatacttttggcaaggggacatataggagcacaacatagaattagtcgagaagactattattttgaagcagaat

SEQ ID NO: 69528 - DNA, 690 bp, Zea Mays
atgagatgttggctaggttgtctgaagattccagcgatagcgacaattttgacgtggagagcgggaatgaagatgtcgaagatcggctgtggaggctgagccatgttgtttttgggaagtcaactgtcaaacaaggtcaaatcgaagcgatgaagggcaaataatttcatgatgtttctatagtgagagtcggagggtaaagcatcattccctttatcgaagctgacaaggtggtggtctttaagagcttcatgaaagttgggcttcgatttccactccacaagatgttggttgaggttttgaagacattcgagatataccttcatcaacttaccctcgaagctcttatcaaagtggggggttttatatgggctatgaggagtcagggactagagccgaatgctaggtgcttctgcaatattcatgagttatcttactagacgaaggcaaccggaaaagaacaatatcataacaacttcggctgttacaactttataccccgctctgaggcaaattatcatgtgcctacatttcgaaagaagtggttgggctcttggatgaagcaatggttttacatgaagaatgatctgaatcagagggaggatgtgagtggcatcattcagcgtctcatatggtcacgttttggcattaggaggccatcaatcgtaattgggaatgaggtgcaagcgt

SEQ ID NO: 69529 - DNA, 604 bp, Zea Mays
tggaattcgaatcgaggcatgaaatgatgtggaattgagccgatacttcacgaataggtttatatgggtaaatatgagtgaagtgtgtgtgcttggtttgaatttaggcgaagaaaatggaatttgggatttggtgaaattgaagcctggtatatcggattggcgtgaaatttggcgaatatgttactggaggtgttgtaaaggtgcttgaaaaatttggattcaaatggagaatttttgactagtttgggcatttcaccgagcatgtggtaggcggaggtttaggttttcggtgaaaaggatatttgaggctgtgaaaccctccctaaggagctgagaacctacaagggtattcaagggacacagaggaacatctccaaccacatggattcacaggaattcataaggatttgaatcaagcactagaggtgggcaggagctccatttactgagtaacagaggaaatagaagagagagggaagaggaggagctcaccagagaggagtgaagagctcagccgagggagatcaccggaggatcgccggaggggagcagcggtgagagacagagaaaatgttccctgccccgggctcgggcggggaaa

SEQ ID NO: 69530 - DNA, 330 bp, Zea Mays
aacactcatggttaaagtacaacgcacgctgattccaagcctcattgtgcctaataacagtgaaagaaaaacccagggcttgctgtgggcccatagccacaagattatctctgtcaaaagcaaatctgaatctcacaagggcctgacccaaatgggagcgctgaatgctcctgacctgaacgtgtcgaacccccacaaggtactcacgaataatgtcatcaaatatgtgaaaattaacctcgtgttctggcagcggctgcacaagaacgatgccccaatcttcatgagcggagggctggggacgggtgacagtgcataccatgatttccc

SEQ ID NO: 69531 - DNA, 413 bp, Zea Mays
tataattgagcctaaatatataagtaactagtacacgtctcgctaagttagtgaaccaaattggttagggtctaataagtgtttgcctagtgaatgattgtagaacccgattaagtgattattctcttttaactaagtttgtctatatagaagccatgtcaaattgatgtgtacttaactagcataataataaaggaactaatgaaaaattagagcgaatgtgataaatgcttgcacgtttgatgccgtgttgcgctggttaattctaggaagtgattgtcgtctttctaatggtattgattacgtaggcccgatgacgtgtagataactaatgctagtgtgtggttgtttacggtgtcttacaatttagtgtttagttcgctaccgtgtatttttatatcttgtgatatttt

SEQ ID NO: 69532 - DNA, 760 bp, Zea Mays
agctagatactcgccgaagacgtctcttcttctttttctgcccatcagcaggagaagcaggctgattggctcggcaaggacgtttcgggcgaacactgataggcctctgaatatccaaggctttactagcttctgggagaggcgccaccgctaatgttccagcaggagcggcatcagaagaatcctcggctaacatatcaagcatagcacttatctctgcatcactgggatccaaaggcacctcaaagtgaacctatcgttcatcatcaggaatttcttcaagcaaagcaaccaaagcactaatttcttcggcagagggtcgtactctaaggcccaaaccgccatcaccaacaggaggatttgacacgaaatgggtaaaagccttggaaggaggcaagttctaggccgagtaggcaacaggggcaccaacatttgataccttgcctctgagtatcatttcgagccggctcaccaagtccacagcaggaattcttctattggtgacccgggtggagtcagctaggcctcggtacagataggtcgggtgtaccctgtccttcaatggctgaatattcttgaagacaaagtcagtaactacagcctctgcagtcagacctctctccttcaacaatccaacttcagctagcagaactcctgcctcagccacatcctggtctgtgggggattcggtccagctcggagtgcgaacattcggttgtctccctgaccgtggggggagagaatttccgtgattctcaac

SEQ ID NO: 69533 - DNA, 601 bp, Zea Mays
gtcgtatcgcaacaacttcagttgttatagcttcgtgcctcgctctaaggcaatctatccagttcccacatttcggaagagatggtcgggggcctgaatgcaggaatggttctatatgaagaatgacctgagtggaagggaggatatcaagtggattattcaacgtcctatatggtctcgcttcagcattaggagaccatccactgcccttgggaatgatatacaagcatgccaggcggcttttaatacagtatgcacatacataggcacaagggacttagtccaggagcacattgcatatagagtatggccacttgcaaatgggtgggagatgtcgaatgaggctgctactggctctagccagagtggtttaatctacctgaagtacaccttcaaatacaggagtcagtttgatgagccaaatgatgactggctagatgccacagaagcaaccagcgatgaattgcttggagcctactcgaaggctgaagatgatgccatgacaatggactttggggatcgaggcaaaaagaggctgaacagggtgtttgatgtcattggatttgtatatccagattactgttatccttcacgaaagcag

SEQ ID NO: 69534 - DNA, 1051 bp, Zea Mays
gagcaatcaagtgaagagtctttctttctctcctcttgtcatccgaactaggattttagtcactctaacccataaattggaccaagtttgtgttgttttaagtaaactttgcagaatcacctattcacgcccgtataggtgatcccaattggtattagagccgttctcttcatcaagggactaaccgtctgaagagatggatcataaagtcaaggggaaggtgaccaacgggaaggagaaggagatcccctccaacgaaacacccaaaggagagactgtcaactccggttctagcaaaaagaagaaggatggaagaagaagcgcatcaagaaaatagtcttctatgacatcgacgcttcttcatattcaccaagggaggacgatgacttatcctctacaaagaaaaagacggttaaacaaaactattctcaaacctcttttaattgttcttgcatttcttacaattcaaatgctcatttgctatctattcctctttgggacacccctggtgtctttttcgtgttacgctgtgagttttgtcctaagcttggatgctcagtgaaatttttttatttctcgatcgtgtctatcactgtttatcaggattattcatggaagttcatcgaatttggagctatccgatctccagaacgaccaaatttggagcatgttaaaacttttatttctcagagcaaatgtaaattcaaatgtcaatctcgtcttgtaactcgcgtccagacttatttattcggactctcgatagttgttatgttattcgatctgtgtccggatctgatttctcgacagtcaagctatgtccgactatttaatctgaatccgcattctcgagcagaatctctgttgtgtcaacctctaattaattattatgcaaattgacttgttatctctatatgatcattcagctctatctatcaagtgtattctaaagatttctcaaagcttgaaccaaatattcgtacgaaattataaatcctacgcttgcttaagactgctcgattaagtaaaagcaaatttagaaattcaaccaagt

SEQ ID NO: 69535 - DNA, 632 bp, Zea Mays
gcttgattagcattaacctcatatgtatccaataaacatactttcaactatgtttgaagaaaggttcctattagctaatactcctagctagtaaaaagtatacatacaagtcgctttgtccatatatttttgtgcatgttgcttctcttgatttatcaccaccggcaccccgcttctacatagcagggtcaatggtagctctagcgtaccatggaagctcactcacaactctaccagtaaactgagcatgctaaactgttaatgaaaaacaaacagcatgagattcgcagataacatcagcaatcaacaacagataaatggaatggtacaatgtcaatacctattgtaattgtagtaaaacaaagacaaagaaaggagcaaggatcaataaaacttacatgctgaaatagccctaccagttggcatcctgcacaaagggacaaaaaacaaaaatatgatcttgtcagcataatcttatcaacataatctataggaggaaagactacctttgcacatacccattaacaaatctgaccaactcaagtgagttacagatgtctctaacaatagcatgcatccaaaatatgagcttgaagaacctatgttgtatgattaaccacacaggcgagcac

SEQ ID NO: 69536 - DNA, 573 bp, Zea Mays
aggccatcaacgtgacccctggaccacgacggacacaatcataggctgaagtgatactcgaagaccccggagcgacactaccgacgacgacgacagaaagctcggtccgacgggaacattcccaagtttacggtgcagtagagttccacccagagctcggacaagtattgaagacacatcgaaagccaataactaagactgagtaggatagagacaaagcgaatagacctgacgacggtagcacgattggtgacggtgcgtcttggtttcacaacaatgttcccgagttctggatacgataggatctaaacggacaacacggtgagcatcaggggaccacagaagagcttaaacaagggtcagtaaaggaaaacacccaccgatacggtctggccacaggccacggcaagaccgatcacggcggcggcggtgacctttaccaggggaaagcggagaccctgagcttctccgctgagctatggtgggcgagcgcaagcaacaaatggaagataggaaacgtaaagagaggacgaagctcacggagaactcaatttataggagggggcttcgaat

SEQ ID NO: 69537 - DNA, 416 bp, Zea Mays
atctgaagatccaccctgacgccaaaccggtgagtcagaaaccacggagacagtccatcgagcggtaggatttcatctgtaaggaggtctagaagctgctggacactggcttcatcgaagaggtccatcacccagtatggctggacaatccagtcatcgttcccaaggctaacgggaagcttcggatgtgcatcgactacaccaacctcaataaggcctatcccaaggacccatatccacttccacgaatagatcaaatcatggattctacctccgggtgcgacctcctgtccttcctagatgcttactctggtttccatcagatccagatgtctaggcaagatatgaagcataccgcttttttaactatggatgggctttactattatgttgtaatgccttacggtctgaaagac

SEQ ID NO: 69538 - DNA, 679 bp, Zea Mays
agtagaataattaagaacaggaccattcaatttttcactaaaatatgcaacgggtttacctccttgcatcaaaacagcaccaatgccaactccacttgcatcacattcgagttcaaaagttttaccaaagtcaggaagttggggtagtggcgcgtgagtaagcttctcttttaaaagatcaaaagaatcctcttgtgactgcccccaattaaatgaaacacccttcttggtcaactcatgtaatggggcagcgatggtgctgaaatccttcacgaaacgatgataaaatcctgcaagtccaagaaaactccatacttgtgtcactgtcgatggcgttggccaactctgaatagcatgctccttggcctcatcaacctcaataccctgtgtagtgacaacatagccaagaaacgatacgcatttggtgcaaaaggtgcatttgtcaaggttagcaaataagcgcgcggcgcgcaaagcatcaaaaacagcacgtagatggtcaagatgttcagataaacaagtgttgtagatcaagatatcatcaaaataaaccaccacaaattttccaataaatgggcgcaaaacctcgttcatcaaacgcataaaagtactaagggcattagttaatccaaaaggcatcactaaccactcatacaagccgaacttggttttaaaagca

SEQ ID NO: 69539 - DNA, 552 bp, Zea Mays
gccgatagcacgctgagtttatagggttcgagggtggtggcccgtgaattggagatggcgcggtggcagccggagagggaagaagttactggcacaagcaattcgtggatgttaccgtggcaagttcttgggcgaccaatgggctatgtattgtgattaattgcgacgtggtgagatggccaacggcgtgtcacgaccgcgaggaacggcgatacgaagtgagggtcgcgcggccacgtcgccggtaaccggataagcgacagagcgttcactgtgcttcaagttcatccacggcgagatctttttacctgggaattgttatctacgcttaacagagcgtgaatcgcggcgctggtgcaaattcgaacgcaaggtagccggcggcgaggggggagctgaacctgagatattttgggtaggcactgtactatcgagatccttatcagagtgcctgacagagagaattgcagtgccccgatctcagatttttgtgtgggaatttgttaacctctctgtaacaaattgtagccctataatccagctacaatcttg

SEQ ID NO: 69540 - DNA, 628 bp, Zea Mays
ctgccgttcatcatcaggaatttccccgagcgaggcaaccaagacgctaacttcttcagcagagggtcgcactctaaggcccaaactgccatcagtgacaggtggattcgacacaaaaagagtgaaggccttgggaagaggcaagttccaggctgagtatgccactggggcaccaacatttgataccttgcctctaagaatcatctcaagtcggttcaccaagtctatagagggaattcttctgttggtaacccgagttgagccagctaggcctcggtatagataagccgggtatgccctatctttcaacggctgaatattcttgaaaacaaaatcagcaaccacagcctcagcagtcagacccctctctttcagcatcccaacttcagctagcaaagcacctgcctcagctacctcctgatcagtgggggattcggtccaacttggagtgcgaacatccggctgtcttcccgacctaggggagagagaatttccatggttctcaacaataaaccactccaagcgtcatcccttgatactgtctttgagagggatttcaagatattcagtcttcctcccgcgacgcatctctaaactagcaccccaaccagctgatgctgcccccggc

SEQ ID NO: 69541 - DNA, 680 bp, Zea Mays
aaaacttatatcggtaggtggtcggttagtcttgattaattctgttctcacaagcttagttatgtttatgttgtcttttttgaagtgcctaagggtgtattggaaaaaatagactactatcactctaggttcttctggcaaggagatcatcataaaaaaagtatagacttgcacgatgggatattctttgtcaacctaaagaccaagggggtctaggtattcagaacattgaggttcaaaataagtttttgattggtaaatggttatttaaattgattaatgaggacggtctatggcagaatttacttaggaacaaatacctcaaatcttgtaccttgtcaaaggtaggtagaaaacctggtgactctcatttttggtcttggctactaaaagttaaagaccaattctttggtcttggttcctttattcttaaagatgggaagcagattagattttgggaggacacgtggacgggtaaacagcctctaatgctgaaatttccgtccttatataatatagctcgtaaaaaagcgatatggtggcgaatgtttttaataggacttctctaaacatctctttccacagagcgctggtgggtggtaatcttttatgttggaatatattggtcttgagtattgctcatactcatctatccactgggagagatgagttcaaatgga

SEQ ID NO: 69542 - DNA, 606 bp, Zea Mays
ggctctgaacgtcgacgacggagaggcatagctggcgtgagcgcgcggtgtggcgaggcggcgagcgcagaggcgagcatagcaagtccggcaagcagcaaccgagtctgggagcacaaggtcgtgggctgtgggttttataggccggcgagggggaagctagagtgcctggcagggagtaatggggaggagagaaaacagccggtttgaagaagattgaaggccattaatggttaattagacgctgttaatagagggaggccactcctcttgattcctcatagaaacggacgagcaagaaacttcagacattaatggtgtcgaagaaaggaagagtaacggctggacaggggagaggaaggggaagaggtaggggatggtggctggcgctccaatcaaacagggaaacgagcgaacgggtctcagtggcacgagctgaagaacaacggctcggaagcacaagcggcacacacaagccagacagaacagaggagctgtacaaaggttgaagacgagctgacattagggccccacaggtaagagagtgaaggaggagagtggagtggagcacggttaggctaattgggctggcgcacagcagatttt

SEQ ID NO: 69543 - DNA, 626 bp, Zea Mays
cttaagatggttaatttaaactctatgctgaagctgccaattttattgtctatttattgacccaaggttgaattattgtgcaatactaatcccatgttcatctcgagtaaaataagttgtagaggtccttaatcattattggtgaatcaagcaaaggactttgatgagaatctgcaatttgctctccaaaggacggtacccgtgtatcttaagtgcattatttccaatcagtattgctcttaagttggattgtcgtgctatacctatccttggagtagttatgcttttgagattgcttgtgttgaatacctttcaattaatgattcatgatttccaagatcataatgatgtttgctcaatcatgactgtgtgctttataggttatatctcttgaatcattcaatgggtagcctttcatttgatatatctaccatgattaactcacttggtgtatgtggctaaacctgtatctttttgtaaatcatgttgtgtggtttttaatgattatgtattaacctatgtgcaagcatgatagttttgtttagtccatgttcacatgattactttgtcttgatactctgtgtataccaaaacaagaaatccatgttgtgtctctaatgtaccct

SEQ ID NO: 69544 - DNA, 280 bp, Zea Mays
ccaggaaggagagcacagagtagccagcagtaaagttgactacctgatctattctagggagcctaaagggatccttcggacaatgtttattgagatcaatatagtcgatgcacatgcgccaatcaaatttatttttagtacacgaacaagatttacaagccactcggggagcaacacttctctaataaagcctgctgctactgggcgttctaattcggcccgtatagcctctcttttgtcggacgcgaaatggtgtagcttctgtcgaatcggttttgcg

SEQ ID NO: 69545 - DNA, 562 bp, Zea Mays
ggatgacatagcgcacgtgagtcaagctctgctccagtgtttaatattatgaattttccataagctaaaaattgatcagctacacaatggggcgtgctgagtttgcttttttcaaggtgctagaatttgtgtcattatatttaaacattagataccaacctgtctgatttctgtcactgggcagtcagtttgggtggttagaccacgactcgttgtaagccttaggctgtctaattagaaccccatgtccagcacccaagccctagctactcctgtaggatacttcaatttctatcaagggagtcatagtagaaatggcacacttggcaagcataatgctagtggaaagcagccatatgtattgttgtctgacatgtttcgacaatttagaatcatgctagtaatagtttattcctaccctgtttaattaggaagctagctacatgtcctttctttttcttttttcttttggtttatagtatagccggattcattgaaactattcagcaaatgcactggttcatgtatgctttgtttgtttagatcagtatgtacaactatc

SEQ ID NO: 69546 - DNA, 776 bp, Zea Mays
gtcgccggagtggtgcgatgaacgtccacccttcttgttcttgcccatggttgattggaagagaagagaaaagtgggagaataagcaacaaacgaccaggagaggtgtgaagacaccagcgaggcaggcagtctatttatagaggccagaagcaaccgctcatctcctaccacggccaccgaacagtcgcaaatattcaataggcaattcaaatcatctggaagcaagtcaggtagcaggcaccgtttcacgtaacacgataccatttggactaaggtcaactgcttgggcgatatgattacaccccgcggtcatgtcaagttactactcgaggacagtcagctaaacgctcggcgtaccaagacgtcccttggttacacccattggggaggggacgtccaggaattttcaatagattttcccaagcagtcacatccatacagtatacgcaatgaatgtatcaagacagaagaaagatattgatggagatcggaggaaagccaaatatagctactgaagtacaagtctaatcaacagaagcattgaaacacaaagcgaaatgaagaccagccaagagccatctaccagacgtccaatctgtcgccgatcaaataaatttcaaacctaacaggacatgggcagatcacgctgttattctctaaaacaggaaacgaagacaacatgttgatctctaaagcataagctgatgatataatgttgagttttaaggcatgagatgaagataagataataacttctgaaagcatgagatgaag

SEQ ID NO: 69547 - DNA, 555 bp, Zea Mays
cttgcccattcgtccgttccccttcctctggccgccctattccgcccacggcgacgatcgatctggagactccggggccctcccgcaaacggcgtcggtcaggtagcagggggtgttctcatcacggtatcagcggtccgaatctctatgaaccggcggttccacctcagcgactcccacatctgtgcgaaggtatgcatctgaatggacctgtgagatgttttgatgcatcgttgtgtggatctggtgtgtagcgtccgtcgtgtgagatttgtgtttaatgtcttcatttagcatcctgcatatacacgtttagggtttaaacaacaaattgaccgacacaaatacataccaatcaccaattggaattcaatgtgttccatgccggctagttgccttcctctggaagtaaggattgcgtgtagcgagctcgtgacaaatttccaagaacataggcttgcacatcctaaacctaaaaatgacactcgtgtttgttcgattgaaatacgattgagaactcaatgtattcatttcgaagctcaccgacgcctgaag

SEQ ID NO: 69548 - DNA, 448 bp, Zea Mays
ccgaccatcgcctctcctcgcgaacgacataccactcatatctgttaacccagtctaccctttgtctactcctcagcatctacccctccgtctaaccttgtctacccccgacatctaacttcatctacccctatccaccccagcttgccatgtttcgtcatgcaaatgtctcatgcgccatgcatggatccacctgtttctctcactcgtccctctcactgtcatcctgggcgcacgcccgcgtgtcagtttcttctcttctcaaattgttgcccgtttgcacgcgcgtctgacttagacgtgatccgcggtgaatttggtaacctccatccgcactatattttttatatatatctacccctaccgtcacataactcttggtacggatatgcacctcctcccagatccaaatcacacaacaggcgccctccgcacggttaccattccc

SEQ ID NO: 69549 - DNA, 341 bp, Zea Mays
tgatttactttacttgatttccattcaatatatttgttatatatgttcgtgaagtgcaagtacttagcggatgttggccactcgcttttgatttctaaaagatatgaaaaacaaggcaacacaagttaataaattgaaagcttctctctttaactaactcttctatgaaggttagttaaacggagaagacaaatcgatataacagtaagataaagaaaatagcatgtaaatcaacaagagtaaacttattactcatctaaatgttcccacttgcatttgtttcattctttacggtgcatcaaagggttccaagcatatatacctttggcttcacacaaatg

SEQ ID NO: 69550 - DNA, 749 bp, Zea Mays
acaaaggacaatgaattcaagcataccagcacaacacaatccaattctactcattcaaccaaaacaaaaggtgagacaaggtttggaataagaaagatattataacatcaaggagttgggtaagaatcatcaaggagttagacaagacatatttgttggtggccaatagggaaataagataaccatgaactattaaagtgaggagaaatgatacaaccaaggatatgaagtgggttagggagaaagcattatcaaggagaaaagtagagaggcaaaggtttaatatatatcaaggtagatattgcgcaagggtggcaaaacaatggcaagaaaacaaaagtataagaagtcaagggttatatagcaatattagggattagaaaaccactataataagatataatatcgtccttaaccgatctagtcaaaaatcctaaatctaaagaacaatcctatcaacctaaccaataagtctggtaatagatccaaaggatccatagcaaaacttcttgcagagtggataagacaaagaatagggcatcgtcgatagcttcaaaagggttacttctggcaagtttcgcttcaagttccataatcttacttgatcatcttgcaatgcttctgaccagagctttctgatagacgaagaatcagagaagaagagttgaaaataaaagagacgagttttgatacaaagtaagtttttatgaagacaattaagtcaagttttgaacgactaactgggcttt

SEQ ID NO: 69551 - DNA, 329 bp, Zea Mays
aagatgtttatcccaacagtgtacagaacaatcttcatctcttgctccattacataagataagatgtttatcccaacaatgtacataacgtagagtcttcatctcttgctccatttcataagataagatgtttatcccaacaacagcgtacagacgtagaatcttcatctcttgctccatttcctaagataagatgtttatcccaacaacagcgtacagacgtagagtgatgcatacgggagggagggagtgagggagatcactttgtgttaaccatggttgaaaacttgaaatgtaaagactggcaaactttagttcaaattatgctt

SEQ ID NO: 69552 - DNA, 657 bp, Zea Mays
cgccgaggtcgaaaaaagttaaggttttaacacatcgccctaagcgcattgaaatgggtgaagtgccaaggcctattgaggggtcttcttccgtatctgagccaagtcgttccgctcctgtcgaagctaggactgaatcagccgaagagctagaactaaagaaagcgacagagcaaccgaaggcaataagtccgttgcaagagacggagctaccgaaggcatcaaagattcctgcagcaactccaaggaggaggagaatggccagcgtactagatgctgtcatggaatctgtaaaagtacaaactcctacttcagcacctgatacagaaggagaagccttaaagaaacctgacgaagccggtatggcgcatgctacttctgaggctggaccctcgattcacgtcgaagcatatcctccgggggctgctcccttaaccgtggaaaaagaaagtgtgcctgagaaattcaagtctcctgcttccaaagcacctgccaaagagctggagtttatcgtgcaacatgctttagggaaacaattggtggaggagcaaattaccgaagctaaacaatatgccagggatctgaagtatccacaaggatccttggtgtacaatgacaatgacgaagatgattttctctattgcctaccagacaata

SEQ ID NO: 69553 - DNA, 684 bp, Zea Mays
atgatacccatatgagaagtggcataaagagtggagccttttgtagtggtggattcatcatttggcctccatcgatcacaatcttctccttccttcaaaaggttagtcccacaagaattagaggaagtagatgtgccatattaaaagtattgttctcaccaaccatttcattacctttgattaagccatatgttggtgaggggatggatgtggcatgatcacttagaccttttgggagaatcacttgagtgcattcatttgttggtgaagttgagcacttctcaagtggtgcttcccatgagagaaacttctcatcacatttggacttgtcatatctttctttgagagtgatccaaatgagaagtgcatcctcaagaggctcatcatctccaaatatgacaatatcaaacacctctttactcaaagcactaaataagacattagtggcttgggcattgagttgtagacatttcacttcctctttagataagttagtcaaatcaacattataaggtgaaatgttcatatctacaatctgctatatttgaggacccatgtccctaaaaatactaagcatgctagcagaccaagatgcataatttgaaccatctaaaaggagaagttccaaatatacctcctcacttgtcgacatcatctctctaggcggttaagcctaaaacagag

SEQ ID NO: 69554 - DNA, 729 bp, Zea Mays
attttacctcaagatcattgtcacgtgagttctcaccaactacaatcctttcatatccctttcaaataggaggacgaagagtggctagtacaactcttgcccaagatggtagctctcgatgaaatatactatagtcacctccattcataagtccaaattaagagcaaccaaagccaaattcgagaaattaagtatgcataagcaattacaagcaaggaaattgtttgattagaaagcaaaattagaaaacccaaaaaaattcccatcccaaaaccctaaccctaagatgagaagggacctacctagttcttgttctatggtatagcacttcatagcctactgcaatttttaacaagaatacacatacttgaagtaatcatacagatgaaaacaaacaaggaaaacagaagcatgtagagaatagcaaaggaaaaaccaatcaatttatcacagacacgctctgctactactctaactaatgtaacaattggaatagcgtcaggagaatgggtagctacatcacaaagtgcagccaccactcccatccgcacattttgttcataatccaacaatctgtcacaaagtgcctctgccaggaagacaatcatcagacaatcatcagaccatctacgagcactttgttttgtattaatctttgagaaaaatgtgacagtttttgttcgcagcttacatttaacatctttgagaaaaatgagatagattcatacc

SEQ ID NO: 69555 - DNA, 291 bp, Zea Mays
tcggtcggtggtaaagtgcaagcagataagatatgctcaaatgtaagggtggaaataagggggatagggttccccagtgacctaatagtaatagacacccctagggtagatgtcatcctagggatgaattggttaatgaagtatgaagtgagtgttagctgtgacaagaggaccgtaacattgaagtccccgcccggagagaaggtagtggctgagctaagaatgcctaaaacagcgaaaggtgactgtcaccagatttcggttgatagcaaggaggccaacccgctcgag

SEQ ID NO: 69556 - DNA, 650 bp, Zea Mays
tgttcatcgtctaacgcgaaaatcaacttattacaatataaatgaaaaatctatagcagtctggtgatggatcctggttctccatagcggatcctcttgcggggaggggataacgccatggcagggacttgaactttagggggattccttccatcaagctgagcttcgagggctgcgatccttgcgtgtgcatccttcagttccaactgtaccctagagaggtccagggtagcactatttaggtcgatattaagacctgccaccacaccagctagggtgttgaggcgatcttcatcagctccacctggaacaatgctggtctggctttctccacgaatacgcagaggaagatgcatgtacttcgtgttgtgcagctgttgcctgtaggtgtggctgagggaccacagagttcgcataacaacatcacggaccgaagcagcgtaggtggatagcggcgtaagagactcatgagctgatagagtcctgaaccctctatcacctgcatccatcaccctgatatgaatgcgagtgatgtagtagcaagcccgaggaggctcgtacacttgccttgtctcatacaggggtcggacgtaggttcccaacgtatgcagaacatcctgcaacaggttagggaagtgccctgtctcgat

SEQ ID NO: 69557 - DNA, 874 bp, Zea Mays
ctatccacaccaacgcccgtgcgggtcgtgcaacaattgagactggagtccaatcgccggcatcaacgtaatggtgcagccgtaaaacccggattccaatccccatccccggtgtataagtatcgggccttccttctctagcctctcaagccgcaaggtatgaacactgccaagatgaaccgtgagcgccacaagtaccggagcggaagaaagctgtcaccatcgggcgcgaagtatgtcgacgattaaaccttggggagccgaggattggagtcgcgggcatctcttgaagcactgccaattgctcgacggagcaatggcgccaccgcgagcagcactgctccgtgcccgtagttggtctcaacaccatctcgggtaagaaactagcctccaacatctccgagctttgttgagactatatcgtggatgattgagctcgagacgtggccggttcacggtgaattcctcgccgtagctgggggccaccattcaccgtggctgaccctctctccatctccgccaccggtatggaccctctattaagttctccatcatctcctccactcgtagcaccttatggttaggagaatagtgcaacaatgagtgaatcacacaactccggcgagcttcaccgtcaaggagccgggcggcgctgccacgcgccaatcgtttgaggaggaaggtgtgcgaggcattaattctttggtgaacgactcagattagatcgttgcgtacccctttgctagtttgatttggacgattggatctgatcggacgaccgagctttgaggtatggcgtgggggtcgatcggctgttgatccatgatcctaagacccatatcgcaggctgttgatccatgatcctaagacccat

SEQ ID NO: 69558 - DNA, 582 bp, Zea Mays
ttggactattttgcagcattggatgtggctgcgacggagacttctctgcgtgtgatgggtgatgaggatattccgggtgagagtgctgggcataggcggcgaagggcggtggcgaaacggagggtgagtgagttgtcgagaagtgataggcgtcatcatggtgaggtggagggcggtcgtcttcgtgtgaacgggactgccaaacgggaatagttgtccttgccggctggggcgagtgtaggtgagggtgagctgcgaaatctttttgagggtgaggaattgaggataatgctattcaactacagggagatgggtatcatcccgaaggttgagccattgtaatgtgtgatgccctcgctgtatgtatgtaactatgatttgtatgatgaggctgcgtgccttcgttgatcctgccgcgcccgtaggcggcttgtgttcgggtgcttttggggaagtcttcgtttttgcgcgtttgttgagttagtccggctgcacccgtaggcgtctttcgcacggagtcttttggattagaccttgattttgcgtacttgtgatattccggctacacccgtaggcgacttt

SEQ ID NO: 69559 - DNA, 504 bp, Zea Mays
tcggcttaagtcggcaacgacttaaggcggtgcaacatgctcgcacttacttaactcggggtgaccactatgccctgctaacggagcaatcgacttaagtcggcaacgacttaaggcggtgcaacatgctcgcgcttacttaactcggggtgaccactatgccctgctaacggagcaatcggcttaagtcagcaacgacttaaggcggtgcaacatgctcgcgcttacttaactcggggtgaccactatgccctgctaacggagcaatcggcttaagttggcaacgacttaaggcggtgcaacatgctcacgcttacttaactcggggtgaccactatgccctgctaacggagcaatcgacttaagtcggcaacgacttaaggcggtgcaacatgctcgcgcttacttaactcggggtgaccactatgccctgctaacggagcaatcggctaaagtcagtagcgacttaagccggtgcaacatgctcgcacctacacaattcag

SEQ ID NO: 69560 - DNA, 962 bp, Zea Mays
gtgccaccataaggtagtggattagctatggtaggtaaaacattaatctgcttagctaataaattctctaaagtaacatgattcgtaactacctaccttgtccacttttctcttaccatatgtatctaactcagatggtcaataccaggaggggtggtggaattgatttacctcccagacgacacactcggaggatatttagacaaccccagccacaaccagcagagatgaatcctcctaatcctccaccaggcggagttgacccactggttgcagctcagatgaggatgatgcaacaaatggcagacactatggcagatatgtgggctcagatgcagcaagaacaccaagagatgcgctaggaaagagaagagatacgataggagttgcaccaggagcgagaagagatacgctaggagagaagaacgcaaccgcagctgcaacaacaatttcaacagcaacaacagcaacaagtaccattgcttccaccaccaccaccaattccacctcgtgataagtaccgggaatttatgagccataagccaccgaccttcaccagttcgccagatccacttgatgcggatgattggttgaagtcaattgagaagatgctcaacatcgcccaatgctcagaccgggagaaagttctttatgcctctggtcgtctgacaggtcctgctactgactggtgggattcttatactactacccatgatactgctgatactattacttgggcagagttcagtacacagtttagaaactaccacattccagctggattgatgaagatcaagaagaaggagtttctgtcattgaagcaaggcaacatgtctgtcagcgagtacagagataaattcattcaactgtcaagatatgctccggatgaagttgctgaggatgagagaaaaaaggagcactttattgaaggacttaatggacccctacagtcactacaacac

SEQ ID NO: 69561 - DNA, 2801 bp, Zea Mays
attcacaagagacggtattagagtacaactagtggatgaagacgttattaagctagcaaatgaccttttgtgatagcaaaatacctaaaatcccctctatttaacgcatacctagatggtatttgtgtccactcaagtaaaacaccgcacatcattatgccacatcgtttctcaaaataaaataaagaccatgggaaatttagccaaattgcgtgagagaactttccaaacataggttaaggttgtaagacaccttttttccaccatacagttgctaaaaagcaggaatataaagaatttaaaacaatagatcaccttttataccacaaatgacgtttcccagatgtcaagggcattgtaattgcacgtgaggttattagaatacaactagtggatgaagacgtcattaggctagcaaatgacattttgtgataccaggtttcctataatcccctctattcaaggcatacctacaaggtgtttatgtccactcaagaaaaacaaaacacatcaatatgccacattgtttctaaaattaaaataatgaccttggaaaatttagccaaattacgtgagtgaactgtacaaagataggttaaggttgtaaggcaccttttttccaccatacagttgcgaaaaagttggaatataaagaattcaaaacaatagatcaccttttaaacctcaaatgacgtttctatgatattgagggcattgtattcacaactagtggatgatgacgttattgggctagctaatgaccttttgtgatactaggtttcctataatcccctctattcaaggcatacctagatggtgtttatgtccactcaagtaaaacaccgtacatcattttttccacatcgtttctcaaaataaaataaagaccatgggaaatttatccaaattgcgtgtgagatctgtccaaacataggttacggttgtaaggcaccttttttccaccatacagatgctaaaaggttggaatataaagaattcaaaacaatatatcaccttttaaacctcaaatggcgtttctatgatattgagggcattgtattcacacgagtgggttttagagtacaactagtggatgaagacattattgggctatctaatgatcttttgcgatactaggtttcctataatcccctctattctaggcacaccaagatggcgtttctgtccactcaagtaaaacaccacacatcattatgccacatcatttctcaaaatataataaagaccatatgaaatttagcgaaattgcgtgagagaactgtccaaacataggttaaggttatatgacacctttttccaccatacagttgctaaaatgtaggaatataaagaattcaaagtaatagatcaacttttaaactaaaaatgatgtttccctgatgtcaatggcattgtattcacacgagagtgtattagaatacaactactggatgaacacgttattggactagctaatgaccttttgtgataacaggtttcctataatcccctctattcaaggcatacctagacggtgtttatgtccactgaaataaaacaccacatattaatatgccacattgtttctcaataaaacaaagaccatggaaaatttagccaaattgagtgagagaactgtccaaacataggttaaagttgtaaggcaccttttttccaccatacagttgctaaaaagttggaatataaagaattctaatcaatagatcaccttttaaaccacaaatgatgtttccatgatattgagggcattgtattcacatgagagggtattagagtacaactagtggatgaagacattgttgggctagctactgaccttttgtgataccaggtttcctataatcctctctattcaaggcatacctaggtggtgtttatgtccactcaagtaaaacaccgcacatcattatgccacatcgtttctcaaaataaaataaaataaagaccatgggaaatttagaaaaattgcgtgagagatctgtccaaacataggttatagttgtatgtcaccttttttccaccatacagttgtgaaaaggttgtaatacaaagaatacaaaacaatagatcaccttttaaacctcaaatgacgtttctatgatattgaggacattgtattcagacgagtgggtattcgagaacaactagtggatgaagacgttattgggctagctaatgaccttttgtgatactaggtttcctataatcccctgtattaaaggcatacctagatggtgtttgtgtccactcaagtaaaacatcgcacatcattacgccacatcgtttctaaaaataaaataaagacaataggaaatttagccaaattgggtaagagatttgtccaaacataggttaaggttgtaagacacctttttccaccatacagttgctaataagttggaatataaagaattcaaaacaatagatcatgtttgaaacaaaaaatagtgtttctatgatattaaaggcattgtattcgcacgagagggtattagagtacaactatttgatgaagacgctagtgggctagctaatgatcttttgtgataacaggtttcctataatccccactattcaaggaatacttaaacggtgtttaggtccactcaagtaaaacgccacacatcaatttgccacatcgattctcaaaataaaataaagatgataaaaagttggaatataaagaattcaatacaatagatcaactttcaaacccgcaaatgatgtttccctgatgtcaagggcattatattcggatgagagggtattagagtacaact

SEQ ID NO: 69562 - DNA, 639 bp, Zea Mays
aacaatctattgatgttcagctccttcaacccgatgaccaccgcgaacatcatgtcgatgatgaggaggaacatgatgatccgctggaggaacaactcgatcaagagaacctcgaggacctccgatcctagacaaacctctcggtgtagaggtgtaaccatgcttgaatgagccgaggaagatgcagcagcatccaccacaaactgctccatgcttgttgccatctactccaacgtgagtgaggccacccatttgctagtatcaacaatgtgacatgccatctcatcccgatccttcgccgcatgttctgctaccgatttggctagcgctattgtcccaccaattgatgttgagtctgcttaacggactcgatcctctacacgattgtgtccaaagtgctcaacacttgatcccatttcacgacctcggatttcttcacacccgccatagcttccagcacgaacatagtctcaaccgatggatgcggatgtggagtcgtgatgacttgcatcaaccacgtccgacgcacaccgcgccgagtcatcgtcgctgaggatcaaaggtgaggaagtgaggccgaacaagaccgaatctgataccaagtgtactaacccattgcagatggtgcgcctctacacc

SEQ ID NO: 69563 - DNA, 479 bp, Zea Mays
gaggagtcatcggatgaggatttggattactttgtagcattggatgtggctgcggcggaggcttctccgcgtgtaatgggtgatgaggatcttccgggtgcgagtactgggcataggcgacaaagggcggtggcgaaacagagagtgagtgagttgtcgcgaagtgataggcgtcatcgtggtgaggtggagggtggtcgtcttcgtgtggacgagactggcaagcaggaattgctggcctcgccggctggggcgagtgtaggtgagggagagctgcaaagtctgtttgagggtgatgaattgaggataatgctattcaactacagggagatgggtatcatcctgaaggttgagccaatgtaatgtgtgatgccctcgctacatgtatgtaactataatttgtatgataaggctgcgtgccttcgctgatccggccgcgcccgtaggcgacttgtgcacttgatgttgcacatttattg

SEQ ID NO: 69564 - DNA, 527 bp, Zea Mays
cacatttgatggtcaattctctgacttacatgagcgatttacagttgttgacactcaactggatggggttcatacatagttcaatgatcttcattctcatattcaaactactatgcatgatcctattatgagcagaatgaacaatatgcaacaaagcttttaggacaatatgggtgctttgtccagtcagtttgaaactctctctatcagcgacaacgttcactcactggatgaaagacaacaacaacttcagaatgattttagtcagttcactttgataattgacagcttcagctctcatttttacaacatgtatcctcgtcctccaccgggtgcgcaatgatgtcccatttgttgaaattgatgccaaaggggggagagaagtgatgattctagggagagcttgctgatcttgctgcatatatgctacatctgtgtttaatgctactcggttattatgtctctactctgttattatgttgcttaaaactttgtttacattgttgtgtttaaggctctatccgttt

SEQ ID NO: 69565 - DNA, 525 bp, Zea Mays
aggatcataccggcttactcagatggacggcacagaagtggggaactcgtggaacatagaacacctcagaaaattctatccttagcgaggccacaaaattcttgaaggaacattgtaccttgtaaatctgaggatttcatcatcaataaagttttcattctccaaaggcattcagactcttgactcacagctgactttgattgggctggactcaaaatcagcatgcccaccttgacttagggtgaccactataccctgctaacggagcaatgtcggcaacaacttaagtcggtgcgacatgctcacgcttacctgacttagggtgaccactataccctgctaacggagcaatcggcttaagtcgacgacaacttaagtcgatgcgacatgctcacgcctacttaacttagggtgaccaatataccctgctaatggagcaatcggcttaagtcggcgacgacttaagtcagtgtgacatgctcacgcttacctgacttagggtgaccactataccctgctaacgga

SEQ ID NO: 69566 - DNA, 486 bp, Zea Mays
cattaaggaatgttgtatttacgtccatttgatgaacaagaagtttataagcagcagccaacgctaaaagcacacggattgtgggcaatcaaaccaccagagaataagtatcaaaataatcctcctctttcttttgagtaaaacccttagccacaagacgacccttgtacttttcaatagtaccatcgggtctcctcttcctcctaaagatccatttgcagcccacaggcttgcaaccagccgggagatcagttatctcctaggttccgtttgagatgattgaatccatctcgctacggacaacctccctccagtactctacatctggagatgtatatgcatctgtgagggagcgtggttcttcacccactagataaataatataatcatcacccagagacttttttagtcctttgtctcttactcctccttaactccaaatctggagtctggtcatggacactcgagggtagagaatatgtccga

SEQ ID NO: 69567 - DNA, 288 bp, Zea Mays
gttgtatttcgcctcatcttccttcactttaatcaccaatgaaattagaattttgtccttctcctgggcttcgtttctcagctgaattacctctgattgaaggttgccaagagctatcgtgcaactttcatcctccgcattcttttgagccctcacggcgttgctcagaattaagccctgcaaaaagaaggataaaggtttagcatgagaataaaaactttattcccaaattcttaaactttaagtttacaatttctgtaccttcaggctgttgtatgcaaggctgtc

SEQ ID NO: 69568 - DNA, 519 bp, Zea Mays
cttcttcaaagttgttcgcttcgcctcaaagttcgcaagaaaccagagtatgtctgaaaggaatattgagagaatggagttgagaagtgcttcatggcagtctacctgggggaaagccgaagctacccaaaccacccacctttccagatcaccaccactggccaccgcttccaagacacatgccaaaatgctgccctaaaagccctctgcatgccaaactacaactatgaattcgccgagacaccccttcactacttcccacccagcaacaaaaataaccctccttggaggaaaaggcaccaagctttatcagggagagatcataatgaggaccaccccaccgtaatcaagatggccgaatatctccacacccttgacacccactttgatgaccttttctcccattgcacccacctaaactcctgggtagaaagcctagagcaacgaatcaaggaactgaaggaagagaatgcagcccgccaaaacagtcttgagatggcagaaggcgaggaagccaac

SEQ ID NO: 69569 - DNA, 788 bp, Zea Mays
ctcgggagcactggctgtgccgaaaccacctcgacgtgatccacgggggaaggccgatgcaaccaccaaacctggagccaccagttgcccctatcctcgcccgtgtataagtcggtgtcgtccccttccctatggaggtgtggacttgccgagatagttgttgtagtcataaggagagaaacaccacatcaccaccgagggcgaagaaccagccacacggtcgtcctacccttggaactggcattttagacatcgcttgagggtgcaaaagatttccatggccgaatcgtgcggcgactaggcgtggaggacaccggaagtcctcactagactctgtggattcgccgcaggcccgtacttcgccgtggagggtgttcctcgtggcatcttcgcctgtaagtgacccccttcgtacgatcacccttactcatgcgctatcactgattagattcgatattggggcacctgggcgctagctcgcgtttcttcgacaagggtgtcactacgcggtgtctacgcgctgccgggcgggcggatggaggtaggagatacgagcccgccgttggatgtgttacaaacgacagattaaatcatagggagtatttcgagtgttgaaatactggctgtagatcggctcagcaacgacccggactaaagccagtgtaccttttgtggagttaaatcatgaccgctggtttagaatccgacgacgaatgtgtgtttcgtcctggaccgtagatctaagatttggtggctcgtgctgcctgcctgtccataatgtggaggat

SEQ ID NO: 69570 - DNA, 614 bp, Zea Mays
ctttttttaagtcattaaataaggaaatgattagtaacacatgggtatactatgtttagctattaggcagaagtagggaaggttgcggtaataaggattggggcaaagaaagattccattatggatggtggatcttgactcatctggtgactccgcttggtctttgaggacttgagttggtgcttatccttccttggtgaggttgaccttctcttctctggtcttggtcccattgattcgaggttagtgtattttatcggactggggaatatggttaagatatatatggatgagatagactacatgatgtaggtcaaaagtttgtttgatgttaggtgagaataggcacattatacaattcttcatgactctattggttgggttagaacatgttatataggagtagagtcacatttattttaccactatcaactggtgaagtgactgtctgtaggttatctcaacttgaggttagacttcgttaggttaggttaacctattagattggatcaaatctagaataaattgatataactgtttttttttgactagataagagctaaataaagtttggattagatcatggttgttattctagagtgagataaatatgc

SEQ ID NO: 69571 - DNA, 770 bp, Zea Mays
tccatcccccagcatgcaaaatgttaggttatggggatagtttgcagctgctaggcgggtaggtgctattgcttagataggaactggcatgcttcacaactctggactaagtctgccgcatctttctttgtcgtaagccagtagaaacccgccctgaaagcctttcctaccaaggtccttgatgctgcgtgtattccacattaccctgcgtggatttcttccagtagatgtctccccatagctgaatggatgcatttcatgaggactcctgttgcacctcttctatacaacagaccccctatgatggcatagtgagctgactgccttgcaatgcgccttgtggcagccttgtcatctggctcctctttattctttatgtatctaataattggctccctccagtcatttggatttgtctttgcctgatccactgctttgcattcctcagcgggccctgtcatgatgctcggctatcgtacctcttgaacaaagacgccagatggatcctggccccgattggaccctaactttgacagtgcatctgctgctgcattgtgatccctctctatgtggtggaattctaagccctcgaatttgtcttcaagcattcgcactgtagcgcagtagctatccattgagtctgtggagcaatcccaatctttgttcacctgactaatgactactaggcagtcacaatatgccatcagttaattgatgcccagtgacacaacgatattgagtccatgaattaaggcctcatactctgctgc

SEQ ID NO: 69572 - DNA, 377 bp, Zea Mays
atctgatcacgtctgagggagcaaacgaaatctgcaatctcgataccgctcgagaacgagtacaagattttcaaatgcagagcttccgtttccatgtgactcgcatggaggttaccaacaactcaaacatagggattgcctacggcacatgttttcgtggcatcatcaccacatggaagtagaagctactggctgtttacttactgatgataaatgacccacctgaaactcatcattgggttcgggcatctaagatgaccggcagagcatctttcctgtcagtgtgtctgttcatccttgtatttgaccagaatgaagaaaacattggatgctacccatgatggaccgatgcactgacaaacagttgaaaccccaag

SEQ ID NO: 69573 - DNA, 553 bp, Zea Mays
gcgatagctgaggatcggagccttcgtatccttgcgatacgcgaagttataacaaccaaaattttcatgcagcccgtcttctctggccttcgtttggtaatgcagctcatgtactcggcaaaaagctttagcatttgggtccatcccttggcttcgaagggcccagatgaaaatgctgagcctaacgatggcgttaggggtcagctgatgaagaaaaatctcaaaattatccaaaacttctccaatcatctcgttcaaaggaaaccttaattctgccctgaaaaagcttttgaaaaccactacttcgtcgtccttcggctctggagtggtttcttctccggcaaaacaaataagcttcttttcagcttctccgaggtaacccagcttcatcatcatggacatatcagcttcagacacggtagatttttcaaaatccaagtggctgggttttgacgggatcagaatgcgataatcctcttcttcttcatcagcgttttcttcctcaacatcagcttgttcagcttcgacagtagatgcaccttcttcaaaggct

SEQ ID NO: 69574 - DNA, 552 bp, Zea Mays
gggcaacctccttgtcagggggctcgggtacgtgatcgagccctcggccctggcctcggctctcggcagaaatagggcgggcacaagtcaacaacaagtacaagccccatgctccgagctataccgtctacaggggctcggctacgcctcctcaccgtacgcggccaactacggtactccaggcagtcctccttgaagctataaatagggtagtctacggcttcaagggggaggcagacacttcacggtgttcaccctcaccatgatattggcactttcctcaatcaaccctagggacttgggatccttccctctcccgatcagtttgtactccctactacaagcacttaggcgcaagtaatataagtctcatcccctccgctggaagtagagccttctctcgcccgaacccagatacagacttgtgtcatcttgcatcacccatctgggctagggcacacaatattatttcattggttggttagaccctcgagtcaagacaccgacaacgcacatagcctaaaaattagtgaatttttacaaaacacgaca

SEQ ID NO: 69575 - DNA, 450 bp, Zea Mays
tcgagatcgcgctctaaggtcgacgaggcacgggatgacctcaacccagcatcaggcacgtcagcacaaacctccattgcaccatcatccactggctccgataacaagtcctctgggaccatatcctcaagagtctgatcaaagttggccagggacagttcttgcaaaccaatgagggcagacaaagcaggagagggaaccccactactttcaccgttggcgatgaactgccgactgtttttccgagccaaaggaatttcattttcttcctcctcgtcatccacattggcaacacaagcagcacccccattgggatcagcaacaaatggagcacccacattgggatcagcagcagattgggtacacccattagggtcagcatccgtaaatccagtcgcaggcacttcttcagtagcaggaactgaggtaccagcgtcctgatccaaactg

SEQ ID NO: 69576 - DNA, 360 bp, Zea Mays
gcccagcttgtgttcaatgtatgttatgttatctacccagaaagttgcctgctttcttgtcagcatttgttttttctctcaccccgatcgccctgagaggggcgtgatctctgtccgtttggctaagatatgattcctaaaaaggatattctagaaactaggtcaaggcagtaggactccatccgaccgtcgccagaggagaggagggagatttccacagaccacaggctagtaagtaagtacgagtggaacccccacaaaccatgataagctactttgccaccaactaccagccgtcgcggttacttgtccctctttccaaaattataatagggcgcgcagggcattagtagtgccaac

SEQ ID NO: 69577 - DNA, 576 bp, Zea Mays
ctggaatggctcaatttggagctataatgaattttctatgcattttacaagtttctagatttgtttttgtattaaaaacgaaattctgtaattatttctctgtttttaaacatcccaggactcggcctcaataacagggaaaactggggtttagagcgcaaaaatgcctaagacacagaggcgcaccagccaaggacgacgggttgaatctctaattttataaggggttttctgcaaagtggttacgcgaaggggtatcggtccgttctggccgtccgatctgcaatctagggtctagattagatcccacagactgcgaatcggtacgctgcgcgagacggtggattcacatcggacggtttaaaacgtatgctcccgtgttctaatttcgtgcatccgatccaaaatggacggctcacgctaacctaacccaaccggtccccaaggtctaatctgggccgtcactggagaatccaatggcccgtgccacatcttctttccacggattgagcacgtcgacgctaacagtcagcacggcggcgcgcccagtggctacggcgagccatcgtctgagcc

SEQ ID NO: 69578 - DNA, 1192 bp, Zea Mays
ggccatccagatgactgaatcggaattggttaagcaattcaataatttgccgaatcgctccaccgctaacatagatgatgaaacgaaaaggcccacaagttagccttaaaaagttgaccaagctactgaaattagataaggaagaaagatgcggaaaaggcggaagagaaggatatatgacgacgagtagtactatatcggttttctttacgaaccgtgtaattttttaggattttacatcttattgttttttatgaattatgtattttttgcttaattaagttatccgatgaatttttatttcgataaaatacaatgtttcatttcaaataaaaatatgtaaaagaaaacttgatgctgtgcagaggtgatggaagaatgacggtagaagctacgctctggagtactgcgatagatgagagttgatgttgctcgatagtatgattggtagtaaggttgatagctggtgtgacggtcggtaagagttgaatgcactagaatgagcctcagggtgagaagtactccatccatcataaatattataaattaatttattttttaattgtcaaaacatctaaaactagattaaattaatataataaataatatttttgtaacatcaactcaatattactgtttaagtttttattaatctattttttatagtataatattggatgtcataaatctcggtaatctttttgataattttaattaaatttaaaggaatattaacttaaaaaaatttaaaggaataggaacataaggtgtggccaagatttttaccaagcatggcaattgtacatataggcatagcggggcatgggctgtattgatgaattaataatgaataatagcaggcagggcaggacagggcaaggtgtgagggagagggagacagcaacgcaagtggctccctcctttcccctcaactgttgtcctcttttgttcgccagtggcctgcctccctttccgtgattccgtcgctgcatcgtcccgccggccgcccgttggccgtcgtctgtttggaaattggagcaagctcacgacacccactgcatttcatgcactagtacgtgccgtatcactgccgacactggtcgtggactaataaaatgtcgcttgttgtaccggcactgcattgacggcgaataaattgttactgccaccgtcaccactgttttattttttt

SEQ ID NO: 69579 - DNA, 929 bp, Zea Mays
gggtgatgttgacaaaggggtccaccgtgataggggtgcaatcttagtcggtcgagccacaagtgttttttggccctgggcccgcccgacgcgagtgtaatcctacgtgaggtggaagttggttgaggtttttgtgccttggagttcatcagcgcagttcttgttggagtcaggtgggacgagcctgcctccgcaattggtgccatcggagaagatctcctctcggatggatccgtgatgcgatgcaagacgccttcttgacctgcgatgtaagagagggatccaaagcggaacacctccccgacgttgaaggtgatcggggtgttgaagatgatagccatggagtggtcatggatcaacgtcgcacctcctacctagcgcgccagatgtcgatgtttatgacccgactacgcaccacggggttccccacatgatgcttttgagcagaacgcgcgttgttgactgcgactcgatggtacgtgcgggagcacgtcagaccacacgagtgtttatacaggttcagaccgctagaatgcgtaacaccctacttctatcgaggatgtgtattagagtttcaccggagtatatggattacaggtgaactacggcggtggaggatgagttctcctgccgatctggtggtgcgtggttgctatgagatggctaatcagctataaggtggtgctgggatgtgacgagatgagatgcgtttgcaggggtacctcctcgcccttatatagatgaccagaggcttatccctttacaagtcttgatcactatctaactctacatgaatcctcttttaacacgacatgcattattgcttaatcggagttcggtcgccgagtttctagcccttcaggtgtgcacaacctctccacgcgatacatcagtgctcctactacgtatatctcggtcgtccggacttc

SEQ ID NO: 69580 - DNA, 472 bp, Zea Mays
gtctaatagctatgaagcgaagtagaaatagattggtagtctgtaactttattttgttgttgttttcgtcgggcaaggaagcaaagtagaaattgtactcaaatgacaatggtgactgattttggtaactacattgacaagcccaaatatccaagatgctcacgaggactggtgcagtataccaacagtcgtatgtttatgtgtctgtctgtttaaggaactgtctgtttatgtggttgttcaaggatttgactgtttatgtggtcgttcatgttccacaattctatttcatgtggttgttgttaatgcatatgtgcatgatccgtatagtgcatgtctgttgaaggcatgaagttgtggttgctattaagtctagatgtttaggtggttgttggtaaatttttttgaacaggcaacggggggacaaagagtccccacctgatcagaatttttatatatgtaacataaggta

SEQ ID NO: 69581 - DNA, 1086 bp, Zea Mays
cgagctaattattgtgttcaacaaattgataggtcggtcgaatgcacgtcatctgcgattcaagctcttgttatgttcagagaaatgtatccaaggtatcgcgatcaagagataaaaaaatgtattaaaggagcatctaaatttattgagagcaaacaacaaaaggatggcacatggtatttaaaatcatcttgtatattgtatgatgttatccatttctttaatgcacatagacaagaactaatttactaattacgtaataggtttggcacttggggtgtatgttacacttatgggacattatttgcagtgcaaggattagttgttgctggaagaacttatgaaaacagttcttctattaggaaagcatgtaggtttctattgtcaaagcagctaatcacgggtggatggggtgagacatatccgtctaatggaactgcggtaattcttaatttcccttacctaactatgtgtcttcttggtcatttcatgtttgatatttcatagaatagcgtggtacacatatatttggtcttcgacaaaatatttaaatgttatcatgtgaattgttcccatctagccagtccatcaagtagtttagttcttaaagcattatatatcattagtgatggtcttcattttaagatttaccaggtctatgcagaggccagtagtcctcatgtagtgaatacagcttgggcaatgttggctttaatttatgctggacaggtagacattccacacattgttacatttggagcatgatgagactgttatatgtaagatttatagttcatttatgtgcatgcaaaataggttcagcgagatccaacaccattgtatggtgctgcaaaagaactgatcaatatgcaacaagagtcaggcgagtttccccaacaagtaaggcttcatcttttaggcgtcaccatttggtagttgtaaggattatcttgcactttgatttgtcactaatcttagttggagcttctaaagattgaaatgctttatttcaacctctgtgcaaagcatgcacgcactgaactacagttgaatattatgagatagaaattctatagtataattcct

SEQ ID NO: 69582 - DNA, 662 bp, Zea Mays
agaccacccggacagagacacggggcaagctggagccgaagtgggagggcccattcatcgtcaaggcgaagacatcccctagcacgtacaggctagcaacggcctccggcgaagaattacagcactcctggaacattgacaatctccacaaattttttgtccaaacattcagggcccacgcgcccttgtaattcaccaaacaatgttattccggcccgcactcttttcctcccggggggtgaggtttttaacgaggcggagccatgtaatatactagcaaaaacccccacaaaagcaaacactcagacgcaacgtgtcaaaaaagaccgcttcgacggtattcgacattcgaccactctaaagtcaccgcggcaggcagcatagactaccctcgcgtgcgacactccgcgcaaaagtcacctaagggtgcagccggaatagcacaacaagtgcgttaatcaaagtctcctactaaagactttccgtgcaaaagtcgcctaagggtacagccgggctagcacaacaagtgcgttaatcaaagtcttctactaaagactctccgcgcaaaagtcgcctaagggtgcagccggaatagcacaacaagtgtgttaatcaaagtctcctactaaagactctccgtgcaaaagttgcctaagggtgca

SEQ ID NO: 69583 - DNA, 506 bp, Zea Mays
cccgggtgaaggtgatcgggtgctcagaccatcgatacggggcaggaggaccgatcgccgccaccagtatctgacggtcgttgagtttttgttgtctcttgctttcctgcgacccgtgtccgccgaaaatgacgttgacttctctgtcaacgcgcgggaaggctccacctcctccctcctcctgctgctggggctgtcgcggttctcctggcccttctcgcggtgggggaggaggtagaggttggaagggtcgaccgtgcccgacggaatgcttgaaatccctgcagttccggagggtgtggcgcatgtctttgtggtatggacactgggcgtcgaggatgtcgtccagcgtgcgttcgcctcctcgaggtcctcctcgggcgcgagaggcgggtggtctggcggcgtggacctcttcacgaggcctcttttcccagcgcttgtcgggttgctggtttgtgtcgcgtcgcggtgccgctggcgcaggcttcgctcccccgatgagg

SEQ ID NO: 69584 - DNA, 403 bp, Zea Mays
gaactccatgttgggtggtaatgcatctaaagatcgagttcgacttctctcctcccttgacgaggttgatcttttctcctccggtgttggtctcattgattcgcggtgagtgcatatcatcggggttggggaatatggttaggatagacatagatgagatagactacatgatgttggtcaaaagattggatagtccaattatgtaattcatcatgactatactggttgagttagatctattaggatgacataaaatcttttcaagataagatgaatccactaaggtaatagcctattttttaagataagatggatctattaagctagaaagattttaattaggataagttaggatcttttgagatgagatggatctattaagcttaatatattttagtggggg

SEQ ID NO: 69585 - DNA, 513 bp, Zea Mays
cgggcgtaaagactccagaacatgttgtttttcgattgggccgactttggtcgtagtttgttgtgcgaaaacggtatccattgatgtcatacccagaatatttcttgaccctataagcaaagtcattggctacttgtctcaactcggcactcatagacggatctctttggccctgcaagtattcgcaagttaaaagacgctaaattgagttcatagacagatctctttgacaaactaagcatgtaccttatgtttgaaccaggaaatgaaatcgggcaatccatttctcgaaccctttctaagaagagtatcatattcctatggagttgggtcccttgatcgacgccagaattcatgaaaaaattgttccatgtatggtgtcacctcttcaaggtttgtcaatacatatagcatgatatgccgccactcttcatgtgtcagggtcttggtggtcaaaccacttgcgcttccaagttgtcctcgaaatatgctgaggttcgattcattgccgcc

SEQ ID NO: 69586 - DNA, 456 bp, Zea Mays
cattctttcactagttggttgaagacccccggtcgaaaacaccgacacaagtagtcgagagagggaggagaggctcccagatctcttatcggggtggaagtggagcttagaagctgtaaggtggagtcctagctaagtcttggcttggcgaggctcaggcctcctagtcctcgtcggtgctcctcctcctattcgtccttgtgggcttgtctccgtctgaaggcgtccagtcgtctccaagtgtccttttgttcctttatccgtcgatcccattttctagaggccaacctctccctttcttaggctgggacaggggttggccagcggtggcttcctcgggaaggagccataaggtaagggtaaaaccagcgttttatctcgggtgagtctatgcgtactcgcgaggcctggggctgcctggttgtcgcgtatttatcgtggtggatgatgtggggg

SEQ ID NO: 69587 - DNA, 721 bp, Zea Mays
gcgagccttggcttgaacactggcattctagccccactcatcagattgtcctccctcctccgtgaacaaactagcaaggtcatcgcgaccgtggggtggggaccgctagctaggctgttaagatcttcacagggttgttgggattggtttcccagctcctcttgcgtgtatataagcatcaaccgacccccctgctccatggtctaccgccgtgaggtgagagagcagcaaaaagagggagatccatcgtggttgagtcacatgtacaccatcgacggggtctcgcttttgggtttgggaacatccccgagcttcgcagagaccataccgtgggcatcagaactcagggcgtgaccaattcacagtgaattgctcgccgtagcctgggaaccgccaatcactgtggttgaccctctctccatccccaccgtcggtaagaactcctctgttgagttcgccatcgtctcctttgcatgtagcaccttacgattgggaaaatagtgcctcagtggatgatccacgcaattctggcatgctccaccgccctgaagtcgggcagcgccgcccacacctgtcgcgtggagaagatggggggagcgttgatttttcgctgaacggctcagattgaacgttgcgtacctcttcgcgggtttgatctgagcagttggatctgattggatggccctggtgggatcatgattatataaaatatgggtcatag

SEQ ID NO: 69588 - DNA, 474 bp, Zea Mays
gtgcgatcggccacccccctttctgccagagacctaccactaccacgccgccgtgcgagagagagcgttccggggtcggttcgccattgccgccaaccccaccgtcgacagaatcacgcagtcatcgccattgcgccatccatatatctccgtgagcttcgtctcagcctgccatatgtgtccgcggactctacgtggcggattactagctggggaatcatcgattcttcgtcagagtagttgctccgccatgggcgcatccgccgtcgtggccgggtcgattcacgccattgagcttggtgagaaatcccttcccagtcttgctttcaactctacttcgaattaccgcaaccggagagatgattcgtgcggggtttggggtggtattagtccggccgaccatggcgctgccgcgggaggagcttaactccggcgtcgcgagatagaagatgccaggatatccctagatcttag

SEQ ID NO: 69589 - DNA, 415 bp, Zea Mays
cggaactgggtggagacccaggcgaagaagtgggtaaaggtggaaaaggtgtcagactttaggcgcaaaggaaaggtccaaagaaagtgagaaagccatccagaatgaccaggtagtatttgtaaccagaaaggatgaagacgggagaggtctagagatcacaatgaactagatcaaaggcctgaggagccctagacgtggaagtgggaaaaggaggacgagaagacgaccgagctgacaagcatggcggagatgtccagagggaccccgactgcaagagatattggagcgactggagacttgggacatcacgtcatgtctaggttgatcgaggcaatgatgctaaatagcggaggtggtggtggcagtaagggcatggggggaggatacaccggtgggggaagtggagggcaag

SEQ ID NO: 69590 - DNA, 638 bp, Zea Mays
cattttaaggcataaggcacctaagccaagatactacaaatgaaaggcgagaacatagctatgatcacaatcaacagaacttcaagattttcaatgaaattgcatagttccattctccatacctttgccttttacctgaatggccatgagagcaccagttgtcaccaaatgagggctccttttgctcatgcacctcatagctcaagagggtgcattggaggcacaacacataccattgttatacacagagtgccaatacaaagtacttatgtgaacatggactaaacaacaattatcatgcttgcatttaggttaatcattaaacacctcatagcatgactaacaagaagtacatgtttatccacatacaccaagagagttaatcatggtaaatatatcaaatgataagctactcattgaatgattcaagagatataacacacaatcatgattaagcaagcatcaatgtgatctttgaaatcatgaatcaatgatcaaaaagtattcaacacaagcaatctcaaaagcataactactccgaggacagatacaacagtcaaacttcagagcaatactgatttgcaataatgtacttaaaatacacgagtaccgtcctttggagagcacgttgcatattc

SEQ ID NO: 69591 - DNA, 400 bp, Zea Mays
ggcgggcttgccgtcgtctactcgggcggcgccgtcatggttcagagagcgcggggtacagtaacgcgggagctctggcgaccatcgatacgtgaaggcacggctaggatttaaaagccgtgtatcgagtcgatcgggcgggtggtggccatggatgttagatccaacggtgggaggcgagtctgggtttcattaaacattggccgatggatctagatccaatactccatatagcatactgattcgtgaggtctagatctaatctgaggcatcagctgttgatccaacggtcgtaattggccgataccccttcgccatgccactttgcagaaaaccccttataattttagagaaccaactcgcagtccaccgtgtacaacactctgagtcataggaagaa

SEQ ID NO: 69592 - DNA, 593 bp, Zea Mays
gtaagataaggttgtgtgccttcgcacattcggctatacttgcgaaggcgttacatacttggtctggtgtatttgttatgttggtctggtgcgcatgtagtcggtctttgcgcgaacagttcggtgtagtcgttttcgcacttgttaagctttgtccggctgcacccttaggcaactgttgcacggacagtcttcgcggaagacttcgatttttcgcacttgttgtgctagcccggctgcgcccttaggcgacttctgcacggatagtctgcacggaagactacgatttttcgcacttgttgtgctagtccggctgcacccttaggcgacttctgcgcggatagtcttcgcgagagacttcgatttttcgcacttggtgtgctagtccggctgcacccttaggcggcttctgcacggatagtcttcgcggaagactacgatttttcgcacttgttgtgctaacccggctgcacccttaggcgacttctgcacggatagtcttcgcggaagacttcgatttttcgcacttgttgtgctaacccggctgcacccttaggcgacttctgcacggatagtcttcgcggaagacttcg

SEQ ID NO: 69593 - DNA, 446 bp, Zea Mays
aggagggagctgtggtggaggggtaggtgtagaggtcgccactactattgcagtgaagagtcacatgccccgtctgtttgtccttgacagaaaaaccgcaagcgtcaaattcaattgaacaagagttgtcacgagtgaattgacgaacagataggagattgcgcacaagttcaggtgctaccagaacattgttaagacgataggtagaggtgggggaggagagtgtggatgtgccacggcaggtgataggtatggtggtgccttttccaactgtgatgccgaatgaaggagggggagacaggacaggagtataccagccgaagacgacatgtgagatgtggcgccggtgtcgaggacccaaggagaggacccctggagggacatctggttcagtgcggctatgaggccagcctgatcccagccgccctgctctgccattggtggag

SEQ ID NO: 69594 - DNA, 563 bp, Zea Mays
atcagaaaagacttcaatttaagttgtaagagcaacactggacatgcttcagataagaactcaaatcgaatcgcacacatatacattgagatagatgatacaaattgattgtaacatactaataataagcagtggtcaaagtggacctaaacagattaattgaactgggttgggatgagaattgtacctacgacgtcctggcggtgaggtgtgaggactcgttgtcctcctcactcttctgcgtgcgcagtcctcctctggctctagccatctggcgtccacacgtatgcctcctctctctttgggtcgcgtcaagcttctccttaatgggaactcatctggctccgacgtccgcatgcgctcaaacaaaaattcgataatcaaagaaaccgggagggaaactgggtgtagctgggtagtatcgatgaagtgtcgcatgctcaccatttatcatcctcggtttaattgtcgtgttagtcaccgaaatatgtagtttttagaaaagcaaatgataaagctaaacataataaaataatcaaggctaatccagaaaatggctacaa

SEQ ID NO: 69595 - DNA, 299 bp, Zea Mays
ttttaatagtgtagcacccggataagtagaagataggtcaccagtcttcgagcgcgcgcgcctccggtgcagccatcgccgcgctagcctgggcgctgctgtgtccatgctgggggaagaagagtggcgtgggtcgttgattctgtttttagcgatcgggattgagtcatcaggggcatgtgataggatgcatcgcaaccgtagatcagcagaggaacgaacgagagtggttcgtgggtatttaacggttggccgttggatggggatttgacggtgcagattagaatctagggcatcat

SEQ ID NO: 69596 - DNA, 876 bp, Zea Mays
gtttaactaagctgatgcacgtatattattagttgttagggaaatccttctgttactttgatgtgttttttcaaaccgaaataaggcagccaagcatttgtactttgatagaatttgtcttttagtgtcagctacataaataccggactatcagtcactagcaccagaattaggaggcagtccattgggaaggaaaaatctacctgactgaatcagcattggagttaagttggagtgccagcaacatcattgttatctagccatgatcagtgtgttgtcatttatttggtaattataactatgctaacacatgtaatgatgtttttattcaaatattgtttttctatctccaatcatgggaagtgttggagctgattagacatgatggtgcagcgttccacataggatgaggtgtgaagttgagatgaaaagaaaagtacgaggacataaacacacttcgatagttcatgaatgattgtttgaaacttttttgaactaggaaaacaacaagataagcctacacagttaaattttattaaaacaaccattgtacaaaagataaggaaacactccagctaagcacgagcgaggcttgaacaagaaaaactaagaaccactacacacaagaatcaaccccgaagagaaaaagaaattgctgaaatacaaagtttgaggactgacactttgatagtcctgggatgaaactgagcacaaaagaaaactgatgaatgacagttgttttggaacctctgtcagaattcaatgccagttaccaatttgtgccagtgctcttcactctcgttcgatctgaatgtgccggacccggtggctgatgagatgaacgagcgttgtgacactctgctacacctctagcag

SEQ ID NO: 69597 - DNA, 349 bp, Zea Mays
cgaactggtactcagtgtgaccccttggattcaaatccgacgacctagattttaaacacacagatctcaccgtagccgcgggatatgagatctacgattcattttccccacacgcgaggggttacggaagatctaatccaagccgcataatgtcgatctaacggctagaggctttccccccactcccctttctcctaccggcgtcaacacgacggcgcctgactgaggcacagcggcgccattacctcggacccgaatcccatcaccctgtgcccgaagctcaaatctactaggtgcaacaccatcacagggccaaagcgaatacagagcggggcgtactcaccagtca

SEQ ID NO: 69598 - DNA, 303 bp, Zea Mays
cacacttagagttaaccatactcaactcaactttcaagcaacaatgactatacataagcactatagtatccttagttaaagcatacaccaaggttctaatattcaatcaaacatcaagagtcatgcaattaatctagtaattacatttaacccttttagaacaccaaggctacaatatcacactatagaactaacaggtagagcaccaattctattacttaaacaacatcaaagaaccgcaagtgatatcgatggagcttaccaaatccttctatcacattactaagttcaccatactcacac

SEQ ID NO: 69599 - DNA, 1696 bp, Zea Mays
caatttggtccgtaagtcaagacacaagcccttagcatatcttccaggaccttgctcactctctcggtctgcccatctgtttgtgggtgaaagcctgaactgtaatctagggttgtccccatggcttcatgtagactcttccagaatttagctgtaaactgcggccctttgtccgagagtatgctaagaggggcccatgcagttggagcacatggtgcacatagaacatggcaagctggtaagtcgtgtaagtcgtcttgacgggtatgaagtgggcggttttggtgagacgatcgactatgacccatatggaatcatccctcttgggcgtcctaggtagccccacaatgaagtccatacctatcttttcccacttgcacatagggatctcgaggcggttcagtagtcctgccggcctctagtgctcggcctttatcctgcggcaaacatcacatcgcgccacaaactctgcgacatccctcttcatcttcttccaccagaagatgccctttaggtccttatacatcttggtgctacccggatggatggaataccgggtacagtgggcctccgtaaggatggcttccctgattccttcattctcaggtacgcataagcgttcctctagctagaggattccttcctcatcctggcgaaagtctgggtgcaagcctttctccacctcgtttgccaaggttctcagttctgggcactccccttgtgccttcttgatccaatcctctaagtcacatttgacccgtaactcattcagctactcagagctaaggatggaaatcctcattcgctgcatctcctcacaaagttcggcagctagctcttcccccatgagcaaattgtagtaagcctttcggctgagagcatcagccaccacattggccttgccggggtggtaatggatctccagctcataatccttgatcaattccaaccaccttcgctgcctcatatttagtttagactgggtgaagaagtactttaagcccttgtgatctgtgtatatgtcacatttgttcccgatgagatataatgcctccatattttgagggcgtgcacaatggcagctagctctaggtcgtgcgtgggataattctgttcatggttccggagctaccgggaggcatatgccacgacctggttgtcctacattagcatgcactctaatccctgtctagaggcatcacatatatcacaatgttcatctgaatgtctggcagcgtcagaacaggggttgtagtaagcttgtccttcagggtttggaagctagcttcgcacttgttcgaccaatcgaaggaggtgttgttcttaagaagatttgtcatgggcttggctatggcggagaatcctaggatgaaacgcctgtagaatcctgccacgacaagaaaactacggatctctgtcacattgcggggtgacttccatccggacaccgcctcgatcttttctaggtccaccatgaccccttctgttgttaatagatgaccaaggaaagcgaccttttccatccagaaatcgcacttactgaactttccatataattggttttcccataatttatccagtaccacgcggaggtgttgctcatgctcctccgcggtcttcgagtacactaggatatcatcaatgaaaatgaccatgaatttgtccaactctgccatgaagatcttgttcatcatgt

SEQ ID NO: 69600 - DNA, 918 bp, Zea Mays
aacttgcatatgccatacatattatccatttatccaattcatctttgacaacgaaggcgaaggtcatgcgggtttgtgtcaatagatcgtgagcgacagatggtgaacgttgagccttgatcgagggaccggagaagctggatgactagccatggcgactaacacctaggaacactgataggcgcaaggacgtggaggcgcggatggtcgtggattggcgggacacgtgtctaggacataagggatgcgtatggggtacgctactcatggaggtttcagtggttgagcctcaaaaccactccgctttatagttcgctagtttcgtcgggtttgggcctcaaaatccggtggtgcggttccgacaagaatcagaggtagcacgtggagtcatcacgaagagtgtgtcgaggcaaagcaacttcgtgaagagcgcgtggctgtcagatgcatattttaggagttggtccattttaccccagctaagtggataagctttatgtaactagggatagtttggtctagtagaataaccctctataaataggagggagggctagttgtttcagtcatctttgggcatttgggcatttaatttcaaactcttgttttctattccctagttttgtattagctctagcccggacatctaggtactttgaacttccacatctgcacacatgcatgagttttttttaaggaagtgtggtcataaccacatggtgctagtgtgctttcgtcgtttatctctaatccgatctcgatgagtttttgattcattttctcacttctcatcccctcttgtggtttttttgtgagaatctctattttcttgtgttttgggattgcttttgggatacttcctggtttgagaacttctctcggatctttgctgtatctgatttgagcacatcacactcg

SEQ ID NO: 69601 - DNA, 278 bp, Zea Mays
aaagattagcataaccgacatttaggtcgatatggtcactgtcgatcgacagtgtgttcgcaaacggacacacgctttatttggtttctcgatcgagcattgagtgtgatatgtaagacacgtcgggaagtgcaattaatatgcaagaaataccaatgagagctctactgaaactctaaagctcacacgcccagagaaactagggacccctgtcgcggcgtgcggtggtgatgggctgcccaaggtagcctaactgctctagaacttctcgatcattg

SEQ ID NO: 69602 - DNA, 450 bp, Zea Mays
gggatccgagcatacggcttggcttcccagactaaatcctgcaggtcctgttgcatgaatcaaaggatggcagataccagacgatgggtcctatgggtgtgctactaacacttcctagtcgaagctgtgtacaggtccaggtcccagtcgagactacctcctgggggccgggtcaccaactctttcttaggtatactggtatccagcctcgacacgtcgagcctacatcccagggggccaagtaccagggaggagttggtaaccacatacagcaaggacaaatagcatacagataagtgctaatactgcttgataaatagtactcaaaagtatcttacaaaaccaaaaattattacaaagtcgcttcccagcgggaccctttccttctctctgcagatctagctactcatcatcagcaggatcccgctggaagcgttcggccaccagttc

SEQ ID NO: 69603 - DNA, 373 bp, Zea Mays
attgcccgcgatgcgggtggtctgggaagaatccgtgccgacctggatggtcttgacgggaccgtcgtctgctccggatggctgcacctttggcaccttggtaggcgccttggtaccggaagtcgaggggtccctccctccatcatccgggcgagcagtttctgccgccagggcgtgcagcttctcgacagccgccagcgcagcggtgcggtcaccccgtacggtaaggaccccagccggggatggcatcttgaggaccaaatacccataatgggtaatggccatgaaccggtatagggccggcctgccaatgatggcattgaaggggaggttaacctctgcgacgtcgaactggacgttctctgtgcggaag

SEQ ID NO: 69604 - DNA, 707 bp, Zea Mays
cttagcgcgcgtgtatacatccttgctggcagtttcctggcagcgaaccctaactcttattttaccgccgcagacaattccctgaaactcctattcaccctcgcgattgcacttgattctgctcatctgcaagtcctgatggcgcctatgaagaagaagcaaggagctactgcacctgtcattcctccaattgaccctaacaaccaatttccattctgcgataactatgcctctgtcgtttctgaatccgatttgctttagttggttgaaatcgaggttctgctatagaaggagatgtactcttggcggggatggcaggggatcaccgtctcaacagaggatacccacgagtcattagtttttgttcccttcttgatctgaggtctaggtctgccagtttctcccttcttccatggccttctcgatttctactccctcaacttaacccatctgaataccaattatgtactccaaatttctatcttcgtccatctctgttaggcctttctggggattaatctccactttgggttatggaaatatttgtaccactgcaagcctggtatggccaggggcagcaccggttggttggcgttgctagccttgagcttcgtcgtggtaggaaaactgagtatgttgatattatattgaaggatagcatcaagggatggcgcttcgagtggttcaatatggaaaaccacaacaag

SEQ ID NO: 69605 - DNA, 384 bp, Zea Mays
ggtaggctctcctcggggaggggaggcggtagcggctggaatggtcggtcatgccgatagaatttttgaaatctctacagttccatagggtgtgtcgcatgttcttgtggtatgggtactgagagtcgaggatctcatccagtgtccttactcctccacggggtgcgccacggggtcgagccgtaggtggcccggcggtgtgcacttgctcccgaggcctcttttccttgcacttgtcttgttgctggttcatgtcttttcgagtgtcgggggcatgggcttcgtgcctcctatgaggtcttgagcccgctcatccgcagtgatgtagatgtccgcctccctgaatagttgttcagaggtggtgggctccttttgaaggatagc

SEQ ID NO: 69606 - DNA, 450 bp, Zea Mays
aagactagaaagttaaactgttgtgctatgtgtttctctcatgttagcattcgaggttcggttagtttgagcacttgatacttttttatgattcgtattgtatcccctttatagcaccacataccaatactcaagatcaagagaatacaaatgttttaaccacttgagtctttaatatcttcatataccatttcttctcaatatcacttcattagaggttgcaatcatttttgtctcatctcttcaagcaaacacacattgagcatgtgacttgaaccatttcagcacatatgagttccattcatgtcttcaagtcacttccactaatgatttgatcctcaacataatatgactcctcataacttgattagtacctcgactcaatgcaagtactctcttcttcaccttagccatgctaccttggtcctcaagccgtctcttaatcttcac

SEQ ID NO: 69607 - DNA, 921 bp, Zea Mays
gaacaattggaatgtcaaattctgaaagcattctatcggagaagaaaaactctggtcggatgacggaatgcacccatcctaatcttaagatgatgaggaggctcgaggcttgcttgattgtaagaatgaacacaagaacacacaagagtttagagtagtttgagccgccggagcgttataccctacatcaaatgtgagttctattgcttgagagcttgagtattgtaggtcttaattagtctctcctccccttttgtatcacaggcaccctccattttatagtccaagggaggcacgttacaagggagctgggtcgcgacaggtgggcccagaagttactataatatgaagcgcgaggcgtcgggggtagagttggtggtgctagatcttctagacgtgtaccttctcttggtcgtggtgcaggctcctctgatcagacttgttgtcgtttcgtcctgctatcgtgtggacgaaggctctgatgtaggctgtggcgtagcatgatacactgtcgtgcataggggggcaagggcggtgtcgtcctgtccgctcccccctattccacctcgccttgataacgcgcagggaacaataggagtcatagtgaagggcgcccaagcggcacattaagtcaatggttactgacgtagcctagaccttgtgggcttcacacgtcgcgtgcatttaacgcggggcgcacactacctgccactagcgcaggcaagcgcacatctcatccgcacttaatgctggtgagcctcatatcagaggtttacgtcaggcgtcgcccgacggcttacatcaggcgtccccaaccacacgtcgacaccggacctctgcctgggccgagagcaggcttgagaacctgtggcgacgtggcaccaccagacctcccttgactgggggtttggaacatgcttg

SEQ ID NO: 69608 - DNA, 295 bp, Zea Mays
ccagaccaaataccatatgcaggcaaatcatgaattgaccacaaatatacagcacgcaagataaattcacattttagatgaccatcataagcctttacccctacccatagctctttgaactcttcaatcaacggttgcatgaatacattgatcttcttttccaggacgtttaggccctggaataataagggcaagaaatatgaacccttctttcatgcatttgttgggagggggttgtagggcatgatgaaaaccggccaacaagagtatgaagttgaactgttgtcgtaaggag

SEQ ID NO: 69609 - DNA, 443 bp, Zea Mays
caaaatttttctatgtccaaaaccaacccttggccaatgatcaaacatgttcaccctcattcaaacttcaaaaccatttaacccaattgacaaagtggcgccaaaatacctctagaataccctggagaaagttgaaccccaccccaagtagtttgacacgacttggcatagcctttgtcccggtttggacagctaggacagaggcaacttctcacctctatatctccctacctcgaccgtatcttggcttgggactcacatcaaaaaggtaggatatggtgcagggaagagaccgtacacagtggttttgccaagatctgcacgctaaggtgctccaatcggccattgaaccatggcagaagcaaacacacacgtgttcgacgcgggctgacactcgggggcgcgctcagagcacgcccgtgcgcgaacccccgcgcgtccac

SEQ ID NO: 69610 - DNA, 460 bp, Zea Mays
gaccgttggaatccatacgctgcagtgagtcatgtggcgaaaatgctagaggatcttgtttgtttaaaattgccagggcagcaagcctctctgtgttgtcgggttaaatggaaagcgccattgaaaggttgggtgaaaattaactcggatgctgcttttgttgctgagacgggcaaaggggctaggggtgtggtgatgaggaactcgcagggagaggttttggcggcagcagcacagctttatgaacacatccctgatgcgctaaccagcgaagctttggctgctcgtgatggcgtggtgctggcccagatgcttagtatggaaaaagtgattttagaagttgacaactctgttctggtggctcttctccggtcagaggagggaagaaggagtgctatcgcaggtttatggcaagaaatcagagagaggagtgtggttttcagatcttttgatgtatctt

SEQ ID NO: 69611 - DNA, 616 bp, Zea Mays
cgggagaaagccgaagctacccaaaccaccctcccttccaagtcaccttcaccggacaccgcttcccagacacttgccaaaatgttgcccgaaaagccctccgacagctatgccaaaactacagcagagaagtctttgagacccccttcgttacttcccacctagcaacaaaaatacccctacctggaggaaaagacttcaggccctgtcaggaagagatcctactgaagatgaccccaccatagtctatatggctggatatctccacacactcgataaccaatatgacgacctttcctcccactgcacccacctaaactcctgggttgaaagcttagagcaacaggtcaaggaacttaaaaaagagaaggcgtctctccaagaaagtctcgagatagcagaaggtgaagaggccaacactcgtgaagcctaccgaaccctgaagatggattacgataagaagttaaagaagctcgcccccactaaaaagatccagaagagaaccaagagccaaggatgccagactgaacggaaaaaggaagccccaccagcactgcctccctccaggatagaaaacttatcagacattgaggatatgtccctagctagtcttgac

SEQ ID NO: 69612 - DNA, 437 bp, Zea Mays
gtcaaagtgtagtagagctcttggtatgcttggttactaaagaggtgtgtcatgagttcctttttatagctcaaagagcccccatagccgttgccccttccttctaaaaagatgttgaaaatctattgtctgcgtgggcactataccagtccgttgcgcatcagaccgggtccacgcacaatctatgggatctctgattggcacttgtcaactagggtggccaacgaaccggttcgttgcacaaggaccctgttgccatgccagctagccattgtgtcgatctcctctgcccaaagtagccattggacacaatcggcctgatgggcactggacaattgtccgatgaccctggtcaaagaagcagactgtagttttgtctagaaaaagaattcgatgtgcaccggaccatggtctgatgatttttaactctttttctc

SEQ ID NO: 69613 - DNA, 354 bp, Zea Mays
ccggaccttcctttgtcgtttatgtgtggcggcttatagattttgttgactggagccaaagatatgggtgatcaaatcgggtttgtctcactgcgtgaatccgagctaaaacccttgacttgacgtgtctagggcacaaatctcgattccatcttcacaaacgttgcagaggggttaatttagcacaactttgtcattgggggcttaaggttttgagttagggattaaggtgaacgcgctcgagttctaggtgagggctgaaattcagaaatctgaattttcagatttccctagagtgcttccacttgcatggcctttttggggattttaaacaattattttggccaaactttt

SEQ ID NO: 69614 - DNA, 502 bp, Zea Mays
gacaaggggaagttgggttgtggtggagaagtgctacgacctcctcgtctcggtcggcgatgatgggaagcgacaccgcaagccatgatcttgtcaccgtgggagctgcattggtgcccccacacggtcgtttcagcctttcttgggaggctgctttagcaggaggagcctgtgagcgcagcagatctggtggcccgcaagacctccgccgaccactccgccccgacaatctagatctatatatttggtctgttctctttcattcgtttcctccctctcagcctcaattgcgcacctcccacaggcgtcctcgtggtggtagatccgcccgtgcgccctgggatctataatttgtttgacgtgcggtggggtgctgcagcctcttttggtactctcaaattttttgtgagccatttcaagctcaatatcatgacgtgcacaacttttcagcgagaaatgttgggtcctcttctactggcaccataaatgcactcaaggctgc

SEQ ID NO: 69615 - DNA, 373 bp, Zea Mays
tgttccataacacgaatccattcatccgcctccaagggttcttctactttaacaaaaataggtggacaagtttccgaaaattccatgtatgtggtgtctctggtgcttggtgttggcctttgcctccttgctgatgaatttgatttccagccatttctcgaataaaccgagtattatcagggtggcattaatcaaagcaggaatgacctctactagcatgggaggtacaagcggtgggatcggagtttcgtccccaccatgggaagttccagccccatcatgagcacgagttctgtacgacatctgagaagaaagcatacttgattattacatatcacaattacacaacctctattacattatttcaaacttg

SEQ ID NO: 69616 - DNA, 1014 bp, Zea Mays
gcatggggcccgcggtcagggaggtcttccacctggtccttgcattatccacggcgctggcttcaaacagtatggcgaaaacttcgcccggagctgtcctccaccgagttcatcgcaagtccgcaacagaccacctccaatcccgcgctgatctcggagtcgggccgaccattggcgtaccatccctggctataaaaccatgccgtgaaccctgttttccccaccatcaggaacggaatagagagaggacggagtgtcgccgcgcttggatctagtctccaccgccggttcggcctcgggaactcgaccagggtggagcgcggtgcgcatggaagatgttgtgggcacccttcaagcatatggtgctgggggtaagtcgcaatttctcgtcggtgtaccacaccgccccaaaatccacacttcgccgcggccaaggcttatgactggatgattcatagtctgccacccaaccgctagttcacaaggttgcccgctccctatttccctaatcggtttcgagtttggagactttatgctcgggattgacattgtaggtcatggcgccgccgcactggcgctgtgcgccgccgtgttgacagccagggaaagaagatggtgctgccaccatcgatctgtttgtggacggctagatctgtgagtcaggtaccgcttcggccgggcgcgtttcggggcgttgatatcccatcggacgatatgcgtgtatcacacgtctcattaatcgtgcgccgtgggatctggatcctgtggccgtaaacgcgtaccggttcacccaaaggagtagatctaatcggggccatagattgatgatcgggtagatgggattcctcgatacccccttcagcccctgtgttttaccaaagagaccctgtctttttcccgattcaacccgcggtccatacaagttcaaaaacccattcagatcagtcctggcatttacagagcgcaccccgatctttcagtaattagtagccgcagcccaagaattaataaaat

SEQ ID NO: 69617 - DNA, 502 bp, Zea Mays
catctgttgtgcctattttaatgacatctacattggtcgtcctttttgcattggtagctacaactatggatactttctccctatgcccccttgtcggggtggtcagtttttgtggccgagcgatccgacaatcttgctggacctgtgtctgatgaccgaattaaggagggctcaattgtatggtactggtggcgttaatctatcaaacatagaggtttgggtgcccctcaagccaggtgttgtgacatcccaaaaggttatggtggcatttccccacatcttatttgttgtatatggtgggggtgggtatgcataggtaggtagatatttagatattgagatggaggtgtccacgtaggtgtattcagtgctagttggacaatgtttcaggccgattttatttggccttatttggtgagatgacccaattgcttttgcatgtctcgcctaggtaggtgagcaaggtcgcttcgctggtcgatcacggtgaccggcccttttg

SEQ ID NO: 69618 - DNA, 663 bp, Zea Mays
ctttatggaggtcttatcctacttaatcttgcaaccattatcctgcttaatcttgcaaccattatttttatctaacccacccacccggattccctccattgctggtatattgcatccggattgagtagcaaggtcgtgtagcctaggggctagtccaagagaacggataatcgcccatggggaggtccggagccgtgtggccgcttagcttggtccaggaccataagcccacacgctccaccaccccgtgtcgggtgtcctagtatccggaattatagtcttgtaggtccggaaacctgaggtccggctctaaagaaagggcacacgtctcaggggaggtctagagctgcgtgactgcttagcccggtcccgtaccgtaagcctacgcactccaccaccatgcgacgagtaccctagtaattagaagccgtgacccaggggatccagacacacgggtcggccccccagcccagatcctataggccatgttgcgtaagacaaaggatgatggataccagttaatggttccgatgggtgcactactaaaactccctagctaaggctgtgtgcaggtccgggtcccagtcaaaataccctcctaggggccaggtcaccaactccttcttaagtatactggcatccagcctcgacaagtcgagacca

SEQ ID NO: 69619 - DNA, 378 bp, Zea Mays
atgtatcaagaaaatccacaataacttacagtttgggatggaaagagtactaactttatgaaacataagaaataactaacaggtgctccacgaaaatggaggggggaaagcatttttgctgcaatgatataggaaagttgttcaccttctttaccacccccaaatcctctgccacaacctgacaaagaaaataagcagagtaatttaccaaaagtagcaaatataaatttgactgatagttctttaaacttcatgttgtacatcagctatggaatcaagaaatcatcaagatggtggcaggagagaagatgtgtttcttagttatgacaacaaccttggccttaagggaatcaattaccagagttgcactaaaaatgc

SEQ ID NO: 69620 - DNA, 383 bp, Zea Mays
aaacaatgttggagttatgtggttgtttaattcaaaaagggttaggaggaatatgacaatgatgtctatagcatatttatggcactaaaacaattgtttgctggcattcaattgtcatgttgattttgctttaaaggatgatgttctagggaggatttctggttgtgcttaagaaaacaaacatgggcccaattcctataaatactgccaagtgaaattaatcatcatgccagccttttaataggactctctttaaggctgctgcctttgactactacatcaaacatttaagcacaggcttggaatcctataccattccttaaagggaggcaaagagtgcgcgcccagagagggccttattaatacctaaactaatgtgaaaa

SEQ ID NO: 69621 - DNA, 832 bp, Zea Mays
atcctgagggcctcagatgtaaatctgtcgcgaccgagagtatggatggattctagccattggatctcattctgagggccatgattagatgtcgcattaagtgaactggtacgcatatttggccctaggatcttagttcaaccgtccggatcttacgttgcccacggtgaatcacatgcgctcgatcagagatggacggtccggattgacaccgccgaacgggtacgcgccggataatcccagccattcgcttgctcatcaacggcatacgccatttttcctcacccgtttcgttttgaatggcggcgccaccgtccccatatggcggaacatcaccggcgacagccctgacattgatacggttcttgattctctacgcaggacccatctaaacaaagcgaggatcaattctaaactatgaaaggggttcgtaccgaaaatcgtgatgacgtgcgcgcagaaccgggcgtggggcggacggaggctctcgttgaactccggcgagcaatccactcttctacccctaccgtcagagcccaccacctccacgggtacgcttggtgtgatcttgcgatgctcctagggtatgcgtcctcgccgatgtgaagacgctacaccacaatccgtggtgcccccctaacttctgcgcggacaccacaccgagggctcccgtgatctttctagggtggcggacgcgaggagcacggagaggtgaatagcttaggcttcggtcgcagctttctaaatagacgagggaagctagggtcacctgcggtaacgaaacgcatgacaatggcgcgcctctggcctccaccatgcgcagcgttcgttg

SEQ ID NO: 69622 - DNA, 726 bp, Zea Mays
agccagacgaggagggggaggcgtgtttcgattttggcatcgccccgcaggccgcaaccgcagagtcgagcgaagcgagtcatgtaatgtgggaccgaacggggttttttagtgaatgatgagaagggttggcagccgactccgactgcctactggccccggcgccgtaatggctactgcctactggccccgctcgcccgcttgtctggttgcagctaatcaacctgtcagtagccattcgcatgtggggtctgtaaaaaaatcacagcacggtgatttcgcacgtgtaattgccatcatcctttccgccaagagggtaactgcgtaacttcgtgcttccatcacagccgcatgtttcgttataacaagtcgagtgtcagatccagatcacatgcgcatcccttgagcccagcatgttccagcgcgattcggtttgagttctttctaaaattgtgcaaagtcaataggcaagcgacgtcaagatcaaattgctagggatctcgcggacaacgaatcaaatttgaagtgtcgtttttttatgtttcggtttagggcgggtacaactacatttattatgtggtctcttgaggggttaattaaaaaattccaaagacacgctctttgtgaagaccaaatttttagcattttggtcctttttcgaagaaaaaaaatcaagtttagaccctagaaaaattaaatgtcatttgtgaaccttttgctcggcgg

SEQ ID NO: 69623 - DNA, 880 bp, Zea Mays
atggccctaggtcccgagtgtgatctacatgttcctctgtgtacctcacgaaggagttatatgccttcggctattgtgatacatttgagcatgggttggcttattcccttgtatagtagtcatctatcatagcaaagtcacgacttctgtgtttcaacctcttggcttcgctttggtcagaggggtgataatgaccttgaatatataaggtgatcggtgtccgccagtcttcggtcattatcaaatgtatgattctgcgatcgtcgaggtcttgtgttatctgcaggccttcgtggtttttacatctggtgtgccgattgtgtggaaaaacatgtcatatggcagtgggtcacctttcgctgctgctttcaccaacatgtcggcctcttcattcttgttccgctctatgtgttgcaatgtgaatcatttgaattgcttttcttggcttcggaaggcagagaggtattgcatgaggactgactctttagtggagtagtccatttcaatttggtcggcgactatcttagaatcagttttgactatgcatgttgtcacccctagggcttgtagcttgcggagtccaaggatgacaacttcgtattctgctatatagttcatgcatttgtttgattcaagtgtgaaatggaggtgcatggcatatctgtatttgaggcctatgggcgatgtaataatttccgcagcgccggcgcccgcatgacaccacacaccgtcacagtggatggtccaaatagtctctgtgcgaagctggtgtggctccgaaggccctgtccaatctactataaagtttgccaagacctaggatttgattgttgtccttggctcaaaggtgacgttggatccggagagttcagctgcccat

SEQ ID NO: 69624 - DNA, 592 bp, Zea Mays
gtggcactagtgtccatacacctattgatgatgacgatggggatcaatagtcatatgcaggctcacagaagcgtgggtagagaagatgccatcacatggcgtgatgggtggccatcaatggacttttcatcacatccatcgagcatacttgtagggatgtcaatgaggggttctcatcgtgtggcgatttggtgtggccatgacgggtttcgatcgccattgtctatatatatggtgtaaagcccatgacaaatgttggttgaagtcgtgtaggcgattttgctataggtggagccactcttgagctaaccacatctatggtttatgttcttagataggatcgtggtgcatagacatagtgtgctgctttatatattcatggctagtaaacatcatggagcttgagggtggttatgccatggcattgagcctaggtccagggttcctggtgtgttgacggtgaacatttgtgcgggtagtgggtggggtactatgggatattgaggaaagcatttgcatcttaccagtttcgataatggttatgtctttgagccttctcttctcttgttgatggtattttcatggcactcgc

SEQ ID NO: 69625 - DNA, 513 bp, Zea Mays
ttagactaatgacaaagtttgcgtcaattttgacttgccaatgaaattgtggtctgctatttggttttgagcaaactgtacgacactgctgaatgcctgagatgatgcaataatatctgtagttcccagtggaacgcagtttctcaaacgctgctccattgatggttagagatcaagaaatactttctaacattcgatcagttagttttacccaaaggaaattttgctctgacctgatccacagggatgccaatgactggaataaaagatcaaacaaaaatattttgatgactggactaaagatgaaacaaaatagcacagtttagccttcttaaattaaaatcagcgttatccacttcaaaaatactagaagcaaagacatggcaggcaacagtcctacccccccccccccaataccaccatagtcccccacccaaggccctttcaccaaacacattgatttaaatgctcaagtgttccttgacttgtgaattttgatgttgaccttaaaaa

SEQ ID NO: 69626 - DNA, 402 bp, Zea Mays
tttactgttgtgtcgtaatgccttacggtctgaaaaacgccttgccaacatttgtacgggcgatgagtaagactttcggggacctgattagggacagagtagaggtatacgtcgatgacattgtggtcaagactaagagagggtcgaccttagtggaagacttaaccctggtcttcgacaggctgcgggcaacccggacaagtgcgtctttggtgtctctgcagggaagttgctggggttcctggtttcacacaggggcattgaaacaaacccagagaagatcagggcaattgaggcaatgaggcctccggcccgcatcaaggacgtccagaagcttgcggggtccctagccgctcttagccgcttcatctcaagattggctgagagggcactgcctttctt

SEQ ID NO: 69627 - DNA, 442 bp, Zea Mays
ccgagaccctcggtcgtggacggcgacaagtcgagctccggtgagctcatactggccagaatgcgcaacggctagtgctctagcttggctgacacttaatttaactcctaacaatcgtttcccctcgatcaattgcaaggttcgagctcttaatcatactgcccacggtgacagcgcaatcaacggatgaaccgagacgttcccggtgatcctacgggctctaacttaattggatgggtcgagaagcatcaagggtacatcagagtactgaaacgagggatcagagggtatgaacatacctgtagcatgctgggccacggcgagctcacttagtacggtgttctagaccaatttgggggaaagtctcaaattggggcacgctaggggacgaactggcgaacgggttgttgtactggatgcttgacttcataggggaaccgat

SEQ ID NO: 69628 - DNA, 669 bp, Zea Mays
gtgttggatggagaagaagaagaagaagggtagaacacggcacaaggacaaagaagagacatttggcgactgggataaggtattcggttcttcgttattcactttagtgttcagaagtcacatataatgtagtgctaagactcctattacatggcccaagtaggcccatggtatttcgtattgggattcttttcccacctcggcttgttcacttaagctcccgccacccgcatctgtttgtcatgcttcagaacgcccttgtcatcctgattcagagcaccgacatcatcaacttcttcagtaggcaccgccacttcgtccacataccccctccttggacagttgtttgcccccaagcgggcgcttctggaacctggaatggagagcctcaacaccatcccaagtggctaatgctacatccgtacctgaccaaagcactttaacctatgaaacaagctcaccttcatgttcaatcattcgacgttgcactatcttgtgggggcacttgaaccggtgtagtatcctcgggtagagagtgaaccaagacttgattctgacccaccgctttcttcaattgcgatatgtgtatgactagatgagtggaactggaaggtggcaattgtaaacgataagctattgatcccactttatccacaattttatatggtc

SEQ ID NO: 69629 - DNA, 407 bp, Zea Mays
gtttaatatccaaattcatgcccactttacctcgggtcagatatgggtctaacccataggtcaaaacatatccatatccgaatccgtcgggtcggatatcagctggatatccgaatccacgaattaaattgccatccctatgcctaggggcttctccaggctagaaggagggtggtcgtggccacgccgctcgggattcgtcattagcaccgccagaattgctcgacgtcgtcgatagcttaccacggaccacaagtctccgtggccagggcactgcgcacccccgaccgacgatgagtcctccctcaatcaactcgcctacacctgtgtcgcgtatagtcgctttcgaggggaaatagtgggtggggattatggatggtcgaacgccggcagggccaccgtcgtag

SEQ ID NO: 69630 - DNA, 489 bp, Zea Mays
gtcgtcgagaatcaacttgcttctccaagacagcgagagcctcaccagggatcagatcaacgtggtcgaactctctatcgcggtgcttcaccaggacatcgtccgggcgaggagtaagtagcctctccgatccctccccttcctgctcgaatcggtggagatggttatgatcataatctagcggctctacaagcgccacggtgtgggttgtgatgaagtgattatggatttggtgtagagttggcaaaaaagctggaaggcattgacatcgacgaactgtggcgagaggtagcacaaatcgaagcatctaagagccccgaggtcgaaatgcttgccggaccgcttcaccacgccgcgcagagtgcgtacaagcccatgtgcaagctccttatcacgcagtgcagatgtgacgtcaatgcttcaacgattgattcctgtaatttctgccacccgctgttggtttcgatccatttgcgtcgtgtatttgac

SEQ ID NO: 69631 - DNA, 468 bp, Zea Mays
aaattaatcaatggatggctgtggtgatgaggagcagaaattagcagcggctcgtcacccgcgccgtgtaccacgtagtaactattgcagctagctttgctcgcttcaatcaatggaatgtggctgttcatcgttgcaacatctcctctgtctcaactcaattgaatgtgccaatgtgttgtactcagctaagaagccagttcctgcatcgtctgattcatgaatcatctcatgctttatgaggtggtgcacgacgatctccgtttggatgttaatattggagtgcatagaactgaattgggtttagatgaagtttccggttacaataccagtgggctctgcaggggcgcatggcctattctcgcgtcagggggcgccggcccgaggccacgcttcatgggcctggctgggcagttagcctcgtgcccataacaaataaccgcacgtccacgccgtgtcatgtccgag

SEQ ID NO: 69632 - DNA, 325 bp, Zea Mays
tgggcatatgcgtggcgcagggagcggtcggccaggcctagtagctcttctattctatggttggtctcgatctttttttcccgccggcacccggcagggcagggcagggcagcaacttttcccgtgctacaggttgacaggacgtgaaactaggaaaaaaggggaagagatgtgtcgtgaagacatggggatcgagcgcctgcctgcctctgcttccactgtactttgcgcccagctctagtgcctgccctggggtggctcagctgtggcttgcatgcatgtgactatatgttcctcacgtcaaaagctgggggcacacacagat

SEQ ID NO: 69633 - DNA, 321 bp, Zea Mays
ttcaagatattttatttcttactctgccttacacttgaatgactttggagtctttatcactattactaggttattgatcctgcctccatatgaaggactttaagatcttttctttctgactctgccttctatttaaaggacttcagagtctttatgacattgttgtactaaaagatacgaccctagaattatgcaattaaacttatttgtggggtggatgcccttatacttgacaggcaagattacatcattaacaaaggcagtcccattaaaaaaccttacacttaacatgtctagacgaaggtccccctataagaaaaa

SEQ ID NO: 69634 - DNA, 492 bp, Zea Mays
ttgggttgttcgccgtcgacgacgagctcgctgttggctggcgggaccggtcacctgtgtgttgcggtggggaagaagaacatgcaccctcgatcgggtagcgcgcggctaggattgggtctgggtgcggggctattgcgggccgtagatggacgatctagtgggcgcgatcgcgtagcaacttgtttaagcgatgactgctcctggcgcttggatgtagatcagacggttgaaaacacacgttagtttataagtgcgatatctaatccacaccgcccgagcgtgatccaacggcttggatccgaagataccccttcggctgcaagttttgcaaataagcccctgaactatgcagaaaacaacccgccgtccaccctgtcggtgctctgagtctgtggaaatcttgcgccagaccccctgcattttccagaaaatgaggccccgtccagagaattataaaatcaggaaaatggattgaaaaatgagttttta

SEQ ID NO: 69635 - DNA, 436 bp, Zea Mays
attcgattcgttgcacgccctagatcgtttagcacctggttgtgttgtgggaccggctcggtagcgccaattcgcgtgtcgccggtgatgcaccgccgcgcatcttggtcatcgccgcgctcggactgctgggattggggaagaaacgagcgaccgtcaattgactgatgtgcgactacgattagatgaagatatcgatttgtggagaatccgacgtggccgtgagatcctgatcctacgcacgggagtgtccctcgctacttaaaatccgcttcgtcgatctgcgatcatgcgatcctggtgccatactggttcatcgcctgcggaattagatctgtaccatctatgtgtgatcaaacggccattactggtcaataccccttcgccatatacgttttgcagaaaagcccccgcggaaatcactaatcaacccgct

SEQ ID NO: 69636 - DNA, 374 bp, Zea Mays
ctttaactttgctacacagaatagggctcataatccatagattaattactacagagctccaaaggtgagtaaaaactgactgaaactgccagcagcagtcacttaaatccatctacaacttggtctgacagagagtgtttagaggcattttactcccaagttcttgtagaaccaagtctttcccactttataaaacttgttctcattactaagttcttcaacttagctatagcaactttagtccaaaaccacttgcattaatcacaaatgagctccaaagtagacaccattcactgatttcaggtttcagccactgaaccaaattcagttacagaaatgcctagcagctgatctttgggggcatttttctccac

SEQ ID NO: 69637 - DNA, 641 bp, Zea Mays
gcatcaggcaaccctttaggaaacaagccaaggaacaattaattcatggcaggtggaggagtcctaattacctagtggtggtgggaccctagggcagaagcagcacatgatggtgttgatgcaccatataaaaggctttcctccaattttgttgcctaagggcggatctaggattcaatcacgccctaggatggtctattagatataatattctttcaatatattttggtctataacaacaaatataactggagatatatggatcatgccccaaacccactgattgggtggctcaaggcttgtatctacccctgtcgttgcccgtagtttgctcccaagccctttgcctttgccaccctcacctttttatttttcttgtgccttccctagctttgtttgttagccaccaacaagtgatatggaggaatagactactgccattgctcctcagttgtggtggttgttcccatgctctacgtgcattgagacgtgtgcgtgtacaagtgacaaagagctttctacaggaggtattcgtatagagggtgatactgggggcaaatgaagccaagccataggcaaggggaggtggtggtgacgatctagcactttgagagtgggtttgggttgccacttcatccatg

SEQ ID NO: 69638 - DNA, 354 bp, Zea Mays
gttggtgacagagaaagggggaaaatggtgtcgcggtggttctgggtgaaatttgggttggagattggggctatacggccgtaaggaactatagtttcaccgtgcacattcaatttgggaggagggggcagaggcaacgcgaattttggattgcgatcaactcactgggtggaggtgtgcataccccgccgtggttcatagcgctatttatagccacggcggtctggctagcgttctctggccatggataacttcgttagcgcatgcttaccacgtagggaagagacacagtgagggagatcgaggcatgggtgacaccgcggtgaaagttatctgagtcatggtggcggccgg

SEQ ID NO: 69639 - DNA, 553 bp, Zea Mays
ccgggtagcggaactaagcgcatccctggaaaatctgcaagcatattgtaacaccctgcatgaagaggtgcacgtgttatatggccggctgcatccgaaagtgccaccagaggttgaagcaatgggagccggaccatctggagcagctagtggaggacctgatggggagttggacctttttggagcccctccttccatgaacctcacagatgaacattctctcgaggctggcagtggagcggccaaggacgaagataattagagtagtgtagtacaagtagtgtccatatgtaataaggaagttgagttgtactaatgagtttgtataattattaccagttcagcataatgtaataaaggtggtgtacttttggtatgtaataattcaggatgtttttcttcctcagatgccatcaagaactcgtgctcatgatggggcaggaacttcccgcggcggggaggaaactccaaacccaccacatgtacctcccacattggatgaggctatcgctgccttagtcaatgctaccgctgacaacacacgtttcctgcg

SEQ ID NO: 69640 - DNA, 879 bp, Zea Mays
tctataggttggaacatatcttaacactacaagggtacacatttgaacacatatgaacgctaccggaactcaccaatggagcacatcacgcagctgccaatagaaaccccaaaccataggacgatgaagtcggacaaagattgcacaaacggaggacaccaaatggagcacagcacgcagctgtcggtagaaaccctaaaccctaggacgactaagccatacagagtgcacatacggaggacaggaaccctataacgacgacgctgaccaaaatactgaggagcagaatggcgtcgaaccggagaaagcggacacgaaccctagaaccacgatgacgaaatagcggagggagagcggacggaacaaacctattgcacagagcagcaaaggaatgaggaggcggagggaggaatggcgagtagcaaggagcttacgtgaaggagacggccagctgaggactgaggcggtgaagggagcaatggcgagcagcagccccgtactaggcccaaaggaaaccatggtgcgtactgtcggcggaaggatccagaaatgcagccaaaccaatataggaaaagccaagagtccaagactaagtattgaccattaattacagatccaatgactgaaaatgtagtagctgacgtggacatcgtggttgtccctggtttgaaccgcctttgttatataggaaatttctctgccttttgcatgttagggtctctgcttctgtaggtggttgagaatcggctaagtctcatttgcaagctctagctagcttatttagctcgtaagccaaacaaaaaataataatatatgtgtatatacatgacaatataatcaatttcatactaataaaaagagtaataatactcataattt

SEQ ID NO: 69641 - DNA, 791 bp, Zea Mays
aattacttaacagggccttcgccatcgttccttcttccttggagaattgactgctttgcaacagatgtgagatagatttaaaacttaaattactccatgatctggataacatcgaaacctaaacctaattcttctcccttcatcaacacacaaggtcgctttctggcaatgcattatcaggaagtattcctaaggagctggggaaccttgtcaatctcataatcctgtaagaaatggactttgtagtgtcatgacctatctgataagaaatatagatttacaaaaaacgtgtcctcaatttaactcacgtgcatgtacatatcacaactattcaggtgtgtaatcaccactgaattaaatgcatgacaatttaacttgcctcaaaccacttcaagctcttcctattagagaggaaacaaatttacgtcttcgtttattctaccagttatcatcatgcttctatggtaaggatattccacccacaaatttaatgcttctaacctggtcttactatttatgtgatttttggagtttaggcacgaacaatttaactggctcccttccttctgaattaggtaacctggttaatggcaatgatcctattgtcgacagttgacactcgagcttaacattcccaaaaaagcttcttttattcaggtctgaataatctatccaaatcaactgcaaagtttcaagggcgaataaatattcttaggtctttgaaaattccaagtaatctgaacttattgacctgctacgaagaaacattcaatcaaatgagtgatatgcct

SEQ ID NO: 69642 - DNA, 711 bp, Zea Mays
caaagaactccaaggacgtcggttgtggcctaatcgccggtgatggcggttgagctgggcctccggacttggcacaaaaattctttctgagctgcaggcattatctatcgctaaaaaaaatcccctgctatttcttgagtagaaaaattctgcttatctccggctgaataacgttgcttcgcgggggtgtttgttttagcctttttcctacttctgtccatcacaaactgctgcagactgccaaatacctagttttcagaccgatttcgatcttatgagaagcattttgatgaaagtcattcaaaatcaacattaacatagaatcagctgagtggtcacgatagtagaaatttgtcactttctagattctaaatcttatgaacttattcatctttctccgtacgtaatcccaataatacccagacacagtcaaattatccccccacagtctcaaaaaagctagtaagaaaaagaaaagctaaagcaaacatgctctatgattaagtgccgtcgaaacgcacggctggccaacagattacaaatgtccttatgttttataacctatatttaaacataaatagaaacatacgaccgctttgcctgtatagagaaatgttctagcgtgtggtgacctggtcgtcgacgacaacgggatacatgtgcgtcgttttttttttccaatagcagatgcagaatcgctatgagcaaact

SEQ ID NO: 69643 - DNA, 616 bp, Zea Mays
aatagctattggaagtaaaaaatagttttgtctccaatagctcctcatatttagacaatagtttaattttgagttcctcatttagacgatagggtcgagggtagtgaacatcgagggcagaggttaagatcggtcgatgcgacttgttaggaagcgacagttcggcgatgcgacttgtgggtaagcggtggtcgactgacggtggaccctgactaccttttgtgcgaaaaaggaatcgacgacagatgtgtttagggagttgctattgagttggcgaatctagagagtaaatgggatggatagcaaataactaaatgttggggcgaaggcgcaacgccccctcgctcgatcgactacacggcaaaaagcagatcatgtcagaagggattcaagcgaagactaaagagcgcgaatactgaagagtgagctccactacggagggagcgcacagagcgggtgaaggcctaggtgctccctccgtctcggcgggttagcgagttccaacactaagtttagcatttgaagaataaacgatgatcgggtataggtggagggtacgtgttacgaacaaccttagaagcctcaaatgaataattgttcatagtaaaaaaaggag

SEQ ID NO: 69644 - DNA, 736 bp, Zea Mays
gaaaaaacaaagttattgtcaaaggtttagaggataaaatcaaagaaattgaggattctctaacagaaaaagatgatttgctacactcaaccaaagtatctcttaccgaagcgcaagttcaaaataagaaattgagcaaagagctggtggatgcgcagatacttttagaagaaacttccagccgattcaatcgagaatctgaaactttgaaaatgtcacttaaggtgctgagaagaatacgaagctcagtgaagcgttgagaactcttaaggagaggtgctttaactttgcaagccaatgcaccactcgattgaaaatcatattcaattcagttggagctgcatctgtagaagctaacttctttaccgaagatatcctcggggcccttgaatgcatagagaaagtggttgatgtcctcgatgaagttatcaccggccatggagacttctgtgcactggtggcttctcgtggtacagccgctgctttcataaaggtcgggtgcaatcacacaaaggctgtcaatagaccgaacattagcctttcgtcaacggatctggttgatattccagccgaagcccgaagcatagggaacaggttcatcactcaaatttgggctaagggtggacgcaaattggctagagatgaagctcggaacctacttaacaaagtatagctcttttacctttattcttttacgtgactccttaccaggttcctgatttccctgttcctcgtc

SEQ ID NO: 69645 - DNA, 502 bp, Zea Mays
ccggaattcctcactgcacctgctgctccgccgtggacccgcctgctctgtggactgaaaacctcgccgtcccactttcggtaagacatcatccaccttgctcgcaatgatctcctctacacgtaggaccttttgggagggtaatcggggctcgggtgcacgattcgcttttcctccggccagagcccgccgtgagacctcacgccgccattctcggtcggccggcttgtggggagaaacccctgtgtcgtccgatttctttctgatggccgagatttgctacaagttaccgattgggattattagatcgtggccgttagtcctgcaatctatgcatgcgattaaacctcaagttgttagactctcatccgtggatgggggatcagacgtctgacgtcgcgtaccggttcggtcccttagatctgaccgtacatcatagatcctatggtctaaacgcatccaagtccttagccgcgtggcattctttgtaaagagcccctag

SEQ ID NO: 69646 - DNA, 837 bp, Zea Mays
ctaggacttactggtgatgatctttatataattgaagaccgcaggttgatatcctcaaacttgagaggctctttagcacaacaggcggtcgaaggggtatggacttttgtggaccgttgaatcgatagtctacggtgcagattagactgcacaaaatatgaaccggtatcccatattgatcgtgggagcaaagatcaacgatccatagcgttccatgtcgtgatctaacctatccccttagatcctgatcagggggttctaatttaatgaaccaaaacggtgtgaacactcctaatctcacacgtccgctcaagatccaacgggtgcaaacatgtcccctacctcacatcgcctgagcacggcggcgccatggctccacggtggcatagcacatcgtagcaatgaaatcgcacccaaatgccctacttcccaccccggatgatgcaacatgaagcagagatgacgtcaatcttaagagaagtagcattaccagcaataacgcggcgatgaacgctgccctcgctgagcggtgtctccaaggctccgatgaacaatccacaaccctctcaatggacttcgccctcgatctcccccgcccaccatccttgtgcattgcgcttcctcctggacccatcaccaagggcttgacaatggcggtggagtccgaccacgaagcgaagcagcctggcgacatacttgtcatctctgacgagcaattgtgttgaaaccgagaatttccatgctctaccacccacacgcgtacactccacatttcttggagaggccattagccattctcggggcgccgattaatggcgaagatgagctatgacggtg

SEQ ID NO: 69647 - DNA, 394 bp, Zea Mays
cagacgtggcctccgccaaactggggaaccatttggtcatgcagaggttagccataaacatatttttttcctattcatgcagatggtaaaattccaatacatgctaacagttataacttgaatttaaacagtttcgtagccgcacagagacatgttatgtcattgcaccagaacgaccggtttctaaagtattcaacatatatgtgccacgcataaagcatttgattgacaacaagctaaaatgtctgccctcccagcatcgccccatgttcgaatcaatgtttgatgcacatgacaaggaggtggataagtaatgttcttctcttcagcagagccatcagatgcttgtttctaagcagattgaactatctgagacatttggcgaaatgatcga

SEQ ID NO: 69648 - DNA, 682 bp, Zea Mays
taaaatccgggtgtgacaatgcaccccctcccacccgtgccatcacgcaccccacaacgcgctctctctcattctctttctcttgctttgttctctaccgttgatccagatagagggggcaaggcggcgaggggtgggggttgctctccatcggagatgcgtgaggacgataacacaacgagcaccaccccctagcgggtgggtggggaagggggatgggcaatggctctccatagccatgtggaagcttatgtgatggtggtgttggtgctgcatgggagttctacggcccaagacaagcttgcgctagctttgcaactgggtcgggagtggcgatgccacgagagctctacggcccgcccgcgacaacggcacttgggtgaccaagtgggaacatacgagctaggtggcctattaggctacttatggtgcaacagctggtacgaccctgcctactgcgctcttcgatcgttcgtcttcaaacaggatggatagtcagaggctatagatctgcagtagagcagtctagcttgatgtgagaatagggacggacggggaggcggtggagatgacgtcaccattacgaaacgatcacgatcatggtcgataatcgagagggtgaaggagatacgaacgcatgggatgatgtgggagcggggcagaaatgatgttgaaatcttca

SEQ ID NO: 69649 - DNA, 587 bp, Zea Mays
caggaggcaatgaacgagttggtcctttggcatcgacgcgacatcaagttgggtgatgagccgatcttaagccgtctatcgcatcataagtcaccaatgccgaattcaacaccaatgcaacataaatatagttcgatcattccataccccatggtgcaggaaaatatagcaccgacctccacaaaaaccgttgaaacaatcatatcacctcttgcgaaggaactcgacgagggggacatagacaaaattgttccttagaatgttgatgcaaacatcaaaaaggaagcaaaggttgacaccaatgttgaagggccaactacttcaaagaaaattcatcagcgaatcgccactaacaatgtcaagaaaccgtgagaagcagtgacacgctacctgcaaaaattgaagagagttatgacagatcaatcaaaagcggaatcagcatctcgtggagtacgcacacggtcccaaatagacaatttcgaagtatgggaagaagatggaatgattcatactcaagaatcattacgtcttaaaataaatatcccgatatataagaagaaggatgttcctcctaaatttgtgaatgg

SEQ ID NO: 69650 - DNA, 479 bp, Zea Mays
atggatcatggcgtatgtgtgtagattatcgtgctattaataacatcatagttcgttatcgatatcctataccatgccttgatgatatgctagatgagcttagtggtgccattattttctctatggttgatttgtgtagcggttaccaacagattataatgaaactaggtgatgaatggaaacgacttttaaaacaaaatttggattatatgaatggttggttatgcctttggcttgactaattctcccagcacctttatgtgtttaatggatgaagttctacaacccttcataggtttgtttgttgttatctatttcgatgatatcattacttacaacaagtctataaaagagcatttagaacatttgtgtgttgtttttatgctttgtgtgctgctcgcttgtttggtaacatggacaaatgcaccttttgcacgcaatatgtcttgtttcttggttatgtggttactccgtagggc

SEQ ID NO: 69651 - DNA, 427 bp, Zea Mays
ccgagcggcgcccagtgctttcgtgctccaacccgaatcccgattgctactacacatagaggagggtattgagatctcggcagaggtattcttaccgaggacgacgcatccaggagatcccccgcagcagatttgacgacggtgagcaatcaccgcttccccggtgctccaccaggcccactaatgcccatcggagcttcgtcgtgtcctcacagacccatcacgactgaaaccccgaacgcagagtgatggagacggggatgaatggccgctgcgactgcgagtgcagggtgagtgtggggtgcgcgcagatcagcggagggacagggactgagcaaacatggagccgcccggcgacgtggagaagaaggtcccgccagaggaggttagtgggatgggttaattgctgcgctgcaccaagactccg

SEQ ID NO: 69652 - DNA, 544 bp, Zea Mays
cgaatgtgttgtggcagagtataggagtgatcaataactattggtgttcttaggtactaaaggaggtcgcaatggggttccatttatatcctaaacacaccccatagttgttgctccttccttccaaatgtctgcagaattctagcctcgactagtgcatcggaccggtccagtgcaccactaaatcggaaacatgaatgagtcctctaggattctaactgacgctttgcaactctgaaggtgacttgaccgttccggtgcacctctggactgtctgccacgtcagctagccattggtcctcgcgcgaagtccgaaagtagccgttaaaggcggtccggtgcaccaccaggccgtgcatagtacttggttcggtgatttttataaataaaaaccgcagacattaaagttcgtatggacacagttcgatgcactaacggatcggtccggtgactcctagactagcacagttaagtcctttctttgcaaaacatgttccatttgacatagcctttcttgtgagcttccctactacttagacaaaca

SEQ ID NO: 69653 - DNA, 285 bp, Zea Mays
gccgaggccaccaggctgaaggatattgatatacttgaggaagaatgactgaatgcagtaatccaatcagcacggtaccaacaaactctaaggcgctatcacgacaaggctgtgcggcaacatttcttttcgataggagacctcgtcctccgccgaattctaacgggggagggacggcacaagttatcacccttatgggaagggcctttcatagtagcagaggttactcggcccggatcgtatcgcctcacctagatggatggcacagaagtggggaactcctgg

SEQ ID NO: 69654 - DNA, 747 bp, Zea Mays
gctccatacctgtcctctttgtgtaagtcatggtttcaagttatggcgacatccatgtcctaggatgcacacaacttgtcgtgcacacgacaaaggccgagtggtgcccacgactagtcagggttgctgaaggctagggcatctgagctcttatgggcaccctcaaccttgtagctagggtgtgggacaacgagtgggagcagcacaacgcctcatgagtgtattgcaccacgaaaatgaagataatgatatcaagtcaccactgctgctctacgtccggacctatgctaagcatgaggagttatggagttatgcttatgctatcgaaagggggcctaactgctagggctctccaaagtcaagacaacaatgaatattatcgaatgagtaggaagggcccacttctgctgctacaggggacgtccgctgcctagccatgaagcttggctttggatcatcggagcttggggcatatgagacgacctacatatgaagaggtatgtggcagaatgccatcgcatctgagtgacacacccccagctatgaagtagtattctagctccactatggcagagaccgaggtgttgggcctataggaggtaggctcctagatgtctgagcgcgggcacaacgaggatgtagctcaggagagtgggaggcgatgtctaagttgacgctacacacctctatatctagagtgggctcatgggtcaccatgttggtgttgcaacgacaagccaatccccc

SEQ ID NO: 69655 - DNA, 729 bp, Zea Mays
ctgtttctaacaatggtggagtttgttttaataaagcacaaagaaatgtgggttttgttggttggatgagtgtaaatgtagagccagcaaccaagattcgaatccttaatttgcgcaccgtagactctcgaattgctgacattgtcacaagagttgtcctcggttggagacatgaaatccaaagacgaagaatgaagatgatgtgcaagtgactggcatgccttgtccatcaaatgtgccacaaaaagacgataatagtgatgggagacgatcgaataaaggcaaatggcacaagcataatttgtctatactccacaacctcttcttaagtggttgaaataagaagcacacatctacttcaagctcattcatagaaatctcatcacagggagtccattaaggagtgtaattacccgctctaaaaaatctacgccatttattgattatcactcctttttattgcatttcatctactttcatagatgaagctctcatggatctagattaggtgaatgtcatccacaaagagctaaacaacttcacttgcaataaagtttagacacctgaaaaggacgaccaccgaccataaaaaaacaagagccattggtacgaagtgtgtgtttcagaacgagcaacaagataaaagtggtactatgaggaacaagacaaggttagttacaaagttgttatccttaattgaaggtttggattttggaaacacaataggct

SEQ ID NO: 69656 - DNA, 600 bp, Zea Mays
gctcagccaacctcctcaatcttcgtatatgcatttgctgctagtctgctactgctacgtttacacaggagtaaagactaaagaatatcaccgtgcctgtctagtgtctgtaccagcttgcattgcattccaagttatgatcgtggccgtttcctgaggtagccccccctcggtttctggatcttggaccatgctatgtctgcgccttgagacttgattcttcaattgtggttcagaggcgcagcacatggaacacgtcctggcatacccaggctgtctcctacggacaccggtaaggccatctatttccaattggctgtgtaaacggtcttgtaaagtattgtttgcaccgtggattgtattatttgcataatgaagttttaaatagagagtgagatatgaaggaagataaggagtctgctgaagatagcctaagaccatcttcaacggttcccatctcgtcccccctcctctcagatagtggagacagtagccctctaaaagctacaacgatgccctctactcttgcctctacgcaagggaaatcgtctctccccctagttccagggacatgctatacactcgtgtcggtgtttggac

SEQ ID NO: 69657 - DNA, 578 bp, Zea Mays
ctcccttcctcaagccagcagggcaacaccccttcctgctcccttctaggctgcctccctccatcgttggccctcacctccacccccttcactcgtctccctaggtgcaggcactcctcttcctcacagccgagcccttttttggtgcctctatccgtggatgaatagcagggcacatcccattgcacgacgtgctcccagctcctccatgttattgccatggtgctctgctccaccatgtggccttcttcccccgagcgggcgcaactctctccctcaccatggctggcttcttcacaggatgtcgtcgagccccctctagaaatccccctattttcatggcacagcccctcccctgcagcagcctgcttccagccacgacccgatcccatatcttctttgttttgcgcgcatgtcagggaagtcatcgcagcagccgtccaacgccacacctctggctctccctgcacgccggtctaggtccagggccgtgcgagctcctccttgctgtaggccagaatccacgcacttgcgcactctcctgccatcctagctggctccacttgcacatgtcgtcc

SEQ ID NO: 69658 - DNA, 566 bp, Zea Mays
actagaattggtggaactcaagaagtagatagagaagttgttggagaagggttacataagaccagcacctcgccttgggccacccagtgttgtttgtggagaagaaagatggtacgaagaggatgtgcatagattaccgagttctaaatgaagtcactataaaaaacaagtaccccttgcccagaattgaagatctgttcgaccagttgagaggagccagtgtgttctcgaagatagatctagggtcaggttatcattagctcaggatccggccttcagacataccgaagacaacattcattaccaagtatggactatatgagtacacagtcatgtccttcggtctgacgaatgcgccagctttcttcatgtacttgatgaatagagtgttcatggactatatcgacaaattcatagtggtgtttattgatgatatcctcatatattcccagaatgagcaaaagcatgaagatcatttgaggaaagtattacagaggctacgagattgtcagttgtatgccaagctcagcaaatgtgaattctggatcagcgaagttctatttttg

SEQ ID NO: 69659 - DNA, 365 bp, Zea Mays
gtcgggtcaggcgtcggcgaggtcgccaccgcggtgggaagatctccgccgcgctgacggtcgtggagaagaaaggccctaggccgtcgatcgcgcgataagaggtcaggattagatgagaggtatcaattcggccgggcttctcttgaccgttgatcagccatcatgcgcttaggatttaatcgcaatataacgtttaggttggtgggatcctcaccatcggatctagatctggtggtcaatagcgcgtaccccttcgtcgttctatcggatccatcggatcaggatcggacggtcgaccttgcccgcaccgcttcatccgtggaacttttcttaaagagcccctacgatttcgagaaaacaac

SEQ ID NO: 69660 - DNA, 552 bp, Zea Mays
ctcctcgacatcaccacaaagtttgttggtggagaggacattgtggggaccattttatacaaggggaaaaccccacacgacttcggtgatatgagcggcataaagaaagagagtctagaacaccctggtaggcgtcagaggggcaaccacgctcgacatgatgggaatcaggtcgccaacactgagtgtccgcccaaactagatgaagaatggtcgcaaccacttctagaagttgatggacacgccatgccataaccacgactacctagtctatcacaagctccatgggtgcgagctcctcaagcgctttatcaccaatcctctgaagaaggtgaagttggaggaagccacccaagtggcgaagtagaatgatgcaactaaggacttccccaagctgccaggatgccttatgatctttggtggccccgagacatacggtgtcgtgccgcctaatgtggaccaccaatcatatactcattaagaagaaaagtgagaaatggaggatgtgtgtcagctacatgggcctaaaccaggcatgtccaaaaaaccctt

SEQ ID NO: 69661 - DNA, 284 bp, Zea Mays
ctccatttgctccttcaggagcttgttgtttgcctcaagagcttggcagctaacacattcatcgaagtatgtagggatccttgcttcttcgtcgtcgcctgccatcgaaacacaaaaacaggaaacaaacggtgacggttatccctagtaatttcactacacgctcctctcaggtggaacacaggaacacgctctattgtatcttaccaagctcttacaagtgtctgacgaaatacaagcaaaggatggtacaatcagaggctggttcgtgatacttaccaaga

SEQ ID NO: 69662 - DNA, 485 bp, Zea Mays
atctggatgaacttgaacttcacagagctgggtataaaatatatctcaacagttatggtgcgtacttttggaattcgtgttggtcagctactatacagagcgacgaatgctttcacaacaaagtgattactagatactaatatcgaaacaaagaaaattaactatgagaatacaagcaacctttcgttgtgaacataccatccactatgtttttcacgatgaaactttacgggtggaaccgatcttaaacggtcaatgaaatcttagaatatccatggtgaactcatgagggcagatgaaaagagaagccgagcggatgccacaatttgctaggtgatgtacatagaacttggaaacaagtggagaaaagtctgttcctaatgactctcatgcccaatttcttatcatcttgtgtgcggtgcatgtcaaatcctcccattgtctatgttgtatgtcatacatctttgcctcatgttatttggttt

SEQ ID NO: 69663 - DNA, 846 bp, Zea Mays
ctcttgcgcaacgagcttcttcgaggcgcgcaactccttgatgacagatccttcgaagacagtagcttaccaagccgtgacacttcagtctgcgaatcccttaactcatccctatgatggtctatttccgacatagtaaagcgatggctcctctctaggatagtgagggaattgctagcatcacgatacaacctatccatattgtcacgagaatcaagaagcgtttgcctctcctcctacaagtaagaagagcactaagcatcgaagcaaaggggcaaaacagaagcagtcaggaaaatctacctcatgaggcatcttctctgaatcgagctgggcatttaaggaagagttcagggtccgagcgctgtccaagaatgcagaaacctagttcagatcagcttgactctaggcatacctttcctcagcatcggagcaccgttgagtcagagctggtgaagcaacaggaaaaaatacaagatgcaaaacaagagaagcaataaatagcaaaaggaagctacagacccactaactaaatttggaggactttagatcatctatttgcctctgaagcaggagaggattccactgcatcaaaggcaaaacttgatcgggcacaggagcgccacaagatttcaattggaccgacacagagttgcgaacattctgcaagctcaaaagttagcaagagaacccgtctgtcaacataattaacgcaaggcaaagatcagctcacctgaaggttagaaagaaataaaggaaatcccagagctggaggcatcggtgcactgtctgttgatggagcattgacagggacaatgttgagagcatcactcaaggagaccttag

SEQ ID NO: 69664 - DNA, 546 bp, Zea Mays
aatcctaacccaagtgaagacaggggaagtcatactcaagggcatcagcacaactgtcaatcatcaggaacacaacagagttccttcaggccaccagtcccaagaggcaaaggaggtagaagcttcagaggaagattcagctcgcaaccaagaaggttgttttatcttttccatggggaagataaggggcatacaacgaggacatgtcaagtcacgatacagaagcaaaagaaaatagctgaagccgaagcacgtcagaatcagctgaagcaggtcctgcataccacttcgtgctattctccattcattcctgagtatgtgggcaatcaacaacccacagtatcagcagcttcggcaagccactccccaactgcatgggccctaccaccaccaccactcatggctccaacttcatctcataatcaacagctagaagggcaccgccaagttcaacaacagcgcgacacatgcgaagagtctgaagctcggacagtcaacaacattgtaccagagtcgagacacatttactgaagcaacacaggggct

SEQ ID NO: 69665 - DNA, 879 bp, Zea Mays
cccagttcggctgtgcctaggagataaattcaaggccttctgtctcaataaatgattctcatcttctaaatttgagatcttatcctctaagctgggaaaaagacgtgcaaattattttgtaaaaactctggagctctatgatattactgttaaaaaggacttactttttcaagttatcccggagatgaacatagttcttttccacatcgtgcaacttgtccatattatcatggctacatttttgagcttttaagagctcttgttccatttctgtgttctttgcctgcattacagaagaggtttgacaaatctagaacacagatttaatcaacctatcgaaattgacataatagacactggaattcattaaggattgcttagaccaagcacaaactaaagacaaaccacaaactagagtaccattatagcagagtattaagagcttacaccacactgatgagggctaaaaatgagaggcataaacataagatttgaatgtgacatggaatattgaattaaatagaactcgaagtagggatattgcactaaattaaaaatttacaggtggggaacacctgtagtaaaatattctccctcttcacttcttctatctgagaaagaatattttgctgagcttcttgatccttggatgataaatctagctgatgttggagcgaggaaattttcttgcaactatttttattttcttcatttgatgcctctaattctgatttcacggattccaatattttgagaagcttggatatctccaatgccttcgactcttcagcagcaagctgtgtacacacacacacacacacacataattactggtactgtaacaaacatcaattaatatacaaaaaaattgagtgctca

SEQ ID NO: 69666 - DNA, 351 bp, Zea Mays
atttaattgatttaaaacaattctggatcgggtctcaattactggtaagtacaggggctaacccgcaagatctccaagacacagcgctccactggtctggactgcggattgtttttaaataaacagaggggctctttagcaatatgggcacgacgaaagggtatcggtgaatcagagccgttggatcgagcaccagcggtccagattagatcgctattcgctatgaagcggtatggaaaactgaccattagatcaagatcctagggttctgattttatgttagcccgatctgccctaagccatcagatagaggatcaatggtcacgatttaatcgcgcgaataggtatgct

SEQ ID NO: 69667 - DNA, 741 bp, Zea Mays
ttgagatgtttgtctaagtcataggatatctctcaagtttagccaaagcaacttggagaagattgttcaaagatcaacaagaagtcagaaactcaaagtcctaaaattgccaagtgtggactgtccggccacttctaggagaccgtccgcgacaccgctttgacttcggccaggaactataaatcgtggatagtccggctagaaaccacggaccgtccggctatacagtgcggatcgtccgactataattcacggaccgtccgcatgtgaagacctggttcagcccgaaggtgacaagttgagcagaaggaattatagagctagcgcggaccgtctgggaccaagggcggaccgtccgcatggtgtcaccgaggcagatagtcattgatctagccgttgatctattagatgtatccgttaaagatgtcaaaatcgaccattggagggtcgcggaccgtccgggcgctagccgcggactgtccgccagtgcaaattctggcagatgcgccccaatggctatatgggtggttgagggctataaaagccaccccaaccagcccattcacaagcattcattgatccatttcatacacaagaattgggtattcactcctatctactagagcaacacttctatacacatcaaagcctcacaagtgccacaaaagagagatcaagcaagaaagagctactcgtgtgcgtttagtgatagtgccttgtgagaattattgagagaaagtg

SEQ ID NO: 69668 - DNA, 460 bp, Zea Mays
gagaacctggattttaaattaccatggccgagagtccggatgagaacgatcctgggaggattcacgcggccatcggtgttctgttgggattcggttgagggagcaccgtgaggaccacgcaacttctgtttcgcccgccgttaggaactgaaatcccgattggtacggggaggaaggataccagatcagatcatggggaaagagggaaggtttgttatcggtgatgccgctgccctattttcgcaccgaaggaagtcgcggtagtgatttctgtgcatcacgggcgcgcgacattcatcgcccaagcgcctgtcgcgcgtgttcagagtacgccaccgttggtttggggaagaagcttctggcgggtgggacccagccgtcagtgaaactagagcagagaagcaggctgaccgggggaaaagtcagtagtgggccggcgggcgcgaattagccgttaggt

SEQ ID NO: 69669 - DNA, 302 bp, Zea Mays
tctcccaccgcttcgtggcattgagcaccagatcaacctcatccccggtgcacagcttccgaaccgtgcaccgtaccgtacaaatccagatgagacgaaggagattcagcgccaggtacaagtgttgcttgacaagggatacattcgtgagtctcttagcccttgctctgttcctgtgttacttgttcccaagaaagatgggtcatggcgtatgtgtgtagactgtcgtgctattaataacatcactattcgttatcgatatcctataccatgccttgatgatatgctagatgagcttagtg

SEQ ID NO: 69670 - DNA, 321 bp, Zea Mays
gtatggggcagcggtcattccatagggattgaacccatctgtggccagcgcaacacgaacattacgagcctcttcggctttctcatggtgaatggcatcaaagtgggtccatgcttcaccatcggatgcgtgaaccatcttgtcaggattgtatcgtttgccttttttgtgccatgtcatctgtttcgtggattcctctgtcatgtatagaccctagatcctcggttgaacggaaggtggcgtaggattgtcacggggatgtcgagctgcctcttctatccatcaccagagtctacctccatgaacctagacgatttacac

SEQ ID NO: 69671 - DNA, 403 bp, Zea Mays
attggaatgcagtcgtagtacttggtataggttgtggcgtagccttatacgctgtcgtgcgtagggttgcatgtacggtgttattccatctcctcctgcttgtctcctcatgcatcggtaacacatgaggaatagtaaaggtcacaatgaagggtgcccaagcggcacattgagtcaatggtcttgccttgataacgcgcggacaacagtgtatcccacacattacagattaggcgcgtcgcacaaatttaatgcaagggatacgccacctgcccctggtgtgggttggtgtgcatcccctgtagctattgctgatgcccccatgtcagagggcagacgtcaggcaccgcccatacacacctagtcacgtgtcggcatcggacctctgcctgggcagggggct

SEQ ID NO: 69672 - DNA, 618 bp, Zea Mays
ggagcggtgcactggcttcgtaacaagatagcggagcaggccgaacactcaatttatagtggtcactcgagtgtttcacgaatttgggatgagatgagcttgcggctggaggggaggtgagtcaccggagcacagctactgtggcgctcaacaaggtaaagactcaggcggaagatgggctgcctactgcgacctactgcgacgtggtaacatctccaagcacgtggcatccttgcggcaagcggcaaactctggcgatggcatcttggccggtcgcggggcaagtgcatatggtggccagctcacaatctcatctgcggtcataatcttttcacaggtccggtaatatccacgccgcgtcgtgcacgaatcacagtggctggcgtgaatccacacgcggagatcaccaacggtgagatgctccacatctcaaatctttttcagatactgtacaatcgcgatcttcttcagtccatctgacagggcgaattgaagggcttcgttcttcaattttcatgtggagagctaccaatccgactctatgaaagttgttgctcaacataccatctttgattttgttataaagatcttgttcaaatactcactggatcatgtgaa

SEQ ID NO: 69673 - DNA, 530 bp, Zea Mays
gatcaagttcttgggtcataccattttgcaggacgggatagcagttgaccctgagaaagtacaggaagtgatggattagaagcctcctaccaccattcggcagattcagagttttctgggattggcaggatactatcggcgattcattccggatttctccagaattgctaaaccaatgactgagttgttgaagaaaggagtgaaatttgaatggagtcaaaaatgtgaagatgcctttcacgccttgaggcgacatctgacaacagcacccgtgctagctcagcctgacaacaccaaatcatttgatgtgtattgtgatgcttcaggcactggactaggttgtgttctaatgcaagacaaccgagttattgcctacgcatccagagcacttaggcctcatgagaaaaattatcccacatatgatctagagttagcagcggtagtccatgctctgaagatatggagacattatctaatgggggctcaatgcaatatttatactgaccacaagagtctcaagtatattttca

SEQ ID NO: 69674 - DNA, 736 bp, Zea Mays
tatttttgaattatttcttgccaataaaccgacccaatggactgcgagcactattttgttgtattccagggagctttgtctaaattccaggacataaccatattaattcttaacttagtgtgtatcgcgggtttaatcctaaaaaatacatgggcttaaatactaaagtgtcggtgaaggggtttgcgatgatattggctgcccgattagaaaccaagtgccaggatccgatcccacttataatgaactggtatgctacatgggctcttggatctagatccaacggccaaggttttgcatagcgcagatcgctcagcacccgcctaatcattactaacggttgaaatcatcgatccccgaagatgagcttcgatccgcccaatgttgaatatgcagttcggatttcaaatagcgaacaccaacccagatccgcctgatccatgatccatgctccagatcaacctaacatgaaccattacacagatctaatctagaccgttgccaccgagatcaacggttatgaacccgaccactaaaacatctagcaacccatggctcgcccgcgactcgcgtggtggtgcaccactggagttgctcccattggtcgctccggtgccctggactctatccgaaccatgctatgcgaagtgtaggatgatatgaacagcaggggagggctattaccggctcagaccgcgagttcaagccggtcctcgacgtagtgcggccccaacag

SEQ ID NO: 69675 - DNA, 359 bp, Zea Mays
gcgacagcgtatcgatagatgtgccgttcgaggagctctgcgacgaggacaagatcactgcgttcttcaggagactgttggacgagtggacccaggaggtggacggtatgcctgaggcggaacggaggacggcaaaagggaaggccgcgatagccacctgcaagcagtgcacgcgatacctcgaccctctgttcaagcagtgcaagaagaaggtatggagcatcaagtgtctcagtagtatcagtttgaatgacctaatgcttattgcgaacgtttggctggatgagttcataggtttgtcaacccgtctgatagcatgctttaatttgaacttttaatacggttttgcttaatttgtt

SEQ ID NO: 69676 - DNA, 713 bp, Zea Mays
acgccaaaaacaagctctattgttgaaagattttgatctgaaccatctcacagagacacagacacaccaataatgggagcgagtagtagcacttggactctcaccacctactgctgttgttataatcgccccctggtgatcccgtgaccgacgcccctctagaaaatgctcctccatgacacattgtaatcttggaaaatagaacgaaggtttgggtaagcagggaggtgcttcctcctttgataagtgtacttgccatttaatttgaatctgagatctggaactgctttgttgtgttttgtgacgagttacgggaaaaggagcttagtgtttgtccctgtattttgctttgtttcttttgatgggattttgcatgcatccttttttgcgtataagtgtatgtgtgtgtatgaggcatcggctaaaccacttctcgatgtgagccatatccttgttggtagggtatagtatgcactctttgtttgtaagcgtgagcatgtaataccgacttaagtcgatcccaccttaagccgattgctccgttagaagtgtacatcatgcacccttcgtttataatcgtgagcatgtgacaccgacttaagtcgatcccgacttgagccgatggttccgttaatagggtatagtttacaccctttgttttgtaagcgtgagcatgcgacacggacttaagtcaatcccgacttaagccgatt

SEQ ID NO: 69677 - DNA, 909 bp, Zea Mays
tagctccatcttacacaataaaccgtttcgcacgatgattgttgtatgaggtatctacggttgataatcgcccactgcctccgaacgatcctggccagatgcgagcggatcaacggctgggatttaataaagcaggagggtatgcccattctaatctgatcgttgatcaagcgatcaatgtctagggttagcttcatctaccccgaaccaagaacgacagagccgcctagaatcccagtgggttcttgccaccgcaaagtgattctccgcgtaggtatgcgacatcccacctagaccgatgctacacgatgctgggaggaaagcgagtcggtctagaggtttctcacccgtgtttatgctgtgtagacccctgaccacgacggagatgcggctcgacggcggagtgcaacaacaacgaacaattgctcgatccaagcttggttccccgtctcgatggttcacggccatgacccctaggttctggtgaatctccccgaccgcctaatagggtccggtgcgatcgcggtcgatttgtgctagcagcggacgccactgactccctcttcttcctcacggtcggtggctcggttgttcgggaacggaggggcacgagccgagacttatagccatggcaagggggaggggtgcgagattttcgagtcgattgtgcgagctggatactccctggcgagatggttacatcgcgcgctcaattgcaccgaagcattctgttacaaggtggaagatgcgctaacaatgtgggcccactcgacagtgtccaggaatatgtgcgagcggctccggggaagcaggggctggcatgcgtgaccctagtggttagtgggaccaggcatgctcggctgagtcgcgatggcgcacgtcccacccatcagcgtgcaagggaggtga

SEQ ID NO: 69678 - DNA, 589 bp, Zea Mays
tcctggaatattgacaatctacgcaaatttttttgtctaagtcctcagggcctacgcgcccttgtaattcaccaaatagcactattcaggcccacactcttttcctcccgaggtgaggtttttaacgaggcgaagccatgtaatatatctacaaaaatcccccacaaaaactaagatgcaacatgtcgaaaaagaccgcattaacggtcttcggcattcgactactccaaagtcaccaagagaggcaacgcagactaccctcgcgtgcgacactccacgcaaaagtcgcataagggtgcagccgaaatagcacaacaagtgcgttaattagtcttttattcaaaagacactccgcgcaaaagtcgcctaagggtgcagccggaatagcacaacaagtgtgttaatcagtcttttattcaaaagacactcagcgcaaaattcgcctaagggtgcagccggattagcacaacaagtgcgttaatcagtcttttattcaaaaagacactccacgcaaaagttgcctaagggtgcagccgaaatagcacaacaagtgcgttaatcagtcttttattcaaaaagacactccgcg

SEQ ID NO: 69679 - DNA, 1240 bp, Zea Mays
tgatggtgaagcatggacccattttgatgccattcaccgtgagaaagccaaagaggcttgtaatgtacgtgttgcgcttgccacagatgggttcgatccttatggaatgaccgctgcaccatacacatgttagcccatgtttgttgtctccatcaatctccccctggtatgttttcaaagatagaacatattcgtgtctttgataattcctatacactctgggaataaaatgggcatgtacatggagcctttgattgatgagttgatccatgcttgggaggggtatggatgtatgaccgagctacgaagacaaactaatgcatgtttggcaccagtactccatgcatgacataccggcgtatggactattttgtgcctggtgtgttcacggtaagttcccatgtctagtttgcaaggaagctcttaggttcacttggtggaagaagggtggcaaatatttgtcgttcgataaacatcgacattttctccctctagaccatgcattccatctagacatcaaagaacattacgaaaggtgtcgtagtgacagaccacccacctacaatgatgactggtgccaaagttcgtcaacagatagatgacctcatagccaacccagaagctggttttgtgggatatggtgagcagcatatgtggacacataagttcggcttgactccgctcccctattatgatgacctgctccttccacacaacatgatgtgatgcacactgaaaggaatgtcaccgaggaactttgggcaacaattatggatattcctgattagtcaaaggataacgtaaaggcaagagtggatctggcagcgttatgtgatagaccaaaccaagagatgaagctgccatgtcatggagagacatggagaaggcctaaggcctatttcatcctcagcagggcccaaaggaaggaagtaatgcaatggatcaagatgttgatgttccctaatgggtatgcagctaacctgagtaggggttgaacttatctactttgcgagtcttagggatgaagagtcatgacttccacatttggattgaacgaattcttccagtgatggttcgaggctatgtccctgagcatgtctgtctagcgcttgtagagttgagctatttcttttgccagctttgtgcaaaagagttatctcggaccgtgattgcagacttggaaagaatgacacccgtgttactatgtaagcttgagaagatctttccaatcggcttcttc

SEQ ID NO: 69680 - DNA, 455 bp, Zea Mays
gagagatcctccccaggttgtcgtggtaggtcctccgtagggtcatgtgtagtcgtactcctagtatggcgtagtctgttgctctagctcctgtagcgagtccatcactaacgtctttgtagtggtgtgtgacgggtcccatggatcaatctcatggtgccatcgtacgtggcgtggcttctcctgtcgtcatgagcccttcgtcacatgtcagcgtgcgtaggcgtacattcggtatggcgtgttgtcccgtccttccgatgtacgggtcactgtagagacccctgtgcccattcagcgtgttgtgcgcacgtctagacgtggctcgatggtgacgcgtcccatcgtagctgacgtggatcagtagcgctggactcagatctttgcctcgtcgggttgctcgacggtgagttggtcgttggagagttggtcggccggttcgcctcgcaaagttg

SEQ ID NO: 69681 - DNA, 319 bp, Zea Mays
ccgatgcacggagacccagaagccctttttgcagcttagcagttaagaggccctgccagcacctggtggggaaattatgtggccattcagcttgctggccatcaagtcacctgggacaaatttaagttggcatttcgggagcactacattccagaaggagtgctccatatgaagcaagaagaattcatgaagcttaagcaaggtggtacacagtatctcaacaagttcaatcatttatcccagtacgcaattgaccaggtcaacactgacctgaaaaagaagaactgttttatgaggggccttaatgaccggctacaac

SEQ ID NO: 69682 - DNA, 469 bp, Zea Mays
aaaaaaataaaggtaggcagggaaggagatgtgtggtcaaaaagatagattaatatggttgcagccggctcccagcaaaccgtgtcttgtgaattgtgacgtgccctggaatctagctatgcgacatttaatttagtacccctcggccggcatgcagccatgacgaagtagcttagtagctagccactatgccacgcacacctctatatgcatgcgcatgcatgcagtagtatagtggtacaagcaacccctagatagctaggtactgggtccttattactatgtgcagatgacagtaccttctctagctagagggtaaataaaaaatgatctagcctcagcgcatgcatgcatgccctgtcaggagaaaactaagtataggagctcagcgccatgaatcatggcaccgagctcagccacgtcggtgcaatgtcagcctctcgttgtcagcggagcacgtacatcggcg

SEQ ID NO: 69683 - DNA, 563 bp, Zea Mays
cgagggcgtagcggcgaagggtgaggagtaggtcccgccagcgtgcgtaggacgacgactctggctccaggacgacggggaccatgaggcgaatgttttggacactcccagcctgaaggtgtggagctgagccacgagcgggtcagccgggtcatgccagagcaccgtggtggtggtgcggtgcccggttccgactgtcgggacgccgtacacgacgcccacggtgtcagaggaggtggccccgccgtcgtgggccacaggcaaggcgaggagctgttccgccgtggtaatctgagcagcgatagtgtcggcggcctcgcgctcgcactcccacatgagggccgcttcccgcagacgtgcctgtcgcgccgcgtgctccgcgcgggcagcggtgagtgcaacagcgatgtatccatggtgggagaccggtggaggaggcgactgatcgacggcaggaggctgatcgacgaccagcggaggggggagggtcctccggatctgcaaccccgcgggaaccgcagtcgccacagcagtaagagtagaggcggtgctcgcggcggtga

SEQ ID NO: 69684 - DNA, 430 bp, Zea Mays
gatattcaaaggaaactttgtgatattacttttaccattggttagagggcaaagtttttgtcacccggaaccatgttgtattagagaaagagttcctcaaaagaaagaaaagtaaacaaaagttgtaccataaagaagttcaggatgagtcaatgggacaagatttagtaagtgatgctaatgtagcagaacaagttgagacatctatggcaagataatcaccaccacaaccacgaaggtcagtaaggcttcatgaggcatgaggagaagtgctattgcaagacaatggggaagtgctattgtttgacaacgatgaactcataacatatgtcaaagcgatgatggacctagattccaagaaatggtaagtcgccatgagatgcaagataggttccatgggagacaatcaaatttggaatttggttgaccc

SEQ ID NO: 69685 - DNA, 530 bp, Zea Mays
gaggagtgccgacgaggacaagaatgccagagccccgccaagccaagacttaactccacttccaccaaacaccttgcagcttctaagctccacttccacccccgataagagatctgggagcctctcctttctctctcgactgcttgtaatccctacaacgagtttgatcatcagtggttccggtagtgcaagccaccgatgactggaagtagggacattctgcccgaactagtacaaatcttgcgcccttcgcgcacaccctacggagcctagaacgcgcacaataaaattacttgttggagcgaggtacaaaactgtcagcaatgaggaggagaaggaatcgacccagaggtgtgaagaggctgatcatgtgcaagaagatgatactgagccaagaatagaaaaaagggagcacaagccaaatgtgtgtgtatccagcccagagtgggttaaggcctagcttgggtcacgctgtgtgtgtgtgtccaatgtgagggagctcttgcacgagctgggtaaataagtgtcgt

SEQ ID NO: 69686 - DNA, 518 bp, Zea Mays
tccttggattgctaatgtaatattgtcgtggattttgaaaggatcggggcaggtttgggtggcaaaggctttaaaatcagtttggattgagctgcaccaaattagtttggattcaagtagggctggatctactccttagtattctaggattgaagtggggttagagccggattatgacccattcccagacctaggtacggtgttatgttctgatcgccgaaacctctctaaataccttgttctcgagtacaatctccaattgagtctagttggtagtcgtgttgatcccaagtccatgaacgagtggataagaaagcttgcataacaaagtcccctaaccgaattttactggtggcgcattactgtaccccgactaacaatacaccgtcagagttattccgttattcctatttgaacgcttttggaagatttttttggagttcgtagggcttagggctaaatttgggaatcaagataagagcactacagtacatggatttttattggctcgtattcac

SEQ ID NO: 69687 - DNA, 615 bp, Zea Mays
agaaaatgtcatgtacacatcgttttcatggtttgattgagaaattaaggttctaaaagagaaaaaaagcatagcatagaaacctggagcaaatgccagacaagtagtagaggcaaactccttctgttccctcagaacgtatgtcaacagagcagctgtaccacctcccagtgaatgtccaacaacctaaatagatttgccaattgccatgaacacccatcaattgcaacactttgaaagaaacatgtaaacatagttatgatgcatcataagtcataaaaaggttatgttgtagcaatgctcatactctagcatcaaagacaaagaaaatggctatgaaataactcaaacctttattttgaagtctgggtacatctgcaatgcttgtgccagacaaggccctgagagctttgcaatccacctagcagcggcaaccatcccaaaatgagcatatcctagtactaagtcgctaacaccaccttcctgtacaatggtatggtgaaatggaaccacagcaccagtggcagctgttaatgtatctctgatgctatgagttcccctaattaatagaagtatagactttttgtctctatcaagcaaaatggtgaaagctgg

SEQ ID NO: 69688 - DNA, 971 bp, Zea Mays
gattatttttacactagaaattcaatttcagagtttatttaattaattaatagatcgactggactgcgggtataattagtaaagaagacaaggtctgaagtgaaagatacaggaccaattggtagtactctttcttcactgatggactgtgagttgtttatagataaatgggggtctcttttgcataaacacatggtcgaagggatatggttaagtcttgtccgcctgatcaagcacgagtggtgccgattcaattggtcccccatgcgaatcggtatgcatccttagcccttggatcagcgatccacggtcaatacactgtgtgcgccagcggccatacgatcctagatctacggcgatgaacaagcccgggcgaaacgttaccttaatctaatccggcgcgttcatcaggagatcaacggttaccgtgcatcttcctccacacgcagagaccaggcagtgatgccgacaccatcgcggtggcgccatggccaggactaggcaatgagctcccctagtgaactccatcaaatctaaacagagctacacattactgtgactaaggcgggtaggtctagggcacacatacccgtagttaggacgccgaggtaccccgaccatgggcagggtggatctgtggcggcggaactgctccatcgagaaattcttgaccaccaggttatcatccccccaattgagctacgaacttcatcaaggctccccggtggcacgcccaggccctctgcaaccccttcaaacgacgctaacactggagaaccacggcggcggactccataccgcatggtggttccgatttctccctctgttgtcccatggtaatggtgtttcctgtctaggccttgataataactcaaggagggggtatggggctccgcctttatgcacctggccgtgatgccaatcagagcaagattttggttaggcttgcacgcgatgtgcgcggtctgtta

SEQ ID NO: 69689 - DNA, 1846 bp, Zea Mays
tgattatccccctaacgaacgcactcagagaaataagaaccaaactcctgaagggtgacagccgagccacctacaaaaaaaccaagacatcccttgaggatctcccacctcgagcagggctccacctcacccgaggtcgacaccactcgctcagcctcgcccgaagccgcctcagcccagtccgtctcgcctgagctggcctcaagcgaataggacaaggcactcgaaaacaggtaggggacatgcgcatttaatgcgtgtgccaacccgcgctgtggcagcagagcacagtggcggacaatatagcaatcacgcccggtgtagtgttatgattacgcctacatcacagtgcacgcacgccacctgacgccctccgatgggacgtctaacacgacaagccaagcggacatgccttcgggcataaccgctccgcctcgcccgaccctgggctcaaccctcgggcaagttctccgcctcgcccgagctcagtctcggccaccgactgcaccacgaatcctgtagacagccactacgcccaactgtagcgcacgttgagagacggctcggctagcgcctcgagaagacttctgcatcaaccaagcagggactctgatctcgatgagtgctgtagggaatctcgacgtcatcatgcactaggacgatgatgcgccctgtaagcagcctttagcccataccccaacgctgtttacaaccactacggcatgggcgacctctccctcgggggctcaggcgtatggacaaccgctcggcctcggctctctacgggaagtcagcaggcatgaatctactgcatggttcgccatcacatcagatgccagggcatctctcttttgaatacaagactcagcttcactgtggacgctccccttggtgtataaatagggcagtggtccctccacgggacacggggacacacaaagacaaactctcactttctcactctgtcttagatattggcacttgcctcaatcatctctagggacttggggacttaccctctcccgctgtgcttgtaaacccctactataggcaccacggtgcgagtaatataagcctcatcctctctgctggaagtagggccttgagtagcctgaaccaggataattacttgtgtcatctcgcagaccatctagagccggccacgcgacacatttactagttggttaaggacccatggtccaaacaccgatatttggagcaccaggtaggggatagtcgcgtgaaacactcctagttctcgccagcgctctagatggcagattcccaccacccgctgaggctagggacgatgatcaggttcaggagtcttgagttcatgtctctcggcaacgagtacgatatggtacttctcccgcctgtccctctcgagtgtccaagctcctatcgccgcacttctcaacgcaggaggcaaggttggagcaaccgcaatcgtgcccccacagggcacttcgtgtgtagaaggcaccgctggggctgatgatggcattgagtccctctcaagggacttggccggcatcaatatttcacccggagtgccgccaaccgcacatgcaccaacattcctggcaccacctgccccaacgtgggagtcaccattcccccacaacgtcgagcaaggggcgtcaactacaccagccctcccacccgtgggtcgagaggagacggatgctccctagagagacatggggggacggaggagaaccgtctatattcaaccccatccccttccaaccgaatttcaacactagctacgacgctcatatgtacggcgagctatcgttccccttcgagtgcctagactccaaggaggaagatggcctaggct

SEQ ID NO: 69690 - DNA, 1950 bp, Zea Mays
ggtcgccccggatggccgtgtcctcgtcgccttcctgcagacccactcccgggtttgaggcgtccctcctcctccgccgccgctctttccggttgcgtttgggaggaatggttgtggagttggtggattctcattctccgctggggttttaggaggattccgggctcttggccggggaagcggagatcggaggttctgccaggcgtacggattgggcgctggagctcctgtttgtttggtgggtttctggctttctgctgtcgggctgtagttttcagatgttcttctctttcgttctcggtgtttctgttgcactttatgatgtgtacagagttctgcatcctagaatggttagattttgaatgggccatccttcgttgaggaacttgtgggaacaatgcttggtttttcatgtcaaaaattacattttgtgtgtgtgtgtgggtaagttttcgatgttttcctctttttgttatttgtaaattgtaatcgaacagtgaggcacttggttccaaataacgctgtggatccggcgtagttttttcgtacttgcttgaaaaaaagtggaggtttcgtacaactgctccctttttatatttcctgtcagaattccatgtatatgtttcttttatttggtgctactgtgataaccttgatgatcttagctcgttttcgttctattaaattatgtgttcagaattgaattttggggaaaagcttccacctttcttctgcctttaaaaggagatggctttttcacacgacggaaagatgaaggtatgaattggtgtgcctattgtttcacttttgttcatatcatggtcatgatctttctgacctttctatcattgttcctcttccttctgttctttccaactaaatcttgaatgcatttgcgtagctgtaattaaatggaacatttcacctaaaaagtgttctgctttgtactatagggctgtcagacaaaccttttccggacaaaggataagaaagtcgtcaagatgacagatagtgcaagctgctccacaggttagttcaccttatgtctttcggaaaactgtatcaacactcaatgcagtaataaatggaatatatagctcactagcttactggctaatttcatccgatcaaatgggtaatggctgaagctcaagtcagttggcaaccacaaagatattgtcgattgagcctatgttgactttgtagaactatcgatagctactcttccagtctgtacacaattttgaaatgaaataaagagatcagattgaattcaaatgtctttgcagaactatggatagtcactctttcagtttatacaaaatatcgaaatgaaacgaagagatcgaactgaatccaaatatggtcatatagtactgcacttgatatcttcattacagaagttcaacattttatacataatggacacggtataacttttctagtttattctgaaaccataatagtaaccaattgttccatgttttcttgtttattgtagctaagtatggatcaagcaactcaaaatcaccatcttcatcccccttccggaagctttcaggttgattttatacttgccaattttgcttttgagctaactctactgacagtacaaaactacagatttaatttgtttttcttttgttgtgtgtgtgtgtgtgtgtttttctttggactaaatgaaagcagaagttaggagcatacgtctcaaccattttctaagtcactcttcaaatgctacaaaatatgaacatgtcaggtaagagatttaatgttgcatgttcagttatacatgaaaaccagaacaactccttattctttaccttcttgtttaggatatttgtctccacatggaatgttggaggaaaagcacctactgccgagttgaaactggatgactttcttcctgttgatgaccattcagacatttatgttttagggtaaccagcc

SEQ ID NO: 69691 - DNA, 933 bp, Zea Mays
gattcttgatgcagtttccttctcaagaaagactggatgaaatgattaattttcctgaactgaaaatgaaaatgtctagggctaaaatttcagtatcctcttggagttcacaggctaaaccaaaatccaaactccattcagtgtggattgttgcagaaaatgtgcctgaagaactttagaattatcaggccatttgtgaactgggctccacaattggtgttgtggaagaagtggacattctatccttagatactaaggatattgtgagattcaaagtgcatgttaaaagtgttgcaatgattcccccaattattgaagtgggtgtcaaaccatttctttatgacatatattttaaaattgataatataactgatgaggggtggaatgatgattccataaatctaggtaagagagcttcggtggataggcagggtttgttgatcctttttttgagaaatctagaaaaatggcaaaaaatgttggtgaaaaaactggcatggatgatatgagaaatgcaaacatggagggccccttagctcatggtaaagaatctggtgtccaggctgataagtcagaaggaatggatgttgaaattttttttgaaggtgataaagggtttatggataatctaggtaatgaggaagatggttttaatgaaagtgatgatgatcttttgggttcccaagatttggaagagtttgccaaagatgaagaccatgttctatccccctttcaagagaaggaaaaaatgaatctaagtgccctccaatctgaagacgttagcaaagaagttggggataagaaaggtggttccatggaaggggagcatgtagagggaatccgaaggagcaatagtctggaatccaacgatgagatgaagattgcggataaggctacaacgagagcaatggctaaagacgcgttcatcaacaa

SEQ ID NO: 69692 - DNA, 828 bp, Zea Mays
tgttcaactcgttaggcgataagaaagtaatttccgcctttttatctagttcatcaatcaaatcataatgttgtttcttttccctttttataaaacctgctaaattctttgcccacccccttaaatattgtcgtaaagttctaatcttgttatgccatacttgtatggaagtttctcctctattttcttgttgccaaatagagctaaccatatcatgaagccctctctaataaaccaacataacacaaatttaaactcatagtgatttcccaggtttgtgggggctttgccattaagtaataaaggtgtatggtcagaccgagacctatcaagcgcctggactgtgacattaggaaatttaagttcccattcagggctcattaacaccctatctagcttttcaaaagtgggtggagccaaatcgttcgtccaaataaattgtcgtcccaccatttctatttcccgcaattctaaattttctgtgatagagttaaactaattaggccatcgataattaaaattttcattacttttgtcttctgctcttcgcataatattaaaatcccacctatgataaaagggtgtgtttcagcaccacacacgcttgcaaattcagctaagaaatcgtttttaagtcatcttgagctggcacataaacaacaaaaagggcccaaatgatgccatcttctttatttcgaagtcagaacttacaataaaaatctccctcgtctatagctccgatgtcatagacacccggattcacgcctaacatcatccctcctgacctccctcttggtggcattaggtgccaaagagaatcaacaccac

SEQ ID NO: 69693 - DNA, 617 bp, Zea Mays
cgttggttgtccggtccattcggctaggctagcttccgtcgctgtctgtcggtgttgtcagtggcctcgtcaccgtctttatttatttccttcaaagaaacccatcgtcagacagcagacaaactggctgtttgggcattactacaagcacgcataatctggtgctcggtagtcggtagagagagagagagagacgatagaggaggaggagagagagaggggcaactttcagatggtttgtgtttagcgtgaagtacaagagtagagcgtagcaggtatcatcaaccagccccatggacaaaggagccgaatggaacgatcataacaccacgtgtcctttcagaaagcaaatcataacatttatagcacaccataccaaatgatggaagggcttgggtgctcctggccgcaatgcaagcttggaatgatagatcggtcgatcagattaaatatgcttacctttctttcgactgtttagcaggtaataaagatgctgttttggctgcacaaggggtacaggactgtttgcaggcaggtaatctttttattaaagggccgtagcaaccttaccgaattgttccggtgctctgaaccgggaacaaggaacagaaacagat

SEQ ID NO: 69694 - DNA, 352 bp, Zea Mays
tcctcctcttgttctctcctatattagtgtcagcagctcctccacctaaccgaatgtagcggtagccaccatttccctgctctttcctcccactaaccaaatccatatgttcctgcttcctccataaatgccgacagtttctctcgccattgtttgttacaacgtcttcaccggcgacctctctgtttctcttccccacgacgtccgggctcccttcgtctcactataaaaggcatgccctcgacctcgccaatgcccgttttttgtaccctttccctagctcgtgcccttgcatgctgcacgttgcgtcgcgctgttgctgttccctgttccctgttcgcctctgctcctc

SEQ ID NO: 69695 - DNA, 506 bp, Zea Mays
caaggaactgagacacgagggttatactagttcagaccgagactctagtctagtgcaatgctgatcgttgtattgctttggaatgtattacaacaagtgtgtttatgtccctagaggaaagagggcctgcccttttatagctcaagggttggaccttacagaggatatctgttttctacgagagagataggatcctctaggttgtcgtgtgggctctccgtagggtcgtgtgtagccttacttcggtatggcgtatcgtctcgctcgttcgtcatacgaacccctgtagttagtccgtcgctgacaccttcgtagtagtgcgtggtgggtcccgtgggtcagtcccatggtgcggttgtgtgtggcgtggctctgtctgtcgtcataggcctgcgtcaaccgctggtgtgcgtttgcatacaccctggtatggtttatctgttgcgttctttcgggcatgcgggtcactgtagagactttagcgttgaggcccttacgaccggggt

SEQ ID NO: 69696 - DNA, 487 bp, Zea Mays
gaaccaccggcctcatgctcatgggaacaaggtggcataggagatggtgggggcggtggtggtatcctgagatcctcaacatctgaatcaaaagaagtatcgacaatggtaccttgatcctcgaactagcgaattgcctcatcctcatctctgagctcaggtgccaaaggatccactgtagcagaagctggagctatgtcctcagaagccgggcggtaggatctaaatgaaagtctagtggtgtcgagaacagactgaactgaggaggtcggatcagttgcacaaagatatgacagaggtagtgtgcatagagcagctgatgccgacctcgaagtccatccaacgttgtgtcctcaatcccacagatcatgaagtcgatgacgtcgaacacagagtgggaaaccaaagcgtcgaggagccaacgttgaatatgagtggtagcctctctatagcccatcctcggtagaagtgtgcacctcatccaggg

SEQ ID NO: 69697 - DNA, 513 bp, Zea Mays
gtgaccaccatggcgatgatcgtgcgaccacgtcgctacgcaagtgggtacgacgaactgagcagtaacagtgcccaagctcatccccacgccgagatattttaccgcaagctgttatccgcgtgccattgggcatgaatcgcagtgccggtgtggatagcggcgcgggttcaccgacggcgagattcactgaatctatgatcttcaggtcactgtaccatggaaacctccttcaatgcgcctgacaaagcgagttagagggcttcgttctccatttttcatgtggaaagctaccaatccatcagtagcaaagttgttgctctacataccaactttgtttttcttataaagatcttgatcaaatactcactggatcatgcgaaattcgacccccaaagttcatcagagcacactgacagtcgagtttcagtctgtgatttgactaactgtccaacttcaggtctattttctccaatttttaggtagctctagggtttaaccacttgataaaac

SEQ ID NO: 69698 - DNA, 427 bp, Zea Mays
caagcgtgtaacacccctggtgttactgctactaaaacttgagcatggcatcataagcattggcattgcatatgtttgacacacctagagtgcattcactaggcaaaaatttcaaacaagttgtattgttttagtgttttgcaaatagaaccctggatagggaacttaaccctaaatagagattaaaggggtaagacctaacccaaattgagaaaacctaaaggctttagggaaagagtcataaaatgtccccaaaaacaaagttgaatcccatttatacccctgggataccaaaaaccctaattgaaaccctggaaaaccctaaaaccaaaccctaggggcctatgtgcaaaaatagtgcacttgtgaactaaagtgcaaaaaccatgttaaataagtatcttaagtactatggttcacaaatatg

SEQ ID NO: 69699 - DNA, 537 bp, Zea Mays
ggctttagtagcctagaatattggaccttaggtccagtgcatcggacccactacagggaactggccgctctcagccttagaagaaaaatcactggacctctagggtgcaacgactacttcggggagtattgatcgacacaatgactagttgatgtggccctcggtccagtggtgcacctgattagtctgatgccagctagagaaggaagacgccaataagaatcttgaaagagatgctacatgactcagtctagtggtgcacccgatcggtccagtggacccgcagataacaagtattctaatttgcagcaacaactatttgaggcttggcggctataagaggacccctccacgccctcgataggaacacccaagtaccaagcaagttgcaaacaagtgcatactcatatcctagccctctatagtgtattcttttgtagatcaagtgattagagtgtgttctagtcatagagagaggcatgtgggctatagtgctgctgtgtgaaaaaagctagtatgatcttgagcaagtatttg

SEQ ID NO: 69700 - DNA, 705 bp, Zea Mays
gcacaagtgtacatggtggagtagaccgtgttgaccaagctgagacggtgatcaatcaagtcaagcggaggtgcaggaggacttggtgatcgggcggtcgaggactagtggtgacacaagtcgagatcgtggagggggcatataggatacgctacacatgaggggtttgctggtatgggcctcaaaaccaccggacagacggtttctcggggttgggcctaaaaacaccggtggagttccgacaggaattgtaggtagcacgaggcatcatcctgaagcttgcgtcgatgcgaagcaaagtcgtgaagagcacgtggccatcagatatatagatcttgagttggaccctaagatactaagaacgtgaaacatgcctacgctccccctaccgagaactttatcccaaaacgtgaaacgagaacgtcgtcccgaatcccgattggggcccgaacgtcgaatccaaagggatcaacgtagaataggaccattgtcctaatccttagtggaactccctcttgcagggttagcatagaaaacctccgtgagggttgaatcaaagcaatctttcctctgaaattcatagctcatgtgtttgctttgatttcggatttgtttttttccttccccttctcttctctgttttgattgatcttgcgttgcaacaagtttggggtggtttgattgcatggatacttgttaggacac

SEQ ID NO: 69701 - DNA, 694 bp, Zea Mays
ccaaagtagattcaacttccataactgttacttccatactattgagcattccaaggttgagttgttccatctcccagcacaattcctgtgacatcaaatgagtagtgatgttgttcacttgttctttatggctcaaagcatcagccactacatttgctttacctgggtgatattttatttccaaatcatagtccttgatcaactcaagccatcttctctgtcttaggttgagttatttctgcgtaaagatgtatttcaagcttttgtgatttgtgaagattttacacttgtttccaatcatgtagtgcctccaaatcttcaaagcgtgcactacggcagctaattccaaatcatgtataggataattcttctcatgcttccgtaactgccttgaagcttaggcaatcacttttccttcttgcattaacaaacatccaagtcctagatgtgatgcatcacaatacagatcaaatcctttatgaatatcaagcataattaacactggtgatgtggttagcctttcctttaattcctcgaaacatttctgacatgcttcatcccacttaaactctttacctttctccaacagcgaagtaaggggtttcactattttggagaagccttcgataaatcttctgtagtattctgctaatccaagaaaactcctgatcttggacacatctgtgggttgttt

SEQ ID NO: 69702 - DNA, 700 bp, Zea Mays
tctaatatttgtggtgggcattcaaccaccaaaattattattgggaaaaaggttaaccctatttccctttcattcatgtcagctatgatggaacgcgtcaccatcaagtcatgtccggatatgtgcacatcacaccaaatgggcacaggggtctctacaatgacttgtacatcagaaggacaaagcagcgcgccacaccaagcgtgctcgtgctcacgctggcaggtgacgaagggcccatgacgaccggagaagccacaccacgcacgaccacactttgagtccgtggaactaattacaaagacgtcagcgttagacttgttataagagccagagcaacgagaaaggacgacgccatgccaagagtacgtctacgcacgaccctacgaaggaccaaccacgccaacccgacgagcagatctatctctctctccaatagaatacaagtcccactataaggtcctacccttgagatataaaaggaaggtccccctccttctcctagacacgaagacaccaattgtaacaggccctcaacaatactacaatcagcactacactgaactaggatgcaaacctgaaccaatataacccaccatatcaaacccattgcttgagtccaagtgactcactattagagtgagtctgcgctagcatccccaccaaacacaaatcttattgtcccctggtttcggaatcc

SEQ ID NO: 69703 - DNA, 618 bp, Zea Mays
ctttacaattgcaaccttgtaaaggcaatagtagtgttggtacctgatcaacatggaaatttgatcctaatgatcgtagaaaacattttgctgaaatgataatagaagatgaacaaccttttatcttatttgagggacctagccttagaatatttttggccaaagcatgcccacgatttgttttgccctcgagaaggacaaccactagagcttgtattgaagtgtatgatgtccaaaaaagaaaagttgaagaaactttttaaagaacattgtgagagaattagcccaactactgatatacattgacatccaataccaaccaaaactatgtatgtgtgcaaaacattgtattgataatgattggaagctccataagaaaagtattatttttagttaagggtcataggggtgaagatattgggaagtatttgcagaattgtttggtagcatggggtattgagaagggttttacaataacagtagacaatactagtgcaaatagtaatgcagttaagtacatgaagagggttgaatgaatcaaaagtttgcacagctgaaggagaatatctgcatatgagatatgttgcccacattataaacttaatagtcattgaaggt

SEQ ID NO: 69704 - DNA, 490 bp, Zea Mays
gaatattgtaaagcgcgggagctaactcgcaaagattcctaagactcaggcaacagtaactacggactgcgggttagttctataaaaacagaggggttcttatgagattttgtcccacgaaggggtatcgtaggattctggtcgttggatcacgcgccgagggcacggattagattggatctcggttgtaccggtacgcgcccagggccgcccgatctagatccaatgacaaggatttaatgagtcgatgatttaacattcatcactagatcacgaatctacggctgaaatcgtcctagtcgaaacgttacacaacatctactctcgtccgatcatcctgagatcaatggcccacgctagtttaaacctagaccgtccgataagaaatgacgacaactgttccatcctgtccacggtggtgcccaacgactgtgcacatgccgcccgcggcggtcgccattaccgagctggccgaaacggtgcccctggc

SEQ ID NO: 69705 - DNA, 624 bp, Zea Mays
gatggtgattcagtgtatgcgcttgccctatagcaagccatgatcgaggagattgatcgagctcacactcaacacgtcgacgtgcacgcacgcctgcagctactcttgactcgcattaagggagcttctagttgctctcagatcagagaaggggaggggggaacactatcaagggcattaatgccacgcatggatgctgcattaattgtacttaaaaatagagcagcggagcatcgtgtttctaatcttacagacaagccaagaacaggcagctaaagaacagcagggaattgcccccggcgcctgcttagccagcatcaaagccaggaattaacagcatccgaagcacattgtcccgctattttaatcccgagctaagcacttgacagcatccctaatctgatctgcgcctcgaccgccaagctaacttcctcgcgcatttaatgcagctgtgcaaatcctccttggccccccatgtgcactgcgtcaccagtcgcgtatataaaaccacacaccatggtggcgccaacgaaacacacacactcctccagaacgaacacacaccagacgtctgttggcgcgttggagagtacacagctcgcagtgcagagcagccacttcctt

SEQ ID NO: 69706 - DNA, 693 bp, Zea Mays
gtgtctcagtgtcgcgcgcatgggcggtgccatcatgagcagtcgttacctcggacaggacgcacatgggtcattcgcattaactccaccgcacataagcatggccgaccctacatacgttagcataccagacttcacttcatagtcgactcgagccggcagacaaggtgaaggcacatctggtcagaaaatccgcacaacgacagagagggaagatatccatctaccacaacatttaaggctccatgatgtacattacttaacactagttcgttgggcccatctgtcggggctcagcacctatgtatgtgcccccttggactataaaagggagggcacatgggatgcaaaagggacatttggactcttacgcagacttctccatactcaagcaatacaactcgcaatggagtagggtattacgctctggcagctcaaaccactctaaaacccttatgttcttgtgttcttgcatctccacaggtaaaccctaggttgccccttattcttaggattaggtgggtgtattccaccacccgactggagtttactctccgacatttgacgcgccatatgggggcatttagcttaggttttctgcatgttttctctgcttgacatgatggtgcgaattgtcaagcatctcaactcttcctactccaatgacattcagatggggtagggagtggtatc

SEQ ID NO: 69707 - DNA, 1002 bp, Zea Mays
cgataaccaaagaataagatagagacatttttgcattccatcatgagaagctaaccagtttgtacatatatataatgttcagccagcaaacatgcatcatgagaaggtatacctggtgcaacttcccacccgagttttgaattaaaaaacgaaacaacaacgaaacttaaatcctaggcaagtaaccagagaaatatattcatccaacatatatgatgatctgtgctaagtgcgcgtggtatgatgcaatcttatgagtatgcgtggttagtgactgtgattttcacatctatatcaattgcttgccccacaaatgatcagccagggtcaggtaaaccatattgtgtaaccatcactataacactgcaatcattttctaaatagtacttttataaatcacaaaccaaaggtataaatacaaaagtctagaaaattataaaaaaccttcatgaagctggcttcatcgtagtaccaaaatagcagtaccaagtgagaaaaatagcagtaatttgctgtctggtggtaagcgtgaagattgagattgcaacacaaataaacactacctcttatttgcatgtgtcccaagattgcaaccagatttttacaaataaacactatgcaccaaatgcaccagacaaatgtacatttgtgtgaaacagactacaagaaacaactgaaacaagcacattcggtgactcgctggacgcaccatttcacattaacagaagcagaattatcagtcaaagcacacattatagtctgaacctctccaaaccgcctcatgttggctcaagtccaggttccccctaaacctcccctcataacaaaaacaggagataaggagaattgagagagctaagagttcgtgacgatcaattttagaataccagcttataatcttcttcatatttgtattcacagagtattgcgcactgatcagaacctctctaaaattgttatcctgttgtttcccgatcgtatccaaattcaacacaccagtgg

SEQ ID NO: 69708 - DNA, 464 bp, Zea Mays
catccgaaaggaggtccggaagctgctagacgctggcttcatcgaagaggttcatcacccagtgtggctggccaacccagtcaccgtccctaaggcgaatgggaagcttcgaatgtgcatcgactacacgagcctgaataaggcctgtcccaaggacccgtatccacttccacgtatagatcaaatcgtggattctacctctgggtgcgacctattgtcattcttagatgcttactctggtttccatcaaatccagatgtctagggaagataggaagcataccgcttttgtaacagtggacaggctttactgctatgttgttatgccttacggtctgaaaaacgccttgccaacatttgtgcgggcgatgagtaagactttcgaggacctaattagggacaaagtggaagtctacgtcgatgacatcatggtcaagactaagagagggtcgaccctagtggaag

SEQ ID NO: 69709 - DNA, 528 bp, Zea Mays
aatgatgttaagtttaaatgtcccccaagtgcaatgaagcttttgagcagccggagaagctattgaccattgcactagtgctggctcaaccaaacattgagtagtcgtttgacgtgtattgtgacgcgtcaggcattggcattgggtgtgtcctaatgcaagaaggccgagttatagcttatgcctcaagaaaactacgacgccatgaggagcattacccgactcatgattaggagttggcaacagtagttcatgccataaaaatctgtcatcactatctactgggtaatgtatgccatatttacactgatcataagagcctaaaacatatttttacccaatcagaatttaatatgaggcaaagaagatggcttgagctaataaaggattatgatttggagatttattatcaccctagaaaggctaacatagtggccgatgctttaagtcgcaaagcatcttgtcacggccttactacaaagttgttcaacactaccttatgcttagaaatggaaatactaaatctga

SEQ ID NO: 69710 - DNA, 513 bp, Zea Mays
ccctggtgaaatatgttgtttggttgtcatatcatctgcagtacgtgtctgaagaatataaatgttatgattgtctggctatgtttaagctaaacattcttgctaaataccacatgttgtccttgactttgtgtttctcttttgcgagtttccatgatcaacatcgattccgccagcttaaacatgatataagaaaaaggaaacaaatggatacacatgaaaggtctacattggttcctccagcttaaacatgatataagaaaaaggaaacaaatgtatagttgtatacacttgaaaggaacatgaaaaccacctgggaaggcttttcctgtaacatgtagaccagcatggtgaccttgcttgaatattgtatactagaattagtgtttcctattctatgggaagctatcaagtgcaaatgcaccatgaagggaaccataaaaactttctcagtttgggtgcaaatcaatatgaaaagatcccagtggttcccttgaagcctttgatcgtgtc

SEQ ID NO: 69711 - DNA, 388 bp, Zea Mays
ttcaacagtctacggcggtaccgatggaagcttaatcccgaaaaatgtgttttcggggtaccagcaggaaagttactcggatttattgtcagccaccggggaattgaggctaatcctgataagatcgaagctatcatgaaaatggaagcaccacaatcacaaaagaaggttcagcgtcttattggatgtatggcagctctgagcagattcatatccaggctgggagaaaaaggtttaccattttacaagctactcaagaaagtggataagtttcagtggactttggaagcacaggaagctctagatgcactgaagaaattcttgacgacaccaccagtactgaagccgcctcgacgagccacgtcaactcaaccagctgaagatctgc

SEQ ID NO: 69712 - DNA, 308 bp, Zea Mays
tgttgtgcattgtgcatattctcaatgacatagtggtatctattgtgcattggatagcctacatcgaacatgatcgatattatcactggacgtgtttgattcctatatggtttcataaacatgcttccctattcatgtatctagtgtgacattcgatggcccaccaaaaatgttcagtgcactggtgaggagtgcctttaccccctctatcacgtggatctggtctctatttcttatttgttctctcaagcttttgtactcatatgtcgctctagctcctttgtgtgcatcgagcttatcctcatcgc

SEQ ID NO: 69713 - DNA, 606 bp, Zea Mays
ctcacatctctccgatgatagaatctcttgaagacagtaacctattaagccatgacacttcgttctgagaaaccttcaactcgtctctatggcggtcaagctccaacatagtaaaatgaagactcctctccaaagtagtaagggagtcgcaggcatcacggtacagtttgtctagactgtctcaagaatcaagaagtcttcgcatctccttatatagacaagaagaacactaagcatccaagcaaaagcgcaacacaaaggtattgtgaacaatcaaaagaatttacctcgtgggctctcttctttgaatcaagctgagcattcaaggaagagttcattgttcgagcaccatccaggaatgcagaaacctaattcagatcgacttgactcttaacacacctctcctcagcgtcgaaacaccatcaagttagagataggagggcaagaggaaaagatacagggggtaaaacgagggagcaatgaacaccaaagaaagttctcaacccactaaccaatgttcaaggctttcaggtcatctatctgtttttgaagcaggagaggattccactgcagcaaagatgatcgcggacaggggcaccgcatgac

SEQ ID NO: 69714 - DNA, 506 bp, Zea Mays
ttgctgcgcacaggagtctgcctgatgtggaaaaatagacccattttctgatgcgagctgttgccgacgattctaagattgaggctgttctcggtatgttggctagagagtcatccgagtctgtgtgggttaacttggggtggtgttcccgagcactcgagtgcattgagaaaaagagttaacggtcccgaaggtgcccatcgcaagcgagcatgccaaatggactcttaggctgagtttgtcgaggtaaataataagaagaaaaggcttcgtcgctcgtcagacctagagccaatgactgcccctatcatgtcgagccttaacaacaacgtaatgaatgttgatctggaggatgttgtggtgggctgcagtggtgtgagggctagcaggtacgtggtggaagaaggggatgacgatgatgttgaagaaatgctcccctggtccggtaggaatggcaaagtaaagctatcggcgatacttcaagccttgcttccgctgggataatg

SEQ ID NO: 69715 - DNA, 402 bp, Zea Mays
actataatgaaaatgaaaattactgagctgacataaactggaataaacgtatgtggaatcaagtgtcgtaaactggcataaaattactgagctgacattactgatccgaatcaagtgtcataaatatgcttgcaaactggcataaccgtatgtggaatgtatcataagcaattaacagttatgtaacagactgaatgtacatctacttagcatacatgtatgtgcgaatatgcataacactgctttgtgtaatgcataactataatgaaaatgaaaattactgagctgacatgttcagatggagtctgatcaaagcatggaccactgtcggggagatctgtttctgccgcttgttggacgccgccgggaaactaacaaatatggtataaatggattagatgt

SEQ ID NO: 69716 - DNA, 699 bp, Zea Mays
attctatgacactttctacccaataatggtcttccccattgcagtgtttgacatatttcaatctgtagcatgtatgcatctctggtgcacactgccgcaccccgacccgcatgcacaggaagcctctgtgcttcagcccacctctagtcaaaaccacggcacaacagctcctccacccaaagctgtcacaaactcacaacgtagctcagatgtactcaatgccaaagtcgggtgcctcagctcagatctactcaacgccaaaggcagcatcgagagatgattctggagctcagatagctcaaatcagaaggatctcttcatgcccaaatcgcaaccctcccacccacacacacaaaactaactgtacaaaataaagctccacctcacccaaatcacctttatgatgtagatctgggcagaattgaactccctacccaaaatagagcaacaagctatcaaatagcacattgagtactctgccaccaagcaagcaaatcgcagcaacagctgaggctgaatcgaatttgagaaacaacacagatttggtatggtcgaacaaatccaaggccagatggatctgcacttcgggtggcataggaggtgaggggcagtgacaagaagagacttggacaagagagcaccatgaagtaggcatgagtgaagacaaacctagtttagggtcagcttgaggtggccata

SEQ ID NO: 69717 - DNA, 827 bp, Zea Mays
cactagttcatcggcaccgtcgcctttgaggtcgaggtagagagggggaggaaaggaggagccggagaacgagcaccagagcactagttcttcggctgctcggtgactcggcatcagcgtctctaactccgagttgggtgtaccgagagggaggaggattggaggactggaggagagtagaggaccacaggtcgacggaggcggtggagtggtgaagctccggtgtggcggaaataccgaggacggaggcgcgacggaaggttcgcgagaggagagctagagaggcaccatctgaattcatgaatgcgtgtgtggtgtggacgataggacgaggagggtgctagggtttacagcggtggtgccgttatttttactgggccgattttgaagcatggttatcatcgacccgtgtctaggtcagcccaacgagccaaagtcgctgccgagcacggcacgcgctccatgtcgtgctaagctcaggcccgttaccagtcataccgggccgaaataacgggctccgtgccgggctaacaggccgcaggctttctggtcatctatagctgtagtggttggaggtgagtgttctctttctagagacatggttcaaagtcctgttgtatattagtaaagattattagcccccaagttatgacatagcatttgaaaaatttaaacaatctgaacaaaatcaccaatgtctacattatttaccgaatgccacaatagtattgaaaatcgtgaaatttgggctaaaattctgaacactaatttgcaccaaactcatagccccaaccgtccaatataattgcagtaaagaaacaggaaaa

SEQ ID NO: 69718 - DNA, 434 bp, Zea Mays
acaagttctatctttcattatctcttgtcctagttttttattggcgtgtttggttgtccgcgggtgctcagctaggttgtctgtgtgcattgaccaagcaccagcttgtgtttggtagcgtgaatacggagggcgtggattgcatccgcgggtgcagaacaggcttaaaaagaccctttagctgcatgcgtggagaagctcaggtttgccgtatctgacgggccagacttgcgtgagccagcttcggtctgtgcaccaaaccaatcagtgcctatataacttgtcagagccatcaagtgaatagaacttctctcttcttctctcacttacttggtttgttattaaactaattattcatttagaccaattttgtgtttaaagttgtgttttacatgcatcacctattcaccccttctaggtgacctttaatttgg

SEQ ID NO: 69719 - DNA, 470 bp, Zea Mays
ttcacgaatgagttcaaataaattctccatcctacactctctatttcttaaccttctttctattctcagacattttcttctatatgctaaccccatgaacaaccagacataatagtacgtgacaaggagagaactcaagatacccctaaatgccatattccttcgtcgagttcttgaggataaatctggaggtcaacaaatgagtttcatataaatctggatatcattgtgcacatcaaataaattaaacagagcatagaggactcagaagaaaatgacattcggagtggtcacgatagtaccaccagctaaatccgaagcaaaacaagttacacaagtttcagatcctgctataaagtttcagatcctactataaattaaacagagctgaagagagaagagcctgccattttgcaaaactcttccatcctagccagatactggtactgacatttgagcttgccttgtca

SEQ ID NO: 69720 - DNA, 414 bp, Zea Mays
gtcgtttgaatgattgaggcgactagggttctagagagtcgcccctgaacggtcgcggaccgtctggacctgtggcgcggacagtccggccctctagcgcagacagtccggaccctgacagagaattgcacttccttgctctatgattgtggtattatcaactattcacctatggatgtttctcacatttattgcagtggtctgggtggtcttcgaaagaagcttgccggtcgcttcaaatcaaagcgccctcgtgcagacgatgctgactacactccaaccactgactcagaggcccaatcctcagctggggcagtgaatctatggacacagaagacattccgcatacccatcctgactatccaattgacatcacatgatggacatttataaagaggaggttctctatggcag

SEQ ID NO: 69721 - DNA, 464 bp, Zea Mays
ataactccctttatcagtcttacctctttgaaattcaactgagttgacacttctcttgtagatggttcgcactctccaaaccacccgcatcaacaccagctacgcccctcagccccggctgatcccggtctacccagtggtagtcgaggaagctccagcgaatctccctcccgtccgagtggagaacgtgatcaacctggaggacagctcggaggagcagctgccgacccccaccccgttggccgagtccctggccttcgcagctgggtcatcgacgtcagcatcgtcggcaccagcctttcaagcacttgcacctggaggcgacgaccccgacgactccggagacggcgatggcgaggatgacgacgacgacgacgatggagaggatgagcacgtcaaccaggaagctgactacgcccagcaggaccacttcatggggattggtccagttgtcgaacattaca

SEQ ID NO: 69722 - DNA, 886 bp, Zea Mays
cttcaagaagatgattgaccttggccctctggaagatacgaacttcttcctctctcaaaatattggcaagcctatcattggcaaaagatttagactccaactcgttaggcgataagcaagtaaactccgcctttttatcaagatcatcaatcattttcaaaagatgttgtttctccttttttactaaccccgctgagttctttgcccacccccttaaatattgtcgaagggacctaatcttgttttgccatatctgaatggcggtttcacctctcttatggagtgatatgactgatagattaatgactgatagattaatgagcacaaagttaagaaagattacaagctcaagaatcaagtgagcgccatgaccttctaactctcccttcccattctagtaaatttctaacctagtgacccctagttcacctttatatatgcatagatgttcactcttttagatcatatggagtgacctggccttttctcagagttcttttggtcctaaaagttcgagcctaacgatccctagttcacctttatactcttttagatcatatggagtgatatgacttcaatcgttactatgccatctttttatggaccaaggggaagagagatttacgtagcagtcagattatgagcccaatcaactaagacccaacaaacccaaatcttatccggatcgtggagtcatacgcaaagccaagaagagagatttacatactagttatatcatggccacggatccagtcaactaagaccaaacaaacccaaatcttattatgatcatgatgtcatacatagagccaacgagagatttacatgccattcagatcatgggtccagtcatctaagacccagcaaactcaactcttatcttgat

SEQ ID NO: 69723 - DNA, 699 bp, Zea Mays
tagaaattcttctggcaaaacattgtttgccgattcggagtcccgtccgaactcacagttgacaacaacaaacagtttgatagccaggacttcagggacttctgcttctccattggcaccaagcttgccttcgcctcagtatatcacccacaatctaatgacgttgtggagcgcgccaacggcaaaattttcacggccatcaagaaaatgcttctcgacgacaagtagggtaaatgggtcgacctgctacctgaagcagtctgggcactgaacacgaccgagtgccgggcgactggattcactcccttccgcctactatatggatcggaggccatgatcccgcaggaaataaaacatgggtcaccactgacaagcgctttagccgtccccgacatagacgaaccaactaccaaggacctcatcgacggagaccgtgtcttcgccctgcaggccctcaacaaataccaagctcaaacaaaggcatggcgcgaccacacagttgtcccaagagaattcaatgaaggggacctcgtacttgtccagacaacttggacagagtcacggggcaagctggagccaaagtgggagggtcccttcatcgtcaagacgaaggcatcccccagtgcgtacaggctaacaacgccatccggcgaggacctagagcattcctggaatattgataatcttcgtaaatttttt

SEQ ID NO: 69724 - DNA, 697 bp, Zea Mays
caaaaaagaacgaaacaaatactgttgcgtggaagaatacatgacaaacatgcaagaaacatacagatctcattataaattcagcaaggaacgttttttaaaaaaaagtacacatgcaacaacttcaaagatgggccttaaattttcaagagtagttcttctcaaagcaaaaactgcacaaatcctgattaaagtgtctatgcaccttaggttgtctccatcagcttatccatcttatctcttatcccatcctcaatttcaaaacccactatgtgaaccgtgaagtctatagtgcaaaacaatattttgtacgaccatatatatgatccggagacagccttaaagaattctatcggaaagaccagcttctgatctatgtatgtgattcaaaatgtgtcctccttgttttatgctaacccagagcagcatcaactttgatgacggattcgaagcctgatccagtgatcccagatacaaattccaaatcatcgttcacttttaaaagaaagttatacacgggtcaggggaagagtcagtctgccacaagaaaagatgatgattctctagcgcatgatgtgcatcctggcttttacccaataatgattctcactgatgggttagaaagttggtatgcacaagtagaaaaaagaggtggtgttgattcaggtaatactgacgtgataaagggaaacaggga

SEQ ID NO: 69725 - DNA, 2383 bp, Zea Mays
ataaggtttaaaaaactggtgttgcatagaatttaaggttcaaagaagaaactatataaacaaaataaacaaaaatagcgctaagttcttgttgatcgaaacaaaaatgtgagtataccttatagaatgtcgattttgggcagatgcgccaggaaaggggaggggttaggcggtaactccggctaagagctaaggctcactggttcgtcaagctcaccaatcgtcagggatgagtcgcattgtcacgaagagtgagatcgggcttgcaaggcgagccggcatcacggcgacgacaaggaggacggggcatcatgaagggagtggggtcgggcggcatcatccgtcggtagtgagatcgggcttgcaaggcgagccggcatcacggcgacgacaatgaggacgggggcaccaggaagggagtggggttgggcagcatcatccgtcgggagtgagatcggtcttgcaaggcgagccggcatcacgacgacgacaaggaagacggggcaccaggaagggagtggggtcggacagcatcatccgtcgggagtgagatcgggcttgcaaggcgagccagcatcacggcgatgacaaggaggacggggcaccatgaagggagtggggtcgggcagcatcatccgtcgggagtaagatcgggcttgcaaggcgagccggcatcacggcgatgacaaggaggatggggcaccatgaagggagtggggtcgggcagcatcatccgttgggagtgagatcgggcttgcaaggcaagccggcatcacggcgatgacaaggaggacggggcaccatgaagggagtggggtcgggcaacatcatccgtcgggagtgagatcgggcttgcaaggcgagccggcatcacagcaacgacaaggaagacagggcaccaggaagggagtggggtcgggcggcatcatccgtcgggagtgagatcgggcttgcaaggcgagctagcatcacggcgacgacaaggaagacggggcaccaggaagggagtggggtcgggcggcatcatccgtcgggagtgagatcgggcttggaaggcgagccggcatcacggcgacgacaaggaggacgcgggcaccatgaagggagtggggtcgggcggcataatccgtcgggagtgagatcgggcttggaaggcgagccggcatcacggcgacggcaaggaagacggggcaccaggaagggagtggggtcgggctgcatcatccgtcgggagtgagatcgggcttgcaaggcgagccggcatcacggcgacgacaaggaggacggggcaccaggaagggagtggggtcgtgcagcatcatccgtcgggagtgagatcgggcttgcaaggcgagccggcatcacggcgacgacaatgaggacagggcaccaggaagggagtggggtcgggcggcatcatccgtctggagtgagatcgggcttgcaaggcgagccggcatcacggcgacgacaaggaggacggggcaccatgaagggagtggggtcgggcggcatcatccatcgggagtgagatcatgcttgcaaggcgatccggcatcacgacaacgacaaggaggacggggcaccatgaagggagtggggtcaggcgacatcatccgtctggagtgagatcgggcttgcaaggcgagccggcatcacagcgacgacaaggaggacggggcaccatgaagggagtggggtcgggcggcatcatctgtcgggagtgagatcgggcttgcaaggcgagtcggcatcacggcgacaacaaggaggacgggacaccatgaagggagtggggtcgggcggcagcatccgtcaagagtgagatcgggcttgcaaggcgagccggcatcacggcgacgacaaggaggacggggcaccatgaagggagtggggtcgggcggcatcatccatcgggagtgagatcatgcttgcaaggcgatccggcatcacgacaacgacaaggaggacggggcaccatgaagggagtggggtcgggcggcatcattcgtcgggagtgagatcgggcttgcaaggcgagccggcatcatggcaacaacaaggaggacgggggcaccaggaagggagtggggttgggcagcatcatccatcggcagtgagatcgggcttgcaaggcgagccggcatcacgacgacgacaaggaagatagggcaccaggaagggagtggggtcgggcaacatcatccattgggaaggcgacaactgtggacggtgtcgggaatagggcatctgtgtggaccagcttcggctgcgttagaaagaatgaggcctaatagattggtgcaaagactggactaaggaggagggcaagagtctagatgactgagcctatccgacgtggaggttcataacatgacttttt

SEQ ID NO: 69726 - DNA, 364 bp, Zea Mays
cttagaagcactacaagatgatcaagctaggattgcggaacttgaagcgaaatttgccagaagaaaccctttcgaagctatcgacgatgccctattctttgtcttatccccactccgcaagaagttttgttatggatcccctggatctattatttgacttcttgattaggttgataggatagttttatgttattaagtttttcgactagattggtaaggacgatgttatattatattatagtggttttctaatccataatatcgctataaaacccttgacttcttatacttttgttttcttgccattgtcatccttggacaatatctaccttgatatattaaacttttgtctctctacttttct

SEQ ID NO: 69727 - DNA, 1369 bp, Zea Mays
tgattttcgatcaccgcaaggagagggccaaacacgacaaagagcctgatggaggcaccaacggatagcccaacaaaagaaaatacggagaggtagcgtcatgacgatatgctagtacccgcaatgggccagaaagggaggaagcctctgtccgaatgagcatttcaagaagatgctcgaggctccatgcctaaaccaccgctaccatatccggcacgcctacaaagattgtgggctactcaggaagttcctaagcaaggaggtgtcatctaggagggccactgagccccaagagatggaggacaggaaagaaaaggcttggtttccctgacaaaatgaaatgtttgctaatctttggcgggactgactactatgcatcaaatagacacctgttgctcaaacgacgtgaagtattacaggttcagcaggcggtcctagctttcctcgactagtttggccacgccatcaccttcggtcgttctaaccatcccaagaatgtcccttggtctgggcgatacccgcttatcgtgaatcccattatcggatctgtacaactgtcgaatgtgctaatggacagaggaagcgggctcaatattctctactctatcgtgtctcatgccatgcgcctcagtcggaccacctctgaccgacggggggccatttcatggcgtcatatcagagaggctagcgacactgctcaggcgagtcgaccaacacattacctttaggacccgtccaactttaggatagagacactgacctttgaagtagttgggttctggggaacctaccacaccatccttggaaggccatgctatgccaagtttatggacgtccccaactacatctacctaaaggtcaaaatgctaggtcctgtaggcactatcaccatgggcaccacggtgcagcacacatacgaatgtgaagtcgaatgctggaatgtggccaaaggagtcattgctagccaagagcttcggggatactccaagccgtcgatgaacaagcacctgatgcgaagagggagagcacaaccttccaactagcggatgacataaaggaagtacccttggatcccaagcatgccaacgagcgaatgatacacattggggccaagctccttcccaaataggaaagtgcgcttgtcgacttccacaatgtagaaggacatcttcgttgtcgacaagttcactaagtggattaaggcttgggctattgcaaagatcacctctgaccaagccgtcaagttcatgactaacatcatccatcatttcagggtacgaaactcaatcatcacggataacaacatgcagttcactagaagcagattcctagaattctacgatgaataccatattcgtgtggatttggg

SEQ ID NO: 69728 - DNA, 638 bp, Zea Mays
tggttgccgtgaatccagggaagtttgttgagcttgctttagtttgttacgagtcgagaaaaaaatatattgactggtttggttgcctagtatcggaaggtggttggttgtcctgtgtagctggctcatgcggcgtttgcagatcgcgtctagctagggggtctcgtgtgtatggctgggcacaagcagcgtagacccgcccgatgtgcatgtgcatggcccatgcaacagagacatgcacggataaacgcaagcgcggggtgcggctgatcagctcaacgatcccaagctgaaagacgtagctgacggagaggctccacaaggcagtgtctccaagcgcaaggaagcaagcacgggttgcacgatgtggaaattggcttacctcagaattatgatgacatcatttgtggctagtgaaataaagaaagaacaaaactagaggtggaagtggctatcacgagagattaattgggacaagtctgaaaggagtggccgaggcaggtttgtttattttttttattttatgttatctttaccactccctagtttcagttcaattttaaatttgttttgaattgtcaaacttaagttcatatgcacaaacaagaagtccagcatgtacgcaaggtataatttat

SEQ ID NO: 69729 - DNA, 345 bp, Zea Mays
gcgaccatggtgccttgtgttcattcgcgatgagatcttttcaccgttgagcgtaatccactcgcccgaggcacgaatcacgacgaccggcggtgcgaatccggacgcgcagatcaccggcggcgaggtaccctaaacctgttgatatttgcgtggcactgtaccattggaaacgatcatcagagtgcctgacaaagcaacttgcaatgctaagatctcggatttttgtgccagaacatgccaatctgtctgcagcaaacttgtagccctatgatctagctacaaatcgactatggcaactatcctcaatcgagcaacagatcttactcaaaatcaagccctaag

SEQ ID NO: 69730 - DNA, 611 bp, Zea Mays
cctcgccgcggtctatggcgctatttatagccacgacggtccggctaacgatcagcggccgcggattgcattgttcacgcatggctaccacatagagaaaaggcatagtaaggggaaaatgaggcatgggtgacaccacggtggaagtgactgagccacggcgaccgtcggtgggatatctccgaccatgcacgactgggttcgcgggatggtgccacgtctgaagttatctctccgcgatcgactcccttcaccaaatcactcgagcacatccagttcaacagtgccttagatctttatcaatgttcttcagatatttacagtgtttagatcttcagcgttttactgaaccgaccacctatcatccccactttctcatgattcttgttaagaacagggtaacctcccttaataaaatttgttccccaaacaacagtctttaagtttgttatagggttcatggatcaattctgtatagattctcagatttggtgctgtcaaagtgactgcatttcactgggtccatacttttctgagtccagtgttcagaaccgcccaactggcttttgacagcgcaacttcacacttttttatctccaatttctattcag

SEQ ID NO: 69731 - DNA, 407 bp, Zea Mays
gtcgtattgtatcctacaatatatttgtgttcctacaacgtgtttgtgttcctagactgtgtttatatatgatgtattacatactgtgtctttgatcgccgtaacatactgtgtttgtgttgaattctagcaatattttactatggctgcttttttggggtatgtgtggtttatataactttcaagatctgaaattgacgcttctcttccatgatttaaattgattcagatgatgtcatttttacatccattgagaaaattttaatatttccatgctaatacttgtacagaatctcatcctgatgactgccaataaatcactttgttattgtgtcatggcacatatttcattacttcgttgacgcggggatattggaataagacatgtgcacaaggaagatagggcg

SEQ ID NO: 69732 - DNA, 384 bp, Zea Mays
gttggattgttgttgcatatgtttgtataagttataggaacaccctcaaagatattcaaaaagatttgaaaaggattggacaaaagaggtgggttgctggacagaagcaccgggggctcaacggaccgtctagtggctcaccggattgtccgatggcacaacaataaaccgtccagccagaggacaaaaacttaacagaaattcggctcagcatcgaatggcacgcgcggacatgtactgttcacggcccgacacggaccctgtccggtgtgaattatagcaaaccagccagcctcgagaattttggagcagggcacactgaaccgtccactggcacacggacagtttgagagggtttcaacagtcacctgcaagttcagaacg

SEQ ID NO: 69733 - DNA, 718 bp, Zea Mays
cacaggaaaagttttataggccaattattcttgcactaagtcctgagtactcatgtgctcggccacaactttgaattctactttggctaattggcatggggagccgagctgcatgttgcacaatggtctcgtcatgctgaagcttaacttcaaaggactcatcaccatgctcataagcttctcccttctcttgtcattagcttttacataaaaccattcgtttgtccagccagtaggccacttggtgcagtacccaatcacaagagcctttgtatctttttgatatgcaaaattatagcatccgaagttcttgtgcagaccatctgctcttgccttggtctggtagtgaagtacatgaactctgcaaaatccttcagcattaacactctttccctagcttcggagagcccatacatagacactaagccagactatagcatttggtgttagctgatgaagatgtatctcaaatcttttcaatacttcgccaatcatctcatataatgggaatcaaagcccgactcggaagaagctcttaaaaaccaccacctcatcatccttcggttctggaattatctcttcacccatgaaccttatcaagttgtcatcattctttccaaaataaccatgtttcttcattaaaactaagtcctcaggtttcacggtggatttaccaaactcgatatggctaggcttgcttggactcagtataccatca

SEQ ID NO: 69734 - DNA, 290 bp, Zea Mays
ttcagtggttggaggttagtagaacaaggatggtcatcgatatttggtcggtactaatttgtaggaggaggaggatatgggtaaggaaagaggggttgaggagttaggccatgggaacaaatagggccttcttcccgtcgatgctgaatggaagaaaggccaaaacttgtccagcacccacaggggtctcgggacgttgcgaagattgctcgttgagcaaatctataaaagtttctgagttgtgactccacctcgaattcatatcgaaacgaaagttgggaagaccttaa

SEQ ID NO: 69735 - DNA, 630 bp, Zea Mays
gtcctgttaggtttgaaatttatttgatcggtgacagattggacgtccggtagatggctcttggctggtcttcatttcgtttcacgcttcaatgcttctgttgattagacttgtacttcagcagctatttttggctttcctccgatctctattgatatattttttctgtcttgatacattcattgcgtatactgtatggatgtgattgcttgggaaaatctattgaaaattcctggacgtcccctccccaatgggtgtagccaagggacggcttggtgcgctgagcatttagcaaactgcccttgagtagtaacttgacgtgaccgtggggcataatcatatcgtccaagcagttgacctcagtcccaatggtgtcgtgttacgtgagacgacgtctgccgcctgacttgttttccaggtgatttgaatggcttattgaatacgtgcgactgttcagtgaccgtggtaggagatgagcggttgcctcccgcccctataaataaactgtctgcttcactagtgtcttcgcacatctcccggtcatttgttgcttattctccacttttctcttctcttccaatcaactatgggaagaacaagaagggcggaagttcgtcgcaccactccggc

SEQ ID NO: 69736 - DNA, 503 bp, Zea Mays
acaatgagtagcactaataatcccaccaatcagatttgtgaatctagtgctcaattctagatcagagagaaaatccgaataatccccaaatttgaagaaatttgataaaatccatgagattatgaaataccgggatgaagacatgtttgttgaactttccacaagatttcggactgtccatgcgcaacttctcttctgcgtccgcgcacaatcgacgaaagtgacctttgtggcgagtggagagcgtgagaggagaggcaatgagtagaaatgacaagttgactgcctctacctgtcttatctgcctgtcacggacggtccgcgcaggggcggcggacggtccgcgccctgataatttcagacggtctgcgcttctgatcggactgtccagctcctgatactgcagacggtccacggtccatgggcggacggtccgcggcctgatactcagtttttcaagttctgtccactttctgattttgaatttcaaatctgatttgatg

SEQ ID NO: 69737 - DNA, 553 bp, Zea Mays
aatatttgacctttgcatacccattattgttttatatatgttaacaagatgaagtagcgaaaaatagatagtaaatcggtgttttttcactatgctgcagtgatcttttaaagctagctagtagtagaagttatgagatagatgatcgactaataaggacgaagaagcttccaagcaggctgcgagataaaagtccagttttcgaatgcatgcatggtctagctaaaacagttcagtcgacgaaattcaccgccggtcaaaatccaagatccgacaagggggaaacacagatcgatcgtgcttacgcatgctactacagctttcgttacatatttatatgcatccataaacgaagcagcgtacatgcacactccacatcatttctcctccacgtgtgacgtgcttatcctagactagtaggccccgcttgagacttcggctccccagtccccacccatgcatattatagaacgggaaagaaagagcgcctagcgccctagcctagatgagagaaatgctcgtgcagcgactgacatgatgattcgcgcgccag

SEQ ID NO: 69738 - DNA, 847 bp, Zea Mays
gctgcgtatgcgcgcgaattccttgcgtctggtacatgcgccaaactaaccctgggcggtctataaaaccccgcgtccagtcccccttctctcctcgacagccccaatcttcgctgctagcaccattcaagaacgtctagctgccgtggtgaagaaagagaaactgagcgccgcgcgtgtaacccgccaagatagccgttcggtgcgcgcgaagtaaaccgtggtgtcgtgtgaatcaccgggtgatttccgtggcgtggccggaagaattggaggggtgtcagatcctgtgattgctcgatggagccaaagaaccaccacgacgccgccattcaccgtcactgggcctctgcgtcgtcttatgcgccggtaagaccagttctgttgtgttcgccattgcttccacttagaaatgatcacattggattgaggaatagcgcgccagggtgatgtatcacgtgcaccggcgatggcgccgtcgcatggtctgggcggcgccaccgtgtctcggccgtgggagagaagatggctttgtggccgtgcgatggtgaacgtgcggctttgatcagctcctgggcgtgtcaccttaggaatgattatgggccgttgatggtcaatcgagtggatagggttacattgcggttcacagggtaatgggaaccatcgatgtctgatcaaagggatgacattgcatgccagtgcgtgttctgttgtggggcgctgatctcagatccaacggcccatgtgccatactggttcggcgtggaggggttttaatcttgatcgtccgtacatgatcggatgaataggaactgctgatacccttttggctcgggaaatttactta

SEQ ID NO: 69739 - DNA, 1091 bp, Zea Mays
cagcttcatacgtactaaataaagatttgttagtgcaaacatgatacgagcaagcagaatcgaggatacattgggcatcatcagcagcacatacaacaaaggcaataagaacatcaccattatcagaactattttcggaggcaacagagatagtatcaacggtcttacccttatccttgttcctcttctccttgttctgtaatttgtaatagttctcaattacaaggttcgtcttcttgcagtatttgcaaaacaattcatcggatggcccccttgacttggagcgacccctctggttatttccctttcctttgccacctgagtaggacttcttctgctcactacggccaaagacatataaagcttctccactcaagccgacagcatcttccgagttaaccatctgtctcatctttttctttcgcagtcaaagcttcatacacttcagccacagttagtgtatcacgactgtataggatggtgtctcgaaaattgctaaacgatgcagggagagaatactggagaagaagagctaggtcttcatcatcaaagtttacctccatagacgtcagatcggccacgatctccttaaacaacaatatgtgtgtcagaatagagcctccttcttgcaacttgtgggagaacaacttcatcttgacatgcatcttgttggttagatccttcgacatacagatcgactccaacttcaactagagtgcagcagcggttttctcctccaaaacctcctacaggatattgttagacagatgaaggtgaatatgtgcgagagccttacaatccttgcgcctctgctcatcagtccaagtcctgatgtcctttctgccaaacccatctagggcaccatccagatcgcgattagactgtgagagaattgcccgcatcttcacctgccacagcgagaaacgcgtgtcgagatccagcagcgaaagatcatacttcattgtcgtcgacatacgtgcgctggcaggaaaccctagcacacggatcacaagaacacgacctctgataccacttgttatgaatcaatacgacacaaagtagatcaaacacagaaaatacacatgttgggg

SEQ ID NO: 69740 - DNA, 1194 bp, Zea Mays
ggagaattcagagttcttacagaactcagaaagattaagattttcatgtaaacctatagccaaacataccaaagacaaaaaaaacacccaacaacctacatatggagcactggggaaacatcccacgtagcactaggcagtctattacagctcaattttctgctatttgaagtaactcctttttcaaaaagctattgataacaagccaattatgaccagcaaaagaactactaaatccaccgtttcctcttgcatcattagccactaggtcttcaattcttcatcgaaggattcttctagatattggcgcccatcctttcgagcgatcaaaaacctcctttgccatccctttgattagctggcttccttcctccatcattcttctttccttccttttctgcaaaattgcccaggaatccaaccagtgacaagagaggaaaacaacatcagaagggtcaataatccgtttattgttgaaacatacatcatttctagtcttccagatccaccagagcacagatcctaatcctacaatcaaaaggttcctaattctcttatcagagcctaaaagccaattaccaaaagtatcttcatgtttctttgggactgtccttagattaagaacaatctgaacaatcctccaaatatatctagccaccgagcaattaaaaaaaacaaatgatcagttgattcgaataaaccacaaaagcaacattctcctccccctttccacattcttttgattagatttcctttagacaaaattttactcctagctataagccacaaaaagattttatttttttggggaattttaactttccataagaatttgaaagggacttcagacagatcactcctaatttttttgtaaagagacttggctgaaaatcccttcttatctaaagtccaagacactgaatcgtcagcgccagtcaggtgaatatccctgcacatgtgtttcatttcatcaagattattcaccgtgtcaccaaagagtcttctctggatttttaaggcctcaaaattggagcaaatcaccttatccacacagatatttctgttttcagagatgtcccataatcttttaaaccggacgcagaaaggttgatcccctatccacacatcatgccagaaactcgtgcgattcccgttgccaaatttttttctacaaaacttgtagaaagtatcttt

SEQ ID NO: 69741 - DNA, 750 bp, Zea Mays
gcccagtgaaattgtgtgaatatggatgcaaaaatcaccaccctgtgtgatgagttgtgcaagctgaaaatagaagttgtttcctccggtgccttaagttatattttagttgagcccactttacatgagtagatagtcatggcagagattggtgacaagggtgttcaagtcattaaggaaatgatcgaacaaaaggtggataaatacaaatgtttccatcaggacaacaaaggaattctatggtttggagaccgattggttgttcccaagaaccctgagctcagaaagaaaatattggatgaagctcacctttccaaattttccatgcaccccggcagtaacaagatgtatcatgatctcagatccttgtactggtggaccagaatgaagagggaaattgctaagtatatagttgaatgcgacacttgccagagagtcaaggccagtcatttgaaggtggcaggcaccttacagccccttcccataccatcttggaattgggaggatatttgcgtggattttatcgtgggattgcccaatacctcccgacaccacgattccatttgggtcatcgtggatagattgaccaagacatctcatttcttgccagtgcataccacccacaagatagagaaatatgcagaaatctatgttgatcaaatagtgtgtttgcatggaattccgaagactattgtatctgacagaggagcactgtttgtggcacgcttttgggagcagctccaaaagtca

SEQ ID NO: 69742 - DNA, 461 bp, Zea Mays
aaaagctgttggagttaggaaagatatggaaagtggtttttatgcaaatatctcttcaaatcataatttaaagattgaaattaagaaagaccctttgggatattaacatcttattaatagactcagcttcaagcccagatcttgttgttggatctgtttatttctcacgctcatagggaactgcgtgtcgcccacttgaacttcctaattcaattgagcatggtcgtcagcccacctccatcgcgcgagcacaaccctctatctccctccatggtgtgtgagcagccttgacttcgttgatgttcggtctgtctccgtcgcacaagcatgcccatccgcttgctcacctctaccgcgtgggagtggctccagttgtccgccctaatgaatccatccgttcacctagagataaaggtcaggatttgtaggctaactttggtattgtcgatataaggtttatc

SEQ ID NO: 69743 - DNA, 758 bp, Zea Mays
ctggaagccctctccaaactgtctcccgctgaagttgcagccctcctcttgctacgatatgacacggatgaacctgtatacactgccggaacagcagcacaaaccgccacctctggagtaacctgaccgttcttttttaccatctcataagctgagagcagactacctggcacaccttctggctgcgacctagttctgccaacttcctcctctcccaaaccctcctgcaactcgtcacccaaacccagcccctggaatatacccgaccctgaacttccttcctccaaaatcgagtccagatccactaccttcttccccgaaaattttcctgcatacctccaatgagatgaattgttccttatgtttcataggctaaagaaaatgcagtcctacggtcacgtctagaaaagcgggaagaagaactacatgagtgtcgtttagcacttgaaaaggaagtaagaactgaacattttctctttttcattttcggtcaataaacctaggtagcttttaccattgaatcatttcgtctcgacaagagatttctctgccataaagaagaaataaataccacgatgattaaataagaggctttgaaataaagtaatcatgaaagtgtttagtatgcaaaattacggccatggaatagttcttctgaaggtgtttgggtgtgttttgtcacagtaactcgtacatttctctttttataacaggactttttagttaataggttgaaaatttgagggagcagctgcaca

SEQ ID NO: 69744 - DNA, 545 bp, Zea Mays
cgctgcctctatagtgacggctattcttgtggatcagtgggatctcttcttcttcctcttcaacctcgtcaaacacgccaccagcagcctgcaaatcatcgcaaccttcaacgtcaacctcggtaatggcgtccgccgggacatcatcagggatcagtgtagaaggaccaacgtcttgatccaggcacgacagtcgtcgaagacgcctctttttcttcttctccttgataggagcagtctggtggttcactcggcatgaacgctttgggcgggcactttcaggtttctggatctccacctctttgccaaattcttgtccagtcgtgatggccattggctcagtgcgggtagagtcagacgattccccggccagcaggctaagcacggcgtccatctcatcatcatcggtgctagctggcatttcaaagtgagtttgcctctcagccttgggaagactccaaagtggagcaatcaaggcctcaatgtcctcgagagagggtcgcactctatgacccgggctaccatcacgagcaggagggttggag

SEQ ID NO: 69745 - DNA, 825 bp, Zea Mays
attttctttaatgtttatcagcaccctggtccgcgtgcattattacagagaagttcaggggctgatctaaaactttccagggcatggctgtaaacactccacacaggctcggacggcgggttaattcactaagattctaggggctcttgagtaaaacttcatggtcgaaggggtattgttggatctcgccgttggatcagatccaagggccgagaacagatcgcgctaacacagccgcgtcgtgcaccgatcggcctccgattaagattcgacggacaggatttaatgggatctgaaccgcccatagccccacgatcaacatcctagggtcacgatttacaaaaacactcaccctttcaccagcgctcatccgcccaccgacggccaagatcttccccgagccaaatgtcacccagactcagtctcgggcgaatgcagcccatccatcaacgaatggacggctcccgtgtttcttcttcctcctgctcacaagacggcggcgcctggtttttttcccccgcggcgaacgccatggatgatgcgcgaccccggtccccgagacccaaaactctatcctgaggtgtgctagacgaagcgaagcatagggagaacaacacgagagatacctcactatgaaccacactgtgtagagtcctggccaccacggtgtgcagcatcggaggggaaaacgatgaactccgttcagcaattcagtcgccaggcgcccctgcgtggatgtcgatgcttcgaatgtgtttaacaggtcgtggcgatccacccaatctccttattggcatctacactacgatgtacacccgagacgcc

SEQ ID NO: 69746 - DNA, 576 bp, Zea Mays
cttgggttgagctgaggtggattgaagtggttcgagagagctttgagagggattttgatctattgtggatttaggcactattgacagatcacagtgtaaggagtataaggagatgatgagatcacagtgtttttctggttcgatcaaaagtgcatggcgaagttgggtaggacagcatgtgaaacccaaaagttctgccatcccgtcttgacagaagttgacgtcgcatctaagaaggttcaattcggttgactaagccttgataataaatataccacccaaagagctttctcgtcactgctctcccggccctctctagtctcaacgtttcattccttgagctttgcgatgacatgggagcagcgttagggcgcaggacgtagacgacgacgtacggtcaccggccggcatccatggacgattcaagctcacagccagccacaatgtatgcatctctctctctctctcgttcgttggcaatcatcaaaagaatggttttattcttctttctatgatgttttgatgcgtttgcctaaaacgggaccacactcggtttattattggttgacaacttat

SEQ ID NO: 69747 - DNA, 767 bp, Zea Mays
gattgacaaaagtggctcatttcataccagtgaggactaattatacgggagccaagctcgcagaattgtatatgactcggatagtttgtctacatggagtgcctaagaagatcgtgtcttatcgaggatcacaatttacttctcggttttggaagaagttgcatgagagcttggatacaaagttgaatttcagttcagcctaccatccccagactgatggacagacagaggactaatcaagtgctagaggatatgttaagagcttgtgctcttaaacatggtggaagttgggataagagcttaccatatgcagagttctcttataataatagctaccaggccagtttgaagatgcacctggcttaaagtgcaggactccactgtattgggatcagactggagaaagacaattctttgggcctgaacttatacaagtggcagaagaacaagttcgaatgataagagaaaatttaagaattgcacaatccaggcaaaagagctatgctgataataggagaagactactggagtttaaggagggtgatcacgtgtatctgaaggtgtcaccgatccggggtatgaggagatttaaagttaaaggaaagttgtcccctcgcttcattggacctttcttgatcttaaagtgagtgggagaagttgcatatcaactagaactacccgatcacctgtcagatgtacatgatgtatttcatgtgtcccagctaaagaagtgcctcagggtacctgaggagcaactatcaatggag

SEQ ID NO: 69748 - DNA, 351 bp, Zea Mays
cttacctgcttatttgaaaatcgtatatctttcaaaaagtgtccgttatgggctttattatcattcttgtcatccacactcatgttttcactaccatcatcaacatcacctccaaaaacatcagctgagaaggataaagatctagtgacatgttgacgcttgaggacagcaagctcctcctgatagaaggacattcttttagtttaggatcatgaaacaaacggtagatctagaattctccatgcatcacctttaggagacgtatctgatgttgtaaagctagcacatctcctgaagcgtcttcattaacaaccgccttaaaatttgaatgggaaagaaatgcttgtggtt

SEQ ID NO: 69749 - DNA, 612 bp, Zea Mays
gcctccaaatccaaaactagccattgaaagtgataaaaattttacatactcattggacaacttcggtacaatcattgaatatgttggtaccatccatgttagctagcctttgaaactagccattattaaccatttgagtaagggcatctggtgctttgagttgttatacaagacacatttagtgtattatagctcttctcgagttgctatgcaacctctttgggtaccctatctggcggcatactagacacgtccaatgccttgtcaatctccttaaacacaatgtaaacctctctaactggcatatctagtgcaatgtctgatgcaaacttgagtgtctggtgtactctatctaaatagcacttcttcaatacagtaacactccaatcaggtgcttctcctgacacttccagtgcttctaagtgttatgtttttcttcgtttatttgtatgtctttgtctaggcttcttctatcttatgaatggactctttcatgatcccatactcattaaaatgcaaatcattagaaaccagcgtcataatgttttgagcctcataaccctatgttatagttgctaagtacaaaagtacacatgcttgtttatttctaat

SEQ ID NO: 69750 - DNA, 983 bp, Zea Mays
taaaatttaatgaaaaagattattcttagcaagatagacgaaacataaaaggccatccacatgaataaaaaagtccattgctgatgattccagctgctcatccatgcactaccaccgactccagaatcatagctagtgtgcccccctaaactccatatgtgattcaccttgatctacaagattcccttaacaagaagttaagaaacacctgtgcctgcaaaagttgctctgatgtcttgaactctgccttcaaaactatagtgtgaaaatcatctccaagatcctcacaaatcgtctcaagtatctaataggttcgctcattcaccttgaccgggctggtttcttgaaggggagctatatccaaaaacttcatctaggcccttgagctaatccaatgttgccacaaacataaaaaaaccccaccctagtcctcaagcttgacttcactaaagccctcaataccgttgattagggtgccttgcttgagattctggaagcccacaagttcagttgtaagtataggaattgggtcagaatgttgctcgactcttctataacctctgtccttgttaatggcaattctggctcctagtttccttgtaaatagggtctgtgccaaggcaaccctatgtccccctacctatttctcttggtggctgacatgctacagttgatcatcaggcatgatagacacatcagacatcctctgtctaacgaccaaccttacacggtcctccaatacaccgacagcaccctcatactccttagagggtcaccttggtgtcgggtatcgtaattaggggtacccagattatgcccctaaacacgcttaacacctaaaaagatcataagacacattctccaaggtcaagaaaggataagccatgattcgcccaagaccttgtccgacgatcgctcaaaactccgccttgctcgagcctgtcctcgggcaaaagcagcgctcggagaaatcctcgtctcgc

SEQ ID NO: 69751 - DNA, 647 bp, Zea Mays
ctctggtctgcgcgtcaaattccaaaacggccaggggctttctcgcacaagtcccacagactcaggtctaatgcgctgatggacggcgggttgattggccagaaacagaggggctcctttgcaatttttatcagccgaagcggtatcgccatttctggccatccgatcagaatcagacgcgccagatcataacgcgaaccggtacgagcccgcgagcgtaggatcccgatccaacggtctacaacatggtttcttttcgcccgcacatccgatgatcaccggccgagatcgacacggccgaatcggtacgctggctcacatcgtggacgttgataatgaatctaacggttgcacatcaatccggctgagcggctacggtcatccgatccccaccgtaccgcacgggatcaacggtcgtcggccttcttctacgttctaccacaccggttctctctctcttctttttttttctttctccagctaatccgccgcggccgagcgccatggacgcgacaacgaactattccgagctcgccattcgagccctatctaccgccaggacgcctctgctcctaccttacacggccacgcattcatcttcttccctacccccatgaccagacctgacggcgccgcccactcctccg

SEQ ID NO: 69752 - DNA, 404 bp, Zea Mays
gtggtagaaggactcctgtctgagtactagaaagaggagctgcgactagatctctctgagctagaagccatgactccactggcacatgtctgaatcggcgaaccctggtggcagtggccctctgaaggtcaaatagtcgaggatcctcagcaagtggttgcacctctgtctcgtctcgctctcggaaatagggtggatgaactggtaagcggcagagggagcaagagcggaggaagcatgtgtggtggtaggcacaggagtggcaaaacctggcgtagtggagggaggtggagtggtagtgatgactggagccgtggggtcaaaacaagtaggtgtggagcgagtccgagatgagatgcgatggacacgaaaggcgatctgatcagaggcaatcctcaactggc

SEQ ID NO: 69753 - DNA, 629 bp, Zea Mays
cacccgagccgaatcatccccggcaacaccctcgggggctgggtaagtgtcaacaccatccttgaggaccaagttctctgcagtagccgcctctaaggctgaaggtccctcagttacttccatgggaacaagacgatccaagtcagtttcatgaccctcaagaccgcgctccaaggtcgatgaggcgcgggacgctgcccgggatgaccccaacccagcatcgagcacatcagcacaaacatccgtcgcatcaccatccgctggctctgataacagatcctctggaaccatatcttcaagagtctgatcaaagttcgccagggacaattcttgtagaccaatgagggcagacacagcaggagaagggactccactactttccccactggcaacatattgccgactgttcttccgagtcaaagggacctcatcttcttcctccccctcgttttcatcagcaacacagacagcacacccattgggttcagcgacagatggagcacccccattggtgtcagcgacagatggatcacacccattggggtcagcgtcggtaaattcaggcacatgcacttcctcagcagcaggaaccgaaggaccaacatcccgatccaagctagatacttgcc

SEQ ID NO: 69754 - DNA, 424 bp, Zea Mays
taaaactagtcaaagttatgcaacagatttgagaaattactaacattgacttaagggtctatataagtaaacaagaacccatacattgcactttgtagatcctatatgcacactaaaaacagtaaacaagaatttaggacagtttgaggatacatttagagcaaacataacttcacttctttataacaactaaaaacgtacgctgcggccatgtattgtattaccctcggagtgaagacctactttgagccagatggaccatgttcttggtcgtcgaagcctgtggctcaaggccaaggagacctggaccgaggagttgtcgcgacagcagttgtcacctgtgccagcaaagttttgtggtaaatccaaagaaaacatattgaagtacgattattgcaaatcattttgttagtacatgtgaaca

SEQ ID NO: 69755 - DNA, 378 bp, Zea Mays
ttatcataagggaaatattgcatagtaaatttaaatagttcaacattcatgaaataaagataatgctcttatagagcttacataccataatttatgtttttttgaactctgaaaaataaatgtgcatgcaagcactgaaatggaatcaaggaaggcttcggtgtcagcctccactagagctatggaggtgttctcttcggtggcaatcatcttcacagcacctgcaagatcaagaggcatgccatatgcttcaagtgtagggtcttcttctatggcttcattgttggttgccatggtgaagtgtgcctcaggtttatgtttgtgtatgttctttgccttatatgcttctatgacatgctttggtgactgacatgtttt

SEQ ID NO: 69756 - DNA, 952 bp, Zea Mays
gtctgttgacagcttcgccaacagcttcattggtaattttaatcgtctcaagcgcttccttcagggctgggtcggcttctgggttgtatggctctggtggggggagaaagttcagctgcatcataaaatatgtttgttagttccgaagctaaaaacggattacgaagcaaaacctcaataaaggtacctataagcctcacacactcaggagcttcttcatctcttttggcttcttcttgagcgtcgtgagattttttttcattctttctaatagcttcatcagctatctcacagccacccttcagccatacctcggagtaaaatttcccgcctaatgcagaagcttcggttgaagggtttttaatgtcgtcggctgagaaaacaaattctagctgaactacagccttggcatgatcacaaccgatcttctctagaattgatacaacccagcgagcaccggcgaaggcacaaaaatcccctctgtcactaagattttcttcaaaagcttcggcctcaccactgatccactggataactccatcagggtcgccgcggatgaatctctgctgagaggaatatgccccaactttagcaaagctgtcctttaatttcctggcacattccaaggacatttcataacatctttctttggaagcacgaagctcatcggtgttcttttgtgctcttgaccttttgatctcgcatatctcatgcttcaccacctcaacttcaaatttttcggttgcttcagcaaccttcctttttagttctaccacttcggctttatgagcttcagcttgtgcaacaagtttagcctcgttagatctcagcctatccactaaggaaagtattatcttatcgttttcaagaacttcgttccttagtgtgatgacttctgagcgaagattcccaagagctattcggtagctctcatcttctgcttccttctggg

SEQ ID NO: 69757 - DNA, 1156 bp, Zea Mays
atgaggttgagtacactagtttgattatttttactgattttatccattcttttgggtaaatacggagtgaatactgctttgtaattggtgcaatgccattatctgtagggagagttagcaaagcagtggtaggcttcatgtttatccttgataacatatttgattttctatatgcccattagtttcccctaggacacaccattcagtttcattcttttagagaaaacgaacaagttctttgttgaaagctagtgatcaagtagctggaattggattgggcaaaaggagccactgccctgcaccaagctaacactaaattagcaggagctgcataaaatttgacacaacatgaggcatttgttagtttttctcatttactgtacatgtgattgacttgaatgttcccattatgtaaccaacaagtatacaagaaaaaatgttaaagatgaataatgttactgctctacctaaatttgtgcaagtgcttccattgttagaatagaacatagagtatcctgttttccttttctaacttcctaagaagtataattctcgattcttattttgacttctatttggttcttcttggtactactagttttttcctagttcaggtaggaacgtggcattcttgaacttagatagatcctttcctgaatctgatccttgttctgtgcatatttttttggctctagtctgtacatgcatgtctgctttagtttgttgaaatccagcccagacttgtagcttgttttattgatgagaatctgatccacatttccctgtaaatttgcaggctttgcatctgtagatcacttctgctattactatctcaggttttgaacttagaagccctagcaactcggtggcaactggtaacaacagcctagaattgtgggttgttggagatgtttgtatttttaattcttgatcacgatgaggacatgtaaaaagttgacaaattagcattgttggtggtaactggtagcagcaactctgttttattttcatgtagtgtatttcctaaaaaagttatttaaatattgtgtaaactacaaattagcataacacagttgattgtgggaacaagcgaattgcaagcagcggctctttttttagaaaaatatatttcatacattagaagcccatacttctc

SEQ ID NO: 69758 - DNA, 422 bp, Zea Mays
aggaagtagaggaaaaaatttaagcaagcaagttcgggatgatatatataaacatttactagctgatagcaaccaagggaaaaagaagaagtattccactcggactgttgctacaaaattcggttgtagcatgaggactgtgcaacgcatatgggacagggcagatacatgtatacaagctggcttaccagttaatgttgggtcatttataccactaaattgtggcctaaaaagactagaagctgatctaacacccattgctagtatccctcttaatgagaggagtacaattcggtctgcgtgtgaaaaacttgggatgaaaaaaagcacgtttcataaaaggttcaaggaaggtcacctgcgtaggcactctaatagtttgaaaccactactaaaagaagaaaacaagatggatcgactgc

SEQ ID NO: 69759 - DNA, 624 bp, Zea Mays
ccttccgcttgatgtatggttctgaggcaatgacgccgcaagagttaaagcacgccccccgaacaaacaaatcagccgtccctgaagtcgacgaactaacttccaaagatctcatcgatgaagagcgtgtcctcgccttgcaggccctcaacaaatatcaaatctagaccaaagcctggcgtgacaacacaatcatcccaagagagttcaacgaaggggacctcgtatttgtaagaaccacccggacagagtcccggggcaagctagagccaaagtgggaagggacttacatagtcaaggcgaaggcatcctccagcgcttacaggctagcaacgtcatccgacgaagacttagaacattcctggaacatcgataatctccggaaatttttcatttaagttccaaggcctaagcgcctttgtaattcttcgaacaatgctatccaagcccgcactcttttcctcccggggggtgaggtttttaacgaggcgacgtcatgtaatataccaacggaaaagcccccacaaaaagaaaaaaatatacaagcatcattaccatgtcgaaaaagaccgctctgacggccttcgacattcgacagatacgatgtcaccgcgacaggtagcg

SEQ ID NO: 69760 - DNA, 761 bp, Zea Mays
ggtcggagcttgccgctgccgcgattcctcatcgtttggccaaccgaagccccctcgcgccgtgccaagctaccccaagcatcgtctctacgtaagtgacctttccccgcccctcttctacaccaaattcgctttaccgggggaatttcagctcaccggagttgcccctcgtcgggttgtcgtgttttcacagcgtttggccattgcaacccctccccgtgcccgaacttaggcatagagcacccctaccctctccctaaagcctatgtcggccgtagcgcgatggattaaacaccattgcgatgggtattgctcgtcggagtgaccttcggttcgcccgaggtttcccctccgccgtttgcccgtctcagtcccgttctcgtgacccagacctcaccatagtgcttgtcgagtcctctctggctacccagaccacccccagcaccttagaagccctagtctcccttgcctctggtgactgtgccgccatgaccacggaaagcgccgcccctggctgaccggagaagataaagcctctagcgcccaatcctaaccgtccagtcttaatcggatggcccagatgtgcagataatgattcgtgcggtccgtggaaccagaaccgttggtctaagattgagcagaaagtgtgccccatgccctcatcacaccgctgacctgtgggccccgctcgtcaatgcctcgacctgccccaaacccacctgtcagacgctcgcgtccacgcctctgtgcgcttgcccgtc

SEQ ID NO: 69761 - DNA, 398 bp, Zea Mays
ccccccacatccgcgcatcactagcaacagcagccgcagacccagacaccaccaccaccatctctaatttgacatctcgaggccaccgtgccagagagtttgggggctaggcggacgatgcagatggcgaggaggtctacgacagacttaggccctagcgcaggaagtttcttgcgtcgagggctagctctcgtggccctcggttgtccgcctcgccgttgtcgacatcgtgcccttcacgttccccgtcgagaaggttcgaccttctctgatctccatcctgcccctggcaagctcgtcactgccaccctgttatcattaacaacggcactaggtacgtcctccctccctctatctagatctacgcgcggaggcgcgatgctggtgagtcacgctac

SEQ ID NO: 69762 - DNA, 976 bp, Zea Mays
attggactaattcgggcccggatgtgcttgaccacgatgatcgcggatactgaactctgatcgaggcgttctggttgattaggtgaagtcaagctccaagggctgggcaggtgacgatcacaagcacatgtgggtgctaaaacacgaacaacaagggcgaggacggacctggaatcagctagccgcaagtaggcggttcacggcggcgcagtcgactgaactgggggaagaaggaaattctcctgctacggtggctaattgagggtgagaatgggtgcttcggcttcgtgataacatggcgcaactgactcggccttcaatttatagaaatgctaagcggtgacgtccaattttgaaaggagagaccggcggccgagaagagagatgagtcatcggcttgaactgtcgtggcgcttcctggggtaatttctccggcaaggaactgacctcttacggatatctacagcgacatggtacatcttctaagcacgtggcatggttataatcgccggcgaaatccgacgaggacactacagtccactgcgcggcatgtgtcgcggtgaatagtccgacgttaagcttctctcctttccccgagttgagatctttctctacccatgattatccgtgagtcccagtgcacgaatcgcgatgatcggcgttaatcacgacggagagtcaccggccgtgagatgcgttgcatccctaatattttgttaccgtaccatggcgcaacttctttagttgacctgacagagcaactttgagctcgattttctcctgatttcatgtaacaaccggttcaactctctgtatcaaagttatagcctaataaaccagctacaactttgctacatcgtgtacccacaaaaagtcatgatatcatgcttagaactgagtcccaagttcatgcaatctcactgtttatttgacttcagactttaaatagtctgacagcacgactttgggcataatt

SEQ ID NO: 69763 - DNA, 467 bp, Zea Mays
gggtgtgaccctgctgatgctgatcccaatgggtgtgaccctgccagagctgaacccaatgggtgtgaccatgtgccgtttattgttcgtattgttgacgaggacgaagaagaagaggaagtcccattaattcggaagaatagtcggcattacagattcagtggggggagtagcgatattccttctccagctttgtctgctcttgttggtctgcaagaattatccatagcaaattttgatcaggctctcgaggatgttgttcctgaagatctgctgtcagagccagatgatggtgatatgatggacgtctgctctgacattctagatgtgggattagaggtatcccgggcagcgtcttgtgcatcgtcgaccttggaaggcggtctttggagccaagaggttggtcaagatcactcaattcccatggaggtgaatgagaatccttcagccttagaggtggctgttgc

SEQ ID NO: 69764 - DNA, 704 bp, Zea Mays
aaaaaaacaatggaatttatgtataatgcaaacacatgggatgatttatatattatttgtaatattgactataatgcactaatgagtaggatggaggcataaatattgatgcacatcatcaatctgaattgcaaattacgcttgttggaaatgatgattgtgaagggacacaatatggggatgttagaaaggtatgaattttaaatttattaaattgcagatattctgtatatttaatgttcgtaaatatttataatctgacatcataacatttgtacctataaatacttctttatatggcatgtagagactggaatatgatgtagatggcataagcttagtgcgtccaaataatgcaagggccaaagggaaggacgataaaaactagtgaacaaagagttgtaaaactgggtgcgaaaggagaaaagaagaagactcgaaagtgccaaaaatgtggcattgctgatggacacaacagtcgcaccagcctgtctatagaggaaaatagggttaaattggctagccttgctgatagaaaaagaggacgaccgcctgggtctagaaacaagaattcaacaatggccccgcagtgaaatgagacatccacatcaaaaaaacataaacataccgattctagagaacatggttcggatgacgataatttgacatgattgtaaaacatttatacataaatatttgatgat

SEQ ID NO: 69765 - DNA, 501 bp, Zea Mays
tttcacctctaatagacaaagcaagtagcattgtctatgaattgtattgattttattattaagaaaacaatcactgagacataaaattgctaagatgcaatccaagtgtgcacaattaaagaagaaactaatcctctcatgtttctgaaaaaactgaccaagaaatgtgtccctcataaaagcatgcatatgatacatgtctaactggaagtctggaatgaaaattagtatgatgaggtatgcattactactaacaaggaaataacaacaactaggcttcatagtaaatcaccacattacaacagttttggacaatgcacgtaaaacatcacattagtacagccgtcgcatattcaaaatttgtataggtgtataacatatgtgatttggatttctctacagactacgtgtgcttccatgctgtcagaatttaacattcaaacacacagccaaaatatttctcatagaccatttatcacatttgagttcccctagtggtac

SEQ ID NO: 69766 - DNA, 482 bp, Zea Mays
ttatgctcttagctgcgtgtagcacctagcggtagggattttagtgcaccatagagattgatcggtgtgcgtcgatgacgtctccgccgcgctccgggcggcgccgccgtcaaggatgtcgggaggaaggagatagcacgtcgttcgtagatgtaagaaccgacggttatggttagtccgcgcgtatcggttcgcttgtattaatccggtccatccatttcagatcaggcgcgtgagattcgttgaagccaacataaaatctagatggttgaactgggatcttagggctaggaatgcataccgtttcgcgggtgcagagatctaatcgtagtcgtccgctgttgatctcgcggccaggataaccccgtaccctttcagccctggcaaaagtgttaaaaagcccctcggttttagcaaaaaccaacccgccgtccagggaccctgttctctgtgtcttggatatcttgcgcatagccccctgc

SEQ ID NO: 69767 - DNA, 276 bp, Zea Mays
gtcattattatgcttgaggagaaaaagagttttgtccatagagcccattttaaaacccttagaaagcataaaagatttcaaacgctcatactaggcaaaccatacaatgcttttcggagtttaaaatgtggtttggaaacttggaactctcaaaaccaggggactacctaacatatacctcttcctctatatacccattcaaaaaggcacttttgacatccatttgaaaaagcttaaaaccctttgaagtagcaaaggctaaaaggatcctaatgg

SEQ ID NO: 69768 - DNA, 468 bp, Zea Mays
agaaaaaggaaatctagtgtttccactttgtctgactcagacagtagcaataacatgcgaaatgaacgatatggatgcacttacatccaaacaccaaatattccgataaaacgccattagtttacttcagccttgtacatagtatgagatctaacgtccttgtgaacccctggttgaaaatgaaaatgctgtgaatttcatcgacgaactggcctcaccagcggcggcgatcaggcaacaactccaagagcgaggattcgctgcctccatcgtcaattcatagcaccaccattgttgcagccaggcattcgctgcctcgttccttgcagcggctcttcctgtaattgagagtgattagaaccatccaaacacgagctgatgattggagagctgctacagaagctagagctcaccgcagacgaggagcagaaagaaagagtgattataaagtgtgattgtccctaccca

SEQ ID NO: 69769 - DNA, 989 bp, Zea Mays
ggaggagagagagagcgtgtgtacatatcgccgaccgttgtcctctgctcgccttcggttggaggccactaagtgtccgggcgcggcgtgacttcctggtgtggcggcagaggcggcttgcgactcggcgtcgggaatccccggagttccatcacggtgcgagctagggatttgcgcgccagcttcgccttcgttccgattgacggtatgatctgttccccctctctgtagcgtgaaggatttagttaggtgtaagctgggtgcgggctcggggtgttcaccgtcgcgacggtgagctcaccttcggctggcggctcggacacccgcatgtcacgctggggaagaagcactgtgggggcattgattcatgaggggacggtccagattgttccaaagactaatctctcgcaggggcggtttggtccgtagaaatgtaatcggagggctgggaaactaacggttgcgatggcgcccagcgtaccgtttgggttgggtgatccgcgaccgtcggatcgtcaacgcaggggcatgatcggatcgagcccatttaaaatcttcaccgttggtagttgatctgatggattagattgcataccggttcgatgtaatatggaattaatctcagcccttcgaatctaatcggacgatcacgataggtccataccccttcaaccacaccatttttcttatgagtccctcggtttaggttaaaataacccgccatccgcctccactgttcactgagtctggggattcttaccccggagcccctggactttctagaagttgacgcccagtccagaggataataaaaaccgagaaatgattatagaatttagtttttaatacaaaaacaattctagaaacttgtttattccatagaaaattcatttttgctccaaattgaactattccaatttctaaaaattttaaatttaatatatatcacttagtgtctctcttttgacataaatacagtaagaaaatta

SEQ ID NO: 69770 - DNA, 522 bp, Zea Mays
acatatttattaaaaaaaaagtaaattggagtatagttgcatttacttttggagagtgcacaaagggaagatcttttacattcaagccatcggtagtgatatcacaagataccagatatggatgccatctatatgcatgttatgaaacacctgcaaatatgttggtgaatctcttgactgttgacattattatattcccaactgcaggtcgggatgctcctggagctcatttaccaacttatgccacctcttgaaacttctggtcaacatcttaaattactcactgcaaagaaaaaaatcatcatgcgacatcgtagatacatgacccagcttgctagcacctttgcccttatagtacaggtacgaggtatcttttcaggaccgctacgggaggacctctggatgcttgcagaagtacataattttccttgacatgtgcacttcttttgtccaatgtaggttgcaaaatctgctgcactatcatcaatttgctactgctgtgttgttgtcattggcagcttt

SEQ ID NO: 69771 - DNA, 644 bp, Zea Mays
ctttgttaagccgttatccttcggctttttcgattcccttgtcttggtatgcccatatccttggaatcttgcaaatgcttatcctttttatatgcctacctttatatcccaacgtctatttaaaacatttagctcacatgcccttgaccacctttatttcttgatgatccatgagccatcattttatttcgcacatccttggtgatcttgttattccttgtaacttcctttggtaatgaatttttacttcaactcttctgccggaaccacacttatcttatccttgattgttttctccacttcatcattttgcgtgtcttgccttaactctgtccatggacaatgcttttcatcattatcacctttattctcatcaactctatatcttaccttgatgtttatcttataccgacctttaaaatctcccccttttccatctcaatctgagcgtcgtactttacctacttttcccttggttgtatcctcttctttgttacatgcgagtttttaactctatcctttgttgtgtttttgtttattatttcctttacccttctcatcactctatcctaccttgtgattacattatgtccgttatctaaaaatctccaatctcctatcccaatttgagagcggtgttttac

SEQ ID NO: 69772 - DNA, 330 bp, Zea Mays
tgtgaacatggtttgtgcaacatgtctcttcgcttattttggatgcaagtgttgagacgatcaacgataatggagaaagttgagtgaattcatgatggatcaaagcggtgaagcacaatgtaaaggcttggaccgagggaccaatgtgcaagggtggactatggctaaaacttggcgacaccaacaagtaagagaccacatccctaagaggcagccttttcatgtcacaaaactagttttgtgaagagtcatggttgtttttgtctaaaacacaagcaagttgggtatttagagcaatattgcaaaaacaagaacaaagctacaacttca

SEQ ID NO: 69773 - DNA, 425 bp, Zea Mays
gggcccgggctccacctgggatcttcgtccaagaaataacacaaccaagcatcatcacaaatcagatggaagaatgcaacaccctgagccagccagaggcagattccaatgactagagagagccaatcgtcagatacatcaaaaatgaagaggagccggatgacaaggctgcggcagagcgcattgcaaggcagtcaacccactacaccatcatagggggcttgctgtacagaagaggagcagtgggagtcctcatgaaatgcatccactcagccaccgggagacaactattagatgaaattcatgctgggcagtgtggcgtgcatgccgcatcaagaactctggtgggaaaggctttcagatctagtttctactggccaactgcaaagggtgatgctgccgagtttgtccagaagtgcgaggcg

SEQ ID NO: 69774 - DNA, 453 bp, Zea Mays
cttagaaaggacagtggtagcatgtcattatttttcaattaccattgtcacatcagggagatgggctggaatgaactttttctgcaggtacactaacctcgatgtgagtagttcgtttagttgcgcaataacgagtgaacgggtatgccaccgcttattacgttaacatgaataggttgtgaggtcgtaagttacgtgcatgcaatggcataatcatcatcttgttcatttattgcatcactcctctttttgaagatagggtaggggttttgtctgcgctattaaccaataaaaacattctcaccctaattctcacccatctaacattgtaacagatagctctccgtaggctcaccgcccgtaagtctacgggaggacgttgctgtaacacctcaggtgttacttagggttttcacttaagactacacaagccaggcccatcatcacatgtgg

SEQ ID NO: 69775 - DNA, 734 bp, Zea Mays
agaagtagaagttgatgacggtaaagatgttgataggatggaccagatgcttgaggatctgcagcctgaattggccccggatcatcatgattcacctataacggaggttcagaagttcttcgacctcctcaaagcgtcagaagagcctcttcacgggcacactgacgtgatcgtcctcgaattcgtgacctggctgatgtcaattaagtccaagtttccattctcaattaattgttacaaggagcctgtggatttgattagcgaggttcatcctacgggtcacaagatgcccaaagacatgtaccagtccaagaaattgcttgaaggtcttggtatggagtatgagaagattcatgtttgtcaggacaactgtatgcttttttggaaggaacatggtagagagcagaaatgcttaaaatgtgggaagtcgagatacgttgaacttgtaaatggagatggggagaaggtggtgacaaaggttgcacataaacagcttcggtacatgcctctcactcctagagtgaaacgtttgtttctctcaaggaagaccactatgcacatgaggtggcataaagattgtacggacagacaagatgggttaatggtgcaccagtcagatggtgatgcatggaaggctcttgacaacttggatctagagtttgccagcgatgcaagaaacgttcgtatcggcttggcaactgatggtttcacgcctttcaatatgaccgccacgt

SEQ ID NO: 69776 - DNA, 410 bp, Zea Mays
caaactaccaaaagcatagcaaagtgcacttacccgctctagctcagccatagagtgcttgtgagcaacctcagcgccgaagggggcccaacatgcggtcaagcatttcgtctgcggtcgtgccaacaaccttgctgattttggtgtcaaaattctcgctggaaccaaaattgggcgaggacaaccgagccaagtggtcgcacccttcgtgatccaatgactcaaatctgctcttgtaggtcacgagggcagaaaaagtcattagtccttgaatcacctcggatagccccgcagtctccatccacagccatgtcgtccagcgttggaagagaccttcgccatctaggtccaacggatggacgacatcccccaactcctgatacacacgattgaagtaattaaatacatat

SEQ ID NO: 69777 - DNA, 615 bp, Zea Mays
gccaaacagactgatgtcgaagctgttgttgcagtcgaagatgaaaacctcacaaccactctatccaaaattgacagacttatatcagaagtggttgcggagaaggagatggccgcagtagtttcagacaagggaaagaagattgacgaaacctcttcagaaggagcgaatttcgacctacgacacttgggcggccaacagctctctgaagaggacatatcggagttgaaagaatttgcgatcttctatggctaccaaccagggtcaatgctctttggcggggtcgacgaagaagttgtgggatgaatctgcgaccgtgctggtgctaaaattataagtacccagtctaagagtgttggattcccgaagctcgaaatggacatcagctgttataggcgtcaacatatcataggcaacctattttattctaacttcaaagtaagaacctttttacaagttaccactgatatgttcgtattagcttaagtattctaattttgagtttgtttttacagagcttgttactaagcaaagctttaaaaatgcaacaaggtgatgaggataggaagaacgaagttattgtcaaaggtttagaggataaagtcaaaaaacttg

SEQ ID NO: 69778 - DNA, 499 bp, Zea Mays
ggagcaagtatgaattttctatgaattattgaagattcagcacttatttttgtattaaaaatacattttctaattcatttattcgttttaacctgtcactggactgggcctcaaaatctgagaacagcagggggctcggggtaaaaatccagagacacagtgcatagtgactaatggacggggggttctatttcgtataaacagaggggttcaaatgtaaatcgcgcagccgaaggggtatggagctctgctggccgctggattagacgccaagcgcgcagattaaatcacgctgaagtagcagaatccgacccttggatcgatttcctacggcacagatttaaaatacccagacgcgttggtaatcatcggatcacagatccatggtcgcagttctattgggcaaagggcacgtaacgccaaatctgagccatcgatcaacagatggacggcatgaatcctttcttcctcccgagattccacccaagcgacagggcgt

SEQ ID NO: 69779 - DNA, 1169 bp, Zea Mays
cttatccccaaccacttttgcttatctcacaatagtgtaacaaacatgatttatgccaaaataaattaagtagatcttatatagtctaatctaattacaccaatttaattttgattccatctaatctgatcagatttaatctaatggacaaacatgttaggtaatactggtaaaataagattggatcctactcttataaatatgttttaatctattggtgacttagatcaacttggccatacacaacaatttgacctatataacaagttacctaacttatccaaccaatctagaagcaaacaaccaaaactacattctgactaatctcgttcaacttatagctatccactaaattagctacacaacccactaatttgttacctacggacctatattaacctcttgtccctaattcggatgaagacaccaagactcaagaagaaggagatcaaactcgttgaggaatgataagagtcaagccatacctccaaaggaatcaagatccacaatccgggatggagtctttctttaccctgctctttcttgctcacacctattcatcgctctaggacatcttttatcctacataatggggcggccatacatatgccttcctaatcacctgataatttgatatagtctgaaaaaaaaatattttggtactagaactaattagaatcttaaatctagactacaagctaaacttgttgtatcctctttcttacaaatctcgaggacgagatttctgttaaggggggtaggatttgtaatacccaaatatttggagttataaaaatacatgaatatggggagattataaaaaaaaattggttgatcacttaatttttccgtttttcatattcaactaaaggaactgaattagccaaatgatgaataaataaatgtagagatgtgcatatcatgttggcgttattgtattgatgcatttgaattcaaatggatgatatagatttgagtttgaaaatttgaaattgaaaaaaaaacaacaaaaattataaaagaaaagaaaatagaaataaaaaaaaagaaatagtcaaatgttggctgggccaaaaccttcaccgctcggcccacctcacctcgcgacagcccggcttgagaaatggtgccgacaggtgggaccgctcggtgcagccctcttttcccct

SEQ ID NO: 69780 - DNA, 1217 bp, Zea Mays
accactgagactttgagcataaattcaactatgatccagcaagaatctgcccatggctgctatgacaaacttgtagctgatttatagctctccatctttgctgcagagcatggagtatgttaccatatagagttgtgagaaaatcgagcctaaatgctgactgtcaggcgctctgaatgcagttcgccatggtacagtgctctgctgtggatcagattgccagcgctgcgtgctcaccgccggcgacctccctgcgcgaagattcgcgtcgccgccgttcggatttgtgcacggtattggatggataacgccggggaaagggtaactcatacgtggcaccatctcctgagctcgaccggagttattcaccggcggccaccgtgactcagtgagctctcgcctcgctgtcgcacatgctttgattcgcctcactgtgcctcttccttacgtggttgccatgcgttaatagcccacctcgtagccgtggatcgatcaccggaccgccgtgcctatatataggacagggagccacgacgaggtgctcgctgttcttcaagtaagcttgagtacaaccaggaattcgcactgccctctccaccttctcctaaatcgattgcgcacggtgaaagcacagcctcttacggtcctatagccccgatcccatctcccaatttcgcccagagccgtcgcgacaccgttttcccctttctctgtctccggcgaacgtaaagctttgcgctccgtggccagccctctctggtaaggccctgtccgattcaagctttgttttagcagctctgtgtattcatgaagctcctcgtagtggccgtttgaccaatccgagcgtagattattgggaacacaggatcgacaccacgggttccgccctgatcgtggacagatagtttccagtggggtttgtgtcgattaaatggatgttcctaggtcgccttaagccagagatgcctccccggtcgttatccgtagcagtcgtcaccggccgtggccggtacgggccatgccaggcttgaacggcgagcgtgccgtgaccagggaggtgtttggagaagaaatagaagtctagggtcatctcagcaatgtgtcagcgactgagtgcaatagtaaataaacctacttcgatttagctgataaaccgagggcctctatgcaaagttgccagagcgcgcgggcgcgcgaccctgtttcctgtgtagttg

SEQ ID NO: 69781 - DNA, 1325 bp, Zea Mays
tagaaaacttgtagagctatataaggagaacaaattttattaagtaagtaagccctagtgctacatgaaagtgggagaaaaatagacctgaagttggtatgtcagtcgagcataactctgaaactggactaacagtaaactaggaccaagtttgagtatgatttagtgagaattgaagtatggtggatatagcaagattaatgctggattataggagaacaacttttctaaaggtggattagcaagttatcacatgaaagttggagatctgggcactgcaaaccgctctgtcaggcgttctgatagggtttctgatggtatagtgaactgaacgagatcacaggtgcagtgcaccttgccgccggcgacccccgcgcctggattcgcgcccactagtgcctggataacgcctcggggtgaaaagatcttcaccgtggatgagaccaagggctggccgccgtacccgcttgcctcacggccggtccagatagcctcgccggagttggccacctgctgtgcgatggtcacgtgccttgaagctttaccacgtcgtagtaagccactttagatagctggttcgtcgctggtaagcttgccatagtgaaagccatgcatcccttgcgccagtgaacttctctctctccggccgccagcacgccatgccaaaattaggagccaccgctctgggattctataaattgagcacaccgccagctccgttaggtaatcacgaagccaaagcacccgctcctgcctccgattagccaccatagccctctaattcccctttcccccaaatcgggttttccacacgccgtgaaccaccgcgtcatggtcagccttctgcaggttagctcaagtctttttgattgatattctagcttccctcatgccccctgttgctcacagaaccctccgattgaactagaccgtctcgaatcacccataactcattgagttatctccggtttccatcgccaccgtggacaaagtgattgtgagctagaactttgtaattgagtgagggattcttgtccccggggttagaattaggggtcgagcaaagaaggagcctagccgttgcattttccggccagggtaagcttgccggagccactgctccgccgtccacggtcggggacctcaattcgcgaaggaatagaaagtgaggggcctcggcgcaaatgtcagtgacacatagaaatagtgcgtaggactattaaccagtttttcaaatggccaggctcctctgtacaaacctggcaacgcgggcgcgcgtgggcgcactttcgcctgtgcgtgggccgacttgggctagtttcagc

SEQ ID NO: 69782 - DNA, 281 bp, Zea Mays
tttccttttccagccactatgcccgggatctcttccgcggctgcatccagaagcatggtatcaatttcagagagtgtggcctctagatttacatcttcagcggtttcagcttcggcactttcggcttcggtgggtgcagcttcggcaacagcagtgctctcaatagctggagtctttgacgccgatgccagcggcggtgtctgctcgataacttcaactacatgaataattcttcgttttttcggctcatctggcttcttcgccaccgaaggctccttttc

SEQ ID NO: 69783 - DNA, 435 bp, Zea Mays
cttccatacaaggcttcaaaaggtgccatcttcaaactggactggtagctattattataggagaactctgccaatgaaagacacttgtcccaatcctttccatagtgtagcacacatgccctcaacatatcttccaaaatctgatttaccctttctgtcttgccgtctgtttgaggatggtatgctgagcttcttattacacgtgtcccaagtgattcttgtaattgctcccaaaaccgtgccacgaatggtgctcctttgtctgatactatagtccttggtattccatgcaaacaaactatctggtcaatgtagatttctgcatacttctccgtcctgtgggtggtgtgtaccggcaagaaatgagctgccttggtcaatctgtccacaatgacccaaatggaatcatggtgtcgggaggtattgggcaatccc

SEQ ID NO: 69784 - DNA, 761 bp, Zea Mays
aaaagatggaaaatgagctagaagatttggtgaagccaatgggatgacttagagtggttggatacactcaaggaacatttgtctaagtcatggaagtgtccaagtgaaaggtcccttgtggtttttattgttttggatgaaaacacaattaaaggtctagtcagggtgttaagtgttgagtaggtaattagtgacaagcctacaaggctcaacacatggagacaagagtgatataccatataagttgagttggatatggtctatggatatcacaagtcaagtgaaggatggacattgtcaagtaggactcaatgtacatgacttggagacaactagtcgaaccaagaacaagggaagatggtcttagagatactagagcaagggagaagatcaagagtactgaggtacctaaagccaaggtgaagaagaggttcatgcagaagtcaaggttgagaaaggttgtgggaattgaggatcataacatagggatgtgacttgaagccattgaggtaattcatatggtttatggttcaagtcataaggttcaagatcctagctcgagtagatcatggtcacaagaagtgcagaagcatcaaagttagaacttgtaagaacccaaaagagataagtatagtttgacttatagattgggtctttcctatgtttggaaatgtttttgttgaacattgtagggtgttggagctcatagatggcaaataagatcatgttatgttgacttgggattttggagtccaaccccg

SEQ ID NO: 69785 - DNA, 698 bp, Zea Mays
tctatttcttagcagtgccgagctgaaacccaaggttttctcattggttgttaaatgttaatcaatggaagactagcttgttcccacacctctgcatagatgctcgcatatatagatgttcaaacatatcgcatgacacgacactgatccgagcactattagacatcagtggtagatctagaaatggatcaaaagggctactaagatgacgttaaaaaatcttcaagaaacacgtagaccaaataagtaggtatgaaatttagagcctaggcacgggcgttggtgcatgtcggtcgtggctaggagacggaggacatctgccagatagacaatgatggccgacatggaacgtaggcgctagacattgggtggctagagataggacacagacagagacagagacacgactggtgtcctagtgcatgtgtgttagatgcagacatggctgatgcgtggtggattagggaggagaatatttgggcaggcttgaagacctactcctacaaacttatcccacggctagggttgtagcccgacagccaatcccatgttgctgccaatgtaaaacacgacaccgttagtaatgtgttgtgtcgtgcctataaatgtgtctagccatcaacccacgcacacagttatagtgtgtaatcatgtcgtgtcagcactatagggcactagcacctaatagtacatgtgac

SEQ ID NO: 69786 - DNA, 331 bp, Zea Mays
aattgatcgaggattatgatcttgaggttcattatcatcctggcaaggctaatgtcgtggcagatgctttgagccgtaagtcccaatgtaactgtctttcggcgaagcctttaactgtgaccttgtgccaggaaatggagaagttaaacatggaaatagtgccacaagcatcaatagtcaatctccagttagggtcagttttgatttatcaaattatcgaagcccaaaagattaatgtctggatagctcatatgaaggaaagaatgatgattgatccaaccacacaattatgggtagatgataagggagttttttggttcaaagatcgttt

SEQ ID NO: 69787 - DNA, 754 bp, Zea Mays
ggctactacacctccaatggagagtttcatccgctgaaacttataagtagaaaaccgatgcaggtgtgggtggactatgacagcaaccatatcatgttgaatgtcacaatagcaccttacttcatgtcgtccaccaaacccagcaggccactgctctcgactatattcaatctttcctctattttgccaaccgcaacagtatacgctgggttttcctccgcgactggcacacttaactgcaagcattacgttcttggctggagcttcaagctcaacggagaagctgcatcactcaactactccgccttatctgtcaagactatccaagaactcgcacaacaagttccaactagcgatcacccaggcagctacaaggttctgatatgcaaaattctcttaccgatcgttgcaattttcgtacttgtttctgctgttcttgttaaggtccacatgaagaggcgatcacaagaaagagctgaactagactggcagagggagtatgggcctccatctttcacctacaaagaattgttggccgccactcatggattcaaggacaagatgcttcttggtagaggaggctttgggagtgtgtacaaaggagtgatgcctatctctaagcagatagctgctattaagcgagtgtcgccggagtcaaggcaagggatgagggaattcatggccgagatcaccatcctcggtcatcttcgccaccgcaatctggtgcagctgattgggtattgcagccataagc

SEQ ID NO: 69788 - DNA, 456 bp, Zea Mays
cgggcctgtactagcttcgatcgacatcataggagctatttctgtggctaagggggcaccctctgcactttcaataagcttcggcacctcggtcgtcccaataggcttcggcctacgtgtcaagaccttgacccttttcgccttcagtgcactagaagaggttgaagcagtaattttcctttttcacccttgccttcagatagtaaaacagtaatcagggtacacaaacccaataacatcgaaaaccctgtttagcctccttttccctcaagcgccgaaagcaactgtcatggcttcgtcttctgtcctcaagtaggctctaagtagctcatcactcgttgcctctatagcgtctagccaatcataactcggctcgtcaaactgactttgtactggaaggtgtacttgagataaaccaagccaccctaaatggagccagcggcagcttccttcggc

SEQ ID NO: 69789 - DNA, 858 bp, Zea Mays
ggatctgaatttcatggatatagatcgtttgaccaaccttttgttaaaatagagctaatgaatgtgaatataaatgtatatatgggcgagctaggataaatggaccagcacgaagcctgcaattttaggtttgacacaaacacaacatgactcacaaatgttatacgtttgggccgacattgatctgtacgtttggtcgtgcctaggtcaacaaccaaccacatagatcgacacggtacgacccgtatatataaatactaaaaacacttatcattctttttttaaaaaaataaggatgagtggtgtggtggtgtgctcacttcctttaacaaagtagctctaaagaggtttgaatcttcttcctagcacgctatagtggaatgtgtgctaaacgggccggcccgacacattaggcacgattaagaaagacgtcgtcgttgtttctctcactccatcagtgctagcacaaatgcacaatggtaacgtggtttccatcctcatacatgtggatactgtagagatgttattgttgttgttacgctgttgctacggatacgagaggacgttcgacgacttccttgactataatcgatgtgttcatctttcgttgcgctgcttgtcaatgcaagtggtaacaatgcaggatcctctgctcgatagatacgctagtgtgtacggtatatgttctctgacacgtatataccatacccacgccaatgcatgtatgagatgaaagaaacatcgaacgtggcagacggaaaacctaccatttatagtcaggcttctttgttggacctatgcatgcgcgccgcggatccacctgttgacttgaaaaacgaattaaaagaaagtgaacta

SEQ ID NO: 69790 - DNA, 461 bp, Zea Mays
cacaacttcctcagactgaaccagtgatgacacaacatgaacatccatagaagcagctgaagaagagctaagttcagaaccttctcggtgtgtccgcttcgtctcaggagacacagccagataacctgctcggtgtgtccgcttgtgatgaacaccatcggggctgcaaactctctcctccccgccaaatgcacgcccagctgcgacactcgccgactcattgcgaacagattcggatgactcgtcagccagcatactatgaacaacgtttgcttctgctttgtcagcgattgcttgcatctcgagatgagtctgtttttcctcttcagggagaccccggtatgcagtaatgaaggcttcaatctcctccaaagaaggtcgcgctatatggtctggactattgtcttgaacaggtgggttggatatgaactctgaaaagacctctgcaacgacaaaacgac

SEQ ID NO: 69791 - DNA, 355 bp, Zea Mays
ttcgattgtctctcccccacgcccgatcccaacgacggcgcagtgatctcccgcggcggcattgccccggcgaacacccgcccaggtgatcctatgaatgaaaacgagtgaaaaccattgctgcacgatgtggtagcatggagtaaaggggtctagggtttcctaccgggtctggatgcagcagtgggtgcggccacgttgtagggcagaactatggcgctccataatttcattgagcgataccgatcgctcacgaccgtgattcctcttgaagacgtgatgagtagcacccatggtggtcgaggagtgtagagcacagtgcggctggagtattggccccacacgtcggcgctgg

SEQ ID NO: 69792 - DNA, 284 bp, Zea Mays
caaaggcacaaaaaggtcttgcggtgacccccaagagaaaaaggatggctagtgtactagatgtgctggagacgataaaggcttcaagctctactccagggaaagttgccaaggcttcgaaagtgcaaattgaaaccgaaacaaaaccgaccgcagtcgaagcttcagtgagccaggctagcgtcgaagctgggccttcagagcctaccaaggagaaacccttggaaactagagaaaaggcaccagaggaagaggctatagaacaaattttgcctgaaaaagct

SEQ ID NO: 69793 - DNA, 636 bp, Zea Mays
ccatcataccaccatctgttggctcagacagcagatcttcaggaaccatatcctcgagagcctgatcaaaatttgctatggacaactcttccagaccaatgagagcagacaaagctggagaaggaatatcactactctccccactgactaggtagcgccgactgttcttccgaattaaggggatttcctcctcttcttcctcatcatcgtcaacaatacgaacaacacacccattggggtcatctctggccggatcacacccatttggatcagcatcatcaaggtcacacccattggggtcagcatcagcagggtcacacccactggggggacgtccaggaattttcaatagattttcccaagcagtcacctccatacagtatacgcaatgaatgtatcaagacagaaggaagatatcgacggagatcagaggaaagccaaaaatagccgatgaggtacaagtctaatcaacagaagcatttcagcacgaagtgatatgaagactagccaagagccatctaccgaacgtccaatctgtcgcagatcaaataaatttcaaacctaacaggacatgggcagatcgcatgctcgatctcaaaggcaaaactgtatgctaacctctaaagcataaagttg

SEQ ID NO: 69794 - DNA, 673 bp, Zea Mays
gcaggggctaaatcataaactttctcagtcttagtaaacaatccgagtggacggcggattttatttttaagaaagccaggagctcttatgcataataggcgggcgaaggggtatcagccaacttgagtcatccaatcagaatcgagggcccagattagaactgtgctttaagtgaaccggagcatgatgtgggccgcccaatcacaatccaacgcaccagatcagaccccgaaccggtacaccgtcctaaccattagatcgaggattgatggctaggatccgacggacgaaagggtatgtggtggcgtgatctcgaccatccaccacccatccgacggccaaaagatcatcttccacctcccggttgcaacagggagagggcaagcggagcaccgccggcgagcaggcgaccccacgccccggtaacctaatcacgatatggttcgatcccacacaaagagaagaaaaatgtgcatcgatctaggtataactcaccttgaatcgtgtagcaggactccacgacaacgaagcagggcagatccgcggcgaagatggcgcctcggtgagaaattgcgtggtttctagaagtgttcctcggacacaagggccatggataccttcatggtgttatggcgaaccctctgcccttttcctttcgatgcagcgcgcgaca

SEQ ID NO: 69795 - DNA, 366 bp, Zea Mays
ggcacacgtgctggcacgacacgacccataattagatatgtgcttctgtgtgccgtgcctttgtgggcctgtgccgtgccgggccagaccggcccacatgtacaagtatatcgctggcaaaaagaaagagagagagacatgatgaagaaccgaggtgtttttttaaagaactgccgattggaaacatcaaagatggcagcaggagaccgattggggttatgaggaaccgtatgttagcgatggagccatttggattcgacatcgggtcgtggacacccatatatccatatctaaaacaagccgcaggatctggatccactaccgctccagattttgctcgacacacgtttccttcccttccccttg

SEQ ID NO: 69796 - DNA, 724 bp, Zea Mays
ctcacgacgacgacaaaaaccgtgaatatcccgatgtgttcttggtgattcaaggcagtctagttcaattaaatgggtctacgagtattaggagacttaagggaggctagaacatcaagccaagaagcttgaactgacctgtagagggttggccatggcgaggtgttcacggtggcgtggaaaacgaatttgggggaaacgtgaaattgagaggctctggtggatgatcagaggtgagagttggtgtgctgggtgcgtaataacctagtggacctagttgatcacttaatttataacatcgatcggcggtggcgtccaattttgagagagcgcgctggcagccagagagaggggaagtcactagcgcaagcgctatcgtggctttcactgaagtaatgacttagacgatggactgactatctacggcggtctatggcgacgtggtgaaacggctgacggtgttgcagggccacgaggaacggcggcacgacagcgatggtcgcgtggccacgttgcggcgcaactggacatggtgacagagcactacagtgtcccatcttcatctcttgcccaagatctttcaccacgcgaagttatccgcacattactgggcgcgaatcacagcgccggcacgaatgcgagcgcgtggttgccggcggcaaggtacactgcacctaggatcttattcaggttactgtaccatcgcgaacactctttagtgcgc

SEQ ID NO: 69797 - DNA, 397 bp, Zea Mays
atttgaatacagtacatctgtgcacagccgagcagcaaaaaataataataaaccaaagcactacacattgacagagatcagtgccaagtacacattaccagatatcgatgagagctggggaggatttagattggggaggcagactcgcttgacagctttaaggagcgccatcctctctgtccatggtaggttggcgtggacgtaggaaggtgattgaattttggcgtcgacgtaggaagcaaatccttggcatgggggcaatgatcgcgcggagggcatgattagccttccatctatgtgccccgattttcttgggattagcggatgtgcgggcggattgtgaggattgtggtggggtcttgcccccaatctctcggcggatgcgtgcggttggtcc

SEQ ID NO: 69798 - DNA, 556 bp, Zea Mays
ctagggacctatgtgcaaaattagtccacttttggactaaagtgcaaaaaccaagtcaaataggtatcttaagtcatttggttcacaaatgtgtggacttgtaagccaaatattggattttggacttaaatgcaaaatagacctcaattaggttctattctaagtctgaaatttagtgttaagggctcaactttggagcattgtatcttgcaaattctagggtttttgccctaggtcaccacatcaaaattatagcccaattattggagaacaagtttgcttgagagtgcaagccatgttcttgtgagaaattgggagataattaagcctaaagattggctgtcaggctgattcagtctgaaattcagatattcagtgtagcagagccaactttgagtatgaattccaccttgatttagtgctcaaatgggttcaagtcctatagccgaattattgttggtttatagctctacaactttgttgcagaaagtaggcttaggttccacaaaaaattggagaaaacagggctccaatttgatctgtcagtcaagctttt

SEQ ID NO: 69799 - DNA, 482 bp, Zea Mays
ggacgggcgagggatccacttgacatatcctttctcgggacaggcgagggaccctgtctagctctgccacgcctgacccctagctcggtgcctcagggttcgtctaggggcgggtgcttctagggtagacatatcctttctcctcctgctaactgatggaccctgattgccaaaggcttcttccgagcgtccttgctgactaatgggccctagggaccggggatcttatccccgacaattctggaaaagttagggtctaaattataaacaaaaggactaatctgtaacaattgtataacataagttgactgtgggttgtattggaagtttctcagggtctcttttgcaaagtgtacgtgactattatacgctcgggagagatatgggttgttggatcttacatcagtggctcagattataaggccgaaggggtatactggttgttctaatcctggccgccccttccataactaacggctcgc

SEQ ID NO: 69800 - DNA, 584 bp, Zea Mays
ccgacttaaagcgtttctaacttaagccgaatgctccattagtagggcatagtgatcaccctaagtcaagtaagcgtgagcatgtcgcaccgacttaaggcatttctgacttaagccgattgctccgttagtagggcatagtgatcaccctaagtcaagtaagcgtgagcatgttgcaccgacataaggcgtttccgacttaagccgattgcttcgttagtagggcatagtgatcaccctaagtcaagtaagcgtgagcatgtcgcaccgacttaaggcgtttctgacttaagccgattgctctgttagtagggcatagtgatcaccctaagtcaagtcatgctgatttcgagtcaagcccaatcgaagttagttgtcaatcaagagtctgaatgcctttggaaaatgaaagctttattgatgatgaaatcttcttgttatagagtacaacttttcttcaagggttttgaggcatcgctaagggtagaactttctgaggtgttctatgttccatgagttccccacttctatgccgtccatctgagtaagtcgatatgatcccggccgtgtgacctctgatacaa

SEQ ID NO: 69801 - DNA, 277 bp, Zea Mays
acggtggcatcttgtgcgcccaaaatcattgggagaggttgcgagggcaagatgatcctctcaagcaccccacactcttcatatatatggacccttactgataggcgtttaacctataggtccattagcattcctatagatcatgattgcctctagggaatatattcaacaaacttccacttgcacttaagtcaatcatctatgcaactatttcaaccatttaagtgtgtggcccgtaggtttatgtgcagacagccacagtcaaaaccattttcga

SEQ ID NO: 69802 - DNA, 771 bp, Zea Mays
tacagcttgtctaggttgttccgggagtcaagaagttttcgcatctcctcctatggatgggagaacccttgataataggtcgaaagcatggaataggagacttggagctctcgatgggttacctcatgagatttcttctccaagtcaagcttcgcatgcagggaggaattcatggcacgggcgccgtcaagaaacatagtcacctgatcaagatctgcctgacctcgtgtacacctgtcctcaacatcagaacatcgctgagtcaaacctagaaaaataatcaacaacgatctttaatatgaacaggaagacaaatctacatgaaacattatcaatcggctcaccgacgtgtgcagatttcagatcatctatctatttttaagagaaagggggttccactatgatagggaacaaatctgctcaggtacagtagcaccgcacgatctcagttgagttgacaccatgtccaggatgctctatggatgcaaaagttagcaaagagaacacccaatgataaaagcacggtagagcagggatgtacatacctgaaggttggaaaggaacgagggaaatcccaaggccggaggtatcgatgcactcccagaaaaaggacattgatagaaagcacatcatgaacaggactgggtaccaaaggaatggggtaatccaagctaagtgcaacacccattgggatctcgactctagaagcacccattgggtcttcagtgccatggccattgacctctatggtggccgggccatatagaccag

SEQ ID NO: 69803 - DNA, 702 bp, Zea Mays
tgtcatttataacaactgatgtatttttctagctttgggaatccaatgctcttcgataaagtgcttatgattttagcaccggcgcggtcgcgaatgcatcccaaaatctcttcatcgaccccaccgaagagcatggatccgggttggtagccacaggatatggcaaactccctaaattctgatatgtcccttcggaaaattgttggccacccaagtgatgaatgtcgaaattcttatcttccgaagaggcctcttcaattctctttcccttatcagaaggcgctgcgtctacatctttctcagcaaccacatctgatataagtctgttgatttccaacattgtggttgcaagattatcagcttcggctgcggcagtatcttcaccatcgataggcataatatctttatccgctgaagctaggggcagggtatgttcaatagcttgcatcacattcatcatccgtcgtttcttctacccccaccagttttcccctcggtagtcggagcagtttcctttgactgtaagaggctagtgagatcaaaccatagaggacttagcatcgtgaatgggatgggttagtcattaccttcaaaatttttgaaacatcagcagcagaaggcgaagaatgactgtaacaccctgaatttctttctaattatcaaccaaactcatgtgttactcttctctctctctaatttctc

SEQ ID NO: 69804 - DNA, 388 bp, Zea Mays
gttttcattgacatctggactgcgcacagtaatacagaatagctcgaggttgaacccacaaaagttcccaaactcagttcatacccgggatggactgcgagttagttactgcttttctcggggtttctttagcaaattcgccacagcgaagcgttatcgcgcaaagctcgtcgaccgatcccaaacggagcgccaggattagaccgccgagggaggaaaagcggtacacagctccgaccaccgaatcagcgatcaacgatccacgttctacataaccgggatcgactcgcgctcatcggatttaagatctacgaccctaattgatcgcgtgaaggatcaatggtcagtgcgccttcttcccccgatagcctgccaccacagtggacgg

SEQ ID NO: 69805 - DNA, 844 bp, Zea Mays
gtgccgaagggcaagaaaatcaagaatttgacccaccggccaagatatattgaaacggccatagtgccaacatttggtgaagagacattttttgctgccgaagtagaacaagctgctcccgccgctcggagcgctgaggaatcgactatagtgccgaaggtgcctatagttgagccagtcgaagccggagatggggcggccaaaaagccagagtttgaaaaaacaataatgttgccagaaattctgagcccaccggtagaagcagaattgccgaagggtgcaaaagctcccaccacaactcccaagaggagaagaatggctagcgtactagacgctgtcatggagacaacaagagcattgactcctgctcctataaaaaaggttgctgaagctgctacgactcataccaaaaccgaagctaggccttcaatgcctgctgagacgaagcctgtcgtaactgaggaaagagctgagcaagaatctccagatattggcatagctatggagaaggaagaggccgaagaagctaaatctcctgctctcgaagcaccatctgaagatcttgactatattattcgacatgcttcgggagaaagattatccgaagaagaaattttagaagccaaacactatgcccgggaactaaaatacccgaagggggccttagtgttcaatggcacggacgaagatgatttcctatactgtctaccagacaacaaagagatatccgtctgccgggagatgatcaaaagtatgggatttccgaagctcgaagctagcctctccgccatgtcgaaggatgaccttgcggacagcctcgtatacaacagtatgaaggtacaaa

SEQ ID NO: 69806 - DNA, 811 bp, Zea Mays
tttttaatacccttatcccttaatctaaagtacttacccttgtacctctattgctcatttaaacagttcagtttaggtgtccatgaccttcttgtcttttgggatcatttcttattcggttgtaagttgctatctttcaacaatttctatgcccttggtcttggtatgctcgtaccattgaaatcttgcatactcttatttttatatgtgcgtacctttatatcccaatatatgtttaagacatttcagttaacatgcccttgaccacccttgtttcttaatgatccatgagcggtcattctactttgcatatccttggtgatcccattgtctccttgtaactccactcggtaatgaatctttacttcaacccttctgttggaaccttacccatctgacccttaattgttttctccactttgtcgtttcgcgagtcttgtcttaactatatcctttgttatgctttttaattattatcatatgcacccttgacacctctatatcctacattgatgtttgtctcatacctgccctttaaaatcgcccctcttccgtctcatgccttctttctcttggtcgtatcctcttctttggctcgcgagtttttaacctcatcctttgttgtgcttttgcttcttattgcctttacccttctcatctctcaatcttaccttggtgattactctatgttcgttatctaaaacctccaatctcccaacttagttcaagcgtggtctcttacttatctcacccgtggttatatcctatactttacctcttgcaagacttatcttatctctattcttgattg

SEQ ID NO: 69807 - DNA, 766 bp, Zea Mays
taggatctatattatctttgctccaaaatgcatcttctggcacaacaaatgtgaactcctcgagtttgtatttgttgctagccaccatgtaccactcatgcattctaatctccggagtcgacaacttagaaagttgcaccgtcatcaagaacggcctcccattcacaaatttaggaggaacaacctccttcttgtatatcgggatattgattttaagacgtaatgattgtcgagtatgaatcattccatcttcttcccatacttcgaaattgtctatttgggaccgtgtgcgtactccacgagatgctgattccgcttttgattgatttgtcataactctctgcaatttttgcaggtagcgtgccactgattctgacggtttcttgacatcgtcagtggcgattcgctgatgaattttctttgaaatagttggcccttcaacattggtgtcaacctttgcttcctttttgatgtttgcgtcgacattctgaggaacaaatttgtctacgtccccctcgtcgagttccttaacaagaggtgatatgattgtttcaacgatttttgtggaggtcggtgctatattttcctgcaccatggggtatggaatgatcgaactatctttctgttgcattagtgttggattcgacgttggtgacttatgacgcgatacaccgcttaagattggctcatcacccaacttgatgtcgtgtcgatgccaaaggaccaactcgttcattgcctcctgcaaagttatgatcccctcaac

SEQ ID NO: 69808 - DNA, 424 bp, Zea Mays
cctttctatagcaccacagccacccaaagtggaccatacccacaaaaaataccacctaataaagaggtgaggtaacatcatgagtattgccatagggacggtcacttggttgagatttgctttagaaggaagagagataagtggtgagagtttgagaggaataatagggacatgcaccaccctgtccatggtgtacacgaccctcttattcagagggatgttggtaggcctagagttgcttttccttagggtgctaagcctcaagaagtgagaccatgcattagttgtggtggatgagctggtagggtgttggtcgtaagaaatatgaccaaagaccctatggcagttgttctttgtcccgcaactctagtggactatggtttccctctcatggagattgctaccataaacctcttaaaccgac

SEQ ID NO: 69809 - DNA, 796 bp, Zea Mays
taatctcagtcgttccacgtcggatcgacgatgacgattttaaacaacagaagtccccctggatccgcctgatccctacacccggccgaatcgacaccccattgatttaatctagatcgttgatttctcaatccatggccatgacttcctcttctacctcccaactcggctgggcgacgacgctgagtgcccagggcaatgcccacgccggaacctaatgacttaaggtccccgcgaccaaacccgggtgctacaaacgacaaaccggacgtggagggcttaatgaactcaggagggaaaatcttaacggtacccggagcagtcctgtgacttggagtggctccgtggcagcgaccaacatctatcagtaattcacggttccacagcagccaccggcaccaacaaccgctacaacagaccctgagttggccgacgacgctccccgtttcgcggacagcggcaacactccgctcctctccggtccattagcactctagtcgctcccccactctgtgttgacgatagggtgtcgagaacctaaaccagggaaactttggtcaaggcggtggcgtaatttataggcccgatgcaaagtatcggtttgcaacacccagatcatcggatctcaacagccccgcatggataagaacaaccctagctgcggacggctacatgctcgcggttttgcttacaaaaattataagacgatctgaccggggaggaccacatgtcagagagcccccacgacacaagcacgacgacggtctagtaggtggggtctgcttggtagcctcaa

SEQ ID NO: 69810 - DNA, 381 bp, Zea Mays
tctggaaggagaccatgagtgagaagaagtttacagtatgtggtgagcgtagattcgtagaggttgaaaacgacgatggcttgatcgtgatgaccgagatagcacgtaagcagattcattacatgcctcttataactcggttgaaacgtttgttcatatccaagaatacaaccagacacatgaggtggcacaaagaaggggtacgctagaatccagatgtcatggcgcacccagctgatacacatgcatggaacgtactagatgcctttgattccagctttgctgttgaagtgtgaaatgtccgcttcggtttggcaatagatggtttctcacctttcaatctaattgcaccatactactcatgttggctcatatttgctg

SEQ ID NO: 69811 - DNA, 468 bp, Zea Mays
taaagagaatgatagaaatgggccgacccaggaatgcaatgggcccacgcccagattactcgtggcttgggcgtgatcccgttgaagcttttcgcttttcccgtgcccgacatcctcaaatgccggagatagctcggagcggaggcaccatgttttcctcgggatagcgaagtttgttcgctattatctaggagataagctggaagagtgtgatcagcgtgtacgagggaagtaccctacggtcgtgtatataaggccagggaggatccccatcactttcatctcattagcacctcaccacttggtagacaccacttgtaaacacctcccacatacaaagtcatcccaggaagtagggtattacgctcctcaaccgacccgaacctactgaaactcgctcgactctctctttctcgtgcccccgacacgaaccatcgagttacaatccacgacactgtcctacccaaa

SEQ ID NO: 69812 - DNA, 636 bp, Zea Mays
caaccgtccatctccaaacaagcgagtcggttagatatttcctcaagccccagtcagccgcctcctctccctcccacagctcctgccgccgcctctccctccgtcggtatctcccacctcgcaatccactcccacctcccccctcgcccctaaaaccctagctaaacccaagccgaaagaaacaatggctctcctcgcctaagcgagctcgcgcccgccccttgctggccatggcgctccagctccgccgcttcctcccgcacggctacggccagcgacaccgcgctgtcacccacgtgctatcaccgccgccgccactcgcgatggtgagtgactcactgtactcctcattctgttgagaatttatcacgtccaaaagtgtcggggtgcatggtggtgcggcttgaacgctagtacgctacctgttcgttgtcttgcccgtgagccactgacaaagcctcgcttatttttctttcaaaaaaagggtggcactgcgaaaagcaaggttctgtggggtgtgccatggagtatatcagtgtattatcccctggttacacagaaagacatcctttgcctttgcacaacattgtgcaagcctgatttggaaggaataaaacataccagctactatcgacc

SEQ ID NO: 69813 - DNA, 451 bp, Zea Mays
gcagagcgcatcaggagagaggcgaccaactggggagcacaaacaatgttgctgtcatgcggatcggtaacttttttccccaatcggctcttcttgcggagcctagaatgttcccggcaacgatggaagtaaagtgtcgtgatggcctagctcgagcacctgctagccggaaccatccacgaccggaccaacctccagaaggcctttgtcagaaatttctagggcacctacaagtggtcgggaagctcctaggacctgaagaggtgcacctagaagaatggagagagcctccaggactacatccagaggttttatcaaaaaagaaacgaactccccgacgtcaccgacgccactgacaccgacatactgagcgccttcacctatggcaccacgaacaaggtgctcgtccacgagcttgggcacaggagaccaatgacaattgtggacctgc

SEQ ID NO: 69814 - DNA, 563 bp, Zea Mays
ttgtgatgtcttctatgccaaaaaggctttcatgcattatattatatatcttcgggttacttcgggtaaaactttatgcacgaggaaagatgagagaattatcttatctgtgtttcatttatatttcaatttaatttcccagatttccaagcactatacagcttgatatagttgttatggccacttggcaatataaataaatatatgatgccacacaacacaagcaaataaaatatagagctaaacaaaattgtttacgaaggttgcgcataatgtgactttaggggcttgaacgacacaccacaatccacgcgagtacaaactctagcgttctggcgtcaacatgtgtgcggccatcagggctacgacaacacaacaagccttagtaataagcgcaacaggcacaattatggctcggtaatcggggtacacgataagtccgcgcaacgtgtacaacatgcacaattgtgactcgatgatcacggcagacggatagtgcctacagggcatacgaaaaatgcatgactcggcgatggcggtccgactcaacgggagcgatccga

SEQ ID NO: 69815 - DNA, 382 bp, Zea Mays
gccctacgagcggtctacgcactcaagcctagcctcgataggttatgagtgctctgctactagggatgcgtgggccataaatgtgccgtggtccgagggactcataggtcatgagtgctctacagtccgagggatttgtaggtcatgagtgggaggtagactgatgcctctgttgtggctcgttgctaggcgcgggatccactttgagttgtttcccttcagcatgttcggccccccctatctggttttgctacgcccgaccatgagctcggtgtcgtggggttcatccgagggtgggttcttctagggtagatgttacctatcacctctgactgaccagcgggtcctagctgccagaggactttccccagggtacttgctg

SEQ ID NO: 69816 - DNA, 446 bp, Zea Mays
gtgtaacaagctaagcccataaaggatgcccataagaatcatgctcgggcgacactccaacaatccaatattctactatagttgctctttgcgaatatccatggggaatgaggagaagatccccttacaagaatgaccaaaaccagcaataatcaccaaaattgttcaatgatcttccattgcgaccaaataatctacatggtgacaaccacaaagagtaacaaaaaccctactactcaatatgatcactagtgccactaggtgcaataactcaatgcaaatcactagagatcacaattaatctcactttggatcaatcattatcactagaggtgaatggatatgttttcttaggcttactagggtgtatatcatgtttagaagctagaatactcaacctaattatgaaagctaggaagagattaccttacccgaaaggggcaagc

SEQ ID NO: 69817 - DNA, 499 bp, Zea Mays
aaaatacacttatctcttatttatgcacagacttaacacctttcgggataaagcgtcactataaacaccttacacataattgccttaggaacctattagttcactcgaagacatctattcaagtcataaacacaatcatacacttatttgtgaagcacaatttaaggaacgcctaacgcgtatagactcaccttataattatagaggaagtgatgactacttacgacatgtcatcacctctctacttaagccgagacaaatttctacccacaaggaccaaacatttatgtcgagcacactttattttaccctgtctcgcatacaaccatattgtggcgtgcacccgagacattaccgttcaatttaacgcaatcactactacaacgcattttgatacacacattctacagcacagtgctcagacaacccacacttccaatttacttatcacatccaaccaacaccacgtttgataacacacctttctaactaaacatat

SEQ ID NO: 69818 - DNA, 559 bp, Zea Mays
catcctgcacgtaaccctgttaacgctactattcacccttgttggccccccttgcgagtagagagcaagtgccaacaactacatcaacaccttttgtaggcatcaacaactttgagttgaggacgattcaaaaccaagaaggggagaatgatgagtatatggatatcaactatatggtgaaggctcaatcaaacatagagtcccaagctcaaggggagttgaagtcaagtttatttgtgaatccggttcggactgcacgagtgggtctcgcaaaaacggatgctcagactacatacagactccatttttgacgttctagatatcgttggaaatctaaggagataagatttctaacccatttggttgcacatcaaaatatgctcggatatgatgggaatcatcattaaaagatgatgtccaaaatctactagaaatcatcgacgcttgtttttgggcctaaaggccttgtacatcttaggtttgctctgccacccccttggacactgcctgagtcgaggacgactccaattcaagtggcagaggatgatgaggacatcac

SEQ ID NO: 69819 - DNA, 876 bp, Zea Mays
ctggtcccactttgtcgaggccccagtgttgtagtggccaggcatgatcgattagtttcgtgaactgctagggtgtcctactctggggtgaaaatttctggcacgattcgcatgactgcactacacaagaaatatttaaatttaaatggggaggccatgttaatcatgtaccttttaatttaaaaacttgttgctctaaattttagatgtgatgaggacatcctctactattacccgttggcaaagacacgatttgcctaattgtagtcggacgacgaccgtgtgagcatcataattattccatcttgtttaacttaggaggaggaagccaccttaaaagggagagtcactcttcccccatcggactagtcttttgtggcgattggacctttccctgggttgggtgtgcttaatgaaccgttgggctccgagcaaccctaatttgttgggcctcggccaaccccacataggctgggtgtatcatcgggtatcagagctaggtctcattttaagaaggtgagaatgatgaagacattcttcactattacctgttggcaaagacgcaattggtccagttggcccaattgtagtcggatgacgaccgtgtgagccccaaaagtatcaaacctcacttaacttggttggaggaagccaccttaagagggagaggcaccctttcccatcgaactagtcttttggagcgattgatcttttccttgagttgagtgtgcttaataattgttgggcaccagataaccctaatttattgggtctcggtcaaccccacccggtctgggtgtatcaatatgtccatctaagagcatctccaagagatattctattttcgactctctatatgacactctacttacctct

SEQ ID NO: 69820 - DNA, 438 bp, Zea Mays
ctagaatctgttttacaatcatatatgtactgatgtagatcttagtacggggctatctctcgtagctttactcatcacttctctcatttcaatcttcactatgtaactagtgcagtctgcagtgtaaaacagtaatttgcatgcccatatgcatgatctgctgaccacatcctaagtacagtagagatacatgcaaacatttgctacctattctactcgtttgatggtatgcttctcaagtaaagtgactaggtttcgtcggtttcttaatttaacaaaagacaagattgattgcaagtttacaaccctgaagtaatgctgttggtatcaaatcctaattgggttggtgtgaccgtttctggtcgatgggttcaaatagtaggaaactattcggcctatgcagaaggatggccatacattgctacgattccatttatg

SEQ ID NO: 69821 - DNA, 1173 bp, Zea Mays
aatcattattattaagataaaatcataatttaccgaagtttccataaacataattaaagtaaaggtacatgaaaacatgtcaaagcccaatccatattatgagaatctctaacctgtgagaacccacccccaagtctactcgtaattgtgagcacgactaatatcaggttataacactctccagatgtttgtacactttacctacaaaacaagatttcgactttatccaaatagatcaaacccttacaccatcatattgatcggatgccttctaatctctaaataagaaacatttggctagcttagggaaatgacttatgtaggagagatggttgtctttggtagccataatccttatttatggggctacaaaaattccaagatcacccctaagcatttgccttgaaccacttaacaatagggctaaatggtccaaactggatttgagtattgaatggctatgagctctccaactacaccacatgttgccccaagatcctccatcgtgttttgaggcccaaatctaatagaactggcatatttggctttgaggctcaaagcgctaaacccatttagagttgtgtagtcgatctgcctcctcgacattattgatgtgtgtcccactatcctcgatagctcgatcaccaagttctcgcacacccaccttgaaatggtccaatcacagtcttgacttcggtcaacaacgtcttcaccaccatcctgccatgtacacttgcttgtcgatgtgtccgagtgctagccatccacaaaccatccttcggctcagtccctaggcccaagcctctacatccaccctttcatcgctttcgattcaacgtgcatggactcctcacttgactttctacaatgccatcaaccatcgcacgttcaacaacttcacatcacaaagccaagaggctatggtatacaccactcactcatgccatggagactcccagacatataaggtgaggcagggttccattagaaccagcgaagaggatgacacaatcagctctgacctgtattcatacatctctcctacgactctcataacctccacctgaacacttagaacacaaaatctctactggacggaaatttatatccatgcatgtgtccgtcgggtttcggacggattttagatattcgtcggatatgatggacacaata

SEQ ID NO: 69822 - DNA, 343 bp, Zea Mays
attcaaccgtgcttcggatttggtcctctgtgtaaaggaattgctcggctgagttccaactctgcctatctccaccgcattgcgtgacctgccttgtctagtgcctttcgcctactcgcagtgcctcgatcgtgttcgccatctactcctctgcctttggcgcgtgttgggtcagcggatagggccccgagagtcacttggggcaattctggtgaagtcctccaccgttcacaggggcggcgccaccgcacgttgggttggggtggaagattacctggttgtcgtggattggccgatggacggctcatatctgatggagtgcaccatttcagacagggtagcg

SEQ ID NO: 69823 - DNA, 427 bp, Zea Mays
ggtaggtcgaaggattgatgcttcaactgcggtgactctgactactttgtcgccagttgccctcaggagggcaagcaggaggctggcccgcgcaaccactactctagtcggtgcaagggcaagcaggagtacacatccggcaaacacaagtctaagggaggattcaacaacaaggcactcaagaagaagtacctctagaaggctaagatcaaggagcatgccttgctcacctctctcaatgatcacgaccacgactccgacgatgtagcatcttccttgagcgatgaggagatcgagaggtgagttgaggacaagctgaatggactctgcttcatcgccgtcaccactgtggcctttgcaccatggcccttggagatgatgcgatgagcgacgactgccaagacatcggcgatgtgatacacccagc

SEQ ID NO: 69824 - DNA, 1114 bp, Zea Mays
ttagaatttgccctgtcaggctgtgaggatgagatcaaattcagttaactgaatttcgggtccagtgaaatgtgcttcactttggggtaccaaaccttataatccatgcatgtttggctctgtagtgttgtagaaaagtgaaagatccatacttaataaacaagtttggagtggtatggtctgcccttctatagaattgggagaaaaagggtggtgaacttggccctgtagttgaactgaagaagtttagaacagtccaaaatccctgaaaatatctcaacccactggtttctctgggtagttctggcatgcagcagatatggagagattgtgttgaaaggggggaagtgcatgacatgagtttatcaccccatggatgagtttgaggaggtgtaaaacctatctatttgatgactcagctgctggctgtttgccttgctgtcacatatgcagcaagggtgaacttggctttcccctgtgcttggtctgacgtggtgaccatgcagaggagttgggggacctattaatgccagtttggctctatgttaagttccagtgatactacaacaagcctgttagcttgtatgccttgccatggttggttgaagcacaaactgagtttctttgtgctcctgtcgacctcctaccctgctcaccgcgccaccccattcacctacatctcgattaagttctcaaatcttcaccaccccactagttcactgtgaaaactagaactcgtggtgagccccggcagtggtgaccacaccagcttctctcctcggttcaccgtggccaagattgcttggcatcgtttcatgcctcggcctttgtgttcgggcccctcttaattatggtgaagctcacaagcctatttgtttaaactctactatgctagattgacaaaacatggccgcggcaccattggtcgacaccgtgaattaccctcagcgtggaccgatccactcatagcttctccgagcgaacttcggtgagcaccttattattgaggggtctctagtactcgtcgtgacctgagattgaactctactgtacttgacgcctcggtccaactcaccggagctcggttgtccgccgtcgccgtgcctagggaggc

SEQ ID NO: 69825 - DNA, 691 bp, Zea Mays
tttcatcaacgaacacaattccttctcagcttaccaacgcctacagccttccagagaggggatgtacgaatacctcacctctgtccccaaaagggcctcctctcaaacggtccggcgtcttcagcgagggcaacggcgacgccggagaccagcggccatgcatccttgctccttgtgcgctgcgttcgcctccacagcttctacaggtttgtccaacaccttatgaccttttcttcttcctcagtagcgcaaaccggtatctaggagtttccagtctctcgatcttcgcggccgtcaatgtcgcccttgccctcgctcttctccctgacccagacaacagggagtcatctcgtgtcggaagctggttcttccagcaccttattatggcattttcttcttcctcggtagcgtataccgatatctagggtttcccaatctctcaaatatttgtcgtcgtgaatgtctccttcgccctcgctcttctccctaaccctgacgataggatgtcagtccatatcggatctgaatggtggagctacggcaaggtgaatggcggtgagctcacatgactcctaatgctattggaagcgagttattgctggtgttcaccatgcgagcaagatgttcgatcaaatgcctaaatagatatttggaatacagattttagtacaatatagtccagtttctagta

SEQ ID NO: 69826 - DNA, 552 bp, Zea Mays
ctatgataaagcttaattgacatatcttttgatctaatatatctctttcaattagtacttgctcttaatttatattttttcttataccaaggttcaatgtgtagaacttgcatcctcggacgtcacatgtcctaaagtgcattgatctacaagtattcatcacttgtatgcacaagtttagggggagcaattctctacacattaaatctttcagactaaccattcttcaagtatatgttgtgcttagtctctaattgaaaggaaaatggagtttctagcaaagggagtacttccacttcacatttgttcggtatcaaacacccttgctcaaactcttgtacttcaattccatatctattgaaaaggcctcaaaatttcttcattttttgtgcttaatgccaatggggggaaagtattaggtcaaagcaaaaggatcgcaccaccaccctattttctgaaaacgttttaaaccatttcttttaagaacatggaatatttctctctatgtctagaacatggcgacagtaggatcactaatgtaaaacattccat

SEQ ID NO: 69827 - DNA, 493 bp, Zea Mays
gcacgacctctggaaaggttgccgcttcggctgctccgagtgagcctgcgcggaagagtaaaaagttgaaagtcctcacccaccggccccgctatattgaaccggccatagtgcccgagtttagcggggaaacttcttcagctattgaagcaaaaggacctgctcctcctacgcagaagattgaagagccggctgcaatgccgaaggcaccttcggccaagttaactgagccgaagactgataaaattgaggagccaagaatcgaagggacaaaaacattagaagttttaagcccttcggcagaagtggcggtgccgaaggcacaaaaaggtcttacgacgactcccaaaagaaaaaggatggcaagtgtactagatgtactagagtcagtaaaagcttcaagttctattccttcagggaaaattgccgaggttgaaacaaaaccgaccgaagttgaggctgcagtgggccagggtaacaccgaagctggtcc

SEQ ID NO: 69828 - DNA, 299 bp, Zea Mays
gggggagacagggatagagagtgagggagagcagtagaggatcaacttccgtcaacaccggaaggagaggcgagaccgtgaggcgaaggcggctacgatggaggcagcgtacacaagggagggatgaggcgacgaggtgctagggttctgggttctgaacttatggcagagcgacgtacacgagtgataggcagggacgaggtcggacggtgggacgatgggttaacccactattagcgggccttagccggaccgacctgtttagcgtgcttaggctttcactgtgggctcgcctagcg

SEQ ID NO: 69829 - DNA, 540 bp, Zea Mays
gccccttcccttttatagtttaagggaggtacatacaaggatgctaagctccgacatgcgggcctaggaacataatggaaggaatacattatgtgaataattaatgctgacagcacaccaagatcttttctggacgctgtgttgctccctccgccttagtaatgagtaatcagtgggggtcatgatgattgcagtccatgcataattgataagcagtaacccttttcttggaaacgcacgagtaatagcgagtcattgcccttgctatggtaacgtgtgagtaactgcacgacccatgcaacatgtactgggcgcgccgtctgtcactggaatggacaggtgcacgtcttatccgtaatgaatgcaaagacgcgcgtagcctagaggctttatgccaggctccgcccgttggcttacgccgcgcgtagtaagccacgtggcagcattgggtctctgcctgggcggcgagcaggaatgtatgtgataaggtccggatcccaccagatcaggtttggacatgtgtcggcaccggacccccgc

SEQ ID NO: 69830 - DNA, 1274 bp, Zea Mays
gtcgggatgacaaacaaccctctctattgtccataccatcgttatgttggacacattattgaggattgtgtggcttttaaagagtggctccagcgagcaattgatgagaagaggttgggactccaacctgacgctataaatctagattatcatgccgctaatatggtgagcattagatcaccatcaaagagttctatgggaaaggaagattgggttccgttgacacagctagaacatgagtttgctagcgtgcaacttactcaagacgttccaaaggttgacactaaccaatggcatgtcatgatgcatcatatacctccatcaagagggtatcaacatcatgaagcaagattagttccaccctactttaagcatgtcgtgtcacataggcaacatgacccaagtcatcgtcgtctaccacaaaggtttgtgccactgtctgagggggatgagcaattcccgcgacttgcccgaaggtcaccaactctagcacaattcatgcccaaaagctgggggcaggcatcccactccacagtgcaagaaagagaacctacaagagaagagtgcaacgtgagcctccaacatagcgacaacacaggtagtagctctgatgaagggttaaccattcatgaacaagagatatttcaagctgaggcttcttcaacaagtgctaataaactagaagtagatatgaatctacgaagtggcaaagtcttgccagaactccaaaatctgcgcaagaagtccaaagaaaaagatgtttgcctgaaggaaaacttaccacaagttgatacaaggaatgcaccaatgaatgatggagatgctgcgctcaaggttgattataatgtggttgcacacctcaagcgtataccagcactgttaagtgtgtatgatgccctcttactggttcctgagcttcgccaagcacttattgaggcattgcaaaaaccagaagtttatgaaatagacatggcaaagcacaacctattatgtaactcgatagaagccaaccaacttacattttctgaagaggataaagtactagaatacgatgatcacaatcgcccgctatacatagaaggaaacattgcttcagcacatctgcggcgtgtacttattgaccctggctctgcagtgaatatcttgccggtccgtagcctaacccgggctggatacactttggatgaccttgaccccactgaagtggtgatttgtggattcaacaatcaagggacttctgcccttggcgccatcactgtgaaagtgcaaatgtc

SEQ ID NO: 69831 - DNA, 493 bp, Zea Mays
gcagaatgcaagcaatagcgtatacgagagagagagacaatctcaaatcacactcctaatagcggacaaaccacactcctaatccggctttgatggcggtttcacggcaatataaagagacaatctcaaagacccatctgagctagcgtgtgtgtgaaaacagcgtgcaactttggatgtaatctgaaaacgcccccacggctgctacactcgataagaaaagggaaacaatgattgttaggttcttttgcttatctcttctagtaacctcgtactgcctgagtgtgtgcttacctcagctacgtgtactcgactagtaaccagccgtcgtaggtgagacgatgcatcctgtgcatggcaatgatagattaacttattctgtttcacgaatgatttttttttccaacaaaaatgtgcggagatgcatggtaaagtactgtatctgtcaaagtgtaaacatctcatcgggcatcctagtcagttcgttcaaact

SEQ ID NO: 69832 - DNA, 724 bp, Zea Mays
cgggcactatatgatggcatgttagggcttcgcttccccttcccttcttcgtgactcatcgagagaggcaaacccgtgaaagataaaggggtagcaagggccaccgccacagatactcgttgacactggggttcgggctccagtggggctactcagaggttggtctagccgcatagaagctgtgtgagggattaattggagggaaactagctgaagccatatgaattccttgtaggccgaacaacaccaccgcagggccgcaactcactgcattcagaggtgtctgtgcctctagggtcggtgagtatctacccttgcgatttgtcattatctgctcgatgtatagcactttttgtctaaaagcttgaatcctgatgtcggatctggcgaacaccgacgatgtcgccaccacggtgatgcccctcgccgccgtggtttgggatcgggtggggacaatggcttttgggccgttgattccacaggaacagttaggattacaatagaacgtaccggttggggtaggatggatctgcatcgctggatggggatcaaatgtgtatgattttatcttggacattttagatcctgatcgtcggtctggagttgagcggctgagatttgtttgtcttaccggattcggggtgcgcgcagatcagtcgttggatcgtgggcgtagagttgggatcagatcttatgctcattaaaccatggccctcgatctcag

SEQ ID NO: 69833 - DNA, 692 bp, Zea Mays
gcagacatgtgagatgcatctggatttgtcctcaaatttaggtgtgacacctctagataggtcaaataggttcctagtggtgtttagaatttatacaaagtgtagaccaggtgctagctcatttattccaagttttacccccttttggttggttttgagccgattttgacttagaaactgaattgttaaacttatgaacatgtgaatcaaagactaggcaaactagttagttcgaaaggttgtgatggacatcaagcaccaaaatcaatgtagaaaatggtttaaggccatttccctttcagtaccaaagaaaacttcctctcattgtgtgaaacccatggttgtcatctaatctctaatgatcatcatgactttacctatctagagtgccaattgttagggattttttggcagtgaatgtatgggatatgttaagatatcaagtactaaaagcaattgcattacagattcgaggatttatataggttcaagatcttgatgcgagataacaccctatgttctgttttgtggtggtttatatcgcctatgtaatatgatatcataatctgccatcttggggctcctcgaccctccttttatagtccaaggaggagcggtgtttacaatgtttgcattcgagttggttataaactcgatatagagttggttatctactacaagtcatgaccaag

SEQ ID NO: 69834 - DNA, 1081 bp, Zea Mays
aattaagcaagtttctatatttattgttgtactaaaatccattttctttattaattctacccattttattattctttgggctgcggccacaattttccagaaggctagggggtcacatgtcaatttcaggacctaactgtgctaatctttctatacccggggatggcgggtcaattaccagataccccagggtctcattaataaaagtggtcggctgaagaggtattttgaagtctcggccgcacgattagatcagagtggcccagattagctcgagtcttgagtgaaccgttacgcacatcagctattgatccagagatctgcgtcacagatttgatgaagttttgttttcctatggatcgtccgatcaccaccccacggccctgatttatcctccgaggaggtatctctacttcttatcataaccgccagccctgagatggacggtgcagagggcatcttctacaaccgtgccaggacgcacaaccgagcacaatggtgccacagctagcgcggcggcgcacagctcccgcgacggcgaccatggtcagaatcccgccatccggcgaactagtccacaaattcatcgtaaacgcgctatagggagggttccgatggtgaacatgacagagaaacgacacataggcggagggcatagagaggggggggtgtccttgctgcaaggcgggaccgaggcggggctattctccggcgagggatctatggctaacgagggctctattccatccgaagcacgatactagccgtcgagaggaacatggcgaagctaggggagaaggtctcaccgggagcgaaggtggggacgaggtcggacacggtgttgggcgaatcgctggcgttgaagtccctccggtgagaaactgtgtagcctccggtccacaatcccaccaggcaaggccatgacagacatcctggtggccttatttatccgcacggcccatccccgagggatctacatcgacgagccagagtcttccccatggcgaacatcattctcacacttccacccatggcggtcgggtatgggatgactcgaattcgggtgccagctcgatggaag

SEQ ID NO: 69835 - DNA, 536 bp, Zea Mays
caaagatctcatcgacggagaccgcgtcctcaccctacaggccctcaacaaatatcaggctcaaaccaaggcctagcacgacaacgcggttgtcccaagagagttcaacaaaggagacctcgtactcatccggaccacctggacagaatcacggggcaagctggagccgaaatgggagggtccattcatcgtcaagtcgaaggcatcccccagcacgtacaggctagtaacgccttccgacgaagacttagagcactcctggaacattgacaacctccggaaattttttgttttaccctcagggcccatgcgcccttgtaaatttagcaaacattattttggcccgcactcttttcctcccggggggtgaggtttttaacgaggcggagctatgtaatataccagcaaagcccccacaaaaacgaaaactcaggtgcaacatgtcgaaaaagaccgctccgacggtcttcggcattcgaccaattcgaagtcaccgcgacaggtagcgtagactaccctcacgtgcaacactctcc

SEQ ID NO: 69836 - DNA, 640 bp, Zea Mays
tcatggggtatcgttggttcataactagacgcatcacgtgtaattttcataggaaattcactctaaaaaatatagcattcttgactctataattataccaaccaacatgtccggtactccagagtttataattaaaaacctatatccaacagtgagaaaagcatacccaaggaaaacataatcaactattgtcggccctaatttgcacttcttattacaaggcacattcactttagccaaacaaccctaggtgcgcaaataggagatatttaatcttttgttttcccattcctcgaatggtgtgatttatttattctttgcgggaactttgttgaggacataacaagcagtcaagatcgcctcaccctaccattccttagatagtcccaaagtctctaacatggcgttaaccaaatcagttatagtacggttctttctttcagcaaccccattggattgtggtgagtatgacagtgtcctctcatgaataataccatgttccacacaaaaatcagaaaaatcactcgcaaatattctccaccacgatcagaccttaaccgtttaattttcctctcaagttgatttttagcttctgctttgtagatcttaaaatagtgcaaagctttatcttttgatttta

SEQ ID NO: 69837 - DNA, 411 bp, Zea Mays
gggaggaagaaacgctggggaccgtcggatcggtggcctgtgttgaggatgagtggatgtcgatgcgtgctgggaggcgtggatccggtattggacggctccgattagaagtagaaaaactattcgggctcgtacgtctgggtcgtcgatcggggatcgaatggctgaggttaactcgcgatgtgggtggttttggtgcgcagatgccggatctgacggtcagggctgcgcgcggggttggcgtgcgccaaatctaatctgtgctcttagattttaatcgaacgacccgtgttctgtgataccccttcaccgtgccacaattgctaaagagcccctctgttatttattaaccaacccgccatccattggtgctgtgcgctgtgtcttagaattattaccccgagccccctg

SEQ ID NO: 69838 - DNA, 1221 bp, Zea Mays
ggacaaaacctgatcaggaacaggggcaccgcaagacttcatctgagccgacacaaagctcagaacattatgcaaatacaagaatgagcaaaggagctttttgtcaacaaaagtaaagcagagcaaaggtcagctcacctgaaggttagaaaggaacaagggaaatcccaaagtcggaggcaccgacatgctatcgaacagcggggtactagtagaagcaatattgagagcagactcgagtcccaaaggaggtttagagctcgcgcccaaggcaacacttagtgagacctcagctccgacagtgtgtagcagattcccagtgcctaggtcactgacctctaaagtgatcgggccaacaagagcagtaggaagacttgtcaacactggctccttagtctgaactggtggtgatccgacatgaacatccatagaagcagccgaggaggagccgagcttggcaccctcgagggctaaagcacccttaattgtacccataggagcggggtaaccctcgcatgtaacatcaggaaccgaggtgtcaccatgaattaggccgcccttaaaggttgaagaagaatgtgaaactgtccaggttatttcttgcccgactggattactagctgagggggtgtcatctgggacctctgcacggatggcagcactctcagtttcgggaagctccaataaaagttcttcaggataatctcctctagtgcatgatcaatggcagacatcgtcaacctctagagattaactagtcccgataaagcatgaattgggacatcgtcgttgtttctgctacggcaattcttgcgaagtaaaggggaaactacctcttcatcctcgtcagacacatgtttgccgactttggtgccaccacaactctcaatatcatcctcgaggttggaactcgccaggccaccatcgaggactggggcaaaagagtctgctcccagttccaagccagatgaatgccaaagtcttctctttcttttctccccctcggcagacacagctgggtgacctgttcgacataaccatttgcgacgaacacctccaggatagcaagctccttcatcctcaccggacacgggtccagctgcagcgctcactgattcagtacgggtagattcagatgactcgcccgctagcatactaagaacaacgttcacttcagtctcatcagcggtcttttgcatctagagatgggtttgtctctcc

SEQ ID NO: 69839 - DNA, 409 bp, Zea Mays
tgctgctgtactttttgattcaggagcatcccgttcattcatagctactggttttgtggaaaagcatggcattcccactacatctctagaaattcttttggtcacccgaaccccagggtcagaccttctatgccacctcaaatgctcccaagtcaggattcttttaagtagggtagtgttctcggcagacttagtcgtactgccatcccacagaattgatgtgatcttaggaatggattggttaaccaagcataatggcgtcataagttgcgcagataagaccattcttctcactgaccaccaaggaaagtcagtttcatgtaaggctcagccacccacccaagatccaatggtgtttaatctagcagcagaaagcatatttgtagtagaagaattcatggatgtgttc

SEQ ID NO: 69840 - DNA, 506 bp, Zea Mays
cgattatatatatgtgtgttcctttcgtcgaactcgttctatgatttgtgtcattttcgcgaggtcgtcaaaccgcatttcctcctcgtgaacgtttgctgctcgcacacctgttacccctttatttcatctaccatcgcctacctctgcctaactcggtcttcgtcgtttactgtatcgtgcaactcatcgtgcgatcatcgctttggctcagccaggacgcaacctgcgacaaattttacaaccgccttccacattctctcttttctataaataccgctctagtcgtcgcaaaacctcctgtcttcccccagatccagatcgtttccccagattgcaggcgtgaagggcagcgcttaccaggtacgcagacatccctcctcttgtttcaaatcgccaaaccgcctccgatttcccgagacccagatcacacgagcatgccccttcggttaccagcgacgcaggtaagccttctcttctcccttttccttccggtggcgtgtagc

SEQ ID NO: 69841 - DNA, 375 bp, Zea Mays
ggcccagccattatcgagccaatactaggtaagccgactcaacccatcttttccatattcaatattcgatactatctctcatttgctgggaaaaaacgtagggttctcgttaacccatgactgtgaggcggcccaggctgacccgaaaaacattttttggagtcgaagttcagctcgtaaagggttcgcgaccgctcctgaaaccccaaagtattgaaaagatggagcgtgccccagatggatcccccgtaaggaatgggggacttgggggctcgccccgcaaaaagaagggttcatttggatcagtccatcagggaccgctaagggccatgatctcaactaccgaggggagcatggtatgactcgccgttcccc

SEQ ID NO: 69842 - DNA, 407 bp, Zea Mays
ccgggaggtattgggcaatcccacgataaaatccatgcaaatatcctcccatttccaagatggtatgggaaggggctgtaaggtgcctgctaccttcagatggctggccttgactctctggcaagtatcgcattcagatacatacttagcaatctccctcttcattctggtccaccagtacaaggatctgaggtcatgatacatcttgttactgccggggtgtatggagaatttcgaaaggtgagcttcatccaatatcttctttctgagcttggggtttttgggaacaaccaatcggtctccaaaccataggatccctttgctgtcctgacggaagcatttgtatttttccgccttctgttcgatcatttccttgataacttgaacacccttgtcaccaatctgtg

SEQ ID NO: 69843 - DNA, 732 bp, Zea Mays
cgacctcagggcctcttgctccaactcaaccgcctcaggcctttcttgctggtcctcccggccagtgggcaggctcctggccccccctcaggcatatgggccggcccctgactacactggcgctgctccaccccctcctggttgggatctccaacaactcgtcaccaattcccaaaccaccactcttcaacatccccagtagcaagagtggttcttcgacacaggtgcctccagtcacatgacttccgacgctggtatactttcccacctctcctcttatcatcatctaccctctaacattgttgttggcaatggcaaccttcttcctgtcacttccactggcaccactcaactttctcacaattttcgtcttaacaatgtccttgtttcaccgtctctcattaaagatttaatttctgttcgccaattcaccactgacaataattgttctgtggaatttgaccctcttggctgctctgtgaaggatcttcccactcggcgcatgatccttcggtgtgatagctccagcccactctacccactcaggagcacaacatcttctctccatgctaccacctcttcattgtggcatcaacgacttggacatccaggatctgcagtcctcactcagctagctcagtcttctgtcattccttgtaccccgaataaaaacacccccatatgccatgcctaccagctaggacgtcacgttcgtctaccttttcattcttc

SEQ ID NO: 69844 - DNA, 1025 bp, Zea Mays
gtcgcaccgccttaagtcgtcgccgacttaagtcgattgctccgttagtagggtatagtggtcaccctgagttaagtaagtgtgagcatgtcacaccgccttaagtcgttgccaacttaagttgattgctccgttagtagggaatagtggtcaccctgagttaagtaagcatgcaggttgacagtaaacaatttgagcgcctttgagaatgaagtctttttattgatgatatatttcccagtttacataatacaaggccgtcccaatagcttttgaaatatagctaggggtaaaacttcctgagatgttctatattccatgagttcccaatttctgtgtcatccatttgagtaagacgatatgatccaggccgagtgacttctactactatgaatggcccttcccatagtggcgacaatttgtgccgtccctcccccgttagaattcagcggaggacgagatctctcactacgaaggatcgatgtcgtatggccctatcatgatagcgccttagagtttgctgataccaggctgactgaatcatcatattcaatcgttcttcttctagtatatcaacatcctccagtctagtagcctcagcttctgctatgttttcaaagattaatctcggtgccccaaacttgagatcagcgggtagcactgcctccgaaccatagaccataaagaaaggagtgtttccatgcagagctcggctaggttgagtcctcaggctccagataacatacgacaactctctgatccactttcctgtgaacttttcattcttgtcgaagactttctttctgagtgcttccaatatcatctcgttggctctttctacttgcccgttggctcttgggtgcaccaccgaggcatatttgatctaaatgcttttttgttcgcagaaatcgaagaactctgagcttgtgaaattggatcccaggtcggttatgatactattcggtatcctgaacctgaatattatgtcttgtatgaattccactgccttagccgaagttagagaa

SEQ ID NO: 69845 - DNA, 459 bp, Zea Mays
gcgaagggagaagatgcttcatctctctaagcttcaaaagatgatcgacaaagcagctgaagaaatgctcaacatcgaggcgcatgaagatcagtacaactacaaggaccagaatcatgagggccataatcatgactacattttttgtcatgatgcattaacaccagagctacaggctacaccttggccaccactatacatgcctcccacactatcaatgtatgatggtttatctgacccaaagtagtttttcatgagctataaagccaccatatcctcatatggtggtaactcagcaggcatggcgaagtcattcgtcatggcggtcagaaatggagcttaaggaaatgcttctcatcagctttccggatttctagtcaaagcccatcactgcacaagccttgttctagtgcactcaagatccagatgcatacaaccagtcatttggtcaaaggtttc

SEQ ID NO: 69846 - DNA, 551 bp, Zea Mays
gtcctcccatttctaagacggtatgggaaggggctgcaaagggcctgctgccttcaagtgactagctttgattctctggcaagtgtcacactcagatatgtacttggcaatttccctcttcattctggtccaccaatataaagatttgagatcatggtacatcttgttgctaccagggtgcatggaaaattttgaaagatgagcttcgtccagtatcttccttctgagctccgggtccttgggaacaaccaatcgatcttcaaaccatagaattcccttgctgtcctgatggaagcacttgtatttttctgccttttgcttgatcatttccttgatcatctgaacacccttatcttcaatctgtgccctgactatttgctcttgcaatgtgggttccaccgagatgtagcctaagtcacctgaagaaacaacttccaggttcagcttgcacagctcatcacacagggtggtaactcttgcatccatgctcatacaattgcactgggcctttctgctcaaggcatctgccacaacattggctttgccgggat

SEQ ID NO: 69847 - DNA, 327 bp, Zea Mays
ttctttggaacgagtaaatcaggaaccgaacaagggctaagagactcacgattgtaacctttatcaagcaacgtctgcacctggcgctggatctccttcatctcatctggatttgtaaggtacgggacgcggtttggaagagaagcaccggggatgagatcgatctgatgctcaatgccacggggtggaggaagacccgatggtaagtccataggaaaaacatcagcatactcctgcaaaaggttaacaacagtagggggtatatccaaagacagtgcatcatcaagcggaacaagcatgcgcgagcatacaggtgcataacagggc

SEQ ID NO: 69848 - DNA, 845 bp, Zea Mays
gtctgttttgcaagtccttgaggttggatttgaagtgcacttttaagaagggtgtttcttgtgttcttgactcccataaggatatcttattgttgaatttctcctttcagttgtgctttttgtgttgacttgttgaggtcatttggcccttctcattgcttggtgggtgaatttatttttgaccttgaaaatggcatatcagtcatggacatttgagttttgacttgcttgcatgacttagaacacttaccttatccaagaattgcaaagttgaaatttgataaatataatgtttgctacccttatcgtcgtaaaaatggttactacttcccatccactcattaagaaagttttgactaagcaacctagtgagctcttacacagacaaaattattcctactcacttacacgcagttggtgggagtggcttgttcttgttgtagttgatgactattctctaacctcttgggtatttttcatggagagtaaggatgaggctttttcacatgctcgagatttggttcttaggatgcaaaatgagtttccaaaacatgacatgagagtgattacattgacaatgacatagaattcaagaatactcattttaagacattttgtgcttctcttgaattcaagcatgagtttccttctccctgtatggttcaattgaatggtgttgtcaaacacaagaatcagatctttgttgataaggttaggacattgctctatgatcacaacactcctagaaagtattgggttgatgtgatcaacacggcttgctatgtatcaaatagcattttcctttgagtcttcttaaacaagacatcttttgagttgcaatttgg

SEQ ID NO: 69849 - DNA, 298 bp, Zea Mays
agaacacataacacaacctaatcaagattatcataacaacacaggacaaggcacttcttatagctccaaacatagcagtacatcacattattcacaagttattattattggaataaaggtgagagaggcatgttaatgcataagagacaattataatgcaacaatcatgatgcatgcatgctcattctagtcgtcttctcagacctaactaatttttcgggtgcttctacaacatccttattaatagtagtagtagcctttatggcctatataaatagccacctagctacccatctat

SEQ ID NO: 69850 - DNA, 1305 bp, Zea Mays
ctccctttgctgttcattgagtgggcgagccgaacacggctcagctcgtttctagccctaactaccaccatcactgccaccaacaccactaccactagcaccaccaccaccatcagaagacgtcgttgcaccactattgccagacttttatatattggacttttatcaccatttttggtctcatcatcgcttgccaccatttcctttcctttctttcttgcttttgatagcatgaactacagctttcgcttaccaatgcgagtgtctcccacattcttctgagtcaactcaaccaattttacacttgaagtgccttgagccatgatgcttgatggtaatgggggtgtcacccttggtgtcctcctcatccagcaccatatctgcattcgagcaacccatttccattcaatgacatatcagattgtttgtgtcatataaggacaatccatcaactaccaaaatggatcttcctccccttgcacatttgtgaaccccattgcatcctttaggcatagcctcatgttgtagttgacatatacaggcttatggagcttctgatacaagattctattctagacctttatgtgtaccaaagcaaaagtgctccaattacgctcacaaccactggaggaacaacattgtgaaaccatgagatgaacccaccaattccaacatttgtacctccttctattattgttttacttttatcttggcccttgtcaatctcccgccgaaagtaatcggcaatgtctaacgaaacgttgtgaaaaccttgcacatttccctcatgtgaggcaagttgttgcttaaaacgtgtacaccgccccatttccactatttcctgcaatacttacacttgaatctgggatatatgttgtccccatgtttccaaaccggatcaatccgatctgacatccttgaaaatagcaagcatatgaagtattattacaagtattattatcctatattgcaattatttgtggtaatttaaaaagatttcaagtgaaaagggggaaatgcccctaaccctagctcctactcagtcgctgcctaattagtcctacacattgagttatcagctttggggagtgcctaattagtaatcctagcccattagtcggttggaaaccgaaggctcggctaaaaaacctaacgcgcgacactaaagattaggcgagccactgaagcgatttattggggtctcgtggtgattaatcgcgcgggtgagggggcttactaactgcgcggagtggtggactccaaggtgaaacctcccctgtgggttttggcgttttggatgacaac

SEQ ID NO: 69851 - DNA, 860 bp, Zea Mays
ggcagcaaggagacgagagaactgcgctagtgatgtagctaaacttctgtctttctttacggcatgcaagaaatagaatccacaattcttttgtgattttcagctagacaaggatggaaaaatagtgagtattttttggtcacacgcaagtatgcaggggaatatgcagattatggtgatgttgtgacctttgatacaacacacaagaccaatctatatgataagtcactgggcgtgtttattgaagctaacatccatctgtaatgtattgtgtttggttttgtgttgttgggagatgagactgttgaaacttttgaatgggcttacaatgcattcaaaacatgtatgggatgtgagggaccgagagttatgctgataggaatgtggtatgtgaatttgttatgctaaattgtcaaattatgtgttgtgatcgttaaattatgtgttgtgatcgtttgcagatcaagatactgcaatgccaattgctccgtgaaatgtattcccgaatacaattcacagattgtgttatgacatgttcaaaacagatatatgccattcttaaatgaattatatgcaaggtttgctgagaaagattttaagacaaagttccaatctattatacatcatcctttaactccttgtgagtttggatgtgcctgggaaatgatgctagaagaacacaatctgcatgaagatgtgactctatgcaagttatatgaaataaggaaagaatggataccgacattttttaaatgacttctatggggtaatggtgtctacacaactcagtgagagcatgaatagattagtgaagaaatcacatgtagatgcgaacaaccctctgcatgagcttgctaaac

SEQ ID NO: 69852 - DNA, 457 bp, Zea Mays
gccggtgctctaacttggctgagacctaattcaacacctaacaaatgtttcccctcgatcaattgaacaatccgagctctaaatcgccctgcccacggagacattgcgaacaatggatgaacacgggtgatcccgacgatctagcgcggtctagtttaattgaatgggtcaaggagcatcatgggcatgtaagggtgcggaaataagagagcagaggacaagatcagacctgaaatgagctagccgcggcgaggacctttttacggtggcggaaacccgatttgggggaagtgagcaattcgtgggctctggtgaacaattggaggcatgagtgggtgtgctgggtgcctaaatacctaacggagctgagggtgtgctcaatttatagggcccttgagtggtggcggctaattggaaggagacgcgcggcggtcggagagggggaagagctctggcg

SEQ ID NO: 69853 - DNA, 836 bp, Zea Mays
atctgtctttttatgccagaaaataaaatctggttcttctgttttgcagtttcactttcatttgcattgatttggcgacaaggaattccatcggactcacaacaacaacatgttccaaggtcacttgtctgttggtttggttgtgcatccttttgtgtcttgaatgtctgttcatcagttgttttatttatagtgttgttttgacttgtcaacacaccacattctttgcatttagtgacatcacttgaggttgacactccaaggtctgacatctctatgggtatggaagaatggaagggacgaaaagggttgagcacagacagattatagagcagagagaactcatctatctaaggttttacctagctaactgatgtcattgtggacaaaagtcacacaatacaccaacaatcatttcaaagaagcaaaccaatcatgaacacaaaggacaataaactcaagcataccagcacaacataactcgatgttattcattcaatcaaaaggtaatctttcccaaggaaaacaatttattatagttttttttgaaaggcgggacaatgttaggaataagaaagagattataaaatccaagaatcagatcagaaataacaaggaggtagacaagattcaaaacattaatgaccaagagtgaaataagataaccactaactggtgaagcgaggataaaatatacaaccaatgatatgaagtgagttagggagaaagcgttatcaaggagaaaagtagagaggcaaaggtttaatatatcaaggtagatattgcgcaagggtggcaatacaatggcacgaaagcaaaagtataagaattcaata

SEQ ID NO: 69854 - DNA, 551 bp, Zea Mays
gacaaaacaataatcaattcaagacgcacacaaccaacgtctagaacaagagacttcaaagcttggttgctcaccaaaggcaagaagaatagctagcttatctaagtttttggttccttagggaagttcatcaacctcatagcttgagggttgtaatattgagtgccatcagaaagaggacatagggtattacacatattatggcccaaacttctataaaattccatgtgtcattatgtttgtatattcatgacgtggtaggcatacaacacatcgtcaggactcacttcctctcccctagttgcttccactcatgtaccttgagtacccttgtgtcatttccacgatattttgcgccattcgtggggacaaacacatgaccacggggcaaacgagctctccttcgtaggcccctttaggttcactgacatctataggctagggtgtgtacgcttggtaatagaggaaggcacgcctttgtccaactcataaaatataaaccgcctctgtaagtttcatccttgaaggggtactttgaaaatatgaccaag

SEQ ID NO: 69855 - DNA, 478 bp, Zea Mays
gcaagataataaagttatctaccacttttctatagcacatatctacagaaaacaccatttagttcatcaaacatacagtatggcgaaatcgctgcgtgcagtccaaaacaacaatcaataaatttcagctcatatataattcaagaattgccgcgttcgagagacttgaattactctaacgctttactatttgttcgagttaagacaatcaatttagaaccaacaatttgacttgcaaattttattcaagtcattagtgcactaaaattactacaaccaattaacaacgcattctccacgataatcacccaacaatttgcgttttaaattagacatcacatgagcactactactttttcatctgcgaccataaccatgcgcaatttggctacaacatcccaaacgtgtgcaagaacacttaactcaatcatcaagcacaaacagggacagttactacaaattcccatttccaaattgc

SEQ ID NO: 69856 - DNA, 1372 bp, Zea Mays
ccgctcggacaccctcggaggctgggtcatagtttgcgctgcccacttgagccggatcatctccggcagtaccctcgggggctgggcagtggcttgcgcttcccacccgagccgagtcatccccggcaacatcctcgggggctaggcaagtatcaacaccgtccttgagaaccaagttctctgcagtagccacctctaaggctgatggaccctcagttacttccatgggaccaggacgatccaagtcagtctcctgaccctcgagaccgcactctaaggtcgatgaggcatgggatgaccttaatccagcgtcgaacctccatcacaccatcatctgccggctcggataacagatcctctggaaccatatcctcaagagtctgatcaaaattcgccagggtcaattcttgcagaccaatgagagcagacaaagcaggagaaggaactccactactttcaccgctggcgacatactgccgactgttctttcgagtcagagggacctcattttcttcctccccgtcgtcttcaccagcagcacaggcaacacccccattgggatcagcaacagatggagcacccccattgggatcagcaacagatggagcacacccattgggatcagcagcagatggagcacacccagtggggtaggcgtcagtaaattcaggcacaggcacttcttcagcagcaggaaccgaagtaccaacgtcccgatccaaactagatactcgctggaggcgtctctttttctttttctgctcatcagcaggaggatcaagttgattgactcggcaaggacgtctcgggcgaacacttacaggcttctaaacatctgaggttgtaccagcctctgggagaggcgccaccatcaatgtcccagcaggagcagcatcggaagagtcctcagccagcaaatcaagcatagcacttatctctgcatcactaggatccaagggcacctcaaagtgaacctgccgttcaccatcaggaacttccccgagcgaggcaaccaaggtgctaacttcttcagcagagggtcgcactctaaggcccaaactgccatcagtgacaggtggattcgacacaaaaagagtgaaggccttgggaggaggcaagttctaggctgagtatgccactggggcaccaacatttgataccttgcctctaagaatcatctcaagatggttcaccaagtctacagagggaattcttctgttggtaacccgagtcgagtcagctaggcctcggtacagataagccgggtatgccctatctttcagcggctgaatattcttgaagacaaaatcagcaaccacagcctcagcagtcagacccctctccttcagcagtccaacttcagctagcaaag

SEQ ID NO: 69857 - DNA, 329 bp, Zea Mays
ttttcccttaactttgaatctcctcattccacgaagtggtgacaccttgagatacacataatctccttcctcaaattctagcggtcttcttctattatcagcgtagctcttttgcctggtttgagccactctcaaattctctcgaattatatggacttgttcttctgcctcttgaatcagttcaggcccaaagagctgtctttctccagtttgatcccaatacaaaggagtcctgcatttcctgccatatagagcttcaaaaggtgacatcttcagactggcctgatagctattgttataagagaactcagcataaggtagacttttat

SEQ ID NO: 69858 - DNA, 492 bp, Zea Mays
ggcgtctgtgcactggttgcgggtgaattgctcgccgtgtccacatcgccgccgcggatccgcctcgcaccatgtccggcctcgtcgggtctctaattctaggcacggaaacctcagccatgtccgtcttgtttagcgcgatgtgtaggactagttaatcggagtatggtgcgccggggcctgcgaatggcatcaccagcggtggttctcgtcgccgccgcgcggtggggtattttggccggaggtaagatgatgtgtggtggtcggtcaatcaatggatcaacggtccagatcatgtcacattgtaggaggtgtctgggccgctggatcgatcacgggcggttcagattagagtggcataccgtttcaatacactaaaccctagccgtagatctcttatcgatcgaatccgagcgaaacttgttgcattaaattctgggccgacgatcctctatcggacggtaccttttcctttctagttcacaccgctgc

SEQ ID NO: 69859 - DNA, 339 bp, Zea Mays
agagatccatgtgaagtgattcctatggtctatgagtatacatttgactcttgtatggatgagtatttgccacttgtttcctagcttgacattaactacacaatttgttcttttcaaatttcacatccttcaaacctcgaactaagtcatgcttggataattgattcaattgtctcataccaacatgaccaagtcttctatgccatagccaacctagtgaagtcttagagaatagacaagttgtaagctttgcctcgttagatgaaaaatcaacaagataaagattttcatgtctaaaacctttaaatattatattgctaccatcaacactagagatga

SEQ ID NO: 69860 - DNA, 534 bp, Zea Mays
ccgtggaccatgtaaaataaatgatttgcattatagataagctatttgcagagtaaagattgaaataggggatatgatgggagagttgttagagcaactccaatagaagccctaaacatacaaacaaattaaaatataacgtctaaacaagaaaggactgctccaacagaaacctcattttaatgaaattcgtcaaaacgttttagggcccaactaaatgagtagtatatttgagactcaaagaagtgtggccctataccggtcccactcctttctaacctccacagatatttcagacttcttcatcgccaagtgcaaacatctgctcctgacccagcggcactcgaccacctgttcccatctcgtgcttgcttccatctcaacactgtggaagcccttgcccttcttcgtcctcttgcctcccctggcctgtctccttgctcccctcctcctgatctacttcgtgcctgagatggatccaacattgaaggtcgtcatcccaagctcacattcatcattgaggcctcacctatc

SEQ ID NO: 69861 - DNA, 285 bp, Zea Mays
ccccgactagtagccgcagttgatagcaaaatccttcaactctgccatatcctcttcggaaagctgctggccacccaggtgccgtaggtcgaagtctgcctctttcgaagagatttctttagcctccttccccttgtctgaaacttctgcggccacctccttctccacagccacgtctgatataattttgtcaatatcggacatggtagctgtgagatcccgccttcagttacagtggtagcttcagcatcagtaggtttgacagtcttgtctgccaaagctagg

SEQ ID NO: 69862 - DNA, 554 bp, Zea Mays
cccaaccttaaggaaccaccataggagaactccataactcttatgggtgtggcccatggcttggatggccactctggtgacagaactaaccgatagcggtagataagcacaagtagtggtaggtttgccgatggcagtcgtggtcctaaggatggcggtcgttgccttaaagcgacacttatagcactaattgagctaggtggcttggatggttatggagctggcagaggtggctagtccatccgtgagcagtatgatgaccacaactttcatcacccaaagatcaatttccctaacctatagtgtgacacgcagtcgcccgagcttacgagtgatatatgtttgtatcctcaggcgtaacctcaccaatatctactatgacatcggctaggaagaccctagtatcgtttccttccatataggcaaccttggaaacatctaagccatgtttctaatagttgtccctaaaggagttggcggccaaatgggcaaacagggaatgctaccactaccctaaaaggtacaccagcgtccacaaatgtgtgtccaaggtc

SEQ ID NO: 69863 - DNA, 565 bp, Zea Mays
tggccggcgaggagctcgatggctggtgatctgaagaagctgcattccatgggccatggcatgggatgccgcgcgtcggctgtctgtatctggccgcgggggggactgacaccggacgatgcgttagcgtgacagggatagtgggagggagggagggagagcaggcgggcgtggtgtgcctgtcgaccggccgctgctggccgacattcctttctcgagtccccaaccaacggatcggatcggatcgatggaatcggatgccttctcgtcttttcaccccgcggcgccccggccccagctagctcgctcatgcttctcccccttccacacgccacgaataaaaagattagctggactgtactcagtgctcacactgatcgatcgtctataggctactagctagtagcgcttgcagagattccggggtacgtaattagcattgttttcttcttttaaggccatgctcccggatgctggcagctaataataataagtaattctccattgatcgccgatctcgaaactccctggaacagattggctactggtagctagctgatctcca

SEQ ID NO: 69864 - DNA, 725 bp, Zea Mays
cgagcttctaatcacggttgttccaagtgacttctatagttgttcccagaaacgtgctacgaacggtgttcctctatctgatacgatggtccttgggattccatggaagcgcactatttggtcaatatagatctctgcgtatttttctgccctgtgggtggtatgcactggcaagaaatgagctgtcttggttagcctatccacaatgacccaaatggaatcgtggtgtcgggaagtgttgggcaatcccataataaagtccatacaaatgtcctcccatatccaagatggtatggggagaggctgcaaggtacctgctaccttcaaatgactggctttgattctttggcaagtgtcgcactgacatatgtacttagcaatttctctcttcatcctggtccaccaatataaggatctgaggtcatgatacattttgttgcttccgggatgaatggaaaatttggagagatgagcctcatcccaaaattttctttctgagttctggattcttgggaaaaaccagtcggtcttcaaaccataaaatgcccttgctgtcctgacgaaaacatttatacttatccactttttggttgagcatttccttaatgatttgaacacccttgtcactaagctgtgccatgattatatgatcttccaaggtcggctcaactaaaatataatccagagtacctggggaaaccacttccatgttcatcttgcgcaac

SEQ ID NO: 69865 - DNA, 526 bp, Zea Mays
gatatatctaaaataaaaaatgcatatttaccagaatttcctctaaggcttgaggagttgatctggcaagcacattcggaatcttgcttcgcctcgtggtcactttcttctttctcttcttcggattctgaaccatgatgggatagtcaggataaaagaacccgatggcatcaaagacaatattcaatcaacgcctctttcaagctccgaaggcttgttgcagagccttggcctcgggcttgctataattaccaagaatctcattgcactttgcttcaacataatctagctaaccatcactgggttctccaaactcatcttcgaatctatactaataacaaagcctaactagcccaggctcagcgtccaaagcatcaccttcaaacatctttggcatatcccactcagcaagttgatgatgaccaggcgaagacctctttgttcctacgtaggcaatcaagcaaactggcctcgtcctataaggctaggccttcgcctatcagtacaacatgactgtggagagcag

SEQ ID NO: 69866 - DNA, 547 bp, Zea Mays
ctcgagcactagcagatttctttgctaattggactcctagctcgcaagacaaatctagtccctcagatgaagcagtctgaactattttctatgatggttcatggggatccttcagggatggtgttgtagctattattgtttcaccatccaaaataaagacaccatatgatgctaagcagcaatttcaaagcacaaacaacatagcagaatacgaagctctattgctaggcctaaggaaactcaaggcgatgggcgtaagaaaagcagtcttaaagtcagactctccagtcgttacatgccaagtggacaagtcaagtaaggcaaagaacccagccttagagaagtacctagatacggtccgaagaatggagtcctctttcgaagggttcacattgaaaaatatcccgaggctgaataatgagcatgctgacatattggcaaagtctaccacctaggggctccctcttccccccgaagtgttcttccaaatattgaaggcaccttcggtcgagttgatggaaagagccatcttaacggtatctcctac

SEQ ID NO: 69867 - DNA, 388 bp, Zea Mays
cagtcgtatcattaaccccatgacagctgatttgataatgacccatacccacagggtacaagggtacctaagttttcaaaaaaattatgtgaccgggacaaaaacacacatgagcacataggccatttctagcacaattgggagaattagccgatagggaggttttccgcgtttgattattttcatgatccctaacttgtactgcttttgcatggtatgccacccctaccacctaattccatatactcttggggaatttagagcaaaattccatgaccatttttcttcgtagtatgagttagacctggtagatttagtagcataaggatgggatgagtcagttaatgattacattcggaggtttcagatcatgagaaatcgatgtttc

SEQ ID NO: 69868 - DNA, 1600 bp, Zea Mays
atgaatatgatgttagcttgacttccgttgtcgacgaggaccttgtgcaggtcccacctagcgacattgcagtttatcaccaacgtgtctgcgtggggtgcgctgcaaagatcgacgtcccttgcgtcaaaggtaagcgagacatgataccactttgtttgtaccaccgagctagtgagattgatgtgattgacccttcggtagtgatctgtctttctatcaattattctcgagttctgcattggacccttcggttatcatgtggatgaacccccagaacagtgggttggccaattcttcttcctggtttggtggcaaagggttgctggtggagttgcgggtttgtctgtgctagcggtgggggtggcagtgctattctttcttggtgttgcaggcattgttgcttgggaaaagcatggttgtagttctactgatgttggggtggtatggtgtttgtgttggtaatgagggtgggggtattgttgtgggaggtaggtctcagtgatggctctctggttgtttgctgggttagctctggccatgcagtctttggtttccttagtttctggccaatctctggttggatgccctatgtcttcgctgtggaacacacgataatacttcctttgatgttgggccctctacctcggcctctttctcttgctgcactaccagtgcggccttgttgtggagggtagtcctggcgtcgaggggccttcgcatttgctgttggttggcgatattatggacctggaggtgctggtcgcattcttggtgaggctagtcttgttgtggacccctagtccattttctattggactgcagagtctcttttggttttcgctatgactccactttcctgtgatggagctcatcagatcggacgtatttctcaaagagctgatatagctcttggaagttgtatggtgggtctctggtagttacggtaaagctagcttgctcgaaggccgctaattgcataatggatcacaatcttatcgttgactgagggtagctgtgatttgaggaggaggaatttcttgtagttgtcgcgaatactctcttttgccttcttcctacagagggacaattctactaattcatcttactcaggcctgtagccttggaaatttagtaggaattagtcaagaagggtcatccatgagtcaatcgaaagtggtggtagtcttgagtaccatgtgagggtggggccttagagagatgatgaatgacttagccttagtggagtcgtctcctcccgaggatgcaatagtgacctggtataactcactatgtattgggttgggtctgtattattgttgtacttgggataggtgcccgctctatagttgtgtggccatggagaggcttggagctatgcagagaggggcctttgctcatcgaggcagtttagtccttagaaagcgtctgcatgtgggcaggcctatggaaatgataaacattttgattgttaatagctatagctagctgttggtgagggagtctacatactacatgtctgcaaatttcctactctagttctctttatttgtcctctttgtccatgattaattgtctcactcttgcatgcatattcctt

SEQ ID NO: 69869 - DNA, 526 bp, Zea Mays
acctcgggttcgctgacgaatgcaagactgccatcatcagctccggcctggatgacaaataggaaggcgcgctcatccagtttctgcaagataactgagacgtattcacatggcaacctgcggatatgccgggagacccgagagaactgtccgagcacaaactgaaagtctatccctaggtgaggccgattcgacaaaagctgtgtcgcttcacgcccgacaagagagaagctattcgtgccgagctagctcgattagtcgcagcaggattcattagagaagtattgcatcctgagtggttagcaaatcctgttcttgtactcaaaaagaataaagtggattggcgcatgtgcgtcgactatacagatctcaacaaacactgtccgaaggatcccttcggacttcctagaatagattaggtggtagattcaaccgccggatgctcaatgttgtcattcctggactgctactctggataccatcaaatcagcctagcaaaagaagacgaggaaaaaactgcattcat

SEQ ID NO: 69870 - DNA, 334 bp, Zea Mays
gttccctaatggatcttttgtgtatctgctactttatgttgatgatatgttgattgcttctcatgacaagtcactgattgttgaattgaaggctcaacttagtcatgaatttgatatgaaagatcttagaccagcaaagaagattcttgggatggaaatttagcgtgatcgtcgtgctggtactctttttctatctcaaaaaatcagtgttatgggaaatgaagataaatcttatttctttgggcaccttagaagcaatgggttttaaattttctgttgataatggtgttcttaaggtttgtcaaggcaactgtgttgttttaaaggttgaacg

SEQ ID NO: 69871 - DNA, 601 bp, Zea Mays
gcaatgatagataaaaacaggaaatggctcgctgaaatcgagtgtgccaaaaaggccattgaggatgacacgccactaggcaaagggccatttgatcaagagtttcggggccagcgatacatggtcaccactcatccagaaaggttatgggtgctaaacaactagccgaagctgttggcttcgctgaacaacttgggtacccttcggggtatacaatctccgggggagggcctgaggattatttgtatcgctactcggatagcttggagactgaagtataccgctacatggcgaacaacataggttttccgaagttagaggccatattatcaatgatgcccttcaaagattttttggattgcctcacctacatgcattggaaggtatgacttgtgtcaattttttgttgctttgggttgttggaatactacataacttggttaacatttgttttgtaactcagggcctgattttaagcaaggagctaaagaacaagaaaaatattgagagcgaagcttcctagaaggaaattgtaaagcttaggtctgaagcatctaagctttgttaaagaagagcacaaagaagaaattaataaggtatg

SEQ ID NO: 69872 - DNA, 498 bp, Zea Mays
ggcgaggggccgtctatggcgccgtcgcggttgtcgtcgtagccgccggagtttgggctgggttaggcgacgagcgtgggcggttggatataatctgtgcggctatgatcgtaccgattgggttgttacgagggttagacgtggaccgtccgatctaatcggacgcggtcgggaaaggaagttgcagagtcgtcgatctcggatccaaggatcagcgttacgtaccgattcggccggggatgcatctaatcctggcagtcgattggcgatcgagcgatcaggagcgcactgtaccccttcgcggtgcacttttgcgtaagagcccctctggacgttgggaatcaacccgcggtccactggattgttctctgtgtctagaaatatttacctcatggccccttcgttatctgaaaatagtgcgcccagtccatagctctgagaattcaattatttaactttagaaattgatatttaatacaaaataaatcctagaacttg

SEQ ID NO: 69873 - DNA, 488 bp, Zea Mays
gaattcaaaaacctaccgtgttcacctagcttctcaactcaaattcaaatggttcaatggacaaaatggcacctaattacctaagacacgccctggaaaattttgacaccaaaccaagctcgtttgacatgctttagcatacgcttttgttgtgacctgggcactgtaacagacccgacttgtcattggtgtagctcctcgcccgaagtgtatcacggctcaggactcacataaaaaagccaaattttggtgtagggaagagatcctacatgggacctttgctgagatagtcatgctagggcagctaaacaagcgcttggacatgggcagacgcgatcctccatgtgttcgacctgagctgagtgcgctctgaccacgacgtgcatgccacgagctccgatcggctcaccgtcgttcccgtgcccaagccctcgcccataagaagccccagccctcggccttgccctcccgcatgccccatacccttt

SEQ ID NO: 69874 - DNA, 679 bp, Zea Mays
acagagtgctggtagatggcgatgtcgctgctggtgggccacgacggcaggattggagtggaatgatgtggtgcgacctgtagaagagttagattgtgtcctcacatgtcgtccctgcacttcacgttcagctttataagcaagatgaaataaacgagtaatattattgtactccttataatcaagcacatcatgaatttcatggtttaaaccacccaaaaagcatgccatagctgcgtcattgttctcaactaaaccacaacaaagcataccaatttgcagctcctgatagtactcttcaacagagtgtgtgccttgttttaaacactatagttattaagcaaattgtgagcatagtatgagggaacaaatctgtggcatgtaaggacttttaaagcatcccaagtggtagggatttcagtgggggtgtgtgtgcaatgttcgcgtcaccaaatagaagcaaaatgggtaaactcactagtagcagctctaacttgatggtttgcaggaaaagcatgaaaagcaaatttttgttcaacaacaagttcccactcaagatatgcgtcaggattatatgtaccattgaattcagctataatgagtttaatcttagaggaaaatcattctggttacgtaccacacaacgagctctgtgccggtaatgacgggctgatcgtcg

SEQ ID NO: 69875 - DNA, 512 bp, Zea Mays
gtgacctaagccatcccacatgtagctcatgtcctaagctgcccagaaattccattatgtttctagtcgtccacctcctagtcggacgactaatcgtcatcagtcaatgattaatcggatggccagaaactaatcaacttattgagttgtagctcccctgcgaacaacccctggtctaactggttaggtgatgtagtagcaaactctcaggttctgagttcaatttctagtggaagcgaattttcatacctgggttaaaaaatcccctcgctgtttctcacccgctcttgggctacagaaattatgtgccccaccctccggcctgggggctattgcagagtgggcagagtcggtcagttagtgatgggaggctagggtttgggggctttctcgaccagaacttgcggtttcatgacttcttatatgaatgttgttggggtggcttaatcccctccgtttgaggtttttttttgagtcatagcccctagttgagtccaggataccgattagga

SEQ ID NO: 69876 - DNA, 530 bp, Zea Mays
tgttttccacaaaattccaaatccccaaaacaacaaccggatgagggaaaaaaacaaaaaaaacaacccctaacttctcttctttgcaaaccgggtatcacactctacccctcttaaaaagaattcgacctcgaattctgacgcttctatcggaatgacaaaagaaaagattaatgaatcaacaacacttaccgacaacgaaaagttctgggtacttctgccgcatcagctcctcaagttcccacgtagcctcgcgctcagactgattagtccataagaccttgacatactcaacacacgctccgagaattccaatatacacaccggacgacactccagagtcagatcctgctgcaccgaattggttccatcttaatctgatggtccggatcccgcaagaacttcctcaacatagagacatgaaaaaccgggtgtacccctgccatggaatccggcagtagcaagcgataagccaggctgccaactcggaccaagatagtgaacggtccaatgtatctcgggctgagctt

SEQ ID NO: 69877 - DNA, 1126 bp, Zea Mays
ctggtggggagttgtggaggcagtagcgcggcatggacgccgattgaggagaaacgtggcagtggagagtgcctcggcccaaaacgctaaaggagctgcacaatgaagaaggagggtacgcaggcaattgttgatagtgtgtagtatgcgttcggctttcccattctgttgggatgtgtagggacaggacagacgaagttgtgtgccatgagcggcaaagaaggtgcgcatagcataggagtcgaactctttgccgttgtcagtctggacagcgagaataggcaagcggaattgggtatgaacgtaggcaaagaacgtacggaggacgtaggggacgtcagatttttgacgcagcgggaaggtccacacatagtgagaaaaatcatcaagaagaacgacataatatttgaaaccagtatgactaagcactggtgaagtccagacatccgaatgcactaactgaaagggaaaatgagtagttgttgctgaagcagagaatggcagccgagcgtgtttgccaaggcgacatgcgtggcaattgtgatcggtagccttattacaatgaaaagggaaattatgaagaagctgagacagagccggagtgccgggatgtccgagccttgcatgccataaggagaccgacggggctgatgaagatgtgaggctgaggtgctgcggtgggcggagtggataaagatcgctggtgctgttacatcggagaatctccactttggttggttgagccttgatagaaaaaccatcggagtcaaattcaatagaaacattgttatcgcgagttaaacgacgaatggaaagaagattcttaaccaacgaaggacaaagaagaatgtgattaagacgaagaggatactgagaggtgggcagagtggcggaggcacggttgtggacaggcaaaagggcaccattgccaaccgtgactgtcgcagaatgaggttcgaaggaagacatcgaaggcataccagaggtggacgacatgtgactggttgcgccagtgtcaaggtaccagtcagaggcggatggagcagtggcgacgccggcagagtgaagggcggagtacagggcttggggaagttccggagttgacggcgcatacatctgagtcgca

SEQ ID NO: 69878 - DNA, 770 bp, Zea Mays
gatctgaatttagactaacagtgaaattgagcaatatttgagctggaattcaaccatgatctagtgagtgtttggccatggttgctatagcaagattgtagctagatcatctggcaacaactttgttactggtggattagtaagtcgctacatggaaaattgagatccaggccttgcaaattaggctgtcaggcgcactgaataagggttccattgtacagtgactgaacaagatcccaaattcatcccccttcgccgccggtgatctgtcgttgcaacttgcgttcgtttgggagattcgtgccacgagaagtgtgggtaacgtcgggtgtggtgagaatatccaacgcggggtgaatccggtcgctggccgaaccgctcgtcgtgtcccgccgtggttagccgcactggcatcacctccattggccattatccggccaggctacatgcctcgacaccttaccatggcacagtgagtcatcgtaaaccactctctactactggttcgtcgtcggtaaggccgccacggtagatgccaccaagctctagcgatagtgctctcctcactctccggccgccaccgcgccaactcaaattcatgagccaccgcccccaagtcctataaattgagcacaccgtcgggtccgtaaggtagtcaagtactcaagacaccaaggcgtgcctccaattactcaccaaagctcaccaattctggatttcccccaaacctgctttccaccaccgtgaaagaagcctcaccgtggccagct

SEQ ID NO: 69879 - DNA, 705 bp, Zea Mays
cctcattgtgttgttcagaataagcaggaggtaaagaaactagattaggttcaggagtataactagtagatgtctcgctacgtgctgcaactctatctttcattgggaatatatcttcgaaaaatgaggcatcacgagattcagtcacggtgttaacatgcacatctggaaaatcagacttaatcaccagaaatctataggttgcactattacacgcatatcctagaaagacacaatcaacggttttttctccccattttcgtttcttgcacgtaggcacgttaactctggctaaacatccacatgcacgctgaaatccaagagcaggctttctacctttccttcatagggtgttttatcacccataactgatggaactcggtttagaacaaagcatgcgaccaaatagctttgccctgccataacttaggtaaaccagaactatccaacatggcattaatcaagtctgtcaaagtttggtttttccgttcagccaccccatttgattgaggcgagtagggagctgttgtctcatggatgattccatgttccacacagtattcaccgaattcattaggaatatactcccctcctctatcagacctagcccgtttaattttcttttctagttggttttctacctctgccttatagatcttaaaacaattaagtgcctcatctttcgtcttaacaagatagagctgg

SEQ ID NO: 69880 - DNA, 533 bp, Zea Mays
tgctgagctccttatcacctgagttcctagtgactcttgcagctgctcccagaaacgtgctacgaatggtgctcctctgtctgacagaatagtccttggtattccatacaaatgaactatctggtcaatataaatttctacatacttttctaccctgtgggtggtatgcactggcaagaaatgagctgtcttggtcaacctatccacgatgacccaaatagaatcgtgatgtcgggatgtgttgggtaaacccataataaaatccatgtaaatatcctcccatttccaagctggtatgggaagaggctgtaaggtaccggctaccttcaaatgactagctttgactctctgacaagtgtcgcattcagatacatatttagcaatttctctcttcattctggtccaccagtacaaggatctgagatcatgatacatcttgttactgccggggtgcatggagaatttggaaaggtgagcttcgtccaatattttcttcctgagttcagggttcttaggaacaaccaatcggtatc

SEQ ID NO: 69881 - DNA, 746 bp, Zea Mays
gttcttcgtataacgtggaaactaacttattacaatatgaatggaaaatataaagcagcctggtgatggatcctggttctccatagtggatgctcttgcggggaggggataacgccatggtagggacttgaactttaggggggatttcttccatcaagctgagcttccagggctgcaatccttgtgtgtgcatcctccagctccaagtgtaccctagagaggtccagggtagcactatccaggttggtgttaagacctgccaccacaccagctagggtgttgaggcgatcttctccagctccacctagaacaatgatggtctggctttctccacgaatatgcagaggaagatgcctatacttcgtgttgtgcagctgttgtcggtaggtgtggctgagggaccatagagttcacctagcagcatcgctggccgaagaagagtaggtggatagcggcatcagggactcatgagctgacaaagtcctgaaccctctatcacctgcatccatcaccctgacatgaatgcgagtgatgtagtagcaagcctgaggaggctcgtacactcgccttatctcatacaggggtcggacataggttcccaacgcatgcagaacattctgtagcaggttagggaagtgccctgtctcgaacattgaggtataatgtttagtgacaggccataaccccacgtagtggtcctgttgttcttcattggcttcctcgttgatgttttcctcctcttcttc

SEQ ID NO: 69882 - DNA, 1297 bp, Zea Mays
ggggctgcctctaaggccttcactacgaatcttgccacgatgagtgagctgccctgatcattggacaatgaggagttcaggttgcagaggacttcactgaataagtcaccaggggtaagttaggaaaggattcgattccaatgagggttagctcgggtagcgcgaaacattgggtggtgagagatgcgaccgtggcgtgcggctacgaggatgtggcgctagcctgcatggcgagggagttgcttgtcttcccttcctcgcataacatccctgatgtcattgctgcagcaatggacccgaaggtgaagctcttgcaccggtgtatagggtagtaaacctggccagctggtcaaagaaaagaaaggtgctagcatccagagtgcccaccaccgtgaagtctcctaaaggggcaaagactgttgccgatgctggtgcagtcgaggcgactgccagaggatgtaacaccctaggtctcacttaggatttctaccctagagccacaccctaatatgttatcacatgtggattagtggagtctttgatgaacataatttaacaacaaaggggttagctactgtttaagatcatatgatgcttaccttgaccatatggtgtccatgataagagaaaaaaattcagaaatccttagtctaaaccactcgggctatctgaacaaaaatagaaaacttgtaaacaaacgatgaatcataccttatcatcagttgggctaattatacaagttgaatatcattaaaatctccatcagagatagtaaggaagtttccccaaaataggtctcaaacagccccaaattgatcactaacagaaagaaccctagaggggaaaaccagattttctctaagtctccctaacccgaattcaaaaacctgtcatgttcacctagattctcaactcaaatccaaatggttcaacggaccaaatggcgcctaattacctcagacacgccctagtaaagtttgacaccgaaccaagaccatttgacatgctttggcacatgtttttgtcgcgacctgggtacagtgatagacccgacttgacactagcgtagctcctctccctaagcgtatcacaactcgggactcacatgaaaaagccagtatttggtgcagggaagagatcctacgccggacctttgctgagataggcacgctagggcagctaaacaggcgcttagacatgggcagaagcgatcctccacgtgtttgacctcagctgagcacgctctgaccgtgccacgcacgccacgagctccgatcggctcaatcgtgcgctcaac

SEQ ID NO: 69883 - DNA, 486 bp, Zea Mays
ctttggtgatgttttggtaattaatgataactgcttgtggactaacggttcttggagaaataagaatgcagggttggaccacatagaacagcaaatgttggagaatcataagcattggttgtggatcagatgaaggcgaaggtaaaatataggttttgtttttttgccggtcttgaggagtttagagaagatacctgaccggattagtaggctagatagtcgtactattaagaggggtcaatgtctttgatctgtgtaaagcttagtgcctcatagagcatcaagtagtttcatttgcatgaggactaacagcgcttcaaatttcgtgagttaaaagttccttcaaaagctagtttgaaaactgcaaagtcttggatgcgcggaccgttcgggccttgagggcggaccgtccgcgatccaccagaggggtccgaagtctaaccacttaggcagccactttgttcttttgcactgcggaccgtccgg

SEQ ID NO: 69884 - DNA, 981 bp, Zea Mays
tgatgcttttgagaaggacggcgttgttgactgcgactcgatggtacgtgtgggagcacgtcagatcacacgagagtttatataggtttggaccgctagaatgtgtaacaccctacttcctgtcgaggttgtgtattggagtttcaccgatatacatagattacaggtgaactgtgggtggtggaggatgagttttcttgcagatctagtggtgcatggttgctatgagaaggctaatgagatatgagatggtgctgagatatgacgagatgagatgctttcatagggatacatctcgaccttatatagatgaccagagggttatccctttacaagttgtgaccattatctaattttacctgattcatcttttaatgcggcatgcattcctgcttatccagagttcgatcgtccttcatccgagttatcgccgagtatctagcccttcaggtgtgcacaacctctccgcgcgagacatcagcgctcctgctgcgcataactcggctgtccggtcttcgtctccctatgtcgagctcattcggcctgtttgcgatccgaggtcatgtcttgaaaagcaagctctcgggaggcccatcaagcggcccatgaggcgtttctgcgtttataaggacccagaggatttctatcgcccgcggtaggagtaatctagacttagtttagccttattagtagtcttcctcaacctctatttcttcacctctcttcgtggctcgacgttgtctagaggcgtcttgggtagcctgctaacaccaagacaagccctgaatctctcctcccagacggggtcctcccgggatgcaagattaggttcctgcgaagaagaagatcatgtgtcattgcagaccatgaggaagcacgcaggaaaggagtcgctcctgcagtgagatcgtggaccgtctgacctagagccaggaccgtcccgtagagagaaccgacaggtggttcattctaatgtcagcg

SEQ ID NO: 69885 - DNA, 630 bp, Zea Mays
gtacaacaccatcaggtaacggaacaacatcccatgtacatgtgcgatgaagggcattcaattcatcagtcatagcaagttgccacttaggtataccagaagcctctttataagatgatggttcaacaatgactgcaccagcacggggaaacccataacgttctggagctgcaatagtgcccacgatcacgaagatgacacccctgattaaaaacaacatgagatgagagtcatcattgttagtacaagtatcagcaacatgatcatcatcaagactggccgtgggagtagagcgaggacgacgaatgcaagtctgagtgacaggtggtttggaagagtaagactgagatggtgtggaagtggaaggtggtgtgatgagaataagaacatctggggtagaaacagtaggtggtgatactgatgaagtttcagaaatgggaggaaagctcataaaggaggtagactctgtggaataaaaagaagaatgagtggaagagttgtaaaagaaggctcggttttcattaaagctcacatctcgagaaatacgcatgcgacgagaagatgaatcataacactgatagcctttatgttcagggctgtatccaagaaaaacacactcaacagattgag

SEQ ID NO: 69886 - DNA, 303 bp, Zea Mays
gacccaattgtgggtatcaaggttgtgtctgagttcccagatgtgtttccaaaggacttaccgggtatgccaccagagcggaaagttgagtttgccatagagcttcttcctggaaccgcccctatctttaaaagagcttacagaatatccggaccagagttggttgaacttaagaagcagattgatgagctgtcagagaaaggttacatccggccaagcacctcgccttgggcagctcctgtcttgtttgtggagaagaaagatggcaccaagagaatgtgtatcgattatcgagctttgaat

SEQ ID NO: 69887 - DNA, 315 bp, Zea Mays
gaaagaatgttttgtgagctgcatagtgagctaaaatgtcttagattcatagaacttggattgatctataacatacatgagtctttatgcctttgatcatgttcctttaattatgctttattgcttattttggtgctcaagttgtagaatgtcatccccgaacctcacaagtccctatgcagtgatgcttatcttaagggggacatgctacaacttgaccatttgagactaatatgtttgcctaagttgtgttgatgtagtctaaaaggtggattgaaagggaaagggtggacttggacaaaggaaaaggcttcc

SEQ ID NO: 69888 - DNA, 650 bp, Zea Mays
gtttttctagttccctggactgcgcgcatgatttcagggaaaggcaggggtctcggtgtaaatgttcctaggacacagagcgcagccgccaggacagcgatttattttccctaaatacagggtctcttacgcaattttacaggtcgaaggggtacgggagcttttcggacgtccgatctaactctaacgcccccgattagatcgaaggtcgctcaacactcccgccgtccgattaggatccaagagcccgaatcgtcccagcgatacatccgtcctacggttgatccgggtcgttcccttgcaatctacgttctggatttaaaacactcaagaccgcatctgcaccaactatgatcaatccagtggcccagattacttctacaccgtgtcatgctctggaccgtcgatctatccatcgaccgcccacaatgtctcttcctaaccgaagtgcccaggcggcaaagctccgcccaatctccgatgagctcgccggagaaatccaatccgccgcgccagtggatagttcgcgcccgcatccacgtagaaccaaattcgctactacccgatctgattgagatgagttttatctcggattgcggtcacagcggcatggaccaccacgatccgtgactatggtgtagcggcggcgg

SEQ ID NO: 69889 - DNA, 803 bp, Zea Mays
gatgacactggggtgtcacaagcactagcaccagcgtccgcatcaacagcagttctagaggcagtttcctcagcagcaagagtactgccagcacaaccaacaaggaggaaactaatctcagaggcagagcagccagacacctcaccttcctgctccagcaaccatccagaacaacaagacagcgccagcggaaggaagaggccgatgatgtttctactgtgggaacaaggccactgggcgtctcactgcccgaagaaagtagcccagcagtagccagtttccaacgccccaacaagacaaagagcaccacaacaagcataaggaggtcgtggccaggcctacaaccgtggaaaggtgaactacttgtgatgaggacatcaaccccaacaaaggaatggctactctaactgaaccagcacagacaccaccaggaccactcactctggctcgtgatgattctgaagaatgaaggaccagaagtttcctaaagtgcatgcgccatctatgctcatgatgaatcttcccagaataaagtctaggtgttgcgccacctatctatcttttagtttggaaagaaataatcaagaaggtgctacgctacctaaataaggaatggggaccaaggagatggcatggctgattgggtgcctattccctgccttgtgggcaggagattgattggctgattgggtgcctattttcctgccttgtggggaggttgggtgcccacctcctcatctctatttagccaggggttgcactccctcttagagttgggttttctttgatagttttagcatcgt

SEQ ID NO: 69890 - DNA, 597 bp, Zea Mays
gacctcttaagctaggaggtctgggtatacctaatctccaagagctctgctgggctctcagaatgaggtggctttggctgcaaaaaattgagactgggcgctcttggtctgggttatctatacaggtgcctgccaaggctcgggctatcttttccagggtcctaatctctgtggttggtgatggagcaaacaccatgttctggaccggtaagtggctgcatggagaaagaatctctgatttggcccctcggcagttcggcataattcctaagagaattgttagcaaaagaactgtccaagaggccttagctaatagaagatggacttctgacatcaatggggctctcactgtcggagctataacagattacctccacctctgggaaatactttccggttttgagttgcaacctggcagggaggataagcacatatttagcattgcaccagatggtagatattcggccaaatctgcctataaaggtctattcctgggttcaagtttgtttggacattatagaagggtgtggaaatcatgggccccatcaaaatgtcgatttttcatttggctgattgcccagaacaggtgctggacag

SEQ ID NO: 69891 - DNA, 397 bp, Zea Mays
cgaagacgaggtggttgattttttgcatcaaactataatggatgtgacgatgaagcttggttcggggtcttcgacgaggaggaggcgaaggacacaacgttggagctacatcgaccgagaccatgaagatactcctgtccagttgatgtaaaactagttcaccaactcgtatgtactctccgctctacttctgtagaaggtaccacacgcataggagtctctttctctaaaattcgggaaggttggacgagcaatccccatagttcactcttagaaccgatgcgctcaactgcaacgatttctcctctaccaaaaatgcatcgttgccctatgatgcttgcctacgatagagctgatgactatattaatgaatatactgaaatgaggaaaggtttag

SEQ ID NO: 69892 - DNA, 432 bp, Zea Mays
accgaagctagaaagcaaatgcaatttaaagggctcaaagcagcagggcagctcaataacataacagacatttttaccatgaccatcatatttatatgcaaaaaaccactgcagagtggtcccactattcagaaagtttcgctaccttagcgacggagaaatgaaacttcctacgccctactctttttggaacacatacactaatacacaggcgatgacgtattctgattgcaataccgtgaaacttacgaagttcacagctttctggtggtctgaaacaattgctgtgttcttaatacatgaaattaatgccatttgctgggtccactgacaaatggcgtcaattacagttacggacgataattagctggacatgtgagaatttggttacctaccattcttatctcagctacctccgttctggaatatttg

SEQ ID NO: 69893 - DNA, 598 bp, Zea Mays
cggagttggcgtctttcaccgcgattgtgccacaccccaggccattaaccacgttgctattagccgcaccagctcgccgataaccgccgtagcccctcagctggtgagtgccacggtaaaacgcgccggtgactcatcccttctttccggccgccgcgtgtctccatcaaattcactggccaccgctcaagcacactataaattgacgacacggtctgctgcgttgggtcatcaccaagcctgagcacccgctcctgccgccgattagccaccacaactctccaatttcccatttccccaattcggtttccaccgccgtggtagagccctcaccgtggtcagcgtattccaggtctgttcatgctccctgctcccttgtttcagcatccttaggttcccctgatgctccccgaccctgccaattggactaggaccccttagatcaccgggaacgcgttcgattgtccttggtgcccgctgtcaccgtggacagagcgagttagagctccgctagtgaaattagttgaggggaaacacttgttagggcttgaattaggtcccagccaaagtagagcacctatcatcgagtgatccgaca

SEQ ID NO: 69894 - DNA, 782 bp, Zea Mays
atcgccaccgcggttggggatgggtctgcgaccatggtaaagatcatccgcgacgtggcgttaaaacgttgcggtggcactgcccggttaatcagcggtcgccggaccatcgccgtggctctacccgtgcgggtgaactcgccagcgcgtttacagctccgcgagcctcatccaacttcggccatcggcctataaattgagcccgggtcctgcttcttcaccacatcacacacacgagcacttgagcaatcgactcaatttcatcggagaactcacacagtccacaaatccattccgccctattccgagcgccgccgtggaggacctctccgtggccagccctcttcgggttagtactcgctcaattgcctcatgttccagcatgtccttagcttcctgttgctctcaacgccaatcaatcaaagtttaccaaagtcccaccaccggaacactccgttgctccgaagaacgccgccgtatgtacctagttcctggtgaacccgtaaagccttcccaagcttcaattttagtttcaatcgcattaatcatccggaacacggtctccagggtggatccgccaccgtgacatgaacaagcttcaaaataggtcaaatctcccaaaataaatgagggcttttgctctgactggctagtgctagatgtttgtaagcctattactccttgcctgggtcaccttcgccgttgaatcacggctctggtttggcgctcgccgcggttccgtcatggacccaggatagaaaagaactagaacccgaggggca

SEQ ID NO: 69895 - DNA, 454 bp, Zea Mays
ctaacccccatgtgggttccctactcttgttactatgttgagattcgaattgagttagctggtcggtagcttagtttggtgaccctttactgctgaaagggattcagaacgcaggaagctagatccaaagaaaaggtacctgcttcctagggtggtctagagtcctgcaaccgcttagcctggtcctgtaccctaagcatgcatactccaccactctataacaggtgccctagtatctagaactgtgcacctaaggtcccggacttcattctagcttaaaggtcggcttctaaactctactcgtcgagttcaattgcttgtgacttagtttgggacctccttttgctgttgaaataggtttggatcgctcggtgccgggtccgaagaaaaggtacctgtttcctagggtggtccggagatgtgtagccgcttagcctggtcctatacccaaagc

SEQ ID NO: 69896 - DNA, 555 bp, Zea Mays
gccaataccgtgggtatcagatcccgtaggagtggatgcaggacaccaaaattgttagtcaggtattgcatgttaattcaatttctctaggaacatgttgatcgagttgacgaacaacatcgggtttaaccattcctccttttttttcccttacccataatactcttgatggttagatgggcatgtatattttggtttgtattcttaatatacctattttgaagtaaatgtttacagtgtttttgttgctggattaatacagtttgtttttttcatcaagagttttcacacaaccttaagattcataagatattggggaaagcgacatatggggtttactcgaatgtatgattctcttctgatttttcttgttgcaggagtatgctttatagtgttaacaacttaacatgatatattcataaattatgtacattttataacaaatgctttctaaccctttccaggttatgggatttatgggcgatatagactgggcaattcttgtgggtcgcatctgtcaattgtacccaaatgcatcaccaagcatgttgatat

SEQ ID NO: 69897 - DNA, 686 bp, Zea Mays
tgatgattagatgcgtatatcaacttaacaaacctataactccttttactttgttttattataacgtataagaaaaatatcatgtgcgtagtatatgtacagtactacagtgtgccatgcctttccgacgtccatgttctgtctatataattaagagcaacacaggcagctaagcttcacattcaattggaaaagcctctttagttacgtatataagctagctatctagctgcatcttcttgttcccttcccataaaagatacgccggactaaagtgagcaccagctagccctgtggcctatagacacgtgtttaatttgcttcccgttgctctcccagttctgctacactactagctagtactactagtgtttggctgggccacagatctgagatccaacctagaccgtacctaaaggttactacccaatcaccatgatatatcaagcttcacctaatcacctcacataccgccgcaccatctcgtgaccaagccacactaccacagctacttatataacgaagattatgaccaatgatagaaaggcgcgcagcatcagtcatcagataagatgaattaaaagggctaggggctcgatcgaacaataaaccaatagtctggaaaggcgcttttattaaagcattttaaattgaccaagtacttaattccacatgtttttttgatc

SEQ ID NO: 69898 - DNA, 810 bp, Zea Mays
caaaatggtctgtcaggctgactgaatgagtagcgcgatggtacagtgcactgatcagatcgccagctcagtgcccttgccgccgacgagccatgcgcggattcgtgctaacgtcgcggtgattcgcgctcggatcaattcgagagcgccgggggtaagaaatatcgcccggggatgaactccagccgctattttactccgaccgccgtacccgagcgtgtcgcggccgccttggataggttcgccagagatagaatcttcgcgaccgtgcgccacatgcccgagcatcttaccacgtcacagttagtcgtgttaagcgtatccggtgatcgccggagagcttgccacggtaattaacacgaatcaactgtgccagtgacctcctatttctctgaccgccgcgcgtcttcatccaattccccgaccaccgctcatgcctgctataaattgagcatgccgtgagctccgtaggataattacgcatccaaagcaccagcaattgcctccaatcgttcactagagaacatgaattgctcatttcccccaatctgtgtttccgccaccgcgaaagagacttcaccgtggtcagcgaatcccaggcccgttcatgtcctctgagtcctcgtttcagtgttcttggatgctctggatactctctgacccatccaattgagctagagtctctaggatcgccgggaacacgtttgaatgtccgcgatgcccgctgtcaccgtgggcagggcatgttagtgtgccattagtaaaatcgattgaggggaaaccctctttaggtcttgaattcggtctctg

SEQ ID NO: 69899 - DNA, 411 bp, Zea Mays
ataacagcgaggttatgctgcgaaatcacgagcggaaggtacacgagtcagaccaaataacacgtaacgactgccattcttgggtgggttgaggacctgtcctcttcctagtagggtttgtagttgtgaaatgcttaataaaactgcatactgcacatttttgtcacacatgatgatggtctacgtcttttcattagttttaaaaaatagatggattcaacggtaacactctagggcactatgatgcatgatatctaaaggacctgctggagtttttcaatggattgggcacccaatatagtatgcactcgagttataccttatatattgtgtatgatgactgaggtgcccattcattaggtcgtcaaacatcatcatatctttatattttcttctctactttgacaaatc

SEQ ID NO: 69900 - DNA, 348 bp, Zea Mays
caaatgcaacaggaacatcaggagatgcaccaggaacgacaggaaatacgacaagaaatgaggcaagaacgctaagaaatgcgccaagtacggcaagaacaacaacaaccaccaccaccactagctccgcctaggcataagcaccgagagtttatgagccataagccaccgacattctctaactcctcggatccactacaacctgatgactggttgaagtctgtggacaagatgctcaacatatcccaatgcactgacagagagaaagtgctatatgcatcgggtcgccttaccggccctgctgcggattggttggatgcataccgcgctgcccacgctgcttccaac

SEQ ID NO: 69901 - DNA, 628 bp, Zea Mays
tgcaacaacacaccaatcatatttgatggtacagtgtaatggttgtatgacacgtaagggcctagtgacaaactagtgtgatgaacgatcctcataaaaataaattttaaattaaaatggacatatagtcattttccaaatattaaattgcagatactgcactttatattagctaaaaggctgagaaagatgagttgaatagaagacatgtccctttttatagctaatccatctgctcttcttcagctagcgaggtggtactaaccgaaagtgtgaagttgcgtgtggtttcgtgccatattgggcttgtgtgttttctcatgatccgtgtagaactgctcgtcctctttcagctatcaagaaggtactatccggaagcatggcactacgtgcggctttgtgtcaagttgggcttgcgtgttttgttatggcccatctagaaggtaacgtcccacgtcacttgtcgacacacgacgatggtggaccacattttaaatcagaaagaagtataatttttttttgtaaaataggcgacgctggaaaccagaaaaactggtgttttataacaaagaaccaattaaattgtattaaatctgacaatgctacagttgcaactttagacaaagac

SEQ ID NO: 69902 - DNA, 365 bp, Zea Mays
cggaaatttataggttccatcggcggtggcggctaattttggagaagacgtgcggcggtcggagaaaggggtggtcactggagcggggttaccgtggcacttcaccgtggcaagaccaccggcgatgaccggacatgctagggcgagtcactgcgacgaagtactgcgtttaggcacgtggcacccgagcggcaggcggccaactccggcgaggttatctggaccggccgtgaggcaagtgggtacggcggccagggcggaacagtgtctcaagctcatcctcagcgcccgatttttcaccgaggatcgttatccgcattcgaccgggcgtgaatcgcgacgccggcatgaatccgggcgcgaga

SEQ ID NO: 69903 - DNA, 525 bp, Zea Mays
gtcgaaccactttaatcatcctatacaggacatcatgcttgtgttgcatgtatctctcggaattgtaaatactcagtcgctaaattgactctagatagtcccttgacgataatggtatacagtaagtcaaatggtaaaggtcagtactgaatggaaataaatttggagtttatgtagcaaaactacattggattccacccccttggtatgcttaccgtaatctatatctgatctaccagaagtgagaaaagtagacaaataactatgaaatctcacatcactatagagcttgaagctaaattggacattaatttgtccttagtcctccgcgccagaagagcaatatctcttgaccactagattattagtgatggtaatttgtcttagaaatatgaagaccttatggagacttgttgtgttctccctagtcctgatgaccctttcgcatgagagtagtgctatctattgttgaagtctggtcccagatggatattgttcttgtttggctcttgccaagcaattttc

SEQ ID NO: 69904 - DNA, 1281 bp, Zea Mays
aataactgaaactgaatttgaaatcagaaatggtcacagtggaatggagccaatttggacgcgccatatctttggattcactcgattttgacccaaatatcctatagtaagtttgaagacggttgataggtgaacaaactttattaatgaagtttgctctgtccttaacaagaatcaagagattgagtggatggaagggggtcggttcagacaaactctaaagatccagtgcactgaaatatttgaagaacacagggaaaagatctacgacactgtttaatcagatgagctcgagtgatccagtggggagggatcgatccgggggaggataactttggacgtggcatcatcccgcgagctcagtcgtgcgtggctggagatattcaccggcggtcgccgtgactcagtgctttccgccgcggtgtcacccatgccttgctcctcccttactgtacctcttctatacgtggttaccatgcgtaagcaaagccttctgcggtcgctgatcgttagccggaccgccgtggctataaatagcgctatgaaccacggcgaggtattcacatctccaccagtgagttgattgatgcccaaaatttgcacagcctctgccacctcttcccaaattgagtgtgcacggtgaaactatagttccttacagccgtgtagccctaatctcacctcccaattccacctagagccgtcgcgacgccattttcccctttctcggtcaccggcgagcacaagttctctgtgctccgtggccggaccactctggtacggctctacacctctcgagtgttgttttagcagctctgtatacccgtgaagctcatcgtagcagccatttgaccaattcgggcatgagtgaatgggaacgcgggctcaacgtcacggtttccgtcgtgcgcatgggtagaacgttctattagtgtacaaaccaaaattaaaggttgttctcgaatcgcctggggtcggaaatactcaccccgtagcttattgggatagccgccggcggccatggccattacaagtcgcggggtgatcgacgacgagcgcgccgtggccaggggtctatttggtgaagaaacaaaagtcgggggacctctgtgtaattgtcagtgagagggtgaatagtgattatgagttcttaacagattattcaagtcagcgggggtctctgtgcaaaactgtcagcgcaggcgctttcctctagtagtgggccgactcaggccagtttaagcccagttctgtagcacctttttccttttctttttcttc

SEQ ID NO: 69905 - DNA, 370 bp, Zea Mays
ctgggtttttctgggctcaggatgttgtaatcctcttcatctttgttaccacttccctctccaactgtgatttgctcagcttcagcagtcaaagtacctttggcaataggctcttctggcacaacaagacccgactgcctcatcacctctgatattggtgtcgtctcagttacttcggcctcgtctccttcacgagatactctaggtgtcgatcgcactcgggccatttcaatgttcacttttttacgaagctaatctcaagtgatgaagcgttcactcaaaaacgcaatgcagaaagcttcggctatggttaaatttttaatagcacgacagtgcaatgacaatgaatgctgtggtaactcctcaccaa

SEQ ID NO: 69906 - DNA, 998 bp, Zea Mays
gcgactacctgggtccggatctgcggtcgccggtagccatccggtttgttatgcacggctgcgtttggtgacgccgacgggtcgtgcgaatgaaggcatgcacgctgatcgatctgctttggacggacggacggacgtgccacttggaccagaaatggatgttatctttggatggttgccgtggctctcatgttgtgtgtacatgtgtatatttgggttgggcctaatgggctatcacgaaaaaaagcacggctcaaatacaacacgacaccaaataatttcggtcggtttggcccgtttatgcaaatacaaaaagacccatttataggcacgtaaaagcacgtatttctttagtgcacagtcttgcactcttgctgatcatcggtgtgggcgtgtgccatgtggcctcgaaaaggctcagttcccatcccacccatcccaccccacggtcctgcaaggcgaagcatacgagctagtcctcggcgagcaactcagcaaggggaagggctgatccaatacagtggacctacatctgcatgacaagacgtgtcaccaccaaagcatgttcggaccacgagtacggtgtcgagaagtccctgtcgaacacgacgacacgcccacgcgtacagtctctagcgtagccccgctgacttgtggggccactcaaccccaatcgtggggacctcagcatcgaagtctctacattgacccacgtactagtaaggacgggacgatacatcataccgggtgtatacctacacatgctggaaggtgacgcgaggtccatgacaagagacgaagctgcaccaagcatgaccctgaaccctactgtaagtctaccctgtgggacacgcaaggaaccactacatcaacatcgaactcgctacagggactcgtatgccggatggaagaagcggtacaccttacgtggagtacgatagcccacaaccctacatacgacgtcaagaggattacaccacccaagggcaacaggacga

SEQ ID NO: 69907 - DNA, 1236 bp, Zea Mays
ggatacgtgaaacacattgtggatgttggacatggattccagttattcaagacggtatgctgcgggtccaaccctgccaatgatgggatagggaccgacgaatcgcggtgctagcttcccttttacttggaacctcctgacaccacacattggagaaaccttgaggtagacaaagtctccttcctcaaatttgagttacctccgcctgttgtccgcataactcttctgccgactctgagcttcaagtaaccttctgcggatcagagcaactttctcttccgcctccttgacaaaggcaggtccttctagtgcttttcccctacgttggaccacatgagaggggtctggcatttccgtccatacaatgcttcgaacggtgacatcttgatgctggcctgatagctgttgttgtatgagaattctgcgtagggtagactggattcccaacttctatcaaatgctagcacacatgctcttaatagatcctcgaggactttgttgactctttctgtctgcccatctgtctgagggtgataagcggtactgaaatctagcttggtgcccatagctttctgaaggcttgtccagaatttggatgtgaactgggttcccctatctgacactatcttccttgggatgccatggagtctgactatctccttgagataaatccgggcaagggtggctcctccaaaggtagttttcactgggatgaaatgggctaccttggtgaggcgatctattattacccagatggaatcattccctttttgtgtccggggtagtccggttacgaagtccatgcctatttcttcccacttccattcaggtatcgggaggggttgcaaaaggcctgcaggtttttggtgctcgaccttcgtttgttggcagatgtcacaccgggccacatactgagctatttctttcttcatccctctccaccagtatctggttttgaggtctaggtacatcttggtagtccctgggtggatggagtaggctgagttgtgagcttcttcgagcaggacctctcgtgcttccccttttggtacacatagacgatttttgaaccaaagggctccttgttcatctgtcctgaggtccgggagttgttccttgcgggccctttccacaagttttgctgtctctgggtctaggcattgagatttgcatatgaggtcttccagcattggtctgactttgagactgtcgctgtttcccagacatgtatttagt

SEQ ID NO: 69908 - DNA, 477 bp, Zea Mays
gtcgtaccccaatcccaaccgtcgtgtacgcgtgcgctcaattcaaacttggaataatcgatcctgtccgtatgacacaagtggtatggtgtgttttcgatcagatacgacatcgcgagccgtgcggcgcgtagagggatggataatacgttcctggcgcgtacgaacgtgaggagccagtccggggcgtcaaagcagccacgtcgcggatcatcgcatggcctacttgcgctcaccagctgattgtcctgctcgggactctctcatcattcagcgagcgaagttgtcgcattgagacggcaagaacacaggacgaaatatataatcggaggcaggaggatggaagaatccaagctcttctttgggttcgcccgcatgtcacagctatcaatctgactgacacgctgatggtagatgccttctgctgtttcaaccccacgtgtttactgaaacacagacggagacggtatggcgtat

SEQ ID NO: 69909 - DNA, 309 bp, Zea Mays
tttggatatttggggtagctcgtcaagtagggtacccagaagaagcatggtcgaaacaggtatccaatgggttgagcgtacattggagaatagtgatgattgctatgacatgtttcgcatgcgttgcactgtgtttcgtcgtttgcatgatatgttggtgcataattatggtctgcaaccaagtcatggagtaagtacaaaggaagcggttgcaaatttcttgtgggcatgcgggggtccacaatcttttagacagattaggaacaagtttggtcactcgttggaaacaattagccgcaaatttagtga

SEQ ID NO: 69910 - DNA, 854 bp, Zea Mays
atctgggtctttttcgtctgatggtgagtttgggagttcgttttcctggaccgaagagtctgcggatgaagacttggattattttgatgcgttagatgtggccgcggccgaatcctagccgcaggtggatgttggcgaggtgtctgatcttcccagtgcgaggaccgagcaccggcgatgaagggtggtgtcgaagcatagcgttggcgaggtttcgcgaagtggtaggcgtcgtcggatggggatggagcgggaccgcgttcgagtagattggtttggtaaacgagagctactgtcttcgccgattgggacgagcattggtgagggggatctgtggaatctttttgagggtgaggaattgaaaataatgtttttcaattatagggaggcgggcatcatcctgaaggatgagccgatgtagtatgtggtgccctcatgttgtcctatggtagtaggggtcgcaattgtatttatttgcgcggtgggttgggtgacccttcactgagtgtatgtaatctacaacttgtattgtgatgtggcatgttgatcttcgcttagtagtgtgatggtgtaagcgtccgacgacacccttgtcgattccttgaacgggggttgtctcatagggtagactttgcgttgtgcgttactgtgcttgtacggctgcaatcttaggcggcttttgcgcggagtgtcttttagtaaaagacttcgtatggcacacttattgtgctttccggctgcacctttaggcgacttttacgcggagtgtcttttagtaaaagacttcatatcgcacacttgttgtgcttatccgactgcacccttaggcgacttttgcacggagtgtcttttag

SEQ ID NO: 69911 - DNA, 453 bp, Zea Mays
atttttgggcgggttaaatagggaaatttaggacatccttgcttataaagattatgctaatgtaacccgattgtttcatcttgcttgcaaagctgaaagggaagtgcagggacgacgtgctagtgcaaggtctaatgtttctgcaggaaaatctacaccatggcagcagcgcacgactacgtccatgaccggccgtacaccagcaccaactccctcgctgagtcgaccagcaccactgcctttctccggcgacaaaccacgtgcatcttccacaaatttagcaaccaaatctgcccaaaaaccaccaggtggtgcctcttcagtagcctccacgggtagaacaagagatgttctgtgttatcgattcaagggctatggacatgtgcagcgtgattgtcctaatcagcgtgttttggtggtaaaatatgatggtgggtattcctctgctagtga

SEQ ID NO: 69912 - DNA, 529 bp, Zea Mays
cgaccgcatcatctttggctgacccgactataggcaccttcggcactacaatcgattcttcagcgctctgcatgatgggggccgcttgttttgcttcggtagttgaagaggtcccttcggcaaattcaggcactacggtcggttcaatatatcgcggccaatgggttagaacttttattttcttagtcttcggcacagccggcacaacagtggtggctaaagcgtcagtttttcttttccttccttgccttcgtagtgggtagtgataatcagggtatacgaagccaattgcatcaaacaccctgttcaatcttttcttcccccaacccccgaaggaagtggacaaggcatcctcttcggccttcgaatatgtcccaagcagctcgtcgctggtagcctcaatgcattttaaccaatcatcatttggttcgtcaaacttttctctgaatctgaaggtatatttcaatcgaactaggccatcttcactggattcagcagtagtctccttcgacatttcccagctattcac

SEQ ID NO: 69913 - DNA, 1041 bp, Zea Mays
cagagatgagttggctttattgggtggacatcgaggttgccgagagttgaaaatagaaactgaaactatgatttttttatcacatacatttgggaggaattggtggtctatatacaagttgtttgcactatgcaagcatgaatgaattatgcatgttttctatggttcctagtcgaatttcacattaacaacatgtggtgtttgtcattcttgtgcactagctttaggtgaagtggaaacatagtgaattttcaactgaagcaaatgctatcctcactatttgaattttttcttcaaaaacaactgcctaagttcgaaaaggtgtgtagaatggcagtaaaaacatgtgcatgcgagagatcatgtaatatatggccatttatgccaactgcacctacgattgcataacccataaatcctaatgattataaaagagatccagagtgcctccatttggaaagctctagttggcaaggagggccgccgaagtgtcgatgagaacttgagaagctagatgactacggtctcaagaggggagagggcagacgtcatttgtgttagactgctagagaagtagaggtgatgtgttggtgtatcatgggattggaaggcaacaggattccagaataaatggtttgacttgaagtgactacatgccttgcttaccattctaatttggagcttttcatgggatcaaaaggcacttttaccatatgttatgtgtggcttaagagccctctcaagatcatcatagggtatctgtagcttatctttcctacttattattaacaatagaccaaaaacaagaaaacattgtattaacaaattctctagacaaataaacaatgtttttgtactcaccctaatgtgtctcaaagaatttgattttgacatgagatgagccctcatggtatttcttgagagtcaacataacctcacaagccatatcgaggtgagacaccttctcaaacttagaaatcgagagactacacaaaagagcatctcggtccttgctattagactcatgatggttaatctgat

SEQ ID NO: 69914 - DNA, 740 bp, Zea Mays
cttgtttatgtctctaaggatcatatccaccaggtggtctctttgaatagtgtggtggactcttgggtgtggcacttagattttgtgtggtggtacttcatcttcatcctccttgtcttattcttcctcaacccccacttgactatcgccacgatcttgagcttgttgttcctcattttgagttggggttgagcttgtgtggaggatggttaatcttgcacttgttgaggttcttgtgggcacacgtctccaatggacttgttgaggttcacgtgtcatatttagagtgtcccatatctcctcagcgctctaagtcgttcaccttgttatattcttttaaggtggcaccttctttttgattggcaccttccttctgaggtggcaccaaactagtatggtgcgctaggccaacaaatcccttctatagagctatctacgtaagcggcccaatactccccagacagctgcactttgtcctttttttgcatatcttctttagacaaatatttgtagtgagaatccaaccagtctaagtcattgtaacttcatctattttcacttattttaattctccaacttgattcctatttatctgaacttaattcctgcacatacgcacttagcaaacatgctagtccacatagtgatatgttggtcattgatcaccaaaacatttatagaaatggctcaagacacattgttcctttcaatgagtgttgtcctagttgtatatatctttt

SEQ ID NO: 69915 - DNA, 319 bp, Zea Mays
gccgtcgcctgcgctccccgccacttcgcctgccggggattccgcgtagtggagcagaaccacaccgccgcgacttctcccctcccatccgcactgcgctgtgacttgcctcctctctcacttgtgccgaccgtttcatccaccgtgctccatctccattaatggctgcggctgtttcttcgattaggtaacactgttcttcaatctgcgtcaatggagtattgaatctggccacaaaccactctcctccctcgcctataaagctcgcgtcgttcttctcctcttccccacgttctggacgccgccagctccgttcctg

SEQ ID NO: 69916 - DNA, 440 bp, Zea Mays
aaactacatggctcggacaggaggacaagggtcatctcgtcggtcatgccgctacatggctcgaacgtgtatcccctaaccacaacaaccgcacacccactcttatacccctgtgcctcctccttgcgactataaaaggaggagcccggggccttctacgagggacgagacgaccacacactacacagctcacaactcacctcaccacgatatttgcactctgccttaatcatacttagagacttggtacacactccctctctcgactgcttgtaacctctactacgagcacttaggtgcaagataatataaaccttcctcacccactggaagtagggccttctcttgctcaaaccaggataaatctctgttgtattcttgcatccaccatccagaacaggagcacgtagcacaaattcactagtcggttagaaccccgg

SEQ ID NO: 69917 - DNA, 2126 bp, Zea Mays
tatggagctgtggaggctgtagaccattaatggaggccattgggcagttttgatgatgacgacaagaagactaagatgataattccatcgatgaggaccatgttgactgggacttatttgccccttcggaggccgatcaaacctcagtcaagccagatgaggtaatgatgatagtccctctcacccactaaggccctcaaggagaggggggcaacataggcacccccaccgcttcaaagcctagcttcgtgcctgtcagctccaaagcggtggaacctcaatgcttccctgatggccgtgaagcgcaccacggtgccaaggtcgaagcagccgaccctctctaatgacttcagggtcgggtcatccatcggttgtcgtggtacccatagatgtagtccatccaaaggtgccggtgtctggggtttagattcggacagggacttagaactctgccacagccgtggccatagaggttctagccaccacaccttcgtttgtggcaacgacagacccacttcccccaccagcttttgtggcttccccgttgtccctagagcaggcggcttcacccacgcctaggttgttgagcccaggggctaggttgaagcaggttaggggcaaggatgggttgggctcggatagtctgcccctaaacgcgatctctttgagaggtggacgtaagttgatgttccttaactgccatattttcgtgcaacccttttcttctgaccacaatttgcccttgtgatcacaacaggtaggccacctccttgcacattgcaccgcaaaaggccgtttggtgcagggagcttaacactgcattgatcgtgaggacaatggcactaaccccacaatctcctccaagtgttgcaccgcactaatacacttcttctccactcatcagccatcttattcgaccaaatgaaatggttgaacaacttgattagtcatactttagctatgtcacagatgcacctacataccttaattgagataccatcaagaccatcgccttaccccctttcatatttttaatgccttcctaaccttatattcttggatcctatgcacaaagcgtctactagtgtcatcaaacgagtcatcaactgagatgttgtgttcccattcttccccattcaataatttatcaaaatactcttgtcgtttatgtctaattgcatcctcctttgacaagaggtgctctatctcatccttaatttggtttttatctagcctttcgtcatttgagtgagttcttcttttttgctgatctttctgcttgtatggtggtgttgacaatgcactcatcaagagggagattgcgaacacaaggttgagatctgcccttgtggtttgggttgtgatgagtgattatcaacaaatgtagcatcttgagttaagtcatgtggactaactaggggtgtgagtgtatttgtgcaacatgtctcttggtctatggtacataggtgtggagttcaaagatggcgatcgatagtgaaagtgaaggtcatgcgggttcgtgctgatgaatcggacgtggcaaaggacaagcattgagtcttgaccaagggactagagaagccaagtgactagatgtggtggttaacatcattggacactggcatacgctaggacatgatggagtagatcatgtcaccaccatggttgcatacaagtgggacacgtgtttaggtcatgagggacacatatgaagtatgctacccatgagggtttcgatggttgagcctcaaaaccacccaacacgatagttcaagggtttcactagattaggacctcaaaacccggtggaacgtagtgtcatcacaaaggatgtgtcaaggtgaagtaactttgtgaagagtgtgtatccatcaaatcaaaattccaaaagttggtccattttcccttggttgagtggatagactctatgtaactaggggtagattaagaaagaggaataaccccctataaataagaggggagggttgaatcattcatttatctctctagcacatcttttacttctaatcttcattttgcttctcgctttgttaggagatccttagatggtctaaaccttgacatctaagttcatgccatttgaggatgtgtggccgtaaccactc

SEQ ID NO: 69918 - DNA, 427 bp, Zea Mays
ctgaaattccttcgttcaaaagagcccttcggtgtttgcacatggtgcatgcaaaaaccccactgctcaccggaacacccactgaagaacaacgcgagaatacacagagacacaactcaattggacgatggtggacacagctcccggtaccttcctctcacgaagaacgattaccagtttaccaccaagtttagagtagtagtacatgaacaaagataatctggaactacttcggacgagttggccttcaactttctgcccaagcctacgccaactgcccaccctccttcactccttatcctgcttacaactacagaaaacaaaaagcaagctgacagctaccagctattgggtccattctagcccaagataaagttgattgggcctactctctcgcctcgggctgttcactatgtttgaattttgc

SEQ ID NO: 69919 - DNA, 447 bp, Zea Mays
gtcacattcagagatatacttagcaatttccctcttcgttctggtccaccagtataaggatctgagatcatgatacatcttgttactgccggggtgcatggaaaattttgaaaggtaagcttcatccaatatcttctttctgagctcagggttcttgggaacaactaatcggtctccaaaccataggattcctttgctatcctgacggaagcatttgtatttgtccaccttttgttcgaccatttccttaatgacttgaacacccttgtctccaatctgtgccaggactatttgctcttgtaatgtgggctccactgaaatataatttaaagcacctgaggaaacaacttctaggttcaatttgcacaactcatcacacagggtggtgactcttgcatccatgttcatacaattgcactgggctttcctgcttaaggcatctgccac

SEQ ID NO: 69920 - DNA, 414 bp, Zea Mays
cttgacagtgacttcattcaaagctctgcaatcaatgcacatcctcttcataccatccttcttctccacaaacagcacaggggctcccaaggtgaggtacttgatctgatgtaacctttctccaacaactcatcaatctgcttcttgagttccacaaactctggtccggacactcgataggctctcttggaaataggggcagtgcctaggataagctctaaggaaaattcaactttcctttcaggtggcatgcctggtaactcttcatgcaagacatcggggaattctgacacaatcctaattgcctcaattggattggactccttatcatctattgataaatggtgataggctccttcttctagttcaggcaagtacaacttggttactacttcttttccggatggagacacc

SEQ ID NO: 69921 - DNA, 462 bp, Zea Mays
cacggcagcgcagatctctactgcatcaacatccacaggctctgataacaaatcctctgggaccatatcctctagagtttgatcaaagttggccagggacagttcttgcagaccaataagggcagacaaagcaggagaaggaactccactacttccaccgctggcgatgaactgccgactgtttttccgagttaaaggagcttcatcttcttcctcttcatcctccacagcggcaacgcaagcagcacccccgttgggatcagcagcagtctcggcacacccattggggtcagcatcggaaaggccagtcgcaggcacttcttcagcagcaggagctaaggtactggcgtcctcatcaaaactggatactcgccggaggcgtcttctctttttcttttgctcgtcagcagaaggctcaggctgactggttcggctaggacgcctcgggcgagtactgacagg

SEQ ID NO: 69922 - DNA, 444 bp, Zea Mays
ccgccggtgacaccgcggcatgaagcactcaagacattgtcgcgcgccggccagatcttttacccccccccccccccggctcaatctgcagagcagtgaacctgtccaaagttatccactctccccaggcacgaatctcccaggtgagtgcgaatcacggcggaagatcgccggtgtcgggttcacggaaccgaagatctttttcagttactgtaccattgccgacttcatttagtgccctgacggagaaacttgaggggccttttcctttgattttcattcagcaaactactaagtcgactataccaaagttgttcccctatatactagcttcaactttgtcacagagatcttggtcatttactcactggatcaagcacaatttggctccagagttgatccaatacaactaacagtctcatttcagattggactcgactgata

SEQ ID NO: 69923 - DNA, 381 bp, Zea Mays
acactgacgcgcacgcatagcaaggaaagggggctagcacatcgctctctcaatctggcgtagtactgacctttccccttacactttttttctctccttatacgtctacagtcatatgggagggggcaccacgcggtaagcattgcggatagtctttgtgaccgtttggttgcaagggtcatgtgggagggacgggacaaatctagtttcaataatgtttgattcatagttaaatagattaaagttctgaatatcttattagagaatatttttctggacgatatctttttctattcaaatacatacttacatctctaccaatgtgttgatttgcacgatttacaccaagtggttgatttatatttgatttgttttctacat

SEQ ID NO: 69924 - DNA, 738 bp, Zea Mays
attttgagtaagatatgttgctcgattaaggatagtggccatagtcgaattgtagctggattacagggctagaactttgttgccgagagattaaccagttgttacacaaaaaacatagattaatgccctgcaaatagccctatcagatagactgaatggcgttttgattgtacagtgactgaaagagatcacaggttcacaccccctcgctaccggtgatcttgcgcccagatccacgccggcgtcgcgattcatgctcggtcgaacacagaaagcgctcctcggtaagaaatatcgcgctgtagataacctccggccactgttctcaccggtcgtcatgtcccgccgtggtcaatcacgctggcatcgccggtgttcactgttatccagcccggctgcattccttaaagccttaccacgtcgcagtgagtcaccataaaccgctctatagccctggctcgtcgtcggtgagtctgccacggtgaaagccactaatcgtgtgcaccagtacccctcctcctctccggccgccgcgcgtctccgttaaattcactagccaccgctcaagcatgctataaattgagcggagcagcggctccgctaggtaaatacgcatccagtgcactaacacctgcctccaattgttcactagagccgcccaatttcccaattcccccaaattagccaaaccaccaccgcgtgaacaccttgccgtggctggctcgtctcgggtctgtt

SEQ ID NO: 69925 - DNA, 435 bp, Zea Mays
gtcagctgaggataaaaaagctgaagcggaattgattaaagaggaaaaagagataatgtcaatcgacatgacttccctcagcccgctgcagcgccagtactacgagacaatgcaggagaagattgttgctaggcgtttggcaaattaatttagttctagtcatttcagttgtggaactattaagcttcagtttatttgtttagttcaccagaacgtttgttgattcatgagaagcattatcaaagtgcaatttcatgactgagatttatttgcacttacatatatattctcaatgtatgcagcagtatgttaattaacttgtgtgctgggtggatgctcctgtgacctactgagcgtatttagtttcctgctcctgtacctgttgcttcgaattggcgctggcgcatagcactactaaactttactttatttttt

SEQ ID NO: 69926 - DNA, 409 bp, Zea Mays
ccgaggttgaacactgcttttgtgtcatcattagttgttgtgcccttcattggtactcaggtcatcactaagttcggcaacatattatgatcagttacttcgttgaatgcttaatttgtttggtggatctatgttgttggtgatgtcataatttgtattccgttgtacgatgtatgtgcacagttaacccgatctaggatgcttcaatttgtaggacaattatttgtttgttgcaacacaacaagttgattgggatgctatgatattatcagatgattgaggaaggaagacatgacatgtcacatgaacatgagatgtactatggacttggattgatgaatgaggacgaagccgagcaaaaaaagaagagatgaagcatgtacatgtggtacacggaatgtggaagata

SEQ ID NO: 69927 - DNA, 292 bp, Zea Mays
cctctaccgacaagagcgcgtgaggattcagcgacgcgaaacatgtggccaaatatagcgtgtaaatgcgccacgtgctgggacaattgagggagtattagacaacgcgaaaatatgagggggaagggccacagattcaggatgtgaagcttttaggggagaagataagagttggagggctcaaaaaacgtttttccatgataaatgcttttggggttgtgttacagtttctctgagagatgctctaaattgtacttaggcggctcggtctctactgcaatttagggtgtga

SEQ ID NO: 69928 - DNA, 282 bp, Zea Mays
gtcaccgaggggttgttgagcttcatcgatatacgaggagcgctcctgcgaagtatcaaggtctgcgggttggttgcagctttggaattcttcgccggtgtcaattctccgacgtgcgccttgggaaggatatttgcgtccctgggacctcggtgagtaatccattaatgactccttactgtcattccctacgtatttccgtctctatatcgaagtttaagcacagagattgggggttgagaaacctcggccatggcgccgccgtgctgtgggtgccgtcac

SEQ ID NO: 69929 - DNA, 928 bp, Zea Mays
acggaatagcagcgtcctcacggctcacgctcccggacttcactcgcccgttctccgtgatatcgcgatctgatctcgcccagcgcagcagccagatccgccccatccagccaccagtttcgcggcggagggtggaggtggaggatgtcggcgacggtggaggagcagatggtggtgaaggcgatccgggaggagtgcccctgggagtcgctccccaagcgcctccagtccacgctccagaccaaggacgagtggcaccgcaggtactcacttctttgctcttgccctctatggatttgctctgctgcatttctgatgtaatcagctacgcttagttttgagctctgatagtcctagtactagtagacgccaacgctgtgtgaaatggctgctcttgtggcacttatttggatctcgttctcaactactccctatctaaaaaagtcaaaacgtctaataatccggaaccgagggagtagctgttttgaggtcctcaattttggccgggacagttgtagtcgtcgtctagcaggtcatacggtgattcattggctcgtttgattactaggtctcttggtgttactctttcctaacaaggacactgttggagtagccgaattgaactatgagcgccttgattggataattctgcgacttgaagtgacttaatgtttcctaacaagtgacttgaaagcaaagtttggttaattgtgcaaccttagttcttactgttttgttacatacattgcttgctagcctgctgggtgctggctactagtgatgttttactgcttgaaacataggtggcacaacatttcttaacaggaaagtagttctatagcgccaaacgatttccacctcggggaaatacaattaaagattcactgtttcataaaataccactgaaaatcaatccattctcgaaaat

SEQ ID NO: 69930 - DNA, 607 bp, Zea Mays
aaacaatctgcttgttgttccgtccattccgtctctgcatgcatccatcccgattgcattgaattgaagtggatgaatgcgagtaggaaggaggggggtgacgagagtacttgtaccacgaccccagtccccagctagccaacagtgcgcctcagtcccctgtgcacgccttgtgcgcccttgggctctgcatcattctcgtgctcgtgctcggtcattgctgtgtagtactagtagtacgcaggggcgtgcattgaattgaatcacctcccgtcctccccccctgcaggacggcatttttgggcggcctgctgcatgcatgccctgccctgcccgcgcttcccacattgattgctgatgggtctctctccctctcatgaactcacactcgtttcccctttgctgtctctgtgttgtgttcctgccacagtgtcgctgcgtggaaaaatgccttctgccgtgtcgaacagctccccccgatcgatttccagtcagcagccggcccgagattggtcaacgaacgaaccagcaggcagcagcaggagactccctcagggcaacaggagaatccacaaaacaacactactttgagacggcgtttagaaaa

SEQ ID NO: 69931 - DNA, 493 bp, Zea Mays
gaacgtccagaaggcagaagaagaagaagccttagcttccaacacataaacatcttaggcccaggaagaagctaaggaagtttgggactgggacatgtttagacaacaacaagagaaggaagggctttagattaatgggaattgtattctcctcatctatacaaaattgttttagttcttcaattaaagggcgcatgcagatgtttagctttggccctagatgtcgaggcttagaatgacaatgcaagaaacatatattgctctttcatggccaacttaggtagtagattgtacgacatgataaacaccagccaacaatagtatgggttgtgtttgtattataagttgtgaaaccattagtctacaggccaagacgaacacttctatgattgtagcaaattatggatcaaagttgtccaatggcttccaagcatcaccatcagccaaatgcaccattatattgtcatcattttgattattgtgtctaccttcc

SEQ ID NO: 69932 - DNA, 686 bp, Zea Mays
cagtttccgtcgccgctgaagcacgtgaccgccgacgtcgagctaccccaagccattcagggagcttcacctcaacaccctgtcggtgtccgtggtctcgccatgcaaggttcgtggccgggttggtgtgaatttgtcgttggagggagcgctccgttgttcacctgctctccgtcgtggccatcactacctaggcaatatttgacggtgagaatgccgccatcaagctcgcttatccatcctctttgtaaatctcgggattagctgtgatttagggtgcttggtcgtgggattgtcgaaccccggtaatgcttccgccgtgactggggtcgcgccgttggccggatgggcggcggaatgggtgtggggaggaagactgtgtcctaacgattggatgagctagattggttaggattagattcaagaaaacattttggctagggtttatgatggccgttcgattctgatcctgggcgggtgaagcattggcgctgttttaaaatcatgaccgtccgatctggatcggacaatccggatcgggtaccggttcggattgattggggtctaatcctaggcgtctggtttctatcatgcggtccaggatcgaccataccccttcgtcgtgctccttttccaaataaaccctcgggtttctaataaaccaacacgttgtccatatggggggc

SEQ ID NO: 69933 - DNA, 391 bp, Zea Mays
tgcatgcatactaacccttgaattggtcgaaatgtccatatatgagcatcaaatcagatttgaaattcaaaatcagaaagtggacaaaatttgaaaaattgagtatcaggccgcggaccgtccgcccatggaccgtggaccgtccgcagtatcaggatctggacagtccggtcagcagtgcagatagtctgaagttaccagggcgcagaccgttcgtgacaggcagttaagtcgagctgagccagtcaacttgtcactttcatccattggctctcctctctcactctcctcacgcctaaaggtcacttttgtcgattgtgtgcagacggtgaagtgaagttgcgcacggactgtccggaagcttatgggacgttcaacaaacatgtcttca

SEQ ID NO: 69934 - DNA, 581 bp, Zea Mays
ctgacttctctgtccctaaagtaaactcctcattgatggcaaattgtcgtactgccatcttgaactcctccattgttggatagattgtaccaatatccattatagggtggtccttatcatacgaaataaccatctcacttggtagaacatcactagtacaaatgcaatcaacatcattatcaaccccatgttcaacatattcagattcatttgtagtcccctcttctcttaaacctaaaagtgcatacatctgattttcgctcaaatgtgcaattcgaccttcgtcatcatgtgtttccactatatgtaagctattccaatcaactcttggcatattttccacaggttcaacattggacctaaacaaatttaacctttcatgtaatacataacaattgtgaaacgctctacataacctattgatcatatacataatataaacattaaaaaatgacatagcaaaaaacaacgctaacaataacaatcacctttggacaggaagtacagggagattgtattgtactgtcggagaagaaatattggggagcaaagatctaacgagagcacccgtagtgggcgac

SEQ ID NO: 69935 - DNA, 716 bp, Zea Mays
aataccaggaagggtggtggaattgatctacccccaatcgacacagtcggaggatattcagacaaccacaacaacaacaagttgagatggatcctccaaatcctccaccagccggcgctgatccagcagttgcagcccaaatgtgaataatgcaacagatggccgatactatggcggacatgcacgcacagatgtagcaggagcgccaagagatgcgccaggagagagagaagatgcgctaggaaaggtgggtgtaacagcagcaagccccattgccaccaccgccacctccacttccacccctggacaaacatcaggaatttatgagccacaagccacctaccttcgccagctcgccagacccactacatgctgatgattggttgaagtcagttgagaagatgttaaacatcgcccaatgctctaactgggagaaggttctatatgcttctggtcgtctgactggtcccgctgctgactggtgggattcatatgttgctgcacatgatgctgctgacactattacatggacataattcaccacatagttcagaaactaccacattcctactgaattaatgaagaccaagaagaagtttttgtgttgaaggaaggcaacatgtctgtcagtgagtaccgtgacaaattcatctagctgtcaagatatgctcctgatgaggaggcagatgatgaaagaaagcaagaacacttcacag

SEQ ID NO: 69936 - DNA, 354 bp, Zea Mays
ggcgtatggttactcgacttgtgtgtttacaaaagctgtggaaaagtgactccccagtcaaacgctctgatggccactcctcctccatgagagcagacttgcttgccattttccggggccgtcaccgctaaaaaggcgctgcggcagcgagagacgacaacaagaactagtgttccaacacagcagcctccttttcccatgcctcctgaaacgacgattcccctcgcccccatcattacgatgctacacatggccggacggatatgaatagtatggggacagattgcattgcaaaagccatcttccttgcaactgcgtgcacgcagtagtaggccggctagaaagtgcccgcag

SEQ ID NO: 69937 - DNA, 583 bp, Zea Mays
attaacagaagaaccccacggagttgaaggatgaggcagtcgcggagccccaaactgggatggtacaggagcggttggtgcaggagtaggcgcggccaagtactgaggaaaacctggcataggcacgaactgagaagccccgggcatatagaactgctgctgagggggtggtacagaaaatgactgctcagtgattgacatcacgctgacagtgccctgcgaagaggaagaagtcactagctcccatttgagcttcccattgggattcctcctacacaccacatccttgtgatcctggttgcatatagagcacctgccactccactgacactcggcacggcgatgcgcttcaccacaacgaaaacacaccaaccccagcccgggcttaggaacagtccgatacctctgagtactccctcctgaagtaccccgaatcaaaggattttccatgataggggtggtgacgctggtgttgcgactttcccctcttgtgggctggacccctagtgttggccctcctcgcgtcctggccatgagactgatcaacacctgaagacttctgagattccatggtatactgatg

SEQ ID NO: 69938 - DNA, 660 bp, Zea Mays
tataactattatttatctgttaaaattagctaaacatcaatttgggtccttgactaataagtttagcaaatgtctcatctaccgcccaactgatgattagctagttgatgattttcagatgttgcatatcaaaatattgataatatgattagctcatttcctcacactcacagtaaaagttctataatcgagcatgtggagaagctatgaaaattagcattgagaaagaaaagatgtgtcaggtgtttcaaacctagctccgacaagtgaatttgtttgtgcgcggtccaggtgatggatggtgtgcttagagggcgtaaagtttatactggttcgggcagaacgtccctatatttagtctttggtggctcacgctaccggcaccgttgttgctcaatgctcatagtagggattacaagtgggtgagagagggaagaagagctcacaagtctcttatgcgtggctagacctaaggactatgtgactagagctctctgctaagccttggacgtcgtggtggttcgttctggcctccgtagtcctccgggtcttctggtccgtctgtgtttcttatgtgtattcgtgtgcgttgtgttctcctttgtgtccatctatgaccctcccctttaatagaccaaggcggggatcggttatcggctc

SEQ ID NO: 69939 - DNA, 979 bp, Zea Mays
ttattctatccaagaaacacccattcatcaagcatagagtgattgatagggaaggatgtgaaaatttgaatgatgctgacatgactcaggtcctgagagcatgcgaacagaaggggatgaaggacatcatgactatgcaatatctttggaatgatgaggtcattgctcaattctacgctattctctagataaagaaggtacatgaggaagctaatgggtatgatcacccaatcacgtatttctatctctatggggtatggcacaaggtgagctatcgaatatttgctcatatcgtgggtttttctgacgaagacaacagagaaggaacctttaggttcatgatatttgtctaccgaggcgtgaagagcaggaagtggttcacatttccaatgagagggaattctagattatctcatacatgcacaggtactattggtacctcaattccttatccagaatgactatccttcccaaggacggcaatcaggtgaatgtccttaggtagagtcgtatccttctcttgcttatgactccctccagcactagcaagataaatgtgtttgatatgatctgggaagagattatgcgggcttcttggtggttacccaagtccactatgaaaagaatgtcaagcatactcattatgttccttactgggttgattccaacaatccagcagctaggtccaagagggctccagctagtttaggaggtcctgcatcttctgatgagccaccacctcaacctccgcttcatgagacatcctctcgtgttgctgccgcttcttgttcgatggaccgtaacgatcaaggaaagggtcagggcaggggtcggagacgaggtatatttgtgcgtctacctaaggggatcacaggggtttctgccatgtgcagaagtcatgctgttgatgaggctgtgcaccactgtgagactcgggcacttcataatgacatgcatagctttgcagcctccatgggcc

SEQ ID NO: 69940 - DNA, 314 bp, Zea Mays
ctttgttacagatggattaagtagttactacataaaaatctgagatccgagccatgtaaatcggtctgttagacgctctgatgaggtctaatagtacagtaaactgaataagatctcaggtttagtccccctcgccaccggtgatcttgcgcccggattcgcgccggtgtcgcgattcatgcccagttaaatgcagataacgatcctcggatgaaagatctggggctggggatgagctcgggacactatttcgtcctgggcggcataccccccttgccttacggccggtccagataacctcgccggagttggcc

SEQ ID NO: 69941 - DNA, 689 bp, Zea Mays
gacttcattatcctttggcactactatgtgatctttaaaccatactactccctgattatctttcctgaaacaatttgccttgccgacctccattttctcatgaatatactttagacccttatttgttctttgagcatcaataattctttgcagaagaattgactcaagcttcaattacatcaaaattccttgttgtactatccccacattcaacttttccatttcttgacataaattggtgttaggtgttcttattgtaagacaatgacaagaagccttgcgacttaaagcatctaccaccacattagattttcctaggtgataatgaatttccaagtcataatctttgattagctagagccaccttctttgtctcatgtttagctcggactgggtgaagatatacttcaaacttttgtgatctgtatacaaatggcatatattctctagcagataaatcttaagggcatgaactactgcagccaattctagatcatgggttagataatgttcttcatgccgggtcagctgccttgcggcataggctattactcatccttcttgcatcaggacacatccaagttcactgcctgatgcgtcacaatacacatcaaaagacttttcaatatccggttgggccaaaactagtgtagtggtcaataatactttcagctgctcaaaggcctcat

SEQ ID NO: 69942 - DNA, 692 bp, Zea Mays
agggcaaattctttcaattcagaaatatcttcatcggacagttcttggccgcccaggtgtcgtaggtccaactctgtgtcctccgaagaagcctttttaaattctttcatttttaaagccaaagccttatcagtggatacttcagctatgtccttctcgggagccacatcagatataagtctatcaatctctgacattgtggtcccgaggtcttagcttcaggtgcggcttcattagcttcggcgttgtcttcggcatcaacatgtacaacatttttttccgcccaggccagggcgggatcatttagatggcttgcactacgttcatcattcgttgtttcttctgacccccggcatttccctcggtagccgaagcagtctcatttcctccctagctttgttcaaattccttctcctttgactgcaataggctagtcagatctgaccccaggggacttagcattgcaaacgggaagggttcagtcattaccttctgtatttctgaaacatcgacataggaagatggagaagtgccgacagtcttttctggtacatcttgtaccttcatctctgcaggagctatcatgacagactttcgtttcttgggagccgaatcctttggctccgctagaactttctgcttcttgacaacccttgatcttctttggcggactggatggcttgccttttcag

SEQ ID NO: 69943 - DNA, 819 bp, Zea Mays
gtccacaattgcatctgcatatacacataggtataaaaaaatatttataaaataactagacaacctagattatccccattagaatatatctagcttaagagatttatcttatcctaaaagatctaattctaaccaattcatcttatcttaataagattctctcttatcttaatagattcatcttatcttaaaaagattttatctcatcttaatagatctaactaatcacaaaagattctatttcctcttatcctaataagcatacttatccaccctagtttaacaaccatgatctagcctaaaataaatagatcttatctagttataccggtgatctagatcccaccaaatctaacatgatcaatccaaattgtgatacttaaataagttagataatgttggcgatataaattaggccctaattctataaacatatcttaccctaaattaataccttagactaactcgaccgtaaacaacaatctaacctacatcataggttgcctaatccagatattccaaaagcaaagtaaaaactctgttaaaacctacctacctcgtgtaccccggctatcctaactatatatccttagccatatgtccttaactcggatgacaaccccaagaataaaggccaaagaccaaccacgtcaaaggaggataagcatcaactcaagtcttcaaggatcaagctggatcactggatgaatcaagatccacaaatcttggatggagtctttccttaccgcactcttccctacccaaatctatctatactttaaagacatcttttatcctacataataaagtggatataga

SEQ ID NO: 69944 - DNA, 484 bp, Zea Mays
cagtgatccaaagagtttatctcacctcgcaacaatccctaacaacaaccacaactcaagaactcgatggttcttccaaaatctgaaggaaaagggcgtaaatgagcgcggagacaaaatcgaataaaaaactacaacacatacaaaactgagcacatgatttgtgaatggatttggccacccttcctttgaatgaggaagtgaagagtacaaagacaccaatgcggagttcaaatcatctgtggatctcgggctaaactaggaaaatggaaactagggttttgtaaacaaaacacaaatgagttagccaaaagagatggatgtccacaacaacccacccatctatttatagagagttatttcactagtctaagctacccctagatacatgagcctatccacttagctgtaggcaaaatggaccaactcttgggattttgatctgataaccatgcgctccacacgaagttgcttcaccttgagg

SEQ ID NO: 69945 - DNA, 301 bp, Zea Mays
gatctccatgaagctcatatgccctattatgcacttgtatgctcgtgcatgcttgttccgcttgatgatgcaccgtctttggatataccccctgctgttgttaaccttttgcaggagtatgccgatgtttttcctacgaacttaccaccaggtcttcctccgctccgtggcattgagcattagatcgatctcatccccggcgcttctcttccgaaccgctccccgtaccgtacgaatccagatgagacaaaggagatccagcaccaggtgcagacgctgcttgataaaggttacatttgtg

SEQ ID NO: 69946 - DNA, 389 bp, Zea Mays
tggcaatccaccatcagatggcctgaccgagtgacttgaagccagattttctctcaattccatgtggtaccaagcccaaacacctataacaaagttattcctctttaataactctacaactttgttttagcaaccctaggtagattctcactggatcttagtcgaaatggctctcaaacttggatcaaagtcactgtccatctgaagttcagactgtatcagcctgacagcctgacttcaggcttaattatctccaatatcttctccacaactatgcttacacccttaagcaaagtggttcttctttgataggcctacaaatttgatgtggtgacctagggcaaattctcacaaatttgaaaactacagagctccaaagttgagccaaa

SEQ ID NO: 69947 - DNA, 480 bp, Zea Mays
cgatatgcggcgacagtgcggcgaagcacctgctccggcgaagaatcccggtggccaggagcacgattccgcccaggcgaagccacgacgagcatacatgtgcgctgggcttcctcccgagtcgatccccgagggctggacgtgggtggtggagcatgacctcggagagcagtggcccgacgatggaagacctgtaccggcgaggaatcccaagtgccgtggtgacagatcttggaccgctagacaaccagatccctcccccaacatggtgaagccctagggcgagcaatcggatcctgagcgacggtatggacgtggttccacggcggaccgacgagttcccccgcgagcttggtttatgggggggggttcacctgtgatgacgatggctaggggcaaagcggggccggatttttataccgaggtagagtccgcgttcaaggagtccatggccgagaatcttgccaacgccgttgcccg

SEQ ID NO: 69948 - DNA, 444 bp, Zea Mays
gtggatgtagagtcgaagagagatgaagatttggggttagggaaaggctaaactggtctaattactgctactcctaggacaagaaagtaaaggaattgaaatattgattgattggtacgattggtgatactcttaatcggtcctactcattaatatatataaggggaggtctagatctgttcccagatgttctccaacaaaatccgtatgattagttagataaacacgtatagaaaagggatatctcacctcatctaatctaatcgtggattgtccggcattcctaggtgccatatatggtgctcaataatatcaaatagtactagtattaggttggtggatgataggagtgcaactaccttgttattgtgacacgtatgaaaatagttatcccttgctagcattcattttaacttattttctcttatacatccaaaatggctg

SEQ ID NO: 69949 - DNA, 398 bp, Zea Mays
tagcaagatatggttgggtatagctagagcgcagttggccggccaaaacaatgctaggcgagagagggaagtggtggtgataggaatgtgagaggagagggattgttatctgttaggtcttatgaatatggaggaccggccgacatctgttaaaaaagtgaacactcatcatagctattgttgggcagggattcttttccatctcgtgtcctctggttgagagatatatatgtctgctgctctcgctatatagagggttggcctgccctgctagctagctagttgaagttctaggcacggatcggatcggatcgatcaacattaatttaattacttaattattagttcccgacgaaattaatatatgttaaacaaagactttaatttttattatatcc

SEQ ID NO: 69950 - DNA, 705 bp, Zea Mays
agtctagatctaggtaataaatctattacccacccttctggctacggttgggatgttaaccaagtctgaaggggcgaggctgaaggttggtttgttaacagtttttacatgattgcacccagccttggcgaaagcaacagctgtcccacgggaagccactaacgcgcaaaaatcaccatgaccaattataacttcatcaaggacatcaatttacttctgaatacatccaagtgctcctgggatatcttcggcagaaaggttggcttcttcaaacatagctctgatagaattgaagatattttttaaccgagcagtacattgggttgcaaaaccgaagcatttatcccgaagacctttaagtgttccgctcagcttaagattcttctcatctttagccttgattgttatgtttaaagcttcggactcacgactgaatcgacttgagttttccttcaaaagtatatgtgctcccttcagctctttactcagtttctcgttctgaacccgagcttcggcaagagagcccttggttttgctgagcatgacgtccttttccttcaatgaattttcaagttcttcaatccttttctccaagccactgacaacaaactcgtttttcctgtcttcatcatcttgctgcatttttagagtgtttcttagcagtaagctctgagttaaaggacgaagtcgagttagaccttcatt

SEQ ID NO: 69951 - DNA, 525 bp, Zea Mays
tcacccctgcgaggaaaagagtgcgggcctgactagaataatgtatctattggttggcttacacataaaattttctcagattgctacattccacaaatgctcgaggtcttcgccgaattgtgttgcgagtctgttggcgtttggggacgttttcctcttgacgatgaaaggcccttcccattttggctcgagtttacctcgggactctgttttgttggttctgatgaggacgaggtccccttcgtcaaactctttaggagtaacagtgttgtaccaccaagccttcgtttgtgcttgatatctgttcaatgcttccagggcggtgacatgatccccatcgaggaggtcctttgttgttgactcgtcgatatctggtgtagccgtggtgcttgttcgtggtgacccatgatgttgctcttgcggagtcctggcttcggatcggtacattaatttgaaaggggtgaattgagtggcttgggattccattgtgtttagtgcctagatgacttcagatagttgctcggc

SEQ ID NO: 69952 - DNA, 1993 bp, Zea Mays
gtaaaacttaacccaagttaagaaaacctaaagctttagggtaaaagtcataaaatgaccctaagaataaacttgaatcacatttatacccctgggataccagaaaccctaattggaaccctggaaaaccctaaaaccaaaccctaggggcttatgtgcaaatttagcccacttttgggctaaagtgcaaaaaccaaggcaaataagtatattaggtcatttgggtcaatcatatgtgaatttgcaattcaaaacttgagatttggacttaagtgcaaaagagccatacttaaccctttttggttaagtctgtatttcagtgtgattgcctcaacttgaagcccttgtaactttcaaattatggggtttttgccctagatcaccacaccaaatttgtagagcaatcaaaggagaacaactttgcttaaggttgtgagcatagttattaagaaaaggtcagagataattaagcctcgaggttggctgtcagacttgttatgtctgaaattcagactgacagacagataccatgaacttcaagcttaattctaaataggatccaatggctttttgtaggaatcctatgtagcaaagttatagctggattgtggctctataactttgatgcagatctttggacaggatgccacagagatttgagagaaaatcgagttcaaacgttggctgtcaggccaactgaatggttttgtcgatggtacaataacctgcttgggttcagagcacttcaccgccgtcgatcactcctccgccgcaatacgtgtcgccggcgttaggattcgcactcgctggtaaccggataacatcacggggagagggaatattcgccgccggtgagctggactccattccggtgaacccccgtgctttccctctaccctacggcttgagccgataagcccaccggtgaaccgccgttctccggtcttgcgccgcgtgtcctaactgcgccaccgcattgccgtgcttcgttttagcttcccgtcgatcgccggagcaattgccacggcattggacacgaagcacttgcgccagtgaacgtttagtcctccgaccgccgcgcgtccttctccaaattcccggccaccgtcgatgccctctataaattgatggcacaggcagctgcgttaccttatcgtgagaccagagcccccattcctaccctcaatcatcctccagagctcaccaatttccaaatttccccaatttcggtctccgccgtcgtgaaacacgcctcgctgcggctagctcagctcaggttagttcataccgattgctccctcgtttgagtgctctcgtgtacctgtgatgcttaccaagtcttcaattcgaattgggagtccaccaatcgtcgggaacacgatcaagtgtcagtagtctccgcagttctcgtggacagaagagagtagatcaccatttgcacaattaagttagggaaaaggtttaggatgggttcaatttggtgtcagtcgctcgggaacgccggtcatcgccccaatcggccggtacggtggctcgccggagtgctccccgcgctgccgtcgtcgtggactaggtctgcgaagaaatagatcatgagggcttatctgcaagttgtcagcgacacagtagaatagtgatcaaacctgtctgcagatagataaaaccgcgtggtcctttctgcaaagctgccagggcgcgcgtgcgcgggcgctttctccctctgtgctgggtttctgggctgaaagcagcccagtgctattcatcaatttgtctttttcttttatctccagaaccaaaacaattctagaaaatggtagaaaaatcctaaaaatgtcaaactaattttcctagattccttatttctcatagtatttaataaaaataatttcatgatttttagattaaataaggaattttggggtatttaaagtagcttaaaacattagttttggatttttagaaaatagataataatcccaaaattgcccaaact

SEQ ID NO: 69953 - DNA, 644 bp, Zea Mays
tttgtacataattttagcatttgtcatttaaatatggaatgcacaatgccagtggaaatcatagaactaggaaaagtggtgctttaatttagtagagatgtgaatgtaatcgtagcttggcttacgtatttggaccgatcaactaacaaagcaaacattgtttgtttagactgattaaatcaccaagtattatacttaaatatatacttgagtggggtcctaacattttgggggccctgggcggccgcccggctcgaccacccccaggtccggccctgcgtgtgttccacatgttgtaccccaccccgagacgatcctgcacggggacccagatggttctgtcgttggtgtttcacgctggttgtgacatagtgcctgcgccacctcccgacatggtcatccaccgattggtgttagactcctgttgtcacgcagagctctctgcctattggaccactgtgtgctcaaggattgtctgaacctcctaagccctctgcccctccattcttcgagcatggtcgaagaggggactccccgtaacagggctactgccacgacgatgttctagctcgcccacggaaaatacggaggggtttggatgtcctccatgattcatctgaggcagcctcgtacctttgcatggg

SEQ ID NO: 69954 - DNA, 816 bp, Zea Mays
gggaggtgggtctcactcccttctccactggcttctccttcaactcttaggggaaaccctgctctaatcccggaggcggtaggcgtggttttatctgaagccatctgccaggggaagagagttactattatgcatatgccaaatttttttcaaccaagttattttattcattacaccagttcatcacaagcatatagctactacaagtcgcactacacgcgagcgctttctgaggtacttccgaactccttttctaaagtgtccccaaattccttgagaaggtcatcaaggctagctagggacatatccttgacgtcggccaaattctctatcctggggggaggtggtgcttgaggggctttcttctttcgctcagtctggcatccttggctcttggtcttcttttggattttcttcgtgggggtgagcttctttagcttcttatcgtaatccatcttcagggttcggtaggcttcacgagtgttggcctcctcgccttctgctatgtcgagacactcttggagggacgccttctcctttttaagttccttgacctgttgctctaagctttccacccaggagtttaggtgggtgcagtgggaggaaaggtcatcgtagtggttatcgagagtgtggagatatccggccatgtagacgatggtggggtcatcttcggtaggatctcttcctgacagggcctgaagtcttttcctccaggtgggggtatttttgttgctaggtgggaagcaaagaagggggtttcaaagacctatctgttgtagttttggcatagctatcgaaggacttctcaggcaa

SEQ ID NO: 69955 - DNA, 511 bp, Zea Mays
taatcaacacacatcctttgggaaccatccttcttttcacaaatagaacagggtatccccaaggcgaggaactagggcgaataaattcagcatcctgttaatctttcaactgtttctcaagttcttttaattcttctagagacattctatatggtcttttggaaataagggttgtgccgggtataagttctatgacaaactccacatcccgatctgagggcataccgggtaactcttctggaaagacatctaggtagtccctaatcacatggatatggtcgcccacaaattttccctctagctgataaatagaaggtttagtggagggggataacgtggctgtgacctcaaatctatctctgtccggactagtgagctcaaccgttcccttggcacaatgtataattgcattgcattcttttaacaacttcatacctagaatcggatctatgtcactttcctccagtactatggttgtggacccaaaaaaattcttcacaagattgttatg

SEQ ID NO: 69956 - DNA, 553 bp, Zea Mays
cgaacgcggttcccgttaaagacaatgaaaatagacgcacgcggaacgcttctgtgtcagccaattctcctaattgtgctaaaaattggcctatttgttcacgcatgctttttccatggtcacccgaaaattttgcgaattcgagtatcctggttccctgtgggtatgggtggtgatcaaatcggctgccataaggtttccaatatgattgccccctagggaccatgcttactccgagcttatctcggaacgcctcagctatttcttccctcactatatcaatggcagccggtgcgagaccaccggctctctggtcaaccataggtggggttgactggatattagcatgttgtcttcccccccattggtttgagttatatggtgcattactatttgccttatatggttcataggattgaccattcctttatggccttctaggcggggccggaaagtactcgcccccatgcgcctgagattccgtattaatgggctgatgcatagtatagtgtgaggggaggtgttgctggggcggatgaggattcaagtagca

SEQ ID NO: 69957 - DNA, 380 bp, Zea Mays
cgaaacattaatcatccctgagtttatttcaggaataataaaatcaccttcatcctggtggcatgcatgaatatgaggtgaagctcaaaacttcggcattatggcttgagcaagacacgaagcatttgactaggtgaatgaaggaaggctttggatgcgtgcatggtatgtctccaggaaaatagacgataatacccttagcagactttgttgtttacatgtataggatctcacaattgtaaatccatacgaagttgtacgacatgttgcccctataaatagggctacagtgcccatgcatgggggtctctccactttaacaacagacatacctatttaagctcgaacaaatctgtattcgaagctttataacaaaagta

SEQ ID NO: 69958 - DNA, 452 bp, Zea Mays
gttttatttgagttattttggccaagctttctcaacctttcttgttgcttattaaatatacttcaatttgtataattggctcaagtcataattttaaatttttcatacccttttccttattttcttgaattttgctcatggggctcacttagggtttttattagggttgcaacattattaccttttgaaagacccatttgttttgatcatgatactttcaagtatatacttggtgagttctttattcctaagataatttgatgctcatgcttactttggttcacataaaataatggttcttggtttggcatttgaaagagaaacccttaggtgacactggggtgtcacaaccttcccccttaaaggaatctcgtcccgagattcgggccagagtcctcccagggtgaagcgaagggtgagacttataggaattgggtgattattgttattat

SEQ ID NO: 69959 - DNA, 787 bp, Zea Mays
agaaagaactattgatctagagtctcttgggctgccagtccatgatctttctgagttggagcttcctagttcaaaacaagaagttttggataccatcagaaaccttccatctgataaggccctagggcctgatgggttcactgggaggttctacaaggagtgttggaatacaatcaaaggggatgtgttaaatgcagtgacaccaatttggaatataaacttcataaatctgggtaggctcaactcatcatatattaccatgatcccaaagatggagggggttgatcaggtgtgtaatttcagaccaattagtctggtgcacagttgtgctaaattggtcaccaagatccttgccaaaggctttctagaaggttaaatagcttggtctccccttgctagagtgcttttattaaaggaagatttatccaagataactttatgcttgtcaagcagacttcaaggttgttgcatcagcggaataaggctagtcttcttttcaaactagacattacaaaagcttttgactctatgtcttggccctttttattgaagttatgcagcaaatgggttttgggcacacatggagagatattatttgtggtttacttggatcctcttcctctcaagttcttctcaatggctgtccaggcagcaggattcaacatagaagaggcctgaggcaaggagacccttatccccaatgttgttcactttgtcatggatgtgcttggccttcttttttccaaggccaatgaagctggattgttgcagctcctatctaatagga

SEQ ID NO: 69960 - DNA, 480 bp, Zea Mays
attttattgatgtttcatgtggttttctttatgtcattatagaataattagagcaaaaactccagaagtttgtcacagaaaatacttccatcttctaaatgttcctaacaagtacaatttcatggtccacgtgttacaaatattcagaaaaatacttttgcaatggtgtcagtgcgggtgatgtttttaagggttgtaaacctctttgttctaatataataatacacagttcccctgcttgttaaaagaatggtacccttgttgcccatccctgttatgatattatccctggatacttcctttcccgctttgtttcaggatgctatgcctatgtatgagtatctttcttttgttgggatagtcttgggaagcggcgccgggctttctcgtgagtagtggggctatggaattgggtgccgcaaaatgcagctttgattctagctgattaaacagtagtctaaccgctggagttgggtggtt

SEQ ID NO: 69961 - DNA, 362 bp, Zea Mays
taaatcaatttctgttattaattattaaattcttctgatccctggacagcgcgcatgaattctagaaagtgtacgggccaacacgtaacgttcctaagactcagtgagcagtactggtggacggcggattaatactaataaaatagaggggctcttatgcaagtcttccaggccgaaagggtatccgtagttctgagccgttggatttaaaatcaagggcaagggttagatctcacatataacgaatcggtaagcaactagggccattggatctgggatcaacggtcgatgacttgccacgccctaaccaaatcagaacgacccgattccacatctacggcccaaatccgatcgcgcgaaag

SEQ ID NO: 69962 - DNA, 798 bp, Zea Mays
aaataaatcagctcctttttaccaaagacacattcctctctttgagatagaacttgtggtcccttaaagcagcaaataccaacctcagatgctccaaatgagagtgccaagtgggactataaatcaatatatcatcaataaagaccataacaaatttccaaaggaaaggagctagcaccaagttcatcgcacactggaatgtagctggagcgttagtaagtccgaaaggcatgactcgaaactagtagtgaccctggtgagttttaaacgcagtcttaaactcctcgaaggcgcctatacgcacctaatgataccccgaagtcatgtccagactggaaaataatttagtgccagcaagctcatccaaaatctcctcgaccaccggcatcggaaaccgattcttgatggtcatatcattgagcttacggtaatccacacagaaccgccacgtaccatccttcttttgcactaaaaggaccggagaagcaaatgggctcacactgggggtgatcaaaccatatttcaacaacgcatccacttgcttctcaatctccgtcttatgatgaggagaatatttgtagggtcgagcattcaccgggatggacccagggagcaaacgaatatgatggtcaaatggtcgagatggaggcagttcagttggtgtaacaaaaatgtcactgaattcccccaataacacctgcaattctagatggatctcattgctgttctcctcaatcacctcctctaacaatgcaaacacccagatatcattccctcgcggccatttctccacctgta

SEQ ID NO: 69963 - DNA, 453 bp, Zea Mays
gcgatgagtcgttcacccgtgggcaccgctgccagtgccgcttctacctagaggtgaccaacgctgacgacttggtcgacccaaaggagtcatctgctcccaatgcccacctctttttcgtggaggtgaccaactcggcaaaacctgtcgcattggtcgatttcgatgccgtcacgctggtcgtctccctccatgccatggctggccttcccacgcctgacaccatgcaggtgttggtcgatgtcggtggctggcatctcgtcgccctcatggataccggctccactcacaattacttgccacggtctcacagatcatgtcgccatctccttctcagttgaacgcttcagttgttatgccattgcccttggttgctctcgtaaagggtcggttcatgcaagacaacttcatgatggtgcaacaaacctcaaggtttcttcatcaacaaaaaag

SEQ ID NO: 69964 - DNA, 424 bp, Zea Mays
gtgaagcatgccgacgacgggagtctgatcatcataagtactctgcctgcctgtctctacccgcgtcgacccttagtcttcgtagcttgtcctcatgtcttcccttcgtcctcttgcgtgctctgtagggcgtcgtaggacttagggttcataggtcatgaataaggctcagacctaggacttataggccttgagtaggtttcaggcctaggacttataggtcatgaatgggaggtggactggctctcttccacaccacggctcagcgccaagcgtagttaatatagcatgagagcagtccttgggtcagacatggaatccacttgagtggctccctgatgcctcgtctaacacccgagctaggttgagcctcgcctgacactaggcacggtgcaggggtcatccgggtgtggattcacccgag

SEQ ID NO: 69965 - DNA, 443 bp, Zea Mays
accgcccgccataaagagcacgatcagggacatctaaatgaccgagaaatatactgacaaacgcaaccttaccagggtagaacactccattttaccacgacacagtagctccttctcaaggaagctatcgatagcttattagctgacccccaccttggcctataaaaggaggaggtcggtcaggaaacgaaaagaggacacttgacggaagacgactacacacgctcaatgagaccagaagacccgaaggccagatccaaggcactagccaccgcgacgtccaaggcttaacttagaactcatttcctgtagtctttaggtccatgatccacctatgcataagagaattgggagctccttcctctctcgccccttgtaacctctactataaacattgaacaacaaagttacaggaaacacgagccaccgaagactgaatatag

SEQ ID NO: 69966 - DNA, 629 bp, Zea Mays
ttgcctttgctcttgtatagttcttctctctacttttgcctcgacaattctagctattttcctctttggaggagtggccttatccgaaggtgactcttcatcattatcaacttcttcgttccatcgtcagcaggctcaacttgttttttctttgtttgaggtgttcttccaaatagctttgctctcctcttccttttctctccatctttggtactgggcaccagtttggagtaatatgtgtattcaaatccaatagcattcatgacactgttcaaccttcgtttccctcggttttcgaaggcagaggtcattgcttcgtcctccttaataagataatttctagcaatctcattgtattttgtttctataagcttcagccaccctgacgaagaagtttagaatgaagcttgctccttgaattcaaaggctaaagttacaagcccaccttctctagattttaccaccttcgataatttccacccagtgtgtgtaggaaaaatgttgcatgcaagaaattcttaaaatagatcccaagatctgatcttgtcgacaacaacattgaaagttttgtaacaattctcagcagcttcgcccatttcgcattttggtctgttcagaccatagctaat

SEQ ID NO: 69967 - DNA, 376 bp, Zea Mays
gtttatttgagtgggttgttatgacatttggtctaaagaatgctggtgctacttatcaaagggctatgaatttgatctttcacgagctgttagaaaacactgtggaaatctacattgatgatattgtagtcaaatcggctgagtttagctctcatatagccgatttacacaaagcctttgataaaatgcgtcggtatggtctgaaaatgaacccacgtaaatgtgcttttggagtgtcggctggtatgtttttaggattcatcattcatgaacatggtatagagatagaccctggtcgaatcaaatccattcggaatgtgggacctccaacctgtaaggtcgaagtgcagaagtttctcggcaagataaattattt

SEQ ID NO: 69968 - DNA, 271 bp, Zea Mays
gaaagattatggcaaggaaaatacttcatctgaaatgtttaagttttgatttatctcgagattcgctttgactgttatatccttccttgtcgatgttgatcttttcttcttcggtcttggtctcattgcttcggggtgcgtgtatatcatcaaacttggagaatatggttaagatagatatggatgagatagactacatgatgttggtcaaaaacttgtttgatctatggctagcccttctgctcatggttgagttggtctacacctggct

SEQ ID NO: 69969 - DNA, 725 bp, Zea Mays
atattaattactggatttatttaagtcctgggttgcgggtactatttaccagaagttcagggtcaaaactataaattctagggacatgttcgtatttattttccataaccagaggatggcgggttgatttatacaaattcggaggactcttttgcaaaaaaggtcatggcaaaggggtattgactatcaccgaccgttggatcacaattctatagtcaggagtaggttcataaacatccaaaccggtacgacatctaggcgcttggatctaccatcaacggaccggattctaaacagcggaggtattcgcacatccatccgatcatggatccatggtctcgatcatacagggcaaaccggtaaccagcgcttctaatctcgatcacccattagccaatcaacggccgagcgttatccttttcccctcatcggagcatggtggtgtacccatgcctacgacggagatttccctagagcaacccaatcttgcgccagggtgcttccccacccatgctagctagtgcaatacgaagccagggaaaccacgaggacagggacgggtaatttaccggagatcacggcatagagacacctagccacagcgtggcacgacccgcagtggaggaggagcgacgacgagaagttggtggcgccccggtgtaccattgttcaaatccaacacgtatacattttctatgtggtcgggagatcacttggagccattc

SEQ ID NO: 69970 - DNA, 421 bp, Zea Mays
accgagtatgaagtgggcttcaacaagatggtccgctttgtccctcatgtggcttataatgagatggaaaaggtgagccagttccgtcagggtctgaaaccttctatcaggcatgcactgggagcctttccgttggtggacttccgtactacggtggagcaggcactgggtgtggagatgcaacaccagtataccatggagtcgtagaagtcttcaggtgttgatcagcctcgtggccaggacgcgaggaggggcaacacgggaggtccagcccacaagaagggcaagtctcagcatcagcgccaccatccttaccgtggcaaatcttctgactcgggtacttcgggaggaagtactcagaggtttcgggctattcctaagtccgggctggggctagtgtgtttctgctgtggtgatgcgc

SEQ ID NO: 69971 - DNA, 502 bp, Zea Mays
attacttccagattgccagtcaaggaagtcgggaatctttttctccatggtggtggagagtgaagctaccttgcgggtgtaggacatctgtgtggtgtgtgattatgccgacgtgtttccagcggagcttccaggcattccaccggagcgcgatgcggcttttgaaatcaaactgatttcgggtgcgcagcctattcataaggccccgtatcggatggctccaaaggagcaggttgaattgaagcggcgaggggtgcccaggtgttctctaaaattgatttgaactctggttatcatcagttgaggattcacgaggaggatattgagaagacaacttttagcaccaggtatgggcattttgagtttatcgtcatgtcttttggcttaactattgcccctactagttttatggaagcaatgaataggatgttgcatgagttcttggatgactttgtggttgtgtttctggatgatattctgatttactcgaaaatggaggaag

SEQ ID NO: 69972 - DNA, 569 bp, Zea Mays
ttcaggctgtagcacgtcgatcgtgccaagaacgaagaggatgatgcattggcaaaagcagcagccaagggcgaggccctaccctccgatgtgttctaccacgtcaatcggcacaccagctgtccacaaccccgaaggcctataaaataacgtaggacgcagagggccaccgcattgtcaatctaatcatggctgaagactggcgggccccaataaccctgtacctgcaaggtcactatcatctcaacgaccgtaacgaggccaagtgactgaagcacagaagccgggacttcgcactggtcgaaggacagctatacaagaaggggatcagccagcccatgctaaagtgcataactgaaaccgaatgcatagaaatcctccgcgaagtccacaacggaacttgtggctcccactcaagaccttgggccctcgctgccaaggtgattcgacagggattctactggcccgcaataatctgcactgccaatcgagtcacaaggtcatgcaaggcatgccaaaaattctcccctcgctcgggtagcccctcgcaattcaccattctaatcaag

SEQ ID NO: 69973 - DNA, 1252 bp, Zea Mays
aaaatctaaccgcaattaaagcgactatagttgcctccgtttactcccctacatgccccttatatagtcaaccagtatggtgcacgtgcattgcaacgaaacacgatattcgttaaaagcctattatatgtgcatatctatgttcttgaagcggcgtggtagactggttacctcatttagacaagatctatctttgtgaggtaaatgttgggagcacacgtgtggaggatcacaacataatctggtctagcctgtttttaattcctggatccgtcactcgactgcaccaaaaaaagacacccccaccaaaaaggaaggctaagtgaaaagcaaacagaaaatctaaccgcaattaaagcgactatagttgcctccgtttactcccctaaataccccttatatagtcgaccagtatggtgcacatgcgttgcaacgaaacataaattattcgttaaaagcttattatatgtgcatatctatgttcttgaagcggcgtggtagactggttacctcatttaaacaagatctatctttatgaggtaactgttggaagcacacgcgtggaggatcacagcataatctagcctgtttttaattcctggatccgtcactcaactacaccaaaaaaagacaccccaccaaaaaggaaggctaagcgaaaagcaaacagaaaatctagccgcaattaaagcgactatagttgcctccgtttactcccctaaatgccccttatatagtcgaccagtatggtgcacgtgcgttgcaacgaaacacaaattattcgttaaaagcttattatatgtgcatatctatgttcttgaagcggcgtggtagactggttacctcatttaaacaagatctatctttgtgaggtaactgttgggagcacatgcgtggaggctcacagcataatctggtctagcccgtttttaattcctggattcgtcactcgactacaccaaaaaaaagacacccccaccaaaaaggaaggctaagcaaaaagcaaacagaaaatctaaccgcaattaaagcgactatagttgcctccgtttactccccaaaatgccccttatataatcgaccagtatggtgcatgtgcgttgcaacgaaacacaaattattcgttaaaagcttattatatgtgcatatctatgttcttgaagcggcgtggtagactggttacctcatttaaacaagatctatctttgtgaggtaactgttgggagcacacgcgtggaggatgccgtgaggg

SEQ ID NO: 69974 - DNA, 514 bp, Zea Mays
tcaatgatggtactctaaatatacctagaaaaatgttgggacataatccattctattgacgaattcaacattcggcacatatctagggttgagaattgcagagctaacaatttggcgcaagatgcatcaggttattagataaagcgagggaaatttgacagcatcgaaaatctgatgaccgttgttgtgccagatccccaggttgcggaccatccgggctgcccgcacggaccgtccgcagtaggttcggaccgtctaggtatgggttccaaaccgtccaacgttgctaggaaagttatcttgattgatttggctgataacaaatacgatgcaattgattggaggacacctataattaattacctatgaaatcccagtgttaggacagacatgaacgttcgacatacacctttcaaatatgttttagtgagtgatgaactctaccgccgaacggtcaatgatgtcctgcttaaatgattaggcctgggggatgctatattagccatggccaaag

SEQ ID NO: 69975 - DNA, 570 bp, Zea Mays
gaaaagcctgtagaagaggggagaaggagatgatttgtcacctgcgcatgaagaacaacggagcaggcacgcaaggaagagggtgacgacggggctgctcctctagcgacacgaggaagatgacgaggcggctcctccaaccatggcgacacaacacatagaggagaaagggcgtaggttgctgctgtgcgagaaggaagagggagggggtgaggttgctgtgcgcagacggttttgcgcgaatccgagaaaaatgggatgaggcgcgtgcatcgtgtgggagcagagggaaagttggggaagagagagatggcagttgggtccacagctgacgcgtggggccggggtgggcggcggcgctggggaatggcttctgctggggcgctcgtgggcagcggctgggccggccacgaggaaggcgaggtgaggtagcgggccatcggctgggagggaatattgggccttttcctattttctttctttttctcctttttatttccaatcgaattccctactagatgcatgcttcacaaattcactcatcaaacaaaatgaaagaatgctccagca

SEQ ID NO: 69976 - DNA, 457 bp, Zea Mays
cttatgttcatccattcggtcagccaaatctataggccccctcctcatcttaggattagggtgggtgcattccatcactctactggaggatttcccctccgacattttgagcgctaggtagggggtcagggcctggccccttgattgatatgacagcccactcatccaccggtgagctcgatcgtggtgaatctgtcgatatttggcgcatggtagagaatcgacgtatcaagaggttcaccgtcgacctcagacgacgtctcaggaagcgagccgctgccatcaagtgaaggcggtgagagccttgtccatggcagagcaggctattgctgccatctccccgctagtctccaccatgcctgaggtcgcctctatctaacccccagcaagatatagtggcactcgaggttctcgtcgtaggtcaacagccgagtgcatgagagagtgcctccatcgg

SEQ ID NO: 69977 - DNA, 452 bp, Zea Mays
ggcgtcgctgcatgaggcagtagggttttgtggtgccgtctcctggcaggagagcagcaccacgctggtgaagtcaagcccacaactcagcgaggagcaagtaggtgacgacggcaggagcagcagcaacatgatggtgacgagcagcgaaactgagggtgaggccatcggcggctctagtatgtactagtgggttggctagtggcgattgtgatccggttgttcctatcgattgaggtggtggtccaatttatagcccatgcaaacagccgggcactgctgcgtctgcgtgggccatccctctctcgtttgatcggggacgcaacgcagggcagagcagagcaacgcaaagcagagctgctagctagtatccctctcatcactagtagtactatcgtacaaccagtccagcagcagcagactcttatcattatcgtaccactaccagccct

SEQ ID NO: 69978 - DNA, 492 bp, Zea Mays
gttcgggataccaagtagcatcatcactgacctaggatccaactttaccagttcggagttctttgatttctgcaagcaaaggagcatccagatcaagtatgcataagtggcacatccaagagctaatggccaggtggaaagagccaacggaatgatactagatgcactcagaaaaaaaggtattcgacaagagcaaaaggcttgcaggaaagtgtatcagagagctgccatacatggtctggagcttgtgaacttagcccagtcgagctctgcatggaaataccccgttcttcatggtgtatgggttggaggcggtgctgcctgccgatctgatcttcggggcacctaggctaacctttgaaagcatagttgaggctgaggcaaccaggctagaagacattgatgtgctggaggaggaacgattgaacacggtaaatcagtcggccaggtaccagcagaccttgaggcgctaccacgacaaagctatgcggc

SEQ ID NO: 69979 - DNA, 740 bp, Zea Mays
ggaaattctattagaagctcttcttctatctcccaagtagcctcatctttaccgtggtgactccattgcactttgcacatttttatcactttatttcttgtaactcgagtcaaagtgtcaatgatcttgatagggtactccgtgtaagttagaacaccctacacactgagttcttccattggtaattgttcctctgggacacggagacacttcctgagttgagacacgtggaatacatcgtatacatcagacagatgatcggttagctcaagttggtaggccatctccgcaactcgcctaaagattttgacgagtccaataaagcgaggggatagcttgcctttaactttgaatcttctcattccatgaattggtgacaccttgaggtacacgtgatcaccctcttcgaattcttgtggtcttcttctattatcagcatagctcttcttccgagtttgtgctaccctcaagttctcccagatcatacaaacttgttcttttgcctcttgaataatctcaggcccaaagaactgtcttacaccagtctgatcccaatacagaggagttatgcactttctgccatataaagcttcaaatggtgacatcttcagactggtctggtaactattattataagagaactcagcatatggtagactcttgtcccaactacctccatgcttaagggcacaagctcttaacatatcctcaagtacttggttagttctctcagtctggcc

SEQ ID NO: 69980 - DNA, 387 bp, Zea Mays
aatcttgacataaaacaaagattaagtactgctaaagaatatttagttcataaccagctactagcctattcgttctacctaccaaatagtttcccttgcaaaactattttgccataagcttctaactcttatggtcaatgccaggaagggaagattatcagacaacagccaacagaaatgaatcctccagatcctccaccggttggaatcgatcaagtgattgccacccaaatgatgacaatacaacaaatggtaaacatggttatggatttgcaagatcagataagacaagaacgcgaggaaatacgtcaggaccggctggagatacgtcgagaaataagacaagcacagttggaaagacaacgaaaccaacaacctccaccacca

SEQ ID NO: 69981 - DNA, 732 bp, Zea Mays
taagagcgagcagaagatttggccttagcgggctaaaccagctcagtggcatgtaactttttttggctcatcttctgagctactatcgtcatgatattcatcctgcaacttaggtggcctgctatctttatgttgaccttccatattaggacgatcacaggtggcttccggtatttcagatagtccgatctatgtggtcggatggtctgcacagggaccagacgatcgagtactatacacagactatccgaccgtgtcgggcatcgcctgcaagccttatggagggctcagtgcgacttcgggttgtccgacgtaaggtatcgggcggttcgatggaggaccagactgttcgagatcgtgtacggactgtccagccataattagagtcgatccaccatatagtgaagatgaccgcagcggctgtcccggatatgagttcactagcataccataatatggctaagactgagaaacacatttgttgttgatgtatttggcgctgttgtttcagtcccaattcatgtgacaaaaaatagcgtatgggatttttctaatgcgtgtgtcattttctctttatcctatgttagacttttaatcaattatcaaaagaaattctaatagattgaagatcgtcgaatgatgcgacattacttatagaggggagctattacaacaaggctgacagggaatcgaagtttatttcccctcccagacgaccttctagtggcgatc

SEQ ID NO: 69982 - DNA, 724 bp, Zea Mays
aacagatctatgcgcttagtgtgtgatgcatgatagtagaaactcataccttagtaaagtgaagactcatgacggcgaagagtcgtgacagtggtttgaggctcttaccgaccagggaaggtaaaagttgtgccacgagtggggcatgacgggcgacgatgactgatgtgtcgaaagctagcaagatgatctgctcgatgtcatctatggcgatgcagaagaatctggatgagggagatggaggcggggatagagatgggaagttcaggttaatacatgacgccaccaacgtggagaaagcgctcgtggtggttgcacatacaagagataagacttatcttatctagttgttaagcaagacgtgggggagaaaaaccaatctacgtgcttagcgcgtgacggacgacaatagaaactcatactttaaaggaatagtgtaaagtgattatgggttgtttttgaagaaatgcaaggttttttatagaagtgttgataatcgtcaaaactgatgcaggagtagagacatactacctatttaacatcgggttaggttcaataaatgtttggcatagctcacgttcgacccgtgcatagtgtctaagtcgcatcaggttagtctgtgcctccttgttagacctgccgtgtcaggagtttttggctttgaataaagtttttcgggttggattgaattttggataaaaaatatggcatatactcgatcctg

SEQ ID NO: 69983 - DNA, 820 bp, Zea Mays
accgaagaggaaaaaactgaaggtccttacccaccaaccgtgctatactgaaccggccacagtgcctgaatttggcggtgaaacttcttcagctattgaagccaaaggacctgctcttacgcagaggattgaagagccggctgcaatgccgaagactgacaaaattgaagaaccgagaatcgaagggacgaaaacattagaagttttaagcccttcggcaggagtggaggtgccgaagacacaaaaaggtctagcagcgaccccaagagaaaaaggatggctagtgtactagatgtgctggagacaataaaaacttcaagctctactccagggaaagttgccaaggcttcgaaagcacagattgaaaccgagacaaagctgatcgaagccaaagcttcaatgggccgggctgacgccgaagctgggccttcagagcccgccaaggagaaatcctcggaaattggagaaaaggcagcggaggaagaagctatagaacagattttgcctgaaaaagctaccgctcctactcccagagcaccttccgaagtccttgattatattattcgacacgcttcgggaaaaagattatctaaagaagaaatttttgaagctaaacactacgcccgagaactaaagtatccgaaaggggccttagtgtttaatggcacagatgaagatgacttcttgtattgcctcccagacaacaaagaattatctgtctgccggaagatggccagaagtatgggattcccaaagcttgaagctggcctctgcgccatgacgaaggatgatcttgcggatagccttgcatataacagtc

SEQ ID NO: 69984 - DNA, 411 bp, Zea Mays
  misc_feature (344)..(411): n is a, c, g, or t
ttggtgttgccatagccagggacatatagtcaagataagtgtgggtacatgggtaggtaggtcaaaatcttgtttttcaacatgttagaattatgtatattattaggaatgcatggccaagttaggctagggcaccaatttaaggttgaatgaattaggtgagaaaagaatttctaggtgtagactctttaactaacagtattaactaatttgagtcaaatatttatatcctctagatatgtgcaagatagaaccagaagagttaagagatttggattaacttagattagattaggcagactagattggactagatcgaattggatctaactaggttagattannnnnnnnnnnnnnnnnnnnnnnnnnnnnnnnnnnnnnnnnnnnnnnnnnnnnnnnnnnnnnnnnnnn

SEQ ID NO: 69985 - DNA, 918 bp, Zea Mays
ccctgttcagtcttcgtttcccacgagcaccgaaggcagtatacatagcttcgtcttcagcctttgaatagccccctagcaattcatcacttgttgcttcaatggcatctaaccaatcgtcatctggctcaccaaattgattcctgaatcgataagtgtattttaggcgaaccagactgctctttccggcttctgaatcagcttcagcatccttagacatttcccattcggcagccagaggccacaccttgaaagttatatgctcctacactaagtccctggtactaatgtagttgcacacatcaacaaataccgtcaagcagccttgcgatttttctgtattcacaatagcaagcctcctaagtccaaagctggatcggataggccactggattacatccttaatatcacttctttgactcaaataattcttcacataaaaccacttcttcatccatgaacctagccattttttccgaaaggttggcacatgatgccttgcatcagaccggtatacgaaggtatagcacccgaagttattatgatattgttccatcccggtggccttcgtctggtaggacaactcatgaatattacaaaaacaatcaacatcctccctggctccttattgcccaaataaaaattccaaccttgattaatgcattaggggtgagctgatgaaggaaaatttcaaacattttcaaaacttcgactagaaacttgtgtaaggggaaccatagcccagccttcatgaagctttgaaaaatcactacttcatctttttcaggaagcggaacaatattttcaccaccaattctcactatagacacatcatgaaagtatttgcctttcatagcctcaacatgtcctttcttcacggttgatttcccaaataccacatgactcagcctccacgac

SEQ ID NO: 69986 - DNA, 302 bp, Zea Mays
aaagtatttctaagcttatgtcttgttttataaatacaaatcaaaccttttcaaaaagagcatccttatgttataataattgcttctgatgtttttgaaagcaaatgctcctttcattgtgctttcttttaattttgtctatggtgaatggtgtatgttactgagtggtgtttgcttcttcttgtttgtttgtatgttattgagtggtcgatcaagtagttgagaattatgatctattccgtcgacaaatctcaagttttctataagcaaggcaagtagacttctcttcctgcatattttgt

SEQ ID NO: 69987 - DNA, 392 bp, Zea Mays
ggaggatgaaggtatttgacctttaacaatcgtgttgccttgttcttgattcacaacatttgagaacaaatgatcaacaacgatcatataaccaaggtcggccttgcagcatttgacatgcttgcatagggaccacgtcacattccacatgatcattgtacttcccaacagaaaaaggaacattcaccacttggataacatgcaatgctacataatcattatgccactgcatcttatatggactaggatgacaccttgattttaattccgatctgtccatcaattcttgactagaaatgttgttgcagctaccattatcaacaatgatgtggcatagctcatctttgatcataccttaggtatggaaaagattgtggcattgtccattttct

SEQ ID NO: 69988 - DNA, 732 bp, Zea Mays
gccccctgcattttggtggaggttgacgaaccaaaagcatatgaactaaacctgatgtaagtcaccggcttttcaatatggagatcattcaataaagcaccaatgtataaaggttgtttcagattgtatctttctcggccatgaccatttgatcaatggatcaaaaggaatagaatggaggtgccccccagtctagatagacaaagggactatgcatgtaccatggaatcatcgtcgtaccattccattaacaccgagttgtccctgaacatcccggctacctcgtctttgatcctctccgtcatgtctggcaaccatccattaagtttgtgggtgaaaatctttggttgcctgatatcactctaccgactttcctcctagggatgtctgaggtgtgtgttaggtgtcctcttaatgtcattagctcctgccctatacctctcaggctctctagtgtccgaaccgtattcagccctgtgtccatgagttggtatggtatggttataatgtgttgttggtggggcaccataatgttgctgcgatgagtgtgggaactgtgtgtattgtgcagctctcggttctacgtacgcatgcccggacggtccaacgtaaggggccgaatggtccgcaaccgggccaaatggtccaaaggtatatccggactgtccattcgtatatgatgctgcctgggtagtcccgtacccggaccgtccgtcgtaaagggctggacgg

SEQ ID NO: 69989 - DNA, 430 bp, Zea Mays
gacctcatcttcttcctccccctcgttttcatcagcaacacagacagcacactcattgggatcagcgacagatggatcacacccattgggatcagcgacagatggatcacacctattgggatcagtgacagatgaatcacacccattggggtcagcgtcggtaaattcaggcataggcacttcctcaacagcaggaaccgaaggaccagcatcccgatccaagctagatactcgtcgaagacgtctctttttctttttctgctcatcagcaggagaatcaagctgattggctcggccagggcgcttcggacgaacactgacaggcctctgaatatccaaggttttaccagcttccgggagaggcgccaccaccaatgtcccaacaggagcggcatcagaagagtcctcggccagcatatcaagcattgca

SEQ ID NO: 69990 - DNA, 512 bp, Zea Mays
tccaaatcctccaccagccggagctgacccagcagttgcagcccagatgcggataatgcaacagatggcggatactatggcagatatgcacgctcagatgtggcaggaatgccaagagatgcgccaagatagggaggagatgcgccaggaaaggaggggacaacaacaacaagcaccattgccaccaccgccaccaccacttccaccccgggacaagcaccaggaatttatgagccacaatccgcctaccttcgccagcttaccagatccactacatgctgatgattggttgaagtcaatagagaagatgctaaacattgcccaatgctctgactgggagaatgttctatatgcttctggtcgtctgactggtcctgctgctgactggtgggattcttatgttgctgcccatgatgctgctgacgctatttcttgggtggaattcaccatatggtttagaaactaccacattcttgctagattgatgaagatcgagaaaaaagagtttctgt

SEQ ID NO: 69991 - DNA, 1107 bp, Zea Mays
aaccacttcggcagcagttggcgacggaggggctttctctgctgcttcatcgaccttcggttcagtagagggtttttggtcaagctttcacttcttagaaattgatgcctttggctctggcgttgtttttattttcttcaaggccttttcatcttcttttactgagcgggcagcttgcctgcttaggatgctaacaacccttttccttttcacacccccggccccttcgtcaaacctctcataatctaggtattcgaagttcaaagcatccattacctggttcatccttcgtttcggccgggtaccgaaggcagcagcattagctggtcctccttcttcatataattgccaagaatctcattgcacatggtttcaatcatttccagccattcattgcatggtttcttgaactgtttctcaaatttgaagcgataggggagccgaacaagctcatactttccccccttcttttttcttcggcatcccccagccgctagaagttggaaatgttctatttgacaaatattcttgcactaggtccctagtactaatctcggcagctaccactctaaattcaactttggccagctggcacggggagccaagttgcatgtggcacaagggccttgtcattctaaagcttaatctcatcggactcatgaccatagtcatcaatttttccctcttcttctcatcagcttttatatagaaccactcactcgtccacccatcggccatttggtgcggtagccgattaccagggccttggtatcttttcgatacgcaaagttatagcaaccaaagttcttatgagggccatccactctggccttcttctggtagtacaactcatgcacccgacagaaagcttcaacattagcactcataccctggcttcggagagcccatatgtaaacactgagtctaacaatggcatttggtgttaactgatgaagatatatctcgaaattctttaaaacttctcatatcatgtcatgtaaagggaactgaagccctgcccggaagaagctcttgaaaacaacaacttcgtcctcttttggctctagaaccacctcctccccagcaaagcggacaagtttgctcttg

SEQ ID NO: 69992 - DNA, 702 bp, Zea Mays
ttggttttcatgctataagtagaaatggtttgcaatctataacgtgtatgttacatatgtgttgaatattttgtacgagttggcacactaggaatctgagttgtatttggtgctatgggattgagatagtacaaaacccttctaggcgttataaccaggaaggaggctgttggggagaaggtccaacaagaggtatccaagtggctacgactaatgatatgctagccttcggctcatatggatgcatgttttggaggcggcaaggatggttttgaagaggtgctctgccaagttcggtcagaggcggagaatgtaccaaagaccacgcttacgatagaggggactttgtccaccacgacgacaccctttgatggttgttgacgtctacgaccaccacctctccaacctgggcgtgaaggacatgacgaggaccacaccatgggtgaagttcgtcactcaccggccaagaagacgaggcttggatacagactatggagggtgcaggccctcgaccttcggcgaagggtgtacacagttagagacaatgctgaacatatgtaggcatggtgggccacctgttgtagaaggtccatccgttggtatcgttaattctgttacaatagagagaatataataatgggttcatgtaatacttgggttgtggcaacctctattcacactattgtacatgatatttctagt

SEQ ID NO: 69993 - DNA, 398 bp, Zea Mays
cctcccccgcggcggacctcccgaccacccatctcacccgcgcaagcacacgacgtaggcacgtattgcgggtgaaagctcgagggggaaggccggaaggcgattggcgacatgcggtaatcaaggccgggcacgacttataacacaggccgcacgaatcaatgggataggctggcggcggtggaccgagcactcacgcgacggctccaccccttccctctgttctggttacggaatgccggccggatagaaggggaaaggcggagacgggtgtccccatttatctccccaaggtcgtgcaggtaggtgggttctgcggggttcgcggtcaactgatcacgcgaagatcacggtggggcaggtacgccgtccgcgctccgcgcgatgggaggaagagc

SEQ ID NO: 69994 - DNA, 551 bp, Zea Mays
taggcctagtcctttgtggtaccaatgtatcggtgctaagaagaatatagaaacttgaacttatataacaaaaacaaaaattaataagcctaacactatgttaaattgtatatatacaaaccagaacaagataaaaggagggaaaagggctaatattgtcgttgtcatcgttgtcccacacatcgtcgtatccattgttactgtcattgtagtaaaagttggttgtctcccttatacagtggctagcgaccttccctaaggttcatgtgacctccttctccacctaagggcagtgatcctcctttggccctagaatattaggtctaggggaggtctaggtgctagctcttcaatgtgaacaacgtattagtggccacattgagtgttcatagacctcctttgctacctatgtgttcaccttgttgtgaagctcccccagcttggtggtaacttgtgtgaagctgatgcatatgtacttggttgtatcccaaacataggaccccatcccaatggtcctaaaacctacaacgactagagccttgcatgtctcc

SEQ ID NO: 69995 - DNA, 628 bp, Zea Mays
tgccaacgtaatacctgggtattgaactgtcaaactaattaacttctagaacagcaaatggttagtagaaatgtgcaaatgcataaatggccatataattgtttcaaccaatgaataccagcctgtcttttaattgatcctgcaactcgcgttagcagctaacttggacaaactgttacataatataatgtctcctcatgcataattatctatggacacactgtaaattttatattgatctttcactcagtactttctaaacgtcagcatctaacttggacaacatgcagcttctatacccaaaactggcatgctatcaatgcaacctgctatttttccatattgatagatgatagacaagatatacaacttcgtttttttcgcacaatgtctaactgaagctgacttggaaaacctacaacttctatccaaaataggtatgtttgcaatgcaagccactattttccatattggtagacaagatacacaccttctattttctttgcacaaaatctgataattgaaggaaaaaaacaaatccagcacccatatcttttattaaaatcatgtagatgtccacacatgtttgttaactttactttatttacgtcacttcctcgcctagatg

SEQ ID NO: 69996 - DNA, 736 bp, Zea Mays
ttagccttgcaattttgtttcagattgctttgttgaatttgtgtccgtgttcgagtcttgttgctggtttaggtcgtgtcgtaatcgtagttcaaccgctccatcgatgttatttgtttctgccgctagcccatccaccttacccagattacaagtcgagacaccacattactcgatttgcccttgctagccgccttgtgtgaattctcgccacgctagccctagattaggttgcaagccgcattgcattgtagcccctccttgtttcatcatctggcgcttacctattgcttataccagggaggtttgtgcccctgtgttctatagccgccgctacggttcctaccaatttgtgcccttgaaaaccataacttgaggtaccttccataaaacgggcataacttttcgctcggtgctccatttgagctcaaatttttatagcagattcctgactccattctggggtggttcggtcaaaaaattcaaaaaatcgggaagataattagaaatattgtttaagtgttttcaagaattttagagatcctttgtgattttctctaggccacaatgcaactctgtttcaagtgaaattttgtgtgcttccatcttttgtgattttgaatcagtgataaaaaaattcagaatattttgagctcgtttgctggtactcctttggaaacgcgcctttgatttctactagtgctgaaaaacctgtgctatttacagaactgccatt

SEQ ID NO: 69997 - DNA, 547 bp, Zea Mays
agacatcaccgtgaactcgtacaacccatacttggtaatgaatgccgtcttcggaatgtctgaaggtcgaatcctgagctgatgataacctgacctcatatctatctttgaaaacatactggctcctctcaactgattgaacagatcttctattctgggcaaggggtacttgttcttgatcatgacctcattcagagctcgataatcgatacacatccttgtgttgccatctttcttctccacgaacaggacaggggcaacccaaggcgaggtgcttggccggatgtaacctttctctgacagctcatcgatctacttcttgagttcaactaactctggtccagatactctgtaggctcttttaaaaatgggagcagtgccaggaagaagctctatagcaaactcaactttctgctctggtggcatgcctggtaaatcttccggaaacacatctgaaaattttgacacaaccttgataatctcgagtggatctgcttcactgctatcaacagccatctgataacaacttcctttctttggcttaggc

SEQ ID NO: 69998 - DNA, 494 bp, Zea Mays
ggacgaacattgacaggcttctgagcgtccaaggctttgtcagcttcagggatgggcaccaacaccaatgtttcagcaggagcagcatcagaagaatccccaatcaacatatccagcatggcacctatctctgcatcactaggatccaaaggcacctcgaaatgaacctgtcgttcatcgtcaggaatctcttcaagcgaagcaaccaaagcactaacctcttcgacagagggtcgcactctaaggcccaaaccgccatcaccagcaggaggatttgacacaaaatgagtcaaagccttagaaggaggcaggttccaggccgaatacgcaacaggggcgcctacatttgatactttgcctctgagtatcatttcaagctggctcaccaaatccacagcaggaatttttctgttggtaacccgggttgagtcagtcaggcctcgatacagataggccgggtgtgccctgtccttcagcggctgaatattcttgaa

SEQ ID NO: 69999 - DNA, 490 bp, Zea Mays
ggaccggtagacaagaaagttttggttcgaccatattcgatcgataaacgcaaagtaaaaaatattatcattggtgaccctcgcgtaccaaatctatcatgtggagtggttacttggaagactctggacggaagaaaggctaataagacaggaggaggtgagggcatggtaaaccagatatacccaaatttaaaagttttggaggtgaaggtcgtgataaataaaaggataaaaggccgaaggttacttttgagcaacttctgagtaaatatcacaagcaaatcaaggcaaagggtattgtcaaactagcaatgctaagtcatctaaagcaccttcaaagtcatcaatatcaactccgaagcgcaaacttatcaatcaagattggcgaggagaagggtttcatgcatcaacaacatatccaccttttcggccgccaatggcaatgcaatacggttcagctccttcgtagtttcatccttatccatcttgg

SEQ ID NO: 70000 - DNA, 383 bp, Zea Mays
tgccgaagccgaaagtgccgaagctgaaaccgctgaagatgtgaatctagatgccacactctctaaaattgatacaatgcttctagatgcggccgcggaagaagctgctgcagccgctgaagagatcccgggcacagtggctggaaaaggaaaggagaaaaccgaggatatttcggaagaagaggacttcaacttccaagatatactcgggcaagaattgtcgaaggctgaaaaagaagaactgaaagagtatgctatatcttgcggatacagaccaggtgcgcttctcttcgggagagttaacgaagaaagcttaggatgcctttgggaccacactagggtgaaggttgttggcactatatcaaagagtgttggcctcccga

SEQ ID NO: 70001 - DNA, 506 bp, Zea Mays
gttcatctcaccgccggtgaccacgcgctcggattcgcgcctgacgctacgattcgtgctcaactaagtactgattgttgctcgaggtagtaaatatcgccgtgtggatgaacttgggccactgttcactccggtagccgtgtccgcctagctcacgtccaatttggatggactcaccggagttagccgctcaacgatcgtgcgccacatgccttggtgtcttaccacgtcgcagtagctcatattacacatatccggtgatcgctggtgcgcccgccacggtgaaagccaccaatctcttgcgacagtgctcttttctttctccgaccgccatcgcgccatctcaaattcacgggccaccgctcagggttcctataaattgagcatgacgtcggttccgcaaggtagtcaagcacccaatccatcaactcgtgccttcaattgttcaccaaagcccccgaattgctcacttcccccaaatcggtttttcgtcaccgtgaaaagtc

SEQ ID NO: 70002 - DNA, 390 bp, Zea Mays
gcaaactaagcacaacatctatctccgcgtcgtcagtgctagatggcatctcaaaatgagtctgcctctcatcctctggaagacttcgaagtggggcaatcagagcctcaatgtcctcagaagagggtcgcactctaagacccagactaccatcacgagcaggagggttggacacaaactcggaaaatggcctatgtggtggcaggttccaggcagaataggcaacaggagcaccgacgtttgaaactctacccctctgtatcatatccagtcggctcattagatcttcagtggggattctcttgttcataacccgggtagaatcgttgatgccactgtacaaataagcagggtatgccatgtcctttaaaggctggatgttcttgaaaa

SEQ ID NO: 70003 - DNA, 782 bp, Zea Mays
tcattcaacaacttccttaggagcatatagggatagctggatgaatttatctctgtactcactcactaacattctttcctgcctaagtgaaaggaactccttcttaatcttcatcaaattagcaaaaattagttgagaattctacctaggtgatggtgtcaatagcggcatgtgcagcacagtaagaatcccaccaattagtagtgggcccagtaaggcgactcgatgcatatagtaccttctctctgttagtgcattggacaatgcatcttctccactgacttcaaccaatcatcatcttgaagtggatctgggagctagagaaagtgggtggcttgtgtctcatgaacttgcgatgcttatctctaagtggtggtggtggtagtgtgtgttgctaattattgtgaagctgagcttgcatgtcgaccatggtgttggacatctgttgcagcagctggatttgggcggcgacaggcggaggatttggtggattcgtctctggttctagattagctactgtcctccctcgacaaatgtgtgcgggtagattgacacctcgtcctttcctagtagaccatatgagttagagacataaggtaaagtagatttgtacataagacaaatgagtaaatatgaaacacttgacttctaggttatgatatcttgcggtcacaatagctcagtagattagaatgacacctacctattattactacactatctctatgttggtacatgctagaatgtactcactatactaggtttcatggtgtatatagtcc

SEQ ID NO: 70004 - DNA, 305 bp, Zea Mays
cgaaggtcttactcatcgcccatacaaatgttggcaaggcgttcttcagaccgtagggcattacaacatagcagtagagcccatccactgttacaaaagcggtatgcttcctatcttccctagacatctggatttgatggaaaccagagtaagcatctagaaaggacaagaggtcgcacccggaggtagagtccatgatttgatctatgcgtggaagtggatacgggtccttgggacaagccttattcaggctagtgtagtcaatgcacatccgaagcttcccgtttgcctttcgaacgatgact

SEQ ID NO: 70005 - DNA, 596 bp, Zea Mays
atttatagccaccaaccttttcctagttgttgcccttgttctgccacgtgtggttggtccgcgctcctggttcggacggttcgcccctgcacatcaacgattggattttgcaacggtcagttataatggctaaaatcacattaaatgtctcgtcgaatgtcagataaagtctgacgtggacgacccggtcgtgcctccaaatggtccgcgtgtgcgttataattcattttaccgaaccagacaccttcgggttgttctgtctttcaacgatcggatggttccctcctgaggccggacagttttcacatgacttcagacggtactattctttccttcggatagtccgtagtagaaaagtgcatttggcatagtatctctccgaagtccatcgaggtgtcacagacagtccgccgaaagggctcagacggtccgagcacatgtgaattttctaaaaatagctcatgtccagaataatctatgtaattccggacagtccgctttagaacctcagacaacccacgaagcgctgttttgatggttaatctttcttgaagtattttctgagttcctgagatcataacttgctaaactagtta

SEQ ID NO: 70006 - DNA, 541 bp, Zea Mays
gcattatgcaggagcattttcatgaggaatatcgtccacaggatcgccaggagcgggaggtttccttgaggtacccgacgcagcaagaacgccagccataatatcatcaggtaccacgacgatgggtatttttagcaagaggtggccagctcggattgccttgtccattgccttgttgcaccataccttcatgatttcacggtcgtcctccaagaccttgatatattggcgagcaacttctaactcctgcgacactagcttcttcaaggcacagagctctttaatggtagaatttttcgaagatagagactcgccaagcatcgacacctcatcctgggactccttctgcttgtttctcttgcgctccaactcctccatggtgaagcgatgactcctctctagggtggtaagggaactagaggcatcctgatacaacttatcatgattgttttgggagtcaagaagtttctagatctcctcctgtgggtgggagaacctttggtaatagatcaaaagcatggaataagcatcttgatgctcc

SEQ ID NO: 70007 - DNA, 585 bp, Zea Mays
tggatcctcagaggctggatgatatgatccaaactagaggcatgaggcctcgagggtgccctggaactgaggtggcctgatgagctgcacgaagatgtaacagaggtagtgcacatacggtagctgacgacgagcacgaagaccatccgaaactgtgtcctcgatctcacaagtaagaaagtcaacgacatcaaactcagagtgtgagatcaaggcaccaagtagccataattgaatgtgtgtggtggcctctctgtaacccatccttggcagcagtgtccgtctcatcacctgatatagatactttgctgcaggggtgaagtcagctggagagcgtcacaacccatctgtgaagggaggtctaaaaagggccgcgacgtgagcagtggctggtgcaactccgccatgagggagacgaggaggatctgatgtaccataacacacactgtgaagatgagtcgacgaatctagaaatccaaacagctgttgtatctggctggcatgcaatgtgacatcctctctttcgaagcgaaacatcatccactgatggtccgggtcaatccatacggtagcataaagtactcg

SEQ ID NO: 70008 - DNA, 951 bp, Zea Mays
aactaggatgtgctttggtgtgtcgacttgctagctttgcttgattgtgagccatcctgttcctgcccactacttctgcgtttgccttttcccttttcaccatgttcttcaatcaactctaaaagtgtggtggaggcattacccaatatgcgaataatatcttcatttggattagaattaacctatacaactataaagtataataaataagatgaagccatggttacctttttctaattcagccaattgctccatgttctcctggatattaattggagtggtccttcgcagccaatcctgagtgcaaacaagtgcttccaccatgaatggagtaagagatgtcctgaagtcatcaaggattcttccagacgtgctaaaaactgattctgaagcaacagttgacaccggaattggtagcacatcacgagccaagtgtgctaataccgggaatcttgaggaattcaccttccaccatcctaaaatatcaaacttattatcttctggttcagtatcttcatcaaggtatttttcaagttcagatttgttgttgccaccgccatagttgtgttgttttagtttttgtgcaattaaggacttcatccttccgcctttggactgtcttgcttcttgagaatcattggctggtgttgttgcatcaggtggagcataaagtctcctatattcttcaaacaattgtcgaacacatagtttaacagcagcccaaaccttatgtccattttcctcactaaacatctcttcaatcgctagctttgtgtattctgatagtttgtatcttggatccaaagctgcagcaacaaaaatcagcatgttcatattctctttttctttctccttccccttccctctctcattcacatttctaccagtttcgccaagaggttcatgccagtttccccaatacttatcatacttgtctttcattttctggcc

SEQ ID NO: 70009 - DNA, 382 bp, Zea Mays
cgataattgacttagagagcacattctagagcccgagtgcatcactatacatgtgtactcaacttcaagccacgtttgaaatatcaatcacattcatttcacttcgcaacatgcaaaacctttattcatccaaaggttttgtaaatatattcgccaactgatcatctgtatcaatataacatattgagatatctcccttgccaacatgacctctcaagaagtgatgccttatatcaatatgcttcgttcttgagtgttggaccagatttgtcgtcaatttcatgacactcttattatcgcacatgagaggaacatgcttgatagaagtcacataatccaatagagtttgcttcatccacaatagttgagcgcaacaatttcc

SEQ ID NO: 70010 - DNA, 560 bp, Zea Mays
gcggtatgagccacctctggccgtccaatcagaatcagacgcgccagatcataacgcgaaccgatacgagctcgcgagcacaggatcccgatccaacggtctacaatcatggtttcctttcgcccgcacatccgatgatcaccggccgagatcgacatggctgaatcagtacgctggctcacatcgtggacgttgataatgaatctaacggttgcgcatcaatccggctgaacgactacggtcatccgatccccactgtacagcacgggatcaacggttgtcggcattcttctacctcaccggtcctctctctcttctttttttcttcctccagctaatccaccgcggccgagcaccatggacgcgacaacgaactgttctgagctcgtcattcgagccctatctaccgctcggacacctctgctcataccttacacggccacgcattcatcttctttcctacccccatgactagacctgacggcgctacccgacacacttgttgatagaccaaagcccgagcctacgaactgctaccggcacagaaatataaagcggag

SEQ ID NO: 70011 - DNA, 342 bp, Zea Mays
ggttttcatacttgatatcttaaatctggtcgagtcgccgcagctaccatgtcgtttttagcgatgagggcaatccttacatcgtcactgttagctagttatttaggtcgagtgttcttcttgggaggcatagtggggttagtcttcatcgcataaacggtgggcgccaaatattaggtacgacatgaggtcaggtgtgcctagacactcagagacaaagacaagggacactgaagcgcggcaagacattaggtgagaactgtagcgtcttgttatgcgtgtcccgtctagctaccggacaggggtatttatagggtcgtctaggggttggtaatccaaagt

SEQ ID NO: 70012 - DNA, 651 bp, Zea Mays
tgtgttcacaatagctggccactttatgccgaagcaagatcggataggtcacttaattacacccctgatatcctccctctttccaagtcatttttaacataaaaccattgcttcatccacgaacctggccatttttgtcgaaaggttgggactagacgcctagcatccgatcggtacacaaaggtataacaaccaaagttgttatgatactgctcttttccagtagcttttgtttgataaaaaagctcgtgaatgttacaaaaacagttagcatctggcttcaaacgctgactccttactacccaaataaaaatcccaaccttaatcatagcttcataggtaagctaatgaagtatatttcaaatctttttagaaccccgaccaacattttgtggagaggaaagcgtagcccagccttcaaaaagcttcagtaaacaactacttcgtctttttcgagaagaggaacattgctctccccaccaagcctcactatggaaacatcatgaaaatatttacttttcatagcttcaatatgccctctcttcacagttgatttcctaaggttaacatggcttggtctccagggtcgttattcgacatcatcagcatcactcttaaaatcaaaatcttcgctatccttggaatcatcca

SEQ ID NO: 70013 - DNA, 847 bp, Zea Mays
cccaacccggcatcgggcacatcagcacaaacatccatcgtgccaccatctgtcggctctgacaacagatcttctggaaccatgtcttcaagagtttgatcaaagttcgccagagataattcttgcagaccaatgagggcagacaaagcaggagaaggaacaccactactttccccaccggctatgtaacgccggctgttcttccgaatcagagggatttcatcctcttcttcatcatcttcatcaacaacacggacagtacacccattggggtcaacttcagcaggatcacacccattgggtttagtagcagtcgggtcacacccattggggtcaacttcagcaaattcaggcactggcacttcctcagcagcaggaacagaaggaccggcatcttgatcgaagctagacactcgacgaagacgtctcttcttctttttctgcccctcagcaggagaagtgggctgatcggctcggcgagaacgcttcgggcgaacactgtcagacctctgagcatccaaagctttgccggcctcagggatgggcgccaccaccagtgtttcagcaggagcggcatcagaagaatcctcaactaacatatccagcatggcacttatcttcgcatcactgggattcaaaggcacctcaaaatgaacctgcctctcatcgtcaggaatttcttcctgggaggcaaccaaagcattaacttcttcgggagaggttcgcactctaaggcccaaactgctatcaccggcaggaggattcgacacaaaactggtaaaggcctttgaaggaggcagattccaagctgagtacgcaacaggagcgccaatgttcgataccttgc

SEQ ID NO: 70014 - DNA, 593 bp, Zea Mays
actacttgttgaggcgttgggaatgagaaggtacggtaggtgatgtggaaacacacaccactatcttcacttcacatgcactggcactgcactccccatgcatgtttttggccgtccgaaatttgtggtacttacactgaagttcagaaaaacagtgtgtcatgcttttagcagccagacagcttgttggaggggaggggagtagaaaccgtatccgaattaaagccgcaaagaacaagtaatcagaattcatccaccggtaaaacaaaagttttactgcatgctttgaattgtctaaagcaggggtgcatcaaccttcagcatttagcggccggataaacttctttaattagtcacgtgattagcatcttcttctagaccaaaaactaaccagctggttgttgtgtgtgccggtgctagctgaaagcattgctggaattcggtcgtagcaggagcgagtacactagctacaccgctaaatgcttggttaacatcctttttcgctcgtctcttccaagtggtccttcactcatttcacgccatgaatgaatgaatctctctctctctctctatccaaaaggtaaaggcgacag

SEQ ID NO: 70015 - DNA, 323 bp, Zea Mays
tgaccgaaccacgggataaaaatcgatgtcactgtctactttaccttattgcgatttcactctttctagcatttcacttcacttacaatattgctctaagtttaatactcaccttgtgagagcaattaagtgaagaagttctctccccctcacactctttattcgaacttggttttttatcttactaaaccaattgtagaccaagtttgttttgttgagctatttttacaggatcacctattcaccccctaggtgctctcactttagatatgatattttcattgaccaaagatgaattacaagttcagtgaacaagccacaga

SEQ ID NO: 70016 - DNA, 633 bp, Zea Mays
tttttattgttttctctttggcaacaaagtaaatggaaaatgagaacgtgttagaaggggacgtgggctggcacaatgaattcggtccagataaaggctttccttttttttatgttttctattttcaaatcctagttttcaaaccaagcttcaaattcaaccaaagtttaaataccaaacttctaaatgcaccagcagaatttcagcatgagatgcaagttatatttgtagggagtattttattgttatttagaaatatatatttcaaatgtgaagtaaacatattgttgagaaataccattttggatgtaagtttaaaggttctcccataattcaacatttttttttattatttattaaaattaaagggatatgttttatgaaggatgaaaaacatttatggaacttattttatctcaaattattcggacattgttttataacttcacaaaataagattttgggtattacacccacctccggtaaactcaaacgaccaccttcgtcaagggaactctgcaaacaccttcttcatgtcgccgaagaagacatcagcgctagggtctgttcttgctcccttggacaccaattgtcacacctggttttaagggcaaaaccgaatgtatagcatat

SEQ ID NO: 70017 - DNA, 1100 bp, Zea Mays
gggactagaaactattgagctccagacattcctagggagttgtcagtaccccaaatatacccactcctgctagattaacgcgggacccctgtggctatccgtagtcgtgggctggcgagcagtctaccccgacttagagcctaggcccgtcccgtagggccactgatgtctaggtcggtgttaccatgggcccccttgatagggtttcttggtaattatggcttgggaccggacccccgtgaaatagtcccagaccccacgtgtgccatcctgacctccagccacggaggtcccgtgtcgccacgtgtctgggccattgcggataagacctagacctccacaagtgcctcccagacccttaaccagtgaagagctgccacgtctgcatatgccacatgccactgggtactgccacgtggcctatagtgaaccatggaagcagcgcaggcgtcgcttgacgtcagcctctagcatggggccactcgcattagaaatgggcagggcatccatctgttcacactagtggaagacgacgtgtgccccgcattaaattcaggcggtgtgtgcagtctgcaaggccccagacgcgctagtaaccctctcgttatcgaggcgaagaccattgaccaactgcaccgtgcatgggtaactcccatcatgaccgcccgttgttcccaatactacaccagacgaaaagataggcggaagggacaggacaacacggtccacctactccactacgcaagatgataggccagtctacgccacaacctacgccagagcattcacccacacgctgacaagacggggcaaagacgagtctggccagaagagcccgtacgatgaccaagggaagacacctgcctacagccggagaagaccttggtccaccagcttttcccgccgctcagcgcttcatatttttagtattcttggacccacctgtcggaacccagcttccttgtatgttcttcccttagcttataaaaggaagggcacatgcgttgcaaggggacagaggcactagaacccagggaagctcactcgagttctcctaggcgaagctcacttaaactccctcggaggcatctccatcccaa

SEQ ID NO: 70018 - DNA, 692 bp, Zea Mays
gttcaaaccgtatagagatcggtttagtctgcaaacgaagtctgggtgagcagcatcagcaaaaccagagggctgagagcagtatactgtttctgacaaagtcccatgaaggaaggcgttcttaacgtcgagctgatgaatcagccagttgcgagttagagccaaagcgaggactgtgcgaacagtagcaggcttcacaacaggactaaaagtttcatcaaagtcaattccaggacgctgtgaaaaacaacggagaacccatcgcgccttgtagcgctcaagagagccatcagcattgaacttatgtttgaatatccacttgccagaaacaacattgcaggagggaggacggagaacgaggtcctaggtgttgttactctgtagaccagagaattcctcctccatagcctgacgccaatgaggatcagcaagagcagtgcgataagtctgtggcactggagactatgctgcagcatgaaacaaagcgagttgtcgaaatcccaacttagcacgggtggtcatacggtgatgattgaccaccggggataccggaatcgccccaagtggcagctgaggaggagccgatgatgaagaggtggctgtcggtggagaaggagcaatcacttccggtgagggggatgctgttgcagttgtttgtgggagtagacgataccgtcgaaacgttgtggatg

SEQ ID NO: 70019 - DNA, 508 bp, Zea Mays
ctgctacaaagaactcataagggcactaggacaccctaatcaaatccatggtctcggtggccttgtctcatgttggaggctatagaaatgttgataaccttgatgatcttcgatctggtgtcaagaaaaataaggtagcaaagcacaggcaaactatactagaattaagcacaggcaaactatactagaatttgtggtatatcaactgactctatattataactatggattctactcaagtgaccgtataatgaaggagccatggtgtatgctatcaaacattgagttgccgaggatccataatttggtagtttttgtaatatgcaagtagcttctacacaaaattttgtatgctgattggctgtcgaaagtgatttcttgcgttgtcgaaagtgcagtttaacgagtgttcctggaatttggtaaaattttgttggttagtgcctgttaattacccacggggaaatggaccacaaaagcttctttgcattgtacatgcccactcctt

SEQ ID NO: 70020 - DNA, 374 bp, Zea Mays
cttcttcaataatccatcaacgaccgttaggagcggtgacaatctagctgtctagaaaacgcgaaacttgcaagacccctccgtcgctcgctcccataaaagcctcaatccctccacccacccacctcgcctgcatatcactcgtgtgctcgcaaacaagcgtccgagttggaggcgtggcggcccgttttgcatgccgtagctctcccggtgttcctccccttccgaacccctcgccgcctctccgtctcgtgattcgaatcactgccccattgcgaacgagccgccacagctgctgccagcctcaaggaagggccccggttcccaatcccagacgggccagcggatcgatcgaacaggcggccggccactcg

SEQ ID NO: 70021 - DNA, 571 bp, Zea Mays
attttgaattatattttgcctcctgtagaatacacctcctgtagaatattttgcctcaattttgggtgttaggtaagatcttggtgttctgctggttcttcatctttttgctcaaatcttggttgtaggctatggtcacggattggactgtccacctcagttctctattgagagtcgatactttcgcttggtgatgcgacacttctgtaggtgatcgtagcactgctgcatctgctgttactggttgctgtggatcagctgtgactagaggtgtcttctcttcagtggcatggacttcttgtggtcttatatcaccaatcgtgaactgcttgattgcttcacaaggtggttcctcattgcttacaatgtttgaatcatcttcctccacttgagagacgttagattcatcaaacatcacatctacgataatttcaactttattggtggccttgttgaaaacacggtaggcgtgctcgttcgatccataaccaagaaggaaaccttcatcaactttgggtgcaaatttagaggatttgggtttgttgaagtatgaagcacttgtatccaaaca

SEQ ID NO: 70022 - DNA, 483 bp, Zea Mays
cccccggggtgctcctgtcgtcgagctagccgatgtggccaagcctttggtgaacgcagacaaccgaagacccgtaggtgagagaccgtcgacttgcgcccatggcaaacctcgtacgtcgtcattcccttgagcaccttggtggacgagcggttgaggatgtagaccgctgtcacagaagacagccgacattcccctcttctcgaggagagcccgagccatccccacaactcgctggttgcgtcgctcgacggcgtcgttctgctgcgggttaaacagagcgagtagtggcgcagaacaccctcatccgcgcagtacgacgcgaactcaaccactgtgaactcgccgtcgttgttgtcggtgcgcaacacgtgcaacttgcgactgtactctgtctccacaatgacttgcacgcctgatggcgttcacagccggtgagcagcctgtgccggcgcccttgatctctacgccggaggcgtcccc

SEQ ID NO: 70023 - DNA, 515 bp, Zea Mays
gcatgaccgagttgaagtggacgaaacgactagcgaggttccaggcggatctagctcggcgctagttcaaacaaccggaggatggggataaccctgacgagtggggcccatgaggaagtgcctgacgcgagtgcgcagatgtaagtggacagggcgcacggataagtggactggtggcggttgtagctagattcggccgactcaaggaagatatggcccatgcgcggctgggtggtttcttctctttttttattccttttaccatttctattccaaattctaaatcatcttcaaacccttattttgaatttcaaagtttaaacatcaattaggatgcataactcagaatttcatcatgaaatgcaagggttttattggatttatattaatatttgttcaaccacatgcttcaaatataaaccacatacacctattttgtttatttatttcaaagaagtcattgatttaaatgtatactgaacttcaggatttatccgaagtttaatattcaacgc

SEQ ID NO: 70024 - DNA, 463 bp, Zea Mays
tgtgaccgaaggtgtccaacattagaaccccaggaaggaggttatggctgtgttgtggtgcaggatggtgagaccgagacttagaccctcgagcaaccagtcaatgggacgcgaccgtggcgaactacagcaatgagggcaagacacgacaacaatacttcatggcaaaaaatgcaaggaagtgcgagcgatggatgagtggcactacaacgatgggaaaacgcgacgcgtagcgagatacgccgagctagcccctgtttctttgcaacagtagcttgaatgagttaaatttgatcaaactcatgtatatctaagtcaatgtaacacgaaatgttaaatgagctaaatcatcgaaccaaacatcacctcgattctaacggtttatagttcgatttttacagtttaccactatttttaaatttacatttttatttttaaattttataaaatatatatttatggt

SEQ ID NO: 70025 - DNA, 490 bp, Zea Mays
cctacacctcgtccctacttgacattttagagacctacctctaccgtcgtcctcagtacagctcttctttattttgtggttcttgccggacaccattctcaacactcccgctttgccgctgatggcgttcgcgacctaggtgttgtgaaaccttcgtgtatccaggttagttcacctattgacctctgcttgttcatctcgttgatctggttgttgggaaccttattacttgtaatctagatttttcttatttgcatgtctgcaatcaggttcacactcttcacctatccagatgtgcatactggtgttctgcatattctaatctcgatatttaggtccatcgcttgtcagttgcacattgtggttttctgtctttcatatttcacgcttgcactgtacctgctattgattagagttttctccatttgatgttattgatgggttatccttaggacctccagggcccatgtccatgttactaggtaaccag

SEQ ID NO: 70026 - DNA, 452 bp, Zea Mays
tcacactttagaataaaatttcccaccaagggcagtagcttcgactgaaggttctttaatgtcattcactgaaactgagaattctggttgaattacagccttcgcatgttcacagccagctttttcaagcagcgagcccccccgagcgcctatgcaggcacaaaaatccccctgccagttagaatttcgtcaaatgcttcgatttcacccttaatccatttgatcacacccttgggatcacctcgaataaaaatccgctcagccgagaatgcaccaacactagtaacaacattttttagcttgtcacagcaatgcatagcaacgatgtagcattcctccttcgcttgacgaagctcttcaacattattttggaccctcgaccgctcattgtcggatatctcactcttcaattgctcaacattgaagttttcaataacttcatcaagtttctt

SEQ ID NO: 70027 - DNA, 968 bp, Zea Mays
acaccgaagtccaccgaaagccatggtcttcaccgcgccgcgaagcccgcgtcccgggatcctctccaggcacgacccggccgcccataaaggctcttcccgagactcgttcttccccctgctaccctctcgcgcctgcgccgagccaaaccctccaccatcccgccgccagtgagacccggtcctgggtgaagtttccgccgcatgctctgatcgccgcgccaccgtagccactgcgcgtgcgcatctgcgttcgactgggacggaggggtctgcgaggatcaccagtatacacctcttcgggattggaacctaccgtggcggatcgtgggcggggcgctgtacaatttcgtaccggcactcctgctccgccgcagaaccctgcgtcaccgtggccaggcaccatcttggtacaattgccggtgagtaccctcaaaccatgttcgcaatagcatgatcatcgcgtagtcctatccgatttggttttgtcgctcggggttggccgttcgccgtcgcactcacgtgctccgccgtgtgagcctggcggcggtgactctgctcggagttggtaggaagaagggcttctagccgttcattctttgatggtcggctagaattaggggtcttgggtgtattaaaccagagccgtcgaattggatgtgtgcggcccagatcagaaagcttatataccgtttagtcggaggagtgtaatccgtagatcttggatcctacgaacgagagcgagcacaggttcataagggctcggatctaatctgagcactcgaactaggatccaacggccagatttgatgcataccgcttcggtctgagagtctttctaaagagccccttcgtttttagcttatcaacccgcagtccagggtgactgtgctctgagtctagggaatctttcgctgtggcccctagcgttcggtttaatcttgtgcgcagcctagagttcagtaaaa

SEQ ID NO: 70028 - DNA, 753 bp, Zea Mays
ggcggatgcatctcgcccccaaagctcaatagcgaaggcagggttcaacaccatatggttatccaaaaatggcatcaggcgcagctttactgcacctagatcctagccatgcacaagcggccataccccacatgcaataaacccttccaccaagtcgcgacagctgctcatcctagccacgcgtcgaagggcgtcttcgcctttatcccccttttttagcttaaactgcgggaatgcgatattgcagtgcgagcatagaatagacggaggtagcccggaaacccccttagtgtcctccagtgtcacgtaaaaccaaaaatccaaccagttaccccatttattcttggtgcatgacacaatctccacaacttcactcgaagtctttctagtcctcggcgtgaaagtgcatgtaccaaactgtgcaatcttgccaccaatgacctttttctaccaaaggagacaataattcttggcgaagacctcgacctagggctcccagccatatgaagtcactgcccaaagaaactttgtcagtgccaccatggcgttcgacgcaagctgatgactctaaacttcgaagcatcacaaaactttgacaacaaactgatgcgcgggcaagcgaagtctagcactgaaaaacgctttaaaaacaaccaactccccctccggctctgagacctttcaacggtcacatttcaaaatcccctagggaccacttcaacctgacgagggtagtgtttcggccatctcctg

SEQ ID NO: 70029 - DNA, 596 bp, Zea Mays
ctccacaactggattcttcgtcatgggaatgatgaacatattccactggaagaaacatgggctgcaaatcaagttcatgaggaagctccccatgaccttgtcatggacaatgttgcctgatctgctaccagggacaattgggctaaacaaaatgtggtagaatagggcctcacataggggatagtggtcattatgtattgtgctaagttggctgagaacattgtctattagcaatgatgaactatctacaatttttaactcactttctttgtgctaagttgctggctgagaacattgtctactagcaatgatgaactatttgcaattttgaactcactttctttgtgctaagttcctttatgtgatgtgcttagttgcaatgattacattacttacattctgataccattgtcgactagcaatgatgaactttcctatgtcattactttaccattgtctatgtcattactttaatatgttaaaactgcaattttgttactcttctatgctacttctactatatatctatattacttctatgctacttctgctattttcttctacttctactatcttccccctaatctctatctccc

SEQ ID NO: 70030 - DNA, 434 bp, Zea Mays
gcagaacaacaggaagcgtttgatctcatcataaagtatttgtcttcggctcccatattaaaagcaccacaagtaggagtaccattcagattgtacattgcagctgaagataaggttattggggctgttctgacgcaagtgactggaggaaaggagcatgtggtgacctacctaagtcggaggctggtggatgctgaaacaaggtacactttatcgaaaagttatgcttatgcctattttatgcatgcaccaagtgtagatgttatttactgtctagtcattgcactgttgccagttaaatcgatgtgattaaatacatgttgcaaaacccgattatgagtggtaggattggtaaatgggcttatgcacttatagagtatgacttggcctatgaaccattgaaatctatgaaaggccaggtcgtagcagatttt

SEQ ID NO: 70031 - DNA, 1023 bp, Zea Mays
gtttaagtaggtagtggaggctcctttgtttgcactttttgtcttgtaatgttggtaatttgtgcttgagacaaatgctctaattagaaacaattatctcttttttgtcaactaggatgaattcaaacactcatgtggaagctcttgaggatgatgtccttaatgctcatgaagatgagaggatgtttcctgagtttgttgaaaatggtcatgcacgtgggtatgacatgcttgcacaattcgaggataccgatgatgaagagagggaggagaaccttaccatgggtgtgcccgatgatgtagaagatgaggatagactaattgttgattgggatagagaaaatccaagtctagaagaaggcaatacttttccaaccatgagagattgcaggaatgcactcacaacctattgcatcaaaggggaatacgactttatcattgacaagagttcacccaagagatacactgtgcattgttggtttgagcgatgtaagtggaggatgcatgcctccactatgaggaatagcactattgttcaagttaaggtcaacccttttctgcacacatgcccaagtgcggaaagaaaagtgacgcagagggcagccaagagcaggtggtgctgtgatgcagtgttacagtgggtgatagaaaatccttctattggtccagccgcacttattaagaagattcatgagaagcataacattcaagtgccttacatgagggtcttctatgggaaacaaatggctcttgataaaatctatggtccatggaaggaaagttttcaactattgtactcatttaaatccgaagtggagaaggcttgtcctggaagtgttgtgcagattgacaagcacaaagtagtgtacaatatgaaaggtaaaactatggagaaggaatgctttcggagagtatttgtttcattcaaggcttgttggaagggttttttggttggttgtaggccatacttggcggtggatgcaactgttttgaccggcaaattcacaggacagttagtggctg

SEQ ID NO: 70032 - DNA, 815 bp, Zea Mays
gaaggcctgatcctgagttgatggtaacctgaccttagatctatcttcgagaacacactgactcctctcaactgatcgaacagatcttcaattctaggtagggggtatttgttcttgatagtgacttcattcaaagatctgtaatcaatgcacattctctttgtcccatctttcttctccacgaacaaaactggagcggcccaaggcaaggtacatggtctgatgtagcctttctccaacaactcgtctatctgcttcttgagttccaccaattctagtccggacactacataggctctcttggaaataggggcggtgcccggtataagctctatggcaaactcaactttacgctcgggtggcatgcctggtaactcctcaaggaacacgtcggggaattctgacacaattctaatatcctcaagcaggttggcctccttgccatctacagacaaatggtaacaggctccttctaggtcatgcatgaacagttcagttactacttctttcctgggtggggacactaactttaccgtcctcttgtcacaactgaaagtggcttggtttctgtgcagccaattcatccttaggatggcatctaacccttgagtacacattactactaggttagcagggaagtctatctccattatttcaatccttagattcgaatacatcttatcggactgaacctttccccctactgaattaactcttaaaggtggaatcattggttctacggggatgttatgtgcttctacccatgatgtagaaacaaaagaatgtgtggcaccagtatcaaatagtacttttgc

SEQ ID NO: 70033 - DNA, 776 bp, Zea Mays
tttggcgaagggggtgagggaagcgttgccacttgaattcaccaaagaacggccatgtcaacgctgacactttacataggctccgccttcgggatcaggccagcctcccaaaaattaaacaacataagtgtaagcttctcgccatcaaatagagccctcagatccatgtcttcgaaacgctgcccaattgtcgtcgtaaggatgatatggtgagtcccttccttcgactacattctttcccgtggatgaggcccctccatccccattcaacgacgccttcgggggcctccgacaccttgtgaagactcacccaaagttcccacactttgttttggcactctgttcctcctcttgctcctcgccgcagtcgaggcaaccgtagacgaagactccgcagcagtcgaggcaaccctaggtgaagactccacaatagacaaatctaataccataaaataatctaagtcatcttctgaagactcatcatccatcctagcaaatgggctcagcaacttctcactttccgatgaccaggggtcaacatcagattccccactactaagcactatcaaacttcggcacatcaacgatttatcatttccatcgtcactaaaatctgcctgcacaggcctaggcactggaacctacacagcaaccgactttaagtatcgaacaaagtaaaaatactgttgtactaaccctactctattcattacacctgcgtagaagtcctcgccgccgtagggtcttcaacgacgacttttgcgagcgaagactgc

SEQ ID NO: 70034 - DNA, 490 bp, Zea Mays
ctatcggaacgacaaaagagagatcagtgaatacaaaaactcacccataacgaaaagtttggggtacttctgtcgcatcaactcctcaagctcccaggaagcctcgcgctcagactgattagcccacaagaccttaacatacttaattgttctccttctcatgacacactccgaggactccaagatacgcaccgggcgacactccagagttagatcttgctgcacaacaatcggttcgaacttgatttggtggtttagatcccgcaaatacttcctcaacatagggacatggaataccgggtgtacccctgccatggattccggcaattgcaagcgatacgccaagctgccaacccggaccaagatagagaacggtccaatgtacctcgggctaagcttcccggagacaacgaaccgaatgactcctctagtaggtgataccctgagaaggacttgatcacccacaacaaattccaaatcccgcctcctc

SEQ ID NO: 70035 - DNA, 758 bp, Zea Mays
agttgattggctcgggaagggcgtcttgggcgaacactgacaggcttctgaatatccaaggttgtatcagtttctgggggaggtgccaccaccaacgtcccagcaggagcagcattagaagggtcctcagccagcaaatcaagcatagcacttatttctgcgtcactaggatccaaaggtacctcaaagtggacttgccgctcatcatcaagaatttccccgagcgaggcaaccaaggcgttaacttcttcagcagagggtcgcactctaaggcccaaactgccatcagcaacaggtgaattcgaaacaaaatgagtgaaggctttggaaggaggcaggttccaggccgagtatgccactggggcaccaacgtttgataccttgcctctaagaatcatctcaagttggttcaccaagtctacggagggaattcttctgttggtaacccgagttgagtcagctaggcctcggtacagataagccgggtaagccctgtccttcaacggctaaatgttcttgaaaacaaaatcagcaaccacaacctctgcagtcagacccctctccttcagcagtccaacttcagctagcaaagccccagcctcagccacctcctgatctgtgggggactcggtccaactcggagtacgaacgtccggctgtctccccgagcgagggggagagaatttccgtggttttcaacgataaaccactccaagcgccatcccttaatactgtccttgagagggatttcaagataa

SEQ ID NO: 70036 - DNA, 556 bp, Zea Mays
ttgagtgggttgtaattacatttggtttaaaaaatgctggtgtcaattatcagaggactatgaatttgatctttcatgagctgttaggaaacactatggaggttacattgatgatatagtgttaaatcgtctgaatttggttctcatataactgatttgcgcaaagcctttgataagatgtgtcggtatggtttaaaaatgaaccctcgtgtcgggtgtgataattaggggtaccaaaccacacccccaaaatgcgcttaaagtcctaggaacacccttgaagtacacccctcgaggtctaggaatcacaagcttcacctcgcccgaggtccgtgtcgagggccatcaccaaactccgtcccgaccgagcccccgtgggaccttccaaaacctccgactcgcccgagctcgatctcaaataggtcacgctctgaggcagatattcgcctcgcttgagcctcccacaccctagagctcccatctctgccttgcctgaggtaacctcgccctaggaccgccgagttcgcctcacccgaacccgtcccaggcgacaaag

SEQ ID NO: 70037 - DNA, 278 bp, Zea Mays
cctgaatctgcaactagaagtggactcatgtgatggaacaaggttagggaccccaagcacattttactcttacttacatgaactggggtaacatgtaccacacatatgccaaactagattggattttatcatcatgcagtagaccatatacatggatggcattgccagcaacaatgcgccaatgcgggaatgttaggtaagagaaagtttaggccataaaaggacataaatgatcagggctatgtgatcttcattagcaacactgtgtcaacaccttt

SEQ ID NO: 70038 - DNA, 484 bp, Zea Mays
ggccctcggtgtcaccacatgcatcatcaaaacagattccagggtcgtcgccggccaaatcgaaaaggaatactcggccaaagagcttgtactgatgcaatacctcaccgctgtctgcagcctcaaaaagcagttcaagggtttcactctacaacacattgagagaaacaaaaacgaagaggccaatacattggccaaagcagcagccaaaggcaaggccctgccctctgacgtgttctaccatgtcatcagcacaccagccatctgtaatcctgaaggcttgcaaataacgcaagacgccgatggccaccggatcatcaaccttataatggtcgaagactggcgggccccaataacactatacctccagggccattatcatccatctgatctcaacgaggccaaaaggcttcaacacaggagcagagacttcgcaatagtcgagggccagctttacaaaaagggagtcagccagcttatgctg

SEQ ID NO: 70039 - DNA, 327 bp, Zea Mays
tgggaggggacttcagacagacattacctgtaattgaaggcggtagccgttcagaaatcgttaatgcagcaataataaattctgccctttggtctcatgtacacatcctacatcttactcgaaatatgaggcttttaggaccaaccttgacacaagaagaacaagaaaacctatcccgattcagtaaatggatgcttgatgtcggtgagggcaaaataaatgctacatcacaagcaggtgaggatgaaccaacatggatacaaatacccgatgaactactcttgctgccacaaggtgacaaaatcgcttgcatagttgataaaattt

SEQ ID NO: 70040 - DNA, 1083 bp, Zea Mays
agacaaagtgagcccacaaccacctatgtcaaaacacatgcgtgaagaaattgcaagcctgcctctagccgccttagcatttgtgcatcctggcaagccccaccacaccctctaccctgagatagccttgtcgtgcacgccgagctgctatattaaagtgtcatgttgcaaaccttgaagtgatgccttagtgcagaaagccactccagcaagacctcgcgcacccgcctgagcacacaccatccacttgtcacaatcacaactaaatgaatgctccaccatgagccaagttaccctaccaatctcgggatgttgcaactacactgtgacaacgtcgccgctcacagtacgtcagtcaagactctccctccattataaactgtctttcctccgcctataaatattggtgcccttaccgtggaacctcccaatccaaccaccatctcattgtcgccccccattcgaccaatgtgtgccttactcttcaaaccagagaacaagtcatcgccgtcgatttgagccgtaggtgagcatgccatgatcttcgacctcttcctccctctcccgaagttattcttaaattatagaagttatgacctttgcatcgattaagacaactttcctcatggccataaattgcctattgaaaatatgcaaggaaaacctcacttaaacaattgtcgtataataagcataaccaagtttctagaagcttctacaattttcatgacaaaccttaatcataagcaaaacaaatttctaggaacaactatagataatcatgatgtacatagccttctagaactccctacattaatcatgataagtcatgaagcctagatatttttagacctccctagaaccatggtgatgtgtcataatgaggtgcccccatataaggtggaggtgacacattcatggtgaggtgtcactcatccatggctcctaggtgcctatataaggatgtgccccctcttgccatgacataccatcccacccccatccacacacattcaagggcaaggtagaagtaaagtagtgttaaagtgtaggagcccttgcataatcatatgtgtccttgtt

SEQ ID NO: 70041 - DNA, 671 bp, Zea Mays
agcagtagagtatttctcaaaatggatcgaagcaaaggacttggcaataataacttcggtgaccattcaaaagttcttatggcaaaacatcatatgttgctttggagttccaaggtccatcactgttgacaatggcacccaattcgactccgaagcatctagaacattttgcaatcatgtagggactaatattcattttgcttcggtcagacacctggaatccaacaatctcattgaaagagaaaatggcataattctactgggaattacaaagtcgttggttggattgccgaaaggaaaatggacagaagagctcatcaaagttgtgtggaatcacaacacatcaacatcaaaatctactggtttcacaccattcgagctcctttttggagacgaagttgtctccccgaagaaatcaaattgaattagaaaatgttacttgtgctccgagggttagctaaccggaagaaaatagaagagacaaggctcgaagcaatagagcatataaggaagtactaagcggaaaccataagatggagagataggaatgtaaagctcaagagcatagcatagggccatttgtgctccgaggggtggctaaccgagatacatcaggaaaactaaaagtgaagtgggagggcccctttctggtctcagcttcgaatagatcg

SEQ ID NO: 70042 - DNA, 649 bp, Zea Mays
gacaaatcaagtgctggaggatacgttaagagcttgtgctcttaaacatggtggcagttgggataagagcctaccatatgtggagttctcatacaataatagttaccaggccagtctgaagatgtcaccatttgaggctctatatggcagaaaatgcaggactcctctatattgggatcaaactggataaagacagttctttgggcctgaacttatacaagaggcagaagaacaagttcgaatgataagggagaatttgagaattgcacaatcaaggcagaagagctatgctgatacccggagaagactgcttgagtttaaggagggtgatcacgtgtatctgaaggtgtcaccaatccggggtatgaggaggtttaaagttaaaggaaagttgtcccctcgcttcattggacctttcttgatcttaaagcgagcgggataagttgcatatcaactagaactacccaattatattgcggatgtacatgatgtattccatgtatctcagctgaagaagtgcctcagggtacctgaagagcagctaccgatggaggaccttagtgttcaagatgatctgacttatgcagaatatcctatcaagattcttgatacactgactcgtgtcacaagaaataaggttataaagatg

SEQ ID NO: 70043 - DNA, 383 bp, Zea Mays
gggatattcagcgttcgcacctgggtcaggttttggtgcagtttaacagcgtgctagatagagacaaccttgttttgcttgggcctcagcaatatcttgatgccaccttcactactcaaagacataatgatgcctggaaccacagggcactttttttaaccgtgagtgctggctaatgctgttgggatttcccctagactatcgctcctccgagtacttgtaggctgccattggctcttttggtagattaatcttgtgggaggaggacaggcacaatgtgactaggactatgcttagggttcgggtcacatctcttgaggaagtcccccagttcattgtcttttctgaagcagatggtttcctcggagattcttggactgtgc

SEQ ID NO: 70044 - DNA, 1102 bp, Zea Mays
cgaggatcagctgtacaagaaggggattagctagcccatgctgaagtgcataactgaaaccgaagacatacaaatcctccgcgaagtccacagcggaacttgcggctcccactcaggacctagggccctcgctgccaaggtgattcatcagggattttactggcccacaataatttgtactgccaatcgagtcacaaggtcatgcgaagcatgccaaaagttctccccttgctgaggcagcccttcgcaagtcaccaagctcatcgcccatacatggccacttcaacgctgggggctagacatcgttggaccactgcctacagctcaagggaacctcaagttcacctttgtcgtcgtcgaatatttcacaaagtggattgaggccagggtagtatccacaataacatcgaagaccgctcaaaaattcttttggcaaaacattgtctgtcgcttcggagtcccgttcgaactcacagtcgacaatggcaaacagttcgacagccaagacttcagggatttctgcttttccatcggcaccaagcctgtctttgcctcggtgtgccacccatagtccaacggtgttgttgagcgtgccaatggcaaaatttttagtgccatcaagaaaaggctttttgacgacaaaaagggcaaatgggccgaccaattacctgaagtggtatgggccctaaacacgacagagtgccgagcaaccgggttcacacccttcctcctactatatggatctaaggccatgatgccgcaagaattaaagcacgggtccccccgaacaaacaaatcagccatccccgatgtcgacgaaccaacttccaaagacctcatcgacggagaccgcgtcttcgccctgcaggccctcgacaaatatcaggttcaaactaaggcctggcgcgacaacactgtcatcccaagagaattcaacgaatgggacctcgtactcgtaagaaccacccggacagagtcacggggcaagctagagccgaagtgggaaggtccattcatagtcaagacgaaggcatcccccagtgcttacaggctggcaacatcatctagcgaagacttagaccattcttggaacatcgataat

SEQ ID NO: 70045 - DNA, 438 bp, Zea Mays
ctaaaacttcaaagccgaagctgtgtgtaggtccaggtcccagtccagaggtaggtagtctcaaactgtagagactacctcctaggggccgggccaccaattttttctttggtatactggtatccagcctcgacacatcgagcctacctcccagggggacaagtaccaagtggaagttgataacgctacacacaacaagggcaaataacatacagataagttccagtgctacttgattaacggttcttaaaatctgttatatggccaaaagttattacagcgcccccagcggaaccctcaccttgtctctgcatattcagctattcggcgtcggtaggatcacgctaaaagcgcgcggccaccatctccactacatcttggacactctcccgagcggcatcttctgtggcggctaccagaccatcgatcaccggtgcc

SEQ ID NO: 70046 - DNA, 601 bp, Zea Mays
gtgaatgaacacaagaatacacaagcatttagaatggtttaggccaccagagcataataccctactccactgtttgtcgtattactgagagcttgagaaagcttgggtctggatggagatgtctccaagggagtttgagtgaggatgtccccttaggggttttagtcccgagggagcttgagtctgtgggggcccccttgcaatgtaagtgccctcccttttataacctaaggggagcaagtacaagggagctgggcctcgacaagtgggcccagaagtacaatagtatggagcagtgaatagagctaggcggacctatgtcttgtcctatggtggacatgtatcttctcttggtcaccgtgcgagctcttttggccagattcgcctttgcccagtcttgtcggcatgtgggtgaaggctctggtgtaggctctagtgtagactggcatgtccacttgcgtaggggagtagatggatggtgtcatcatgtcccctctgcttatctctttgcctcgcactgtagtcagaataatggaagtcatgatgggtgccgcccatgcgcggcagagagagtcaatggtcttgcctcgctaacatgcag

SEQ ID NO: 70047 - DNA, 391 bp, Zea Mays
gaccgtcttcgtctaattttatctaaccctgtctcgtgcaactcgccgcgcagctgtctctctcgctcggccaggacaagagccgccgtgaaattgacaaccacctctcgcgccctctcctttctatacataccctctcctttctatacaatcgcacacccctgccatgaaccccttccctctttcttctcacacaggagcagcccacgcgttttcttctctatgcattgtgccgccgtggtctaaggggccgcctcattgtcttcctcgcgtcgtcggaggagcagcctcgtcgtctacctcttccttgcgtgcctactctgctgttcttcatgcgtaggtgacaaatcatctccttctccctcctcttcgcctccttcttcctcgtcac

SEQ ID NO: 70048 - DNA, 435 bp, Zea Mays
gttggtcgactcggcgagggagttggtgctggtgtacggccggtcatggacgtagtcgtgcgctgctgccatggtgtagattttcctacagaaacattagaccttgcactagcacgtcgtccctgcacttccctttcagctttgcaagcaagttgaaacaatcgggttacgttagcataatctttataagcaaggatgtcctgaatttccctatttaacccaccccaaaatctagccatagtagattcctcaccctcctctatgttacaacgcagcatacccttttgtaattcctgataataatcttctacacttttagtactctgtctcaattgttgcaacttgtttaacatatcacgtgcataataagaaggaacaaatctagcccacatgacccgtttcaacgcatcccaagtttgtggcatgttattagga

SEQ ID NO: 70049 - DNA, 283 bp, Zea Mays
cgtcgatcgggattcatacggctaggattagtttcgtggtattccttcgctgcgtggatgtgagccgttgattccgtattgtgcgcatcagattagatcgggtctcattaaaccggggtcgtggatctcggatccggcggctagtatcgtgtaccgcttcagtgaagttagatctaatctgcgccctagaattctaatcgaatggccgacgtttgtccataccccttcgcgggtcagttttattaaagagcccctgagatttcagagaatcaacccgccatcc

SEQ ID NO: 70050 - DNA, 428 bp, Zea Mays
actgtcgctgctgcctctacctccgaagcaaggaatcctagcagaggaaaaagcagagacacgctgcactgcggctccgtgctgtttgcttcgctttattccccttccttgttccagcaccagctctcctctcccctgtcactctccatccggccatcccgccgcccaccctttcccccatccgccgaacccttcgcctgctgcgtccgtctggtccgaggcgtttccgttcctgacgccaagaacgagctcttctacgtacgcctgcacgctgaggtggtttctttgctcctgcctgccaccgtcgtcgattcttcttcttattcttttccccttggtccgtagccattgttggttggtgtcatatactttcatgcttcgtgtcctcctgctccttccattcctctccttcccgtagccattgttgg

SEQ ID NO: 70051 - DNA, 564 bp, Zea Mays
cagcgttgatgaattggcctcggacttgaaccatgtaagcattgctagcatctgcaatgagccaatgatcgtcggttttttttttttccatttttcagctaacaaacctgcaaccactatgtagtgtaggctgacttgcattgctttgtttggtcccatatggctagtttcaagattccaaagggcagtgcaaaggaaacaaatcacgggaggcaaactttaaaacgaggtatatgaacatagaaggttttaccgctgaggctcatgaccatggtgaaaccatccaatgcttcataaaaattgaaggtactagaaattctttttacagtttcatattctattctgaacttcagtctagtgaagcaactaaaccttgaattctggcagaattcaccgtaaggttcctgagcttctacagatctctagtggcaaaaaactcgaatagaggcagtgctcaatgaagaacaactcgtcgcttgggtctacagatccccttctgggggctcttgtacctatggtacctgaatatgatgcgttgtgtctattgtcttcatcttgtaaaat

SEQ ID NO: 70052 - DNA, 440 bp, Zea Mays
tgctagaacatccaacaaagaagcatgaaccaacctgaggagggctggccacgatgagagacgctcggcagcacggaaaacccgatttggggatattccaaattgaggagctatggtgaacgattggaggcgagggctggttcattgggtgcgtaataacctagcggagctcactagggcagcaattaatagaatctatcggcggtggcatccaatttgaagaaggcgtgctggcggccggaaagagggaaagttaactggtgcgagctgtcgtggctttcaccggggcagtgtctcaggcgatgaacaagctacctaaggtggtttactgcgatgtggtaacgcttctatgtacgtggcatccgggcggcaagcggcagactctggcgaagacatctggaccggccgctaggcaagtgggtacgacggccagcccacga

SEQ ID NO: 70053 - DNA, 401 bp, Zea Mays
gactgaagccaccgagacagctctgacctccaaagtcatgagacaatcgggcttagttgtgacggagggagccattgaagaaggtgcacctgctgccgaagctgaacaagctgatgttgaggaagaaaacgctgatgaagaagaagaggattatagcattctgatcccatcaaaacccagccacttggattttgaaaaatctactgtgtctgaagccgacgtgcccatgatgatgaagatgggttacttcggagaagctgaaaagaagcttattcgttttgccggagaagaaaccactccagagccgaaggacgatgaagtagtggttttcaaaagctttttctgggcaggattatggtttcctttgaacgagatgattggagaagttttagataattttg

SEQ ID NO: 70054 - DNA, 576 bp, Zea Mays
gaaaaatataaaaatgagatagttacacagtagaatatgccccacccctgccccatgagaaagtttataaaactttaagaaatcatacaacccatcccctatgagtaaaaatgaccaactttgggaatgattgctcttgcacaaagaagaaactagaaaaattaggaaatttgttgtttgacatttttcaaaaggagtgctagtagaaagcacctactaagccccaaactttagaaaatcaccattaaataaccattaagtttctttgtctacaatctagcacagaagcatggtattacccataaacatcatcataaataagctatagggtagaagccacttctacacaagggttgtagttcaaagtgccctctctgccctaaaccttgtcatttttgtgcagggttaaccacttctgctttacaccccaaatttttagagaagcttaattatgtcagtaagaagccactgtaattgttatagaagttttagaaacttatagaacaaaagcatagttcaacctaccccgtaaaagcctttaaaaacagagggtgaaagtagcttttaatttctagc

SEQ ID NO: 70055 - DNA, 2458 bp, Zea Mays
caagacgtcatccgggccaccggcgcgggccgacggatccgacgccgcgggcggagggcgcccaccgcggatgcggatcgggtatgaactttgccatccgcgtcgcttttttccggtcaacttgatgacgctagtggtcagcttgatgtctgtatgcgtgcatcatctaatgcttctctttccacctttttctgggtttcttggatctcgtcgttcgatcttgcgtcaaatgactcaaataacgcttccttttagtccctaataaaaaaaatctttggtggattagcagctattatgtgtccgttcccttgtgtggttaacattagctgttttcagtgctttccagtattgctaaatattactacatgcctttcattgacaaactgacagcatcagatagaatgcaagagtgggttatggagcatctccctccttccatatatattccacaatgtacatcatcatcggtccttctatcagaaacagttcgatactcatagtctaccgctaagcactctgtagttcgattgtagtttggtagtgtgctgttaagtcttggttgtaagttgcatttttttttttaaaaaaatcttcttctccacctacttttgttgaattttcagagcgagcaagtaaatgcagccataaaagctgaatccttgttttgtgatagtattgtctgtacgacccttgcaattgagtattttctggtactcgtttgacttatgttgtactggatatatggttgatctgtaggttgccactgtacagtgctgttcctattccggctttttgttgcgtgggtgatgcaccatgattttctgttgagcagtaaaaactaaatataattattttgtggcagtggtatagaaaattctggagtaggcctcattcggtttgaaatgctttagtgtagttcgcagatggaagcatagccccgaattccagttatattagaacatcactgattgattatttagagtgtccaaattgataagctaagagaaacacaaagaatattaaaactagtgctgcatggacatctaatatggcccaaagatgagctggctgataagtttggcacacttgcatgtatgactgtcatctgtgtggtggactgagcttcaatgtggacatgtacatggaattagaattttatactaaatgattgtgagtttatttccttttaatgattatgacattttccatcctaaggcctaagggcatactcgtgcctttgtctcttgtatgctttattttctttgtttgtggtttctcctaatatggcttctggtaggaaccaccgaactacatcgtgttcttgagtatttagcatgcttgtagccttgtacttgatgtctctgtttagttatttattcacaaaacgtggagaaatcttgcatgtattagcaacagcaaagaagtggtaaagaaagtgtatatcaggtggttgttgcaacttctttaagtatgtaaccggtaggtgtgaaaaatcgtatagatcctacaaaacttgcaatatgcactttattattgtttatttgtttatgcatttgtttttttactttcatgtttttaacgaactagaagggcattggtttcttttcacaccatgcaatttagtaagggtcccctcacctcatcatatcatttggaaacatagtttgttcatcttttctgatttgtcatgcattcttattacacagcaggatgtagataatgttaagttgtgaacctcttattttgaaagtgtgcggtgatgctttttgttgaatacgactaagatttgtgtctttttagggctggtttggctccttggaattgaatcagtttctatgaatcagattctaggaattgattcgtctaaaattgtaccagctggaaacggattcatttcattattcttgtttgggtgcaaacataactgaatttctggaattaaaatcaaaatcttgtctggctaacttggatcaagaattgagcccagattatctaaccagcacaatatatgagacacacgcagcacatacagacccatatagaacacaaagatcacaatatatgtatataatcacttaatcagcacaatatatgaggcccaatcaacacaatatatgtttagacatctaataatcaaattaaaacaagtacatcagtgagaggtaggcacaagcacgaacacgatatatgaaccaaacaacacgtgctgattacacatcaaaattaaaaccattaaccatttggtaagaaacacatattactctaatcacttcttaactgcttcagtagccacctctttcccctttgaactggtagagctatcatgcacttaaatttgctagcgtcagaggtgagaacgtcatacaggtcaagatcagtatcagattctgaaagtgtggaagaattggaggaatagtagttgattcatgaggggacgatacatgtatgtgtgtgtgtg

SEQ ID NO: 70056 - DNA, 678 bp, Zea Mays
cgcaggtgtgtacgtagtggtaactggttggtaacaacacgacacgcccaaacgtacgtaccaaccctggctccctgcagccggctacgtacggcggctgtactgtataaatacgcgtgcgtatgctgttgactcgcacgtactataggcccagcgcatccccgtccgatccacggcgacttctttatgacagcactgcccagcgtcttaccaaacgctcctctccgggagtgtcatcgatcgtacggtcatatattttaggcagcaggggtacacgtacgtacgtcgacttgattgacagcctcaggcttcacgattcaggttaaaagatgtactaagcagtaggcacttgctgaaaccctaagtccttagtgacataaatttcacctgctacatactacatttggtgtcgacttcggccggtacgtgtgattaattgcaacaacatttggtgtcgacttcggccagtagtagaccagaaccacgcggaacttgctcaagattatgttttggtcatatataattgagcacacaggtcaagtcgatccgtacttgaatactaattaatccatgcttagttactccctccgtacgtcttatatcttaaggaaacaaggtttctccggactcaaatgtttttaactttgaccgttaataacaaaataatcataaatattg

SEQ ID NO: 70057 - DNA, 573 bp, Zea Mays
gagaataataacattagtagccctgcaaaccagttggaaacagccatcagcaattcagcacatggtgatacgatcataacgacaaaagatgcaaacaagttatagctcaaacatcatgtagcaatattgaatacatgaacaattacaactgaatgggggctaacaccaaaaatccccaaaaaaagcaaaagcaaaattatatcacacgactgaactatggtagtgcagttaagatcaaggagagacagagaatggtgaactgtttcagagcatagctgatgcttcatgtttcttagcttctttttccttggtaccttaaataagtcctagtaatttgtaaattaatgtaactttgcaacaacctgagttactagcctatgtttctatgtaattcctatccacaaccgtattaatatgaagaagttcccctcccattttacccatttaaaaatatggtatggatatctttgatttttttaattataccaaaagcacaccaaaaatgaaattaccagaatctgagcgcaaattagatcctatttctgaacattttgtgtaggtacacttcatatg

SEQ ID NO: 70058 - DNA, 420 bp, Zea Mays
atttttatccatgtcattttgtattactagcttaattgcagaaccaaaactatacatgcaggaatttttcagcttgcaagcacaagaacacttaactcaatcatcaagcacaatcagggagagttactacaaattctcatttccacattgcaatgatttggttatcgagcacaactatcacatgcttatgttatgtaagttggttaccatgaaagatacactttaataatgtaaattagcaggtgacgataagttaattctaaactctttacctctcgcaacacatgatcattttaatgtcatcaaggtaccacaacatcatacgaggacatatgcatactagtttccagttttacatctacaacttctttactagttattttcaaccacttaatcagcattgatcgaattaaacctcta

SEQ ID NO: 70059 - DNA, 473 bp, Zea Mays
ttcatatgtgtcggggttagccggatcttaactctcatcatcactatcaaccatttcatagtcaacaccatctgaaggcgcaagttcgtcattaatgtaattgccttcaaggattactaagtcattctcattttgcacctcatcctcctcctcatcaacaaccatttcaatatctacgtccattccgatagcttcggttaagtctatctcaaatcgcccttctagcccatcttcttggaagaactctccatcatatgtgtccgggtctaagttataatcttcatcgttaggaacaggtaatctaccgtgtggtgataccttatacacaatatcccaacccttaagatgttctttcgtttgacatgcatatgggagataatacacttgtgtggcatgttgggctacgatatagacatcgtctcctggtaaggtggaatcttgtcgaatttcgactatcccaagattagaatgtg

SEQ ID NO: 70060 - DNA, 1351 bp, Zea Mays
ctgaaatcagactgacaatggcctagaactaggtttgagagccattttgagctagatttgttgctcggttgatggttgttgctatagcataattgtagctagtatgaagggctacaagtttgctactggcgaattagcaagttcttatgtagaaatatgtgttctggacgctacaagttgggctgtcatgggctctgaattgcatttctgatggtacagtatctcgatcggatcgccagctcagtccctcgccgccaacgatccgcgcgcggattcgtgctatcgccatcgttattcgcacttagaacaactagatagcgccggggtcagtaaatatcacaccgtggatatggtccggccactaaattactccgaccaccgtacccgagctagttacgattgcttcggatgggttcaccggagattgccacctcgcggtcttgcaccacgtgcccaggcatcttaccacgtcacggttagtcgtgttaggcatatccggtgatctccgggaggaccgccacggtgaaagccactaagcgcttgcgccagtgcccctcttcctctccggcctccgcgcgtcttcgtccaattcaccggccacctctcacggactctataaattgagcacactgtgagctccgtaggataattacgcatccatagcacccacgcttgcctccaatcgttcaccagagaccgtgaattgctcgttgcccccaatatccgtttccgccgccgtagaaacaccccaccgaggccagcttgctccaggtccgttcatgctccctgttctctcgttttagcgtgcttgtgtgtccctgttgctcctcgacccctccaattgagctagagtccctaggatcaccgggaacgggctcggttaaccgtggtgtccgctgtcaccgtgggcagggcgtgttagtgcgccgatggtgaaattagtttgggggaaacgctccttaggactagaattaggtgtagaccgaagaagagcatcggtcattgagtaattcgactggtgtgcgctcgctagagctcggctcctcgccattccccgtcatggacctcggcctgcgaagaaacagaacttgggggaggtttctgtaaactgtcagtgactccaggaatagtgctgcgaccccgcttctggttattcaagacaacgagggcctattcgcaaagtctgtacgcgggcgtgctttcctccagtattgggccgacttgggccggtttcggtccaatactgttcatgtcttttctttttccttttctgccagagctaaagaaattctagaaaattgtagaaaaatgataaaaataccaaaccaattttgctaggtttctaatttcc

SEQ ID NO: 70061 - DNA, 443 bp, Zea Mays
tttgaggtacaagtccaccagttgacgccgaacgcagtggtggcgcttgcgaagtatgtctgggtggttacctcctacggcaggcagcgtttgtggaggtcttcgccaaaaactattgcctgcattggcagaagaggaagataaggaataagattgcctaatttggatcgtgcaccttcacgccaaggactgggaagacttcagctgaggttgtggagatagtcccctacgctaggaacaaatggggtagctggtgggatttttggttctacgtggcttctggtgatgtcgaattcttgctgagtttgcctcaggccatcctgtgctcacattgttatgtggagtttcctcgatttgaggtggcggaggaagacaaagatgaaggggcccttcggcaaactgctcgcctgagtaccaagcgtgacttggtggtggaatttatt

SEQ ID NO: 70062 - DNA, 831 bp, Zea Mays
actaagtctgaaaaacagtgatattggctcaactttggggccctgtatcttttaaaatatagggtttttgccctaggtcaccacataaaaactatagagcaaactaaggagaacaactttgcttaaggtggtaagcatggttgttaagagtatttgagagataattaagctcaaagtcgggctgtcagtccctccctgaactaaatttccaggagcagtgtgatgggatgaactttgagctcgatttcgaatgagattcagtgactatttgatagtaagctttgtggcaaagttaaagattaactatagctctataactttggtgtagagagatgaccaagtcgtaatgcaaaattttgagaaaaatggccataaaccgtggctgtcaggtgcatttgactgaattttccccatggtacagtacacggattaggatgccagctcggatagctcaacgccggtgatccgcgtgaccggagttgggttgggcgacgagattcgtgtcgcgggggagtggattttgctgatcttggaaagatctccttgccgatgggtatgaactactgtggcctcgctgtcttcaccttttacgccggcgacgtggcttcgtggccatcgccggagttgccattctgcgccgcgatggtgccacgtttccagccgttaaacacgtcgtcactagccgccctagctcgacgatgaccgccgtagcttctcaaccagtaagtgccactgtaagccgcgccgatgactcaccctgtcattccggccgtcgcgcgtcctcctcaaattcgtggccaccgctttgcccttctataaattgagggccag

SEQ ID NO: 70063 - DNA, 842 bp, Zea Mays
atttatatagaccaaatccataaaatactaacaattatgcatcatagtagcattttcatgtattgttcccgacaagattagatatatttgagctttgagaaagttagagccacagttaaaaataacaagggagtggtgccgcgtagccgataatggtatgctcatcatgagtcattcatcctgatcctagtacagcaaaagccatgcatgcgttgttttctacgcacccagatatagccaataatgcacgcatcatgcgtgtcatcatctatacagtgcatatattcaaagatgctacaattttgactgtagtacgcgtggcagcgaatatatttggagaatggcgcacacaaagaccaaccgaacaaatgaaggaacatatcaaagttgctgcgctgtccgagtgacgcaaacagaactggtctgatgtggatggagcagaacatacgcatgtcagcagcagcagcaggcagaattatgctctgattaattatttcgatcacaaggtatcgcgaactcgtcaagtttctcatgcttcgagctgggttacatgggtaattatatggcctgcttcatcattgcttcacttgtgatcggaattggaaaccggctacgctattgaattcttaaacggcactagacaaccaaaactaaaggcgttaatctttagtttttgttgcatggtcctatacaaaagagagacctttactattagttggttggcatgaactagtattaaaggtagtccaccgtcagaggatcttttatattaatttaagccgccaaccggtagtaaaatttttatagaattttgattctacatgtttaaaaatcaatattaa

SEQ ID NO: 70064 - DNA, 499 bp, Zea Mays
aatgtgcaaagctccaagatcttggataaacaattcaaccatttgatacacatattcacttcatcaccaagttgagtgcaccccatcccatggctagaaccctacaatagagcaatattttgtacctatttagcgaaacagaccactctgtacacctcataaagaacaaccacattgacctctaaccttcgaatcacttagggttcactaagctatatttagaaatcacgtctagaccctccacctaaatttatcaagtcgagtagaggtttggggactgcacccattcggtgcacctgccatgtacctagggactcaaagaacacaaaacaaattactccactcacctccacctattctttgaattgcatggaggcttggggctacacatagcaagtgcaccgtctgtccacttagatggaccaagaacatgtacatcagacactcgacttcacaaactaaagcctttagtaactctagtagaactagtctagagtaa

SEQ ID NO: 70065 - DNA, 1087 bp, Zea Mays
cacagattctcatattcatccagtgtttcatatttatcagttgaaactgtttgtgcctcgttatactcaagtgttcaagactcttcctactatggtggatttggagaatgctgagccgaaggagattcttaagtgcatgttggtgaagaaaggcagtaatgccattgttcaggttttggtcaaatgggatggttttcctgtagatctggctacatgggaggattatcaggcgctgaagaattgattccctggagcacttgcttgaggacaagcaagccttgagggggagggggcagatgtaagacttgaggcatttatggctagggaatagaagaggcagtggttgttctagtttatattagctagctgtaatctgctataattcctatatgaacatcaaatagctgtaagggaagggttaagcttgcctccgacagctatataaggctttgtaacatccatttgaacggatatgaaataaatgaaaccctagaaccaccatacctgtgtcttcccttacttggaagttcatcggagttatgacctcaagtctcgttgattccctcggcggccaaggggtattacaatgaggtggaggtcggtagtggcttcattgtcatggggccgaggttagggtcgaggcgtagggaggcaaggatgatggcggaggggcctagagagggaggcacaaaggggatggatatcgttcgctgcaatggtcgtctgagtctacacgaaagaggcgactagggcagaagtggactggggagaagcacacacacgtgcgtggggaggagagagtactcgagaaacgtgggcgacataacagatggtccagattgatgggagatagaacgacagaactagaagagacaacctacctctttcatacttaataagtagtaaagattgagtaaattttagtttgcgcacaccgtaaaatctgtgaagtcttgctcaggttatttttattggatatggattgaataggattgaaagaaattagtaagaattttgactattcaaatctcgtctaattcatatagattaagattaaaacgaacttttctaaggattgtgtctttta

SEQ ID NO: 70066 - DNA, 690 bp, Zea Mays
taaatgctaggatcactacgcgcccgtccgtttatgatctaacggcagggatccgtctcaacgatggggtacgcattgatctaatctacaccgttccttttgcatcctacggcccacggttcttcttcctcagctcgccaccaggatatggccaacagcgcccacaatcggcgaacacgccagtgccgccaattaccagccacccggcggtagcctagacccgacaccccatggaggaatgccgcgctcgcacccaaactcctggtgcgcaccaaaataacgcaaagtaagaagaaggcttaccagcgcggggcacagacgaggtcgtacaaagacgacgagaagccttcgccacacgacgcgagcatcaccaggactgcgccgtagaccagcccatacgtccgtctcggccgaccgcagatgggtctcgcccgaagatcgccacccaacgtccctagctcacgcgctagtgatgtccactcttcctttctctctctcggctacactcgtcgcaaggcaaccaggaagaacgaggcgagatgaagatgcggcgtttccggaatatatagcgcagaactcaatggaacaagcagggctcattcgggtcgcaacagaatcgctacggatgtggtgggaggtctgcgccgaggaggtagccgggaggtgcggaatccgttgccgcatccgtga

SEQ ID NO: 70067 - DNA, 299 bp, Zea Mays
ttctcttttctttctaaaagaaagtatcaataataatcagaggtcaaaacatctaataaataacttagaccgatgattaacctataattctggcaccaagataaattctacaccacttactaattcggtgctcaagaatttccattatttatttagcgcctaaatgaaccttttgattataacttctaaataaacattaaaattcatcctaaacagaattagttataaaatcacttgtttagtatttgtaccacatgtctaccaaatttcgttattctttctaatccaaaaccaatgca

SEQ ID NO: 70068 - DNA, 1468 bp, Zea Mays
cttcactgcaaatgcagttagcttcctaactatatttaaacaatattgccaaggaacctttgcaaatgggggctgaacaattaagatactagctaccaaaataggaaccacatttacaaaatgtagcaaccattccaatagcaaaaaatcaaaattcaatactgcacaacaaaaccaaaaaccaaatgcacacatctagcaagcatagcatcccagtgtaacatctcccagacatgcaacaagtatactgcacactggattatgtaaacctaattcaagagatggttaacatgttattcgcttcaaagttatttcatctacaattgtttccaccagaaaactttcaaagtctaaactctaaagccacatctatgtgacgtgaccaccagggttataactacatacagtaactagatacatcgccactatcatataccataaaaaatacaaaatctatgagatggtaactatcgcctccttagctactgccacatataataaaaaacatgctaccagagtctgaacattagtttactaacagagccattaagtcccagtaaagcatgatgtcttatttcaacaacccaaaaaggctaaaattgatgcaaagcgatagaattttcttagacagagctctcactcagttcggtttctaagcaattatcaccaaaattgtgagacaggactctcactcgttcagttcttaagcaattgttaacatattagtagctcactagtctcgaaataacaaagtctcgtgacaaaaggtaagtagacaaaccaggtggttgacaatgtgggagcctgaagtgttcccccgcgagttacagaaccacttgcggcaggagggtacgttgcacctcgccacgcacgcagggttgtggatcccgcagtaccggcatgcgtgttccacgaagtctcccttgctgtagtcgtacccgtcctccacggcgccggttcctacaggatcctcgaagttaagtgcgacaaccccggaggcgagcccatccgccgcagccgacggacgcgccttggaggcggaacgcggcgacggcgaggaggaggaggccggcggggtgtggacgtcttgagacgtgagatcgggttccggggaggccgcgtcggacggcggaggcggtggggcaggccacgacgaggacgacgtgccggcgccggggatggaggacgtcagcggcgtggatcggggaggtggttgagagagctccgggaagtcggggtagtcgaagtcgtccccctgcgtgttgaactcgagaaaagtgtaggcgtcgccggcggcgggggcgtccggctgcgaggccgtctcatagaggtcaaccgcggcagtggcggtagagggcggctgcgtcgccatcccaccggttagggttttgtcgctggcgtagggcttgggaagacggggcgaatcgggaggggaaaatggagaggacgactcgggaaggatggtggg

SEQ ID NO: 70069 - DNA, 417 bp, Zea Mays
gaggaagggaagaacccaaggtgaattcatgtttaacttttgttgtttttgtgctgcaatcaattgaattatgtgtttatctttgcgaatcggtagaggtgttgtccaggaattttgtgagtgggtggacaacagtagttctagggatttctgggaattttcgttggttaattagtgggaatcagtgggataatcatgtagagctttgtcatacctttccaacgagtacttatgcgctcgattcggagttataatttaggagatatcattgtttgaatccggatatgtagctgtccaaaaaaacagatttttcaggtgggtgaacagcagtagtattagcagtttctgggaatttttcgtgggtaattagtgataaccagtatgataatcatgtagggctttgtcttatctttccaa

SEQ ID NO: 70070 - DNA, 508 bp, Zea Mays
gacacttggaactccaaacttcaaatctaagtaatcctcttacctcattgagttccaatatgctgcaatggtcaccaagaacatgtccaaacactggaatgacctaaactctgattctttctagatttttcattttttggtcatttctatcaaagtcttgcacaactatgagccctttccaagttctttctttgatacctctttcttggacttgtgaccatgcttcttcacttgtcttgagctagcaacccccgtgtcatatgatttgaatcatctcatcacataagaattaaatcgatgacttcaaattatgtcttgtaatgttgtgatcttcatcgctatatgactcttcacaatctgattagtccgtcgacatcttgcaagtactctcttctttcggtccataagtcatctgcttgtccttcaccttcacttagtccctcgaagccctttccttgcctgtcttcaccctatcagactgtctcaatattgtgaaccttacttgaat

SEQ ID NO: 70071 - DNA, 487 bp, Zea Mays
ctccctccattcaagctccatgaacgccatcaatggtgccttaaacccatcggccgccctttattctccctctccccatcgacgtcttctcccctccctctcctgtggctatataagccgatgctagccacactcctcaccctgccccagctactcgtctcacctgcatcgccgtactctcctctgctcaatgcgtgatttggtcttctcgaggttctccactgccagctgctcccatgtcgtcgtagctcagtccctttcaccggtcatgaacttcctggcacagcctcgctcgcactgctgctcaaggcctccatagttctttgctagtgctgttcaccgcgtacctcagtgctcgctcgcactccccacactctctcactcacccgtgcagcacctcgccagagctccgcctgaacgctcaccaacgatcgcgccgtccccgcctgtcgaaccccgctcatcgacgttcatccctgcgtatgaa

SEQ ID NO: 70072 - DNA, 828 bp, Zea Mays
aagtgagatggagatgtattgtaatctaggactcaatgagggggaaacgacagaggaaaatgcaagagatgaagccgtcaaatgagggggaaaaaggcacaggaaaatacaagtaatttggatcgatcggagcctattaattttggagacaatactatagaccaatcattggtgaccgttctttttggccgaaggtggatattgcaaatgaagtatttgcgccaatggcgaaaagaggggttgggcgacaaaggaaaaacaaaataaagagttgtctagagggtggtagtgctaaaaaatgaaagggcgtggaaaatgctcaaggcacaacaaagataaaaagacagtacacttgcccaaactgtggtcaactaggtcatcggaaaaccagttataagtgccctttaaatggaacaaagaaaaggttataattgtattagtaattgtttttttatttcattgtccattagtacttgttagtaattgttttgttgctttgtaggaagaggaagccaagaaagaatacgacgaaaaattggatcccgaaagagttacagacttctacatctcaaactagtgctcctaacgaagaaacaactattgtacctcaaactgtggatgcagaaacagttgtaatagaccatggtagccatgaaaacgtcagtactgatgcagcactagtccgtgtggaaactcctcctacttctccgccaaggagtgtcaagtggcttgttaagaaaattactccgaggaaaaacttgaagcgtgctgcgacaagggaatagaactacagatggtccaagaaacttgaagcgtgctacgacaagg

SEQ ID NO: 70073 - DNA, 643 bp, Zea Mays
tctttaatttttgtacaacaaccaaagaagatgactgtaccaaagttactctcctataatccaactttaatcttgctacaaaggtcttagctaattacccactaattcgagctccaccaaatcctgatgctggcccagtaccactggcttctttgaaccatacagattctcagcctcacaatcattctttagatctaattatctccaaatttctcatgacaccaaggcttaatccctatagcaaagttgttctcctatagtagcgctagacttttgttgtgttgaccctaggcaaattcctagtatttttagaactacagagctccaaagtcagccttgttcaactgttttcagacttaaccattggagcactagggtggcctttttgcaaataagcccaaaaatcatggtttcttttgcaaatcttcaaatatgtgaactatatgacttaaggtaccctaactccatggtttttgcacttaggtccaaaagtgtgcacatttgcatataacccctagggtttcagtccagggttttccagaggtctatttagggtttctggcacttctagggtttggatgctatcaaatcctattagagttgatgtctcatgaccatttctaataagttttgagaatttaac

SEQ ID NO: 70074 - DNA, 419 bp, Zea Mays
cactcacacatgcagttgtaatgtgatagccgctacgacggatatctttgaacgtgaggagagtatgagttgctcctgggtataggagtgtttcttaaatgaagatcctagtaccgttagggaggacaacaatgcctcgaccggagcctacaatgcggccattgttgccgacaattgtattgatattctcagtcctcttcaggagtgtctgaaaatatttcgtctctctaagaatcgaatctgtggctgcgctatcaatcaggcatggttcatcgttttcctccatcgtgggaagtgagtcttgttctatataaatagtatataatattgattcagttcatcattcatgatgacaacatataatagagcaagaacaattaaaccatgaatgaggaataaataaaattgcaaagcaatta

SEQ ID NO: 70075 - DNA, 333 bp, Zea Mays
tggaatctttttctcatttatgctaattgatcggttagtaaggcatagagatcgccataagatgagtaaacgcgagcacgttacactaagtcgagtaagcgtgatcatgttgcaccgtcttaagtcattgtcgacttaagccgattgctccgttagtagggtatagtggtcaccctaagtcgagtaagcgtgagcatgttgcaccgtcttaagtcactgtcgacttaagctgattgctccgttagtagggtatagtggtcaccctaagtcgagtaagcatgagcatgttgcaccgtcttatgtcagtgccgacttaaactgattgctctgtta

SEQ ID NO: 70076 - DNA, 411 bp, Zea Mays
cacaaggttctcaaaaaatggctaaaaaacttaacatccctattagaaacaatagtatttggcacaccatgtaaacacacaatctcagtgaagaacaaattagcaatatgcgaagcattgtcaattttgtgacagggtataaaatgtgccatcttgggggaaacgatcgacaaccacaaaaacgctatcactccccctctttgttctaggcaagcccaaaacaaagttcatagaaataccctcctaagatgaataagtaacaagaagtggcatataaagaccatgtgggttaagtcgggatttagctttgttgcacatggtgcaacaagagacgtagcgctcaacatcacggcacatccgaggctaatagaggtgactggacaacacaccctcagtcttcttaacaccaaa

SEQ ID NO: 70077 - DNA, 923 bp, Zea Mays
ccggcatactgtcatttggggctgtgcacatcccgtggctgtgctagctggaccttttttgccatgtgtgttcgcatgtaccgtctcgaatccgtcgcatgcatcgtgagtaaacgaaaaggagatttcttcagttttttacaggggaggagcatagttttgccagagaacatgttgcacacaaggctacataaaaatagaaaaggagttacaccaagaggcaaattcttcatgcttttcggccacgcacccgacgtttccatagatgagcttcttcagctgtgtcgtgtcgatgattgaccgctctaggacttacgttaccctcctcgatcgagtagcacaatagtagtgttatttttttactcatgtgaatatgctgctgcttgtctcgttgctactccctccagggcctccactccactgtgaatccatgtgtccgtggcacttgccgctgtctccaactgtgcatcccgtgtgtgatggacagctggtcctccgatcctcttcacgggcatatagccggtctggttctcagaggcatccggagaaacgagctcttcttgcgttgtactcctacgtacgtacgtgcaggcacctcattaactcgggttctaattgtcctactcgtcattaataccagctgagacaacagcaccaccatattccatgctactccggagtaccctcccaacttttctgtctgagctctgctacacaccgcggcgcggcgtagggcttattagtacgtatacataaaaagaacgcagcttaatttggccatatctgatgcatccacactgttcctcggcagaatccctatatccagatatcctccctctatgcttaggctatactagggatggcaacggaattcccggtcgggttttaccttcacatccctattcccgtaacaaaaaaaaatt

SEQ ID NO: 70078 - DNA, 969 bp, Zea Mays
gcttgtttgatgagctacttagagaagtggctttgtctagcttcttcgtcatccttggtggcctaaggcagctctcgtggaggccaactaacgcgtacccatacatagggtaccctaaaatcaacataaaaggcactcttagagattaaaacatcatattgtcatgatgaactctgacctaatatctcgatcagatggaacctaaccaaacccaacctcggtgagccctaattcgaccctcgaccaaaaacaagccaaaccaggtgagacacaactaagggaggtctgaccaaaatccccaaccaaaggcatattgaccaagagaaacctatttgatattcccacaacccgaattatcggctaggtcgaacgtgaccccaagcacgttaggaccagttgtctaggcgtacactcttgatagaacacaatagctcgagagaagcatgcaattaaaggaagggatggtgcattttttactctaaacacttgttgcatgccttttaccctgtcaaaggatgaccataaacatgtaccatacggacaacttcgagccgcttctgttcgattgcctatctcttggaaatacaaggaaaggtaaggcggacaataatgagctgtacaaggatgctcctcgaggacacacaacatgatcatgtaactaatctatatactatatttagcctggcgtttttttgttgtgctaggcataccaaaccaagccaaacgacatgtttggacatctaaggatgtgtttggttgcctggtttttgcgttgtctgagtcagactttaggtgtgtgagatgtgtgtttggttatttgtgggtaggtgtagagtaagattcggacgatacttacaatattctagaccatactctaaaaatcgactagattgatcacatctaggttatctccaaccattccccttcccaaatcccccattcatactttctatttttatttaaatacct

SEQ ID NO: 70079 - DNA, 522 bp, Zea Mays
ccccccctcaccgccggtgacctctgcgcaaggattcgcgttgatcgcagtgattcgtgcaggactcaggcaggatagtaccgagagggtgaaaatatcgcaaagggagtggatttggtcgcggggtgaagcttatcaaccgcgcctatagccgtgcgacgtggccggatcgccggtgccgtcgtggagctctggcgacctcaattatgccatgccgtggctctttactgtgcagtagtaaccgtggcacacctaggcttaccatctcagaactgctgcaccagtgaacgccacgactgagccactagtgaccttctttctctccggctgccagcgcgccattccaaaattgagtgccaccgcccttggacactataaattggtgccccagcctgctccgctaagtaattgtgcacccagtgaaccagccctcacctccaattagtcaagaaccccgacgtgtgtaagctcgccgtggccagctctccataggtctgatcacgccctcctcgctcttgtttt

SEQ ID NO: 70080 - DNA, 807 bp, Zea Mays
gaagttttctaatacttatttttgctggcatttagatgttataacatgacttggcacaattttctagccattaatacttaccagttattttattatgattttcccaattttctagccaaaggggtgcttctatatttgaaaaatatcaaacaacagatttctgattttttctagcttctattttgtgcaagagcaatcattctgaagtttggcatctttttgcttaagggaaggggtggtaggaattatttggattaaatggcctttttcatgaagtattggtaataggcattattgtacacctttcaattgggtttgcatttttctctggtggtctatctcattagtgaccttgccaaattttatttgcccattattgcattattttgggttactaatgatttattcaaaatataacccattatcatgttctatttacctaccctacttaaaatgatgggctgaggtgtttattatttttgcagtggggttttggtggttacaagttcactgaatttttattaataactttgggtctggttttataattctaataattgttttctagttggaataatgctaaataaaacattccactttaattctattctaaactagaggcctttctattttttctaggttctctgttacttaagtaggctaggaaaaataatttcatccactagtcattaatttctaaggcctttctgattttattaagttttgggcaaaaatggcttttaatagatatccctactaaatttttcaatattgcggttctcactatttttaaacagtgtttaaatg

SEQ ID NO: 70081 - DNA, 304 bp, Zea Mays
gtgtttcaacagataggagggtggacgaggcgaagaacgattctgattataaggtcggattaccaacctagttcgcttctcaggtccctgattagacctataacctccaaatccctttgattttctatggcctgtgttcttggcttctacggccaatgccgtgctgatagctctactgtaagtaagatccaggcaggtggccattttcctcagaagcctgtcattaagtaccctcatgaagaaattctttttctttagatcagtatttacttgatcaatagcatactgggacagatgattgaac

SEQ ID NO: 70082 - DNA, 288 bp, Zea Mays
tttgcgatgggtgctgttccagggaccagatctatgtagaactccacttctctttctggtggcattcctggtaattcttctagaaatacgtccatgaattcttctactactgatatactttccgttgctagattgaacatcattgggtcactggcgggtggttgtgcctgacaggagactgactttccctgctggtcgatgaggaggactgtcttgtctgcgcaactgatgatgcctttgtgtttagttagccaatccatccctaggatcacatcaattcctttggat

SEQ ID NO: 70083 - DNA, 460 bp, Zea Mays
tttgttattttagtctagctatttcaccactatattacaaccatcagtatcgtgtgttgtaacggcacacaaatttgataaaatgttatagcacaacaatcatataaaaacaaacaactctttgctaacaaccaatatcgtctgtctcaaaacaattgcctaatgcggccttgtaaagctgccaatcgaaccaacaaatgaagtgagaatatctccttatgtaagttgcacatgaaactcacaaaacaacactttttaacaagagtgtatatcattagcgtttacaagagctccttggacatgtagtgatagcaaggcatgcgttcaatttccacaaacctttgccgtgttggttagcatctcggtaccagcagggtaagaggtgtaaaatagtaacactggtcggcccttgagatcccagcctcgtcctatagaaatctgaatataaagagtacaatac

SEQ ID NO: 70084 - DNA, 402 bp, Zea Mays
tagactcaagcacgttctatttagtttgcttacttttttggcatacaattccatgaagctctggattaaaattcttctcgcaccaacacctaatgcttgttgtactgaacttattagttatttacctgcttgtgtattcttcaaattcacgaatttagttggcggactggtgttatttgcttggttgtggttgtggagaacttatttaggtgatatcgtgatgggagcattctgtacgcaaagaaggtaggtgctcccatgcgtaaaatgcatccagtcgatccgttctatatccaacagtgttattgcattttttgcaaataagtcttctcacactctccacgttagtgctgttcactaaaaaaacccgtacaccccaaacgcatccccacgctagtgatg

SEQ ID NO: 70085 - DNA, 584 bp, Zea Mays
gattgcacaaaaagattcaaacaacataaatcttgtgctcgagatgaatcaacccatacccacttgtgttagtgattctaggagagaattttgagtttcaaaccatcaaaaccctctccatgaacttagattcacgaaatactcaaaaactcaaatgaaaaagagatcaaaagaggaaacccaaaatgattcaaaggattgagatttgcatgggtattattgaactagaggaaccaccttggttaggtccgcacttcccaattcacatgacatacatgccacaatccaaaagcacctatggatctcctaacaaatggaaatagaggcaaaaataccaaaatgaaaagctagagagggtttgggtgacccttcctccttatttatagagagtatttttacattcccatcataccccaagatacatagagcttatccattcagccagaggtaaaatagaccaactctcattctgatgatctaactgccacactcccttcataaagttgctttgccatgacataaccaccatgatggctccacatgtcatcttcgattccctccagaaccgcactatcgggttttga

SEQ ID NO: 70086 - DNA, 716 bp, Zea Mays
aaaagacttcgacatttgcaaacttattgtgctgctctggctgcacccttaggtgacttctgcatggagagtcttttaggaaaagacttcgattttgcgcacttattgtgctattccggctgcacccttaggcgacttttgcacgaagagtcttttagaaaaagacttcgatttcgcgcacttattgtgctattccggctgcacccttaggcgacttttgcacggaaagtctttcggaaaagacttcgtttatcgctattccggctgcacccttaggcgacttttgcacgcagagtcttttaggaaaagacttcgattatcgctattccggctgcacccttaggcgatttttgcacggagagtcttttgtaaaggacttcgattatgcgtgcttattgtgctatttcggctgcccccttaggcgacttttgcgcggagtgtcgcacgcgagggtagtctgcgctacctctcgtggtgacttcggagtggtcgaatgccgaagaccgtcgatgcagtcttttttgacatgctgtatctgagtttttgtgggggatttttgcaggtatattacatggctctgcctcattaaaaacctcaccccctgggaggaaaagagtgcgggccggaatagtactgtttggtgaaatacaagggcgcgtaggccctgaggatttacacaaaaaatttgcggagattgtcaatattccaagagtggt

SEQ ID NO: 70087 - DNA, 443 bp, Zea Mays
cgaccgtggtgggacacgatggccggagggaacatgagctcaagttcatccatacgatgatatttaccatcctgagccacattcggtacattactgagcccgaatcgcaacggtgacgaggatcccggcgcgagatcaccggtggtgggatgagctgaattgatctgatctgatctgaatactgtaccattgaatacctggttcagagcgcctgacagacagatttgtggtgcctagatcttgaattttcgcgtaagaacttgctaatccgtttgtagcaaacctgtagccctatgatctagctacaaatcgactgtggcaactaccctcaatcgagcaatagatcttattctaatttggccccaaagtttggccagtggcactggtggccatgtttcagttttaaaattgactgacatcccaactttgagctgacttttctc

SEQ ID NO: 70088 - DNA, 879 bp, Zea Mays
atttaccctacacttgtatcctacacgtaagtaaatgtggcaaacactatagatttctagcggcatgatatcgcaccggttgcatcaccatgaacaacaacttcatcaatgaaatcaacaatggttttgcatcacaatataggttttgtattacacaatttagtttttgatatctccctaaacccaattacttcatcacggtaaacaacatcattgaaatctaacacactaaaatcaattacttcatcacaataaacaacaacatcacactaaattatactgaagcgagggcacgagcagcgtagaggcgtggggtggctgcgagcctgcgacgtggaggagcgggtagcgacggtcggtgtggaggagtggaacacggctccggctccgattctttggaggcatcggccacgactcgttgggggtgtcagccatgtcgcgactacgggcgctccggtcggtggtggttctggggcggcagacgacggatagtggcggtggagaagctccgatcggtggtggcgaacaatgagtagtggcaggggagaagctacggatggtggcggctctagcggtggctccaagggcagcggacgtagatcggtggctggcagcagggcgtgagagaaagagactatcgggggagagaaaagggaagaaaataactcgatgcagattcttaaaacaaatgttcttagccaggttaagaacatcgggccaatgtttttttctggttttcctgtagtgactcaaactcgaacaccaagggactcagcgcacatgccagaacatgatccacctacatatatgaaacagataagagaagatgatgtttcgttgaacctttataaaagcaacatgtttcggtctataagggac

SEQ ID NO: 70089 - DNA, 767 bp, Zea Mays
ctctcggccacgggcgagattacctgtcaggcaactacaaaagcgttgcaaacaaagagcgcgtaataagcccccggcggggctggaatttgcgccttctttttggacttgctgttcgcccgcgttgaatgcaagggcaagcaaacgactcttccgtgtgctgtgtgttctggggcctggtaagctgtgttccagctccagctactaacattcttggcttctatttgaagcaagtccctttccgccgtaaagaaaagggacggggcaaaggtagataaacacttcttcttttaaaaccccgctgcactgcactgcactgcacactttgagagcaatttctggggcaatttgcaaaaaaaaagggcgtcaagaacaatcagtgctcgaggctactccagccttacaggtgtctcagtgtctggcgattatgactgatgatctacggcgcgtgctgatttcaccgtttgacgtaactagtagttggtgccagtaacgcagacagtgacccacgtagtatggctcggagaaagaaaaaaaaattgcctaggaaagtgacagcctctcggatcgtcatcatcacaggctccccctcagccgccgggcgcgtctcaagttggctactacgtcgataatggtagtaggttccagcgctattgcctcccgtgcaaatgcaactcactggcagccccgtgtgactaaattccaaggccttgcatcgcacgctgagtgcccactctgcatcactgtgaatgctgaaccccagacgc

SEQ ID NO: 70090 - DNA, 400 bp, Zea Mays
gttagaggtgtttgggccatagtgggcataataaactacgccaaaatggtactcattggttgatgaacacaaaggaggaaaagattacaagctcaaacaccagtgagcatcaagaccttatagctccccctcacctcatggttatagtgtgagttataacctaatggtcctaatccacctttattctttcctcctagatgaactctgttgcaagagtgttctaagtagagactagtcactaaataaaaaccccaaaccaaattgaataacctaagttggaatccccttaaatggtgttcatcacctccattttgtaacgcaagggagagatacaggttacatgaacctcgaattccaccagctaagacccaactaccccactcttatctagttcttggaa

SEQ ID NO: 70091 - DNA, 367 bp, Zea Mays
catattattttttcgaaaacgatagcagtacgatatttgacggtaacgaaaacggcgacggtatttaacgataacaaaaacgataactaaaggatcgaagacgcatcgaaatcgatcgaaaaccatcaaaacgatatttaaaaacgataaactcataaacatgtcatgctgtagaacatgataatatctataaatcttgatcatataacaatacttactattacggcataatcacaatacctatatattatatagcatccaaaaaagtgaaatagtcattagtccatacaaccgtagcacaaacccaagcacatataccataaatatcataatccatattccataaccatagctagaaataaaatga

SEQ ID NO: 70092 - DNA, 1190 bp, Zea Mays
atttatcaacaaggtggagaattatacactcatagaaatcttattgaggatgcattcatttatgaggttttgaacatttattcagggggagttgtttcttgcaaagtgagttttgggagacgttttgctagttgtgttgagacttttcctctttatagaggaactagctttgctctcatccttaataccgtccttcgctctgatttgggtccaatctttggctagtcgtgttgagacactttctgcctctttgtgctgactagctagtcttgtttggttgtgttgagctattgcacgtgtctttagggaccaagctttctcacgtccaatgaatttgatttagcttttgtatggcctttgtcatttgagagagttcttccttctctattgatcttcatgtttatgtagtggtgttgacaatgcactcatcaaggggagattgcaaacacaaggttgacatgtgcccttgaaggtttgcgttgtgatgagtgattgtcaacaatagtagcatcttaagttgagtcatgtggactaacagtggcatgagagtgtttgtgtaacatgtctcttggtttgtggtgcacaactgtggatcccgagatggtagtcaacgatgaaggtgaaggtcatgtgggttcgtgttaatggactgagagcattgaaggacgagcgttgagtcttgaagagactagagaagaaggtgactaggtgtggtgactaatacatggggacacccataggcgtaaagagatggtttagcggatcgtgttgtgttgctattgtggattgatgaaacacgtgtctaggatgcgggggatgtatatggagtatgctacctgtgggagtttaggtggttgagcctcaaagaaaacatgcgacagtttgctagtttcgttgggtttggccctcaaaacgtggcgacacggtttcagagggaatcggagatggcacgtggcatcatcgtgtagggtgcatcaaggcgaaacaacttcatgaatagtgtgtggtcatcccataaaagcttcaagagttggtccattttgcctctgatcgagtggataagctctatatatatgtcggggtagtttagaaaagaggaataaccctctattaataggagaggaggacaaaacaattcagccatatctctagtttgtaatcttcattttccactcttattttgttaggag

SEQ ID NO: 70093 - DNA, 739 bp, Zea Mays
ctttactggcttctcacggtactgaagatctttctaaatctgcactgcctcttcttcgatgagactttctggtgcttgcaggcatttgcggagctaggatacgtgaaacacattgtggatgtcagacatggattctggtaattcaaggcggtatgctgcgggtcctactctgccaatgatgggatagggtccgacgaatcgcggtgctagctttccttttacttggaatcttctgacaccatgcatcggggagaccttgaggtagatgaagtctccttcctcaaatctgagttctctccgcctgttgtccgcataactcttctaccgactctgagcttcaagtaatctcctgcagatcagggcaactttctcttccgcctcattgacaaaggtaggtccttccagtgctttttcccctacattggaccacatgagaggggtctggcattttcgtccatacaatgcttcgaatggtgacatcttgatgctagcccggtagctattattatacgagaactctgcatagggcagactggattcccaacttctatcgaatgctagcacacatgctcttaatagatcttcgaggaccttgttgactctttctgtctgcctatctgtctgagggtgataggcggtgctgaaatctagcttggtgcccatagctttctgaaggcttgtccagaatttggaggtgaactgggttcctctgtctgacactatctttcttggaatgcca

SEQ ID NO: 70094 - DNA, 497 bp, Zea Mays
cgttcgtagacccctagtggaccgtccacgacaagatgataagtcgagcagaggcagtcagagtgtcactttcaacgattgtctccctctctctcacactccacacgccaaaaggtgactcttgtcgattgtgagcggacggtgaagcgaacttgcgcacggactgtccgggagattgctggaagttcatcaactatgtcttcatctcggtatttcaaaatctcatggaatttgtgtgatttattcaactttgggaattcttagggatttctctctgatctagaattgggcaatggagttacaaatttgattggtggaattgctagtgttactcattgtgaatattgtgcaaaaatttgaaccgatttggatggttattttctgtcgaatcgttgattgaatgcattgggtggctagggttctaaaactcgcccctggacagtcgcggaccgtccgccacgatggcgcgtacagtttggccccctggcgcagacagt

SEQ ID NO: 70095 - DNA, 375 bp, Zea Mays
ccgattgctccgttagcagggcatagtggtcaccccgggtttagtaagcgcgagcatgttgcaccgccttaagtcgttaccgacttaagccgattgctccgttagcagggcatagtggtcaccccgggtttagtaagcgcgagcatgttgcaccgccttaagtcgttgctgacttaagccgattgcttcgttagcagggcatagtggtcaccccggatttagtaagcgcgagcatgttgcaccgccttaagtcgttgccgacttaagccgattgctccgttagcagggcatagtggtcaccccgggtttagtaagcgcgagcatgttgcaccgccttaagtcgttgccgacttaagccgattgctccgttagcag

SEQ ID NO: 70096 - DNA, 284 bp, Zea Mays
catgcgtgtaacaagttcagcaactcatcgatcaagctgctcataggatgtcgccacagagtcctggtattttttaaaagcttcagtcatcgcgcgcatcatctccttcaattccagctgagagacacactcatcgtcgttaagcttaagccccttgtccttgtctattttgattctttggtcctgtcattgttagcacaaaacagagacaaaaaggcaacaaacaatgtgaatcctacaactatctctcagagtggtggtggtggtggaatacaaattatgaa

SEQ ID NO: 70097 - DNA, 316 bp, Zea Mays
tgataagtactcaagttagacttattgggttggggtttatttcttcttcccttttgttttactctcttaaatgttttggagtgggtttgaactacaagttgcttttataacattctaaaaattttgcaaaaactacagtggcttggtactggtgtatgtttctctgtctcaaaatttggggatcagaaagtgaatggttttctctggacaaaattattaaattctagggcagaaggggtgctttgaactacaactattatctaacagtgggtaattctctaaaacttatttttgctggcttttaggtgttataaca

SEQ ID NO: 70098 - DNA, 616 bp, Zea Mays
gctaagttgagattgatgaaccaagaaggccatgtgatgacatgaagtggatgatcattgttcatcatttaatgaagtatgatggggaatttgtattatcaagttagtaggtacaaaattgatcgagttagtaggctatatagctatactatcaagtgtggtcaattatcttacttgacatgtctttagtgccactttgctcatatagttggggaatttgtatgagggataacaatgatttagattgtgaaagaaaaatcatattcaaaagcttatctttgatatgggctaaactttagtactgcggactttctaggccagtatagcggaccgttcttaggtctaactcctgtggtgggcagaagcttgtagtttctgggttacaggaagactgtgtattgtagaccgtttggtcctaggtggcggaccgtctgcagttgaaggacttgtgtttggatagaacttacgaagttctgttgtgcttttcaactttgaactacggattgtctgagacctaggcatagactgtccacagtactaattcttttcaactgcggaccgtcagacacctaggtgcggatgtctataatacaaattttagaaaccatgcctagcc

SEQ ID NO: 70099 - DNA, 636 bp, Zea Mays
ctccactaaactaaggactgagacatcaaagctccaaattgatagcaataatctgacaaagttcaattatcatcaaccagagcgctgcgaggacacaccacctaatagcagaaagcttcactcgattaaaccacctaacagagctagaaacaagccaagcactaaaaaatcctcatacgacatccatatcagcatcaattccacgcctgggacaaaaattatgcggccacggcttcatggatcctagcagagcctcttcattgttttgtaacatctttcaattcaaacaaaaagaagggatatcttccacttcagaccactccaatgtcactgcaaattttctcaaccgaatgttgttcccgtaaccacttcttcactgagtccagtatatcttccaacatcgcttgttcccttgtcttgagtagcacgctccagctctgcaagaaagacatgatctcatatatgatcgttgtcgtactgttagggaatttttcataatcgccatcttatttctgttacaccaaagggaccaaaccagcccggcaacaataaagagatggaaagtacaagcatcatgggaggttcccactccccaattgctaaacagactagctacagacctgggaacacggtccc

SEQ ID NO: 70100 - DNA, 310 bp, Zea Mays
accggagtttgcgcccttcaccgtgattgtgccacgcctccggccattaaccacgtcgccgtgagttgtgatcgttaccgagtgaccgtcgtggcttcttatcccgctattgccacgaatcactgcgccagtgcccccccttctctccggtcgccgcgcctctccttcaaattcactagccaccgctcaggggacctataaattgagcacgccatgagctccgtagagtaatcacccatccaaagcaccagcacttgcctccaattactcaccagagaccacgaattgctcatctcccccaaatcgggtt

SEQ ID NO: 70101 - DNA, 579 bp, Zea Mays
ttggtggctgggtgtgtgatgatcttgcggagctcacggtggcttcaatttatagggagcgaccgcgagcacaacgaatttgagcggcggattgtgatctgtaaaacggggtgagtcactggtggccgcgcaacgtggcttttaccgtggcggcacctccggcgatcaccggacatgcgaagcacggttagccacgacgtggtaaagcgtctggacacgcgacagatgacggtgatggttcaacggcggtgagaatcttatccgagggatcggtgagcaaggggaaaggtacggcggctagccggagtggtgtccagctcaacggcggtgctgatccttctacccgagatgttatccacttgccacgagcacgaatctagacgccggcgacacgaatcacggcagagatatcgtcggcggtgagatctctacgctagcggtctgatcccaagtctggtactgtaccatggcgaatcccattcagatgaactgacagcccgatttgcagagctatttactcccaattttgtgtaataacatgatcgacactctttagcaaagttatagtcctaaaatcca

SEQ ID NO: 70102 - DNA, 399 bp, Zea Mays
ggggagaactgtggagtacccatatggttcccgactgccagtggctatgtgagggaacaacctttttgactgactttaagattttacccttgagtggctatgaccttattgtggggatggattggttggagcaacacagcccgatgtcggtgcattggggacataagtggctgacatttgtatataaaagggaaacctgtcaagttacaaggtgcaaagccaaatacccaatcatgtgttgctcttattgtagtacagtttgattcattgattagacaataggctatcgaacaactcttggaactacaagttactgcgaatgatcctccagctgagatacctccacatgggtttgcaatttatggaaattggtggtttcctgacttatgtctgctatgc

SEQ ID NO: 70103 - DNA, 1172 bp, Zea Mays
ccgagctttgcatggaaacactccctttttcatggtttatggttcggaggcagtgctacctgctgatctcaagtttggggcaccaagattgatcttcgaaaacatagctgaagctaaagctactaggctggatgatgttgatatactagaagaagaacggttgaatacagtgattcagtcagccagatactaacaaactctgaggcgctatcatgataaggccatacggcatcgatcctttgcagtgggagatcttgtcctccaccgaattctaacgggggagggacgacacaaattgtcgccactatgggaaggaccattcatagtagcagaagtcactcggcctggatcatatcgtcttacccaaatggatggcacggaaatagggaactcatggaatatagagcatctcatgaagttttacccctagctagatttcaaaagctattgggacgacattgtattttgtaattgggagatacaccatcaataaaatggcttcattctcaaaggcactcgaattgttcattgtcaatctgcatgcttactcgactcagggtgaccactataccctacaaatggagcaatcggcttaagtcagcaacaacttaaggcggtgtgacatgctcacgcttacttaacccagggtgaccactataccctacgaacggagcaatcagcttgagtcggcaacgacttaaggcggtgtgacatgctcacgcttacttaactcagggtgaccactataccctacgaacggagcaatcagcttgagtcggcaacgacttaaggctgtgtgacatgctcacgcttatttaactcggggtgaccactataccctacaaacggagcaatcggcttaagtcggcaacgacttaaggcggtgtgacatgctcacgtttacttaacccagggtgaccattataccctacgaacggagcaatcggcttaagtcggcaatgacttaaggcggtgtgacatgctcacgtttactcaactcagggtgaccactagaccctaccaacggagcagtcggtttaagtcggtagtaacttaaatcggcatgacatgctcgcgactattcgattcagcataaacacgtttgcaaatttcttagggcgatctctatgccccacgaaaataggaagaagtttcaaaaccatcacactgca

SEQ ID NO: 70104 - DNA, 350 bp, Zea Mays
gcagccgagttagtccagaggtgtgaagcatgtcaatacttatcaaaacaacaacatctaccagcacagcaactgcaaaccatacctataacatggtcgttcgcgtgctggggactagatatgattggacccttcaagaaagctcaaggaggatacactcatgtactggttgctatcgacaaattcactaagtggatagagttcaagcccattgcttctttaactttagctaatgcagtggaattcatacaggacatcatattcaggttcggaataccgaacaacatcataaccgacctaggatccaatttcaccagttcagaattttttgatttctgtgaacaaaagag

SEQ ID NO: 70105 - DNA, 300 bp, Zea Mays
acacgagcacaatagtagcctgtacttgtagtccacgaagtacctcgcaccaccgactgagacttggacatccaaccctccctcaactccatttataatttgcccccagtgtaaaacgagggtagggtatacgagatacttgactagacgaagcgacattcggccaaaccaaactagtgtaaaaatcttgtctcccacggtcaccatatacactagatggtcgaagtacttagaatcactagctggtgtttttagaaaacctacaataggcacgctaagtagagggtcctttcaggtgtc

SEQ ID NO: 70106 - DNA, 480 bp, Zea Mays
ataaaaagaccccctttccaaacaaccttgagtttagcaagtgaaacctcttaaaaaatcatgcttgtgttggtgttttatgacccttgtgtgtttcccccttgaaattgcacctgcacaacttgtagattcccatggcttgacccctaaatcgactaaaacttccttgtgcacttgttgtgtcgaaaaaaaaattattgttggtgtctagttgcacgaaccctatcaaggccctgttcctttccatagatcctgtcccgaatcttcatagcatttctgctactcatcctagcagatcttgttttcttacctctcctttgcctggatctggtaatcctttttcttatgaatcatgttgctttatcatccgaatctcgggatcccctattgattctgccccgttatctggttatctcctataacccgttctcaagtatcggatgttgatttgcctaaatctctcatttctaatcagtctca

SEQ ID NO: 70107 - DNA, 381 bp, Zea Mays
ataaccattacccctcaaccaatttcaaggttctagctcctaatctctctgcccacagtgacagtgcgatcaacggacaacccgaagcgttcccggtgatcatccgtgttctagctcaaatggccgggtcgagaagcatcacaagcgcacagggatgctaaaacaagagcgaggagggcgttaacgggacctgtgaagggctaaccgcggcgagctcacacacgcggtgttcttcaccgatttgggggaaatctcaaattggggcgttctggtggacgattcgaggcacgagctggtgtattaggtgcgtgtctacctagcggagctgatgacacgctcaatttatagggcccgagggcggtggcgcctgaatttagcatg

SEQ ID NO: 70108 - DNA, 533 bp, Zea Mays
tactaggataggcctgctgtgtgtcagctgctgcactcgattggttatttgagtgttcccttcctacgaggaggacggccttctttaacatgacagaacagtccccagcgtcagaaggcaacttttttgaatcaccaaggacgaagggagtcctaggagcaggtgatgcttcgtttggtttggtgacggtcactcagggacgttcagaatctatagccgtcagacagcctggtttgcagtgacaacaaaccagcctggacgtgggcagacaatcgggagtgcgtttcaggaataagaagaagaaaaaaaaattaacagcgacacgtccgtttcagaaagagcgtgactgtaacagagacgggctagctgcctcaacgctttcagctgaaaacgaccgcaaccgccactcgccatcgggaatgtaatgcactccagcctcccacccttttgctcagatgaaaaaaaataaaataaaataaaacttctgcagcctacttcgaattcctgagattgtcttcacctcatcaatctta

SEQ ID NO: 70109 - DNA, 686 bp, Zea Mays
atttaaaacaatccaatggagctgtggcagatagggaaaaggaatcagacgttcgggaacaattactcacaatagaggagaaacactcagtacacagcggttgccgctcaggtggtcgctgcccattagccagggaggcgctccgccctcgcctatgaataagaaaagaaaagaaattaggttgaggaagttgtatagtttggagaagatgtaatggcaggggtagatttgggcggtggcgcggcgccagtgtagggcgcgcgcgtcattgctacagggacgatagaggcgaactggtggaggtggaggccgaactggaggtggaagatgccttagtcagatcccgcccagccgccccggaggttgctgccttgtgcccttgtcgaattcgtagagcctaaaggcgtggagaacgatagaggactgaatggaggcggccacgccgctggcaacataggaaacgcagccgcgcatgtttgcgaaataattgaaagagtctatgttctcgtgacttgagcgactgagggaggccgccagcaccaggctcaatcggtgcaagcaggaggtcttttgggccacatttttaggctaaaatgtattttggtctagatgttttggttgaaaaaagatatatatatatatatatatataagaggatttttgggctgcgccccgggccacggccc

SEQ ID NO: 70110 - DNA, 554 bp, Zea Mays
tgcacttggcagaaagcttcagcattcgggtccactccttggcttcgaagggcccagatgaagacgctgagcctaatgatagcgttaggggtcagctgatgaagatatatttcataattatctaaaacttccccaatcatctcattcaagggaaaccacaatcctgctctaaaaaagctcttgaaaaccaccacttcatcttttttaggctctggagtgatttcttctccggcaaagcgaataagcttcttctcagtctccccaaaataacccagcttcatcatcatgggcatatcagcttcagaaatggtagattttcctaaatccaagtggctaggttttgacgggatcagagtgccataatcttcttcttcatcatcaacgatttcttcctcaatatcttgttcagttttggcagcaggtgcaccttgttcaatggcttcctctatcacaactagtcccgactgtctcatcactttggagattggggcagtctcggtggcttcggcctcctctccgtcacgggtcacccttgcaattgaacatactctggc

SEQ ID NO: 70111 - DNA, 553 bp, Zea Mays
tgcggtgaagcttggaattcgtaccatgtgtgagtcatctagcttctagttgcattaccatgcaaaggtgatgaactaccattttattcatgcacaccataggcttcttggttaagatgtctagaggcttgaatccatcttcatcccatgcttgttcatgcactccattattcttaagaacattgaaacaagtactcaaaagcataggttcattcaatgtaatctgattattaggcataaggttagcgttcacatgagaatgaatttccttctccaattgtttagctctactccttataactggaccagctatatcaagtatagattcatttggagatgagtgagtgctaggaatgtcctcattagcctccccctcttgagaaggagtcgccctcgacttaggctcactaggaaatggaagaaagtctttaacaatgaatgtggtactcacattggaatattctcgtgacaattcaagtttgtaagcattatcattaatctgttggagaaacttgaacggaccatcaccccgaggaggtaacttactcttaca

SEQ ID NO: 70112 - DNA, 786 bp, Zea Mays
aaatattaaccaaactaggttgcaacatgattacaattaatatggtacacactaaaataaggaactcacttttgccatctttttccaccaatcttcaggcatgtcaatatttttaccactaccatcccaccctaaaccagtctgtcttgttaattgcttccaaatcccgtaatcaattttcaatctgtcccatttgttcttaaattgtttacgggtgtacacaactcctgtcctttctttgaatttctgaatcacattttggtaaccggctttgttcaaatgagtgcttgaacgatttccgatgaggacttcgtcagcaaaaatttcacatgctatcctagtatactcatcacaacaagtggccatactgtatacaaaaaatttgacagatgaacataacatcacagacaaccaaattacacgataacatacaatatatgaaactctgtaacgtagaaagtagcaaatacggcaattacctaggatctgtaatgtcgacgtttccagcttgttcttcgtttgatatcacatcttgtggtactgattgactatcgtctccctgtcttgtgtatccatggccatgcccggtcatcggttggctatgcacaggcgtggagaagccatttccgtccaccaatggggtgtggctacgcccaggcaagacaaatgcagaggagactgtgtctagcagccctgcacaaaacaaacgaggaattacttgcaagcgacggccacagatgcaaaacaattcgtctgttcttgacgccttgaagctcctactatccg

SEQ ID NO: 70113 - DNA, 1301 bp, Zea Mays
atagttgcaatcatattattatggaagtaacagaaagagggactgatcgttatggtaaaaggcagtttcatatgcataggccacaaaatagtatgaccttaagaactagatatgactaattgattatacaagcaagcattttaagttgaatgctaaagtaaaaattacatatattactttaaaccaattgaccagggcataaacagtagcatccatcctcccttgccacacaagctacctgccatgtataacgataggcagcagagtagacgaacttacttgtagtgcaaagaacttggtgttgagattctgggaattctgcagaatatgtacaacttgtagccacatgtctggattattttgtagatcacgtagtatctgatcagcggcgctcctctaaaatgaaagagccgatacagttattagtgttcattaccaaagccacaaagctataaacagagacacataactaacaatgctcagcccctggtcatgagaaagaccagtcagttcaaagtgggaaagaccgccaactgttcaggtttgcactaacatttagtcattctgaaggcaaggcctagatagcgtaagtgtgaacggagcaaactaaggtggtgtcgccatcgccatctcacagacggacaacatatggcacgctaaaccttatcaccaacacaagaaaaaccctaaccactagagtagccttgtttagcaaaacaggtagcattggcatttagcaagtcgagctcggatagactcgaagctcgagcaaccgaagtaaaccctaaagtcgttccggggcaagtaatccgcgaggtggcgggcgggtaggcgcgcggaagagattacctcctctttagatccagtgccgtaaaaggcggcgactgtggcatcgagcagcgtcacgtctatcggctgactcagatccctgagcttctccgccatggcggcagcgtttggagtgagcaggtcaaggaagcttgtgggggtggggatggggggcagcggggatcgcggggagcagggaaggctccggaggcgcgagaaggcgcagccctagaagcagcggccgcggtgactctggtagcggcggcggcggcggcggctaggtggaagtgactctgatcggacgagaaagaaggaagaggggagtcgggggagaagaaagggggatttttatttttggttttcggggtttaagaaagctgcgcgcggggagttgctgccaaaatacgccaatgtgtggtatcagtatggcatgtctcacgtagctgcatcagctccatatttattatcgataa

SEQ ID NO: 70114 - DNA, 931 bp, Zea Mays
aaaattttctcggcagcttcgttcagaagtttgttgacagcttcgtcaacagcttcttcagcaattcttatagtttctagtgccgccttcattgctggatcagcttcggtatcatagggctcaggtggaggagagagctcaactacactaaaattaataagttgttaatctgaagccagaaaaaaatactaaagctttgaaatagttaaaatacatatgcgccttgcgcgctcggcagcctcttcggctcgcttagcttcttttcgagcctcatgagtttccttctcattcttctttatcgcctcatcggctagttcttggccgcctttcatccaaatgtttgagtaaaattttctgcccactagagtagcttcagccgaaggatccttcatgttttccacagtaaagacagcctccatctgagttgcagctctaacgtgttcgcagccagatttttccaaaattgctgcaacccctctagcaccggcaaaggcgtagaaatcagcacgatcactaaggatctcttcaaaagcttcggcttcttcaccgatccattcgatgattccttcgggatcgcctctaataaatttttgctcgaatgagtaagcacccacctttgcaaaactgtcctttagcttcttggcgcaatccaaggatttttcgtaatatatttcctttgattcccgaagctcatctacattcttttgtaaccttgcgctagttcactcgcttatttcctacttcgccttagccacttcgaaatcttcatccttctcggcaagctttttctttaaatattcaattttggctctatgagtttcagactgcacggcaagattggcttcactggtcttgactttgtctactaaggaaagcaaaattttgtccttctctgcagcttcgttcctcagtttgataacctcagaccgaa

SEQ ID NO: 70115 - DNA, 726 bp, Zea Mays
gtctgtagaattgtttgggtgcattagatggaaccactatcgaggtaactgtgccaacacatctaaaagaaagatataagtcgaggaaagcagacattgtgacaaatgtattgggtgttcgtacacccgatatgaaattcatctatgctgcctggttgggagggtttaccacatgacagtcgtgtattgtgtgatgctatctcgaggccaatggatttctagcaccttatcgagatcagtggtaccatttgtgtggatggacagcgcagaatccgccacatagtcctgaggagtatttcagtatgtgtgatgctcgagcaagaaatatcatagagagggcttttggaaggcttaaagggcgatcggtgattcttagatccccttcatattttcctataaatatgtaatttcgtataataattgtatgtgcccttttgcacaatctaattttgcaaaaaaatgtctaaagaccctatggaaagtgaggaacaattggtggtagattctgaaatgctcgagagagaagttggtgaaccagaattcattatgggtatctccacaacaaatgcgtggagtacttttcgagacaatcttgtgcaggggatgtgtataatgcttatagggcttttcattgataatttttcatggtactttgatgcttaagtacttttatggctctattactatttttgactatatatgtgtcacaccggtttgagaaggtaa

SEQ ID NO: 70116 - DNA, 494 bp, Zea Mays
gtcggaaggcgtgaggaagggtaagctagggaggaaccctcacctcgtcgtgggggataagatcccgcgtcatcgacgttttggcgatcgtccctgcctccccaaagctgccgagcatatgctcgttaatctctaggctcgcgttgacccacaaagaggctgactcgatgcgggtccactcctctgcatccacacccggcacattgaacgaagaaaggtaatggtcctcaccagcttcttcctcttcaggcagcagcggtcactccagaggttgaactgcatccaggggtgccaccgccccggattggttgctccccctgcgacatctagaagtgaggggatttgagaaggcggcaacgaaggcagaacaaccgcccccgtcagcagggccgccctaggtgtggacacatcgacaaccaaagcctcccatgtaatggctaccaggggcagtggcttaagggaggctgtgtcaagcgccaacaaccttcaccggc

SEQ ID NO: 70117 - DNA, 309 bp, Zea Mays
gtcgcaacgcacgggtaactgattagtagttgttatatcttgtgtcgctagttgagcttatcaatatggttctactatagtgttactcttgatgattgtgatcatctaaggccacgctctgttgctagaggatctgaggggattaaatcccttccattcaattttggctatgaagggatttaattttctttaatccccttcaatccctccgtaaccgaacacgccttaaatggtctatagctcgtgagatcatcgaatggccattgaagattgtcgtctgctccgaccgttgttgtaagaggctcttgt

SEQ ID NO: 70118 - DNA, 710 bp, Zea Mays
cccaatttgtgatgtcttctatgccaaaaaggctttcatgcattatatatcttcggtttacttcgggtgaaacttttatgcatgaggagagagagcaaaaaattaacttatctgtgttttattgtatttcaatttaatttcccagatttccaagcattatagagcttgatatagttgttatggccacttggcgatatataaatatacaatcccacacaacacagtcaaataaaatatatggccaaacaaaatttttatggaggttgcgcataatgtgactttaggggcctgaacaacccaccacaatccacgcgagtgcaagctctagcgtttggtgtcaacgcgcgtgcggccatcagggctacgacaacacaacaagccttcgtaataagcgcaacagacacaattatgactctgtaattggggtacacgataagtccacacaacgtgcgcaacaggcgcaattgtggctcgatgatcacggcagacagacagtgcctacagggcatgcgaaaaatacgcgactcggcgatggcggtctgactcaacgggagcgatccgattaatggagagcgcgacatagcaatcacatgacgcagccaagttcatacgacacaaataacgtgtcgtgttgccagggcccaaccaatgctcgccaatgccataactcaaccgattaacaacaaagtctgatcgacatgtctgagtac

SEQ ID NO: 70119 - DNA, 774 bp, Zea Mays
ttcaagcatcaaatcacttcacaccaaaaagcaagtaattcaaaattttgatgcaagtgataatgattaatgatgcttatgatgatgtttacatgatgcatatgagatgtataagcatgcttaacactaagggtgttacacccgagcctgtctcgggcaaggaagataaaaccccaaaccaggcctcagccaaaggtcgcaggggacataaggattcaatgcgcatacctaccccacacagcgtcgcatgcgaacatgagcgacattaccgtggtcctatcggctttcaccatctacgatgacacaggcctgggtacagctgctactgttccccgcgccacctaccaatcctaatgggatgcgcaaacaacaaagcgcgtgctggacctcgagaggaaactacacctcgcccgaagccgacctcagcctcaaaacaaactccgcctcgcccaagcccgggcttggctacctgctccctgcgaatcccgcagaaggccactccttcaactgtattgtcaagcttcgttgagttggtcgaatgtgtgtttcaaatttgactcattttgctcgctcatatacaactttaccctaagggcgccggtggctattgctggccaagtttcttgagacagttgaaaacttgagacttgaggccttgcatgatcatcccgttagcctcctcgacctgtcctttcacacgggggtgggccatagtggcccaatcgacatggatgtgttattcgacggaaaatttaggaatctgttctcggtgaa

SEQ ID NO: 70120 - DNA, 1863 bp, Zea Mays
ggagctgataaatcaagaaaatgtgaagacaacgaagaataaaaaaaggggagaaaggtgacaccagccatcaaagccgtggaggtgggagagagttgagcttcttgactggaccggttggtggtgctttcggtgatcaatgtgttctcagatggatagtctcgctcggtgcagttctgattcctccgttctctgttgtatctctgctggctttagcgcatctgggcagtgctataggttctctggcatgcctttgtatctctgtactttcagtttgtcgtttggggccgggcagtgtgttagctcggcgaacccttgtttgaaggtcctagctcctgttagtttggtgcagcagggtctcttgctgatttatgcgtggtggcagcgtactgtatcaagtagagtggatgtttttaccttatgaatccaaaatgtactattttttcttggaatgtacgggggttaagtgaccacgctaagagagaaagcgtaaggcatacaattctgtccaccagtgcttccattgtttgccttcaagagacaaagattttgagttggtcaaatgtagtattaaaggaaactgtaggtgccaagcttgcaaatcaaacttttcacctgccttctctgggtgcctcgggcggcatccttatcgccgctgatccggatttctttgacatggttctcttaccatgttcaacaacatattcattgtcagtgaggatcagttctagattggaggacgaggtttgggacctcacgggtgtttacgggccccaactggaaaatgaaaaaatgatattcctctctgagctccgtaacatccaaaccatggtcaaaccagaatgggtattactagatgatttcaacatgatcaggagagcaagagagaaaaacaaagggtcaatcaacaaaagagtgatgaggcagtttaataacacaattgatgatctgcatctcctagagctagagctcaccgatagagcattcacctggtcaaatgaacaacttaacactaccatgactaagattgacagattcttcgcgacaacagagtggcatgacctgttcccctcagctgacctacactccatgtgcaccatgacatcggaccactgcccgcttctaatgcaaagccactctttggttactttctaccaagggtttagattcgaatctttttggcctcagattgaggggttcaacgaggtagtccatcaagcatggaattctacagtaaacactgatgatgccatccttcgacttcatgtaaggatggctcgcacaaccaaggctcttttggcctggagacgcaatacagttggcaacttcaaagtgcagatggccatcattcagatcacccttactctcctagagaaagcacaagagattagacaactatcctctgaagaattggaattcaggaggactcttaaaatcaagattcttgatattgcctccgctcagagggcacgtgcaagacaacactccaggctcacttggatgcggttgggcgatgctaacactaaattctttcacctagcagccaataacagaagacgaaaaaatttaatcagatcgttaattaaagatgacacactgttgacgagtcaggaagacaaaatgaacgaggtacaacatcacttcagccaggtgctaggcacgataggtaggaggagcagtgctgttcgttgggaccagctggggtatgccccctttgagttatctgagctggacaacttgattgatgacagtgaaatcatggatgttgtgatggggcttcattctgaaaaggcccccgggccggacgggttcattgggatgttctacaaaagctgcttcgagttgataaaaaatgacctttcc

SEQ ID NO: 70121 - DNA, 538 bp, Zea Mays
gcggcgaccgcatcctccattggtcgcacgtgtccgcagcggcacccgcatcacctgcccgccagccacatccgcatccttatccgatccatacatagcagcgaagcccgcattgcctgcctacatccttcacttctcgtgtatgcgtccgtagcggcaccagcatcacccgcccactagccacgttcgaatcttatatgatccatgcagtatgtctttatataccaccaattctctgactctgacgatcaatcgatctgcttaggccggggaggtctcgattagtagctgcaggtggagtgctagcggtactgatgcgaatggagcttgagagtcagattggtgcatatgggggtgagtgatcgtctgcttgcttgctcgtttctaaattgatggagcggagaattgagttgtccgtgtttatggcggcgacagcgtccatgaggatgcatgtcatgtatttgtagaattgcgacaaccttcgctgaggcttggagagctacttctgcggtcgtgatctgaagaaggttctcaaagc

SEQ ID NO: 70122 - DNA, 548 bp, Zea Mays
ttggtgaagtattcaacggcaacaaaggtgaatttgaggttcccttgagccgtaggcagtggtccgacaatatccagcccccagcgttgaagtggccatgtatgggcgattagcttggtgaattgcaaaggcttgcttgagcgaggggaaaacttttggcatgcttcgcatgacctcacgactcgattcgtagtacagattattgtgggctagtaaaatacttgacggataaccttggcagcgacgaccctgggtcctgatgggagccgcaagttccgctgtggacttcgcgaaggatttgaatgccttcggtttcagtcatgcactttagcatgggctgactggtccccttcttgtacagctgacccccaagaaatgcgaagttccggcttcggtgcttgaggcgtttggcctcattgatatcacttggatggtaatggccttgcagatacaaagttattggggcccaccaatcttcagccatgatgaggttgacaatgcaatggccttcggtgtcattagttatttgtaagccttctgggttgcgg

SEQ ID NO: 70123 - DNA, 402 bp, Zea Mays
tccctcggaggctagaaggggaaccccctccacgtcacttttttctagaaatgtttttctaaaaagcgactttggcagggatcctctgaaaagacaagctaaaagcacgaaacaagagggaaaaagccacacaaacatgaaagtgtttgggccttaggacatcaccattcactaaagacttaaaaggtttttacataggtctacaggaccagcaactcaagcgtcggggtggggagaaacaacatcctcaggatcatcatcgcccgccatgaggacgtttactctcatggccatgatggaaacaaggagacgatgacgacgaggtacgcagatctcccactgccaccaagtagctccttacttcaacctcttttgtccctcttgctctggtttcaatctttg

SEQ ID NO: 70124 - DNA, 379 bp, Zea Mays
gcacaacaggctactaaggcagaggctagtccagatgacaatgagggaggcagggcgacttcggtgcttgaggacatggaccctttagagaattgctagtgctacaacatcgaaggagtctaggatgagtgatggttattcgagtggtccgagtcaggttgcccgattatagtgatagacacttcttggtgattatgtagtcagttgctgactttggaactagatggttgcgcaggttccgctaatggggcttataaagcgcaaaaacttggattcttttgatgtgcgggagaatgatgatgttgtgtttgtagattgtcagagtccatcaattgactccaatgtgttttatgaaatttttccatttcgaagagtcgtt

SEQ ID NO: 70125 - DNA, 917 bp, Zea Mays
tagaccttttgaccaagctcatgacaaaaacattactgtggagaaggtgctctatttgaattttcaggctttatcttttagtataagattattgggagacctggtttctttatttgttaatttgaaaaatcaatgtagtcggattgtgagatctaactgtcatgacaaggtaatctggtcccttgacaggaatgattttttctataaaatcgttatacagaggtagtaaatgtaaccagattcctatcccattcaagttcttgtggaaaaccaagttgccccgtaaggtccaagtgttttaagaataaaattcacacaaaagataactcgagaaaaagaaactagcaaggtcctgtggattgtgttttttgtggactgcccgagtctataaatcatctattctttgagtgttttgttgcttgttttgattggagaatcatccaaatggctctgggttggcaatccatcccatgaaggcttgaagatcattttggttcgtagaataatgcttatgctggcaaggaaaataacttatttctctttggttgtggggctattatctgaacgatctggagatccagaaacgactactgctttggtgataagatgatgttggctccaactaacgtgatctatgtgtgtgtgtgtttggcttgattcttgggcgattagtcagaaagagagggaaaaactagtggagcaaggaagcctcataattcgaaggacaacaagtgacgtcttcagtcgagctcatgaatggaagccgctgcataggtgtatcaagtggttgatttcgtctcagttgattcctgcctcgtcgtaggcctataattgtgttcttcgctatggtcttgctgatttcgtctagttctggttgtgtgtgcttgcttttctgtagccctcatagttgtgacgag

SEQ ID NO: 70126 - DNA, 534 bp, Zea Mays
gcagctgggttgtttgagtcaacccattatgacatgtagcaggagtgtttgacaagcttgtgaaagcgagtctgggtaactgcttcgatcatcttcataataaagggtgcatgaagacaccccttcagaggagaccaagatgctcgaagaatttcctcccagatcatgtcaaacacattaaggcgggtggtgctattgggagtaaggagaagaaggagaactcgactcccccaagaacattcatttgattctcgaccttgggaagaacggacatcctagaagtgaattaaggtaccaataatacctaagcatgtttgaggtcacccaaaactccctttctttggaaatatgaacaatttcttgttcttcccacctaggcagtctaatgtcatggactttaagattactacctctaatatcctcataagaaaaacctaggatgtgagcgaaccgatggtagctcaccttatgccacactctctgaataaagaagtacatgactgggtagtcatacccatcggcctcttcatcaac

SEQ ID NO: 70127 - DNA, 549 bp, Zea Mays
ttcaaaacaacatccaaaacactggccatcctccttttcttaggaatcattgttacagcagttgttagcctcggcaacccagttgtggttgggggactcaacagttttgattgctcttctgcctttgagctctttatctcagactcttctactggatcggcactaacttcgaccgtcacaacaggaatcgtctccgaagctaaggggatagcttcggcctgttcagcaatctctatcctctttgtatcaggtattacggctgtcctttttatagaatgtggcctcggcctatgagttaaaattttaaccttcttcagcttaggcgcggtggaagaggatgaggctgccatttttcttttcaacccttgttttcgagcaggaaagcagtaatcaggataaaaatatccaatcacatcaaaaactctattcaacctcctctttccgtgagcgccgaaggcagtggtcatagcttcatcctctaccttcgtgtaagctcccagcagctcgtcactggtagcttcgacaacctcaagccagtcatcatttggc

SEQ ID NO: 70128 - DNA, 596 bp, Zea Mays
agacatgcactaaacaaatgacattagggggtagattaatggctagtttaacagctagaacaaaccaaacaacaaagcaatagaaaatgagatttcatgattatctggtaagtttaatttcaatagcctttctataatggtttttgaggtggttgggctatatatacttggttccactagctaattggaggttattggagtaaattgataatattggaagctagattaagtgttggaacactccatgcaccatgtgagagcttagagattaaatccatgactaggattgcacttattgaccatccctgtcaatgtgttagacctttagattgaaagcttcagtggtgggatttgtgcccttgtaatattagtaagctggggcacttgatgtcttaatgaatatttgatgatattgaccctccgagtttcgtgtggaacattgtctctttttatttcttgtaaatcctagggttggtgaacaaatatagaacccaattttcgattagagatacgtcttggggattcatgaacatgtgtttgttactaacttgtgctttgcagatacttaatgacaataatttagttacattgaggcc

SEQ ID NO: 70129 - DNA, 437 bp, Zea Mays
gtttgctcatctctatcgtctcccagctctcacttgcttattcaccatgcaccaccgtcgctcccttcctcgctctcgcaccccaagctgtgtcctcggacccaaacactgctattacccatcgccctagtctccggagtccacaacctcgttcctgtcagtcctccaccgatctcgagactggcatttttgtccctagccacccatacatgatgtagaatgcagagtgtgtttgactatatctcatgtatgtgtgactgctgaattatgcttgtttcagtaagcatctatgtgtgtgtgattgtttaagccttctttttgtggttgtatgtgtgaaagaagtgacatcatgtatgggtgtgatacatattcatttgtgagcaatttagtgaaccgttaattgtttgttgaattcagttagtacaagctggcatttt

SEQ ID NO: 70130 - DNA, 592 bp, Zea Mays
acggctggggtttgtttccaaacttcgccagggcgtgtacaaggtaatttggcgccactttgatatttggaccatgtggttttgagttttggatttaagggaacacggttgatctttggggaaaggttggatttcagaattttgaatttctgattttcacttgaagtccctacttgagtggttgatttgagaattttgcaagcccctttttggtaaactttcttactatgttttggagattattttgtgtactataattttgttaattggtccaaaacatgattttgtgtttcacatagcctttttactagatttccttttggtactcaatggcttaattagggtagttctaaggttttgaatattttcccacttgagatggatgatgtggttagggtatgattcttgggatgtaaaagacttaatttagttttatttcctcaagtttggtgccttttgctcaaattaatccacatgtgataatggtcacaatgtgggtactgagggaaaatccctgagtaacactggggtgttacactaatttccatccatggcgccataaagtgtgagctcacctagatcaagtcaaact

SEQ ID NO: 70131 - DNA, 372 bp, Zea Mays
tacgaagctgcatgcccccagcttaagcactactgtagtagagagcacaacacaaagtggagcctgcatgcagtagcagcttgctgtgcatgggctgcatgagcatctgcatgcatcggccacttcctgttcttgccactgtcgccgtaggcacatctctgcctgccgccgcgctgcaaaatggtaccaccgtccaactccacccacctacccacccacccaccgtctgtctacaggcggcatggggcttgcaggtgtggatgttgttctgtttaccgatggcatggcagaggcaggccaggcgctgaaagcggtgaggaccggaggagtaggggagggtggtggtaaattcagaaagctgccgagtggcgt

SEQ ID NO: 70132 - DNA, 532 bp, Zea Mays
cctcacaaacgagataccgagacacagcgtgggtgccggtccgcttccgactcatgacctacggaccccttgggcggcatagcactcatgacctatgagcccccagacagcggcacattaatagcatgtgcgccctcaacctacggtgcacttatgccctatcgtactaggcctgagtgtgcagacctcccgcagggcattacacgacgataaatacgcgacaatcaggcagccccagggtaaaacactggttttacccctgccttacggctccttcctagagaaccaccgctcgtcgacccctattctagcatataaaagggagacgaccgcctcagggcagggagattgacggaacgacgaacagaaggacagaccgagggacaatcggacgtctttcagacagagacgaacccacaaaaatgaatagaggaccagaaggtcagagtctcgccaagccaagacttagctaggactccaccttacagcttctaagctccacttccacccccaataagagatctaggagttt

SEQ ID NO: 70133 - DNA, 427 bp, Zea Mays
cttgtatagtatccgtgatttcctttcatcggaaaaaaacaccacaaagcctgcataactatttggaggtggagatggccggctctggagagtcgtcggcgatggtaggaggtggcgttcgtcttgatccagagacaaagggaagagttgatggtaactcactggtcacaccacctcctgctctactgggtcctgtaatagacgagatgagcataggggaagaaggagaacaaagggtccgacctcctatgtccaatattagctccagggagatggatacgcctcaaatactgcattcacatgtaagtccaattgttgtgtttgattcttgattgattagattgttatgatcatattccatcgtacaaacaacaatgtcaattaatttgtagaaaaaaaacattgatccaactatagtgccaacggt

SEQ ID NO: 70134 - DNA, 855 bp, Zea Mays
gaactctagccctgtccgctccgtccgaggttgctcctctgtcacatctgtaatatgaacataatcactcctgcctcctctctcaactacctcagctacttgtgcaacctcaagatccctttaggcctctttggcagcgagcttcccgcttatgggagctctatatctagattgccttgcccatctcctaggcgggtgatggagaatggttgtttgtcactatcatcgtctcctccaccactaacattcttggtgcgagtcatactgaatgtcggggatacgatccccggtctcttggacccatcggtcagcgagcacactgggtaaagtgccctggcatccagggcccatcggtcagctggagaagataggtgacatctaccctggaagaacctgtcgcgtggtggatcctaacaggagggccagacgtggcaaagggaaaccactcgagtggatcccacgcttagcctaagaccaacccgtcataaatgactggtcgcattaattgtgtctggtgccaagccatagcaaaggcatcggtccgcctcccactcatgacctacggacccctcgggccacatagcgctcatgacctacgagcccctcggactgcgggacatttatggttcgcgtatccctagccagcggtgcactcatgacctatcaggactaggcctgagtgtgcaggccgctggcagggcgcaacacaacgaaccacgtcgagccccaggctacgaaggccaggggtcggtatagcccgattgatggtacttgggccccacgccatccgccataaagaatacaagacagccaaacgattgcaagcatgcgtggcattaccccatggtagaacac

SEQ ID NO: 70135 - DNA, 308 bp, Zea Mays
ctgggttgcgctaggaccgttggatcgggatctgatggaggaaagcgcatgcaggtccatgcgatgaatcatttaatctgagccgtcggtgtctgatcgtagggctcatctcgcgcgataccccttcggccggggatattgcattagagcccctccgtttctgcggattcaacccgcagtcctggcgcgagccgatctatgtctaggcaattttaccccgagccccctgcatctctgtttaaatatgcgcgcagtctaggtcatgggaaattgaataaataatatcaggaaatggtttgtaatgagaa

SEQ ID NO: 70136 - DNA, 1020 bp, Zea Mays
aggcggtggaattcatacaagacataatattcaggttcggaataccaaatagcatcataaccgacctgggatccaatttcacaagctcagagttttttgatttctgcgaacaaaaaagcattcagatcaaatatgcctcggtggcgcacccaagagccaacgggcaggtagaaagagccaacggggtgatattggaagcgcttagaaagaaagttttcgacaagaatgagaagttcgcaggaaagtggattagagagttgccgtatgttgtttggagcctgagaactcaacctagccgagctctgcatggaaacactccttttttcatggtctacggttcggaggcagtgctacccgctgatctcaagtttggggcaccgaggttgatctttgaaaacgtagcataagctgaggctaccagactagaagatgttgatgtactagaagaagaacgattgaacacggtgattcagtcagcccggtatcagcaaactctgaggcgctatcacgacaaggtcatacgacatcgatccttcgcagtgggagacctcgtcctccggcgaattcttacgagggagggacggcacaaactgtcaccactatgggaaggaccattcatagtagcagaagtcactcggcctggatcatatcgtctcactcaaatggacggcacggaaattgagaactcatggaacatagaacatctcaggaagttttacccctagctatatctcaaaagctattgggacgataatgtattctgtaaactgggaaatatatcatcaataaaaagatttcaaaggcactcaaattgttcactgtcgacctgcatgcttacttaaatcggggtgaccactataccctactaacggagcaattggcttaagtcggcaacggcttaaggcggtgcgacatgctcacgcttacttaactcggggtgaccactataccctactaacggagcaatgggcttaagtcagcaacgacttaaagcggtgtgacatgctcacgcttacttaa

SEQ ID NO: 70137 - DNA, 426 bp, Zea Mays
gttgatttgtttggaatctaggttgcataactctttctggtagagatagcaacaaacatagtcaaacccatagatgtacatacatagtttatctattgcataggttttgagtaggtaaaagttatatgccttggtttgataaatagaacacctaattcacccccataggcatcatggtccctgcatagagcaacatgtgaagagcgccatgtggtctgtctagagctatggtgtgagtattccctttggtagagagagtgtgcttgtatgctaatcactagcaagagaatgaatgataaccttgggttgcctcaatagggattaagtggttggcaaaccactgaaccttagcataaaaatcactgtttcacctcatcttctcattggtttgcaattccatgacatttgcttgtatttcttgtgctt

SEQ ID NO: 70138 - DNA, 661 bp, Zea Mays
tatcaatggtttcccctcatttaatttcgcaaatgggtgcctggttggctctggccacggtgaccgtggatgttgcggatggataaatgcgttcccgacgactagtgggctcttagttcaattgggcgggtcgacgagcatcacaggcacatgagcacacttaaacgagggagcagaaggtttgcactgacctgaatcgagctggccgcggtgaggtgcgttttacggtgttcttgagcggatttgggggaaatccaaaattggagcttacgggtgcaagattggaggcaatactgggtggtgtggtgcgtgatgatcttgcggagctgacggcgggctcaatttataggcctagtgagcggtggtcgcgaatttgaagaaggacacgcggcggtcggaggaaggggagttcactggcgcagtggattcgtgtcccacgccgtggcaattactccggtgatcaacggagagtgagagtaggttacggcgatgtggtggaaaggtagagacacgcggcggatggtggtgatggcttaacggcggtgaggaccttatccaaggaatcggtgagcaaggggaggggcacgacgactagccggagtggcgtccagctcaacggcggcgaagatttttctaccccgcgacgttatctatccactcc

SEQ ID NO: 70139 - DNA, 837 bp, Zea Mays
acaatgccgtcccaatagcttttgaaatctagctaggggtaaaacttcttgagatgctctatattacatgagttccctatttccgtgccatccatttgagtaaggcgatatgatccaggccaggtgacttctgctattatgaatggtccttcccatagtggtgacaatttgtgccgtccctccccccgttagaattcggcggaggacaagatctcccactgcgaaggatcgatgccgtatggccttatcatgatagcatctcagagtctgttggtacctggctgactgaattactatatttaatcgttcttcttctagtatatcaacatcctccaaactggtagcttcagcttcagctatgttttcgaaaatcaatcttggcgccccaaacttgagatcagcaggtagcactgcctctgaaccatagaccataaagaaaggagtgtttccgtgcaaagcatggctaggttcagttcttaggctccaaaccacatacggcaactctctgatccactttcctgtgaatttttcattcttgtcgaagactttctttctgagtgcttccaatatcattatgttggctctttctacttgcccgttggctctcgggtgtgctactgacgcatatttgatctggatgctcttttgttcgcggaaatcaaagaattccgaactagtgaaattggatcctaggtcggttatgatgttgttcggtattccgaacctgaatattatgtcctgtatgaattccacttccttagctgaagttagagaagcaatgggcttgaactctatccacttagtgaatttgtcgatagcaaccagtacatgagtgta

SEQ ID NO: 70140 - DNA, 643 bp, Zea Mays
gttctatggtttgaaggccgattggttgttcccaaaaacccagaactcaggaagaaaatattggacgaagctcatctctcaaaattttccatgcaccccggcagtaacaagatgtatcatgacctcagatccttgtattggtggaccaggatgaaaagagaaattgctaagtatgtatctgagtgcgacacttgccaaagaatcaaggctagccatttgaaggtagcaggtaccttacaacctctccccataccatcttggaaatgggaggacctcaacatggacttcattgtgagtttgcctaacacctcctgacaccacgattctatttgggtcatcgtggataggctaacgaagacaactcatttcttgccagtacataccacccacagggcagaaaagtatgcagaaatctatattgaccaaatagtgcgtttgcatggaataccgaggactatcgtgtcagatagagccatagcacgtttctaggagcagctgcaagagtcacttggaacccatgttataagaagctcagcataccatcctcaaactgatggccaaacggaaagagtaaatccgattcttgaggacatgttgagagcatgtgtgttacattatggcaaggattgggataagtgccttt

SEQ ID NO: 70141 - DNA, 520 bp, Zea Mays
ccgaggtggcgaactctggttaaacggcaaccccgtgccctcaccggaaaccgccgcacggaaagcttgccagcgcatccgtagttcgcgcttcttctccaactccggtcgacgacctataaattgagcccccccctcggcttcgccatgtattctaccagctattgcactcacctgcatcccaaaccccccaccagagaacttgaatttgggatttcccccaaaccggttgaagaacaccgtgaacccaagctcaccgtgggaagctctcctcaggtccgatcctgttgtcagtcttgttctagcatcctcatgtgcccttgatgctcaccaaaccgtcgaattaaactaagagcccgccaatcaattggaacacgaacacatgtccgcgccgttcactgtcctcgcgggcagagcttggcagatcaccaacggtaaaatttattggggggaaatgatcctagggacttggatttggtgtccgctgctcagaaacactagtccttgctccaatcggccg

SEQ ID NO: 70142 - DNA, 342 bp, Zea Mays
atcttccaacacttggtttgttctttctgtttgtccatctgtttgcggatgataggctgagctgaagtttagcttggtatccatggactcttgtaacctttttcaaaagcgcgaggtaaattgggttcctcgatctgatacgatcttcttcggtactccatgcagacaaacattccttgacatgtataactctgctaactgggctcctgagtaagttgtcttcacgggtataaagtgtgccactttagtcaacctatccactataacccatatggaatcatagccatcacgagtacggggtagtccaactatgaaatccataccgatttcttcccatttcca

SEQ ID NO: 70143 - DNA, 314 bp, Zea Mays
gtcagaagggttatgcagacaaacggcgaatgcccttgtattttcatgaaggggactatgtctacctgaaagtttcaccaatgaagggggtatcgcgtttcggggttaaagggaagcttgcacctaggtacattggtccattcttggtacttgagcaatgtggaccagtggcgtatcgactgcagctcctcgaaactttgtctgctatacataatgtgttccatgtgtcacaattgaagaagtgtcttcgggttcccgatcgaaccattgaagtaacagatgttgtccttgagccggacttgacatattctgaa

SEQ ID NO: 70144 - DNA, 890 bp, Zea Mays
agcgcttttacccgcatcgacaactaaaaaatgtgcagtgctagccattctgtttctgaaaggattttaatcgttcggctgctctcacggatctcgcaagctgagggagggcgcggttgaaccggatagattcgtcgatcgagagagagagaaaaaaaaaacgtttatagcccaagtgatcagactaatcttgaggcagtagatgcataataaacaactacaatctcctaccaaatattcggtgctccctgcgatacatcgctcatcccaatgattagttgagattatagtgtcgataaggcagggctcacatgcttgcatgagcccggctgcctgcccggacatggccacgtaggtagggcgtaggtggaggatgcagagatggtttttttttttttaaaaaaaaccagctcttcagacaagcctgcctgcagctaggtgcaggcaagtccaagatttcgtctgatccgactcacgcgaggagcagcggatcgagtcgcaccatgcatatgcatgtggcctctggacaggtgtctacagcagcgcgtgtcgtgctcggccagtctcccggggctgcttagactgctcagacgtggatgctggagctgccagatgaacaatggcagagacaccctgccatgttctctgtctgcttttagctgcagcacacacgtctgtttttttctctccggacaccaaccaagacgtgagtgacgcgcttcatgttcacgcctccctccctcgtctctccatttcacatactgcagacacaaacagcaacggttttgacgcaccaaattctccgcgtgcacatgcaccaggccggcggaccaaaccaacgcagctgcttaagcaggcaaaagcatgagagtttcatatgcttctcctta

SEQ ID NO: 70145 - DNA, 414 bp, Zea Mays
ccggcgtgatgcaccggacggtccgtgatggggccgaattgttcggggttgtaccctggtggtccgaccatgtatggtgcgacctgagtattttgtgtgcgggcctgcatctggtcggacggtcccgtgaaatacatcggacggtccgcggtataaccggattgtctgagatgatgctcgaacggtccggtcacgtccagtagctgccgcgtgcctagtggttgtggctgtgatggtgacacgaaagtgtgcatcggcataccatatgatggctgggttaagggtgacccgtttatagccgatgtgtttgacgcgggtggctctgtattagactctcgcgatggaaagctaggagcagctgatttctcgtatgcatgtaaatgcattttaatagatttatctacatattgcttt

SEQ ID NO: 70146 - DNA, 1097 bp, Zea Mays
cgataattagggtctacctagattacgtccttaaaacacgcttaaaccctaaggacatcatcggagtacgtttcccgaggttaaggaatcaagagccatgcctcacccgaggccccccacgggggtcttaccaaaactttgcctcgcccgagcccgatctcagacgagccgagtgctcgggagaatctccatcctgaccgagttctcctcacctctgaacgatgatgtttggctcgcttgagcctgccttgggcgagcaggataatctcaaggtaaggccttccaaagaccactaggggacaaccacattcaatgcgcgtacctaatccgctcaagcctgcctgcatacagtgacaagaagaccacggtcttgtcaaagtttcaccaactatgattatacgtgcgaccactgtacatgcacgccgtctgccatcccctaacggggcatgtaatacgataggggcgtagaccagccctcgggcacaaactccgtctcgcccgatggaggactcatcctcaggacaaactctgtctcgcccgagcctagcctcggctacctgctccctcgtgaatcccgcgtgaggccactctttcaactgtggcacacgtctttgaatcttaggacgggatcagtcacgacctcgggcggacttccacctcaccgagcctgattctgccctcgatatctgtgatagaggacacccccgacatcatcaagatacggtggagctgacgcaccccttaagaagccttttcccatgcttagcaatgtgtcaaccactacggtatggtcaaaccctcgccagtggggctcaggtacatgatcgtgcccttggcctcaccctcggctctcagcaggcacaagtcaacaacaaagtacaagaccataccaccggccataccatctataggatacaaaaacacctcttcacagtacgaagccaactccaagacctccaagcactccaggtagctccccctgagcccataaataggatactctacgacttcaggaggggcaggcgaaccattcacgagttctcctccgcttggtattggcacttgcctcaatcatcctcagagacttgggatccttc

SEQ ID NO: 70147 - DNA, 577 bp, Zea Mays
catacatccaactgcctcttatccaagacctgatatcaactaagatccagcggctccatgtacatcaacgctccaagttctaagcaaaattgcttgatcatgactcagaggttggcaagatagttgtcattatcaagcaatgtctcaataagattggtaggaagcagtaccagctagctgatacatttggagagttgattgacgaggttctccaggctgagatatatagttcaaacgttgaagatcacatgacacaaccttgcagtgcatctgtaccagatcagttttcattttcatcacatatgtatacttcatgcaaacatatgatgcactaattcatagttttcaatgtgtagaaccagccacacaatctagtgatcaatttgtatctgaaccactgatgacacccacccagatggattctgtcggtaccctgaaactagggtaccccttactgctgtataaagacgtagtacccatgcggctatttttagtcgcgtagtaaaagagctgtatgtgggaccaggccatgactcgccctagtctcgggcgactactctgggctagcaacaacgtc

SEQ ID NO: 70148 - DNA, 401 bp, Zea Mays
tagacaacaactcttgaagtactcttatgattgcaccacctttgccatctaccataagagtaataggcctcttttgtctaccttcacgaaatcttctttggtcctctaaagacttaggtaccgctatatcttcattatcattatatagctctaagaaggttaccttcaatgctataatcagccttccgtgctgcaagtatttcaaagatatggtgcactgctctagggatgacaccgacagtatcctgtagtagttcactaacctgacacgttaggtaagacaaattattcaacaattacaaagaacttcctgtcttcatcatagatgatgggcagatattatgggtaccttctgtctcatctctccctctatggtatttgcctttccggttccagtctgc

SEQ ID NO: 70149 - DNA, 625 bp, Zea Mays
cggatgacaaaactgcagcagaacgcatcgcaaggcaatcagctcactacaccctcattggggaggcactgtacagaaggggcgcaacaggagtcctcatgaagtgcattctttcagctactgggaagcaactgttagatgaggtccatgccggacagtgcaggatacacacaacatccaggactctggttgggaaggtctttaggtctggtttctactggccgatagcaaaaagtgatgcagccgagttagttcagaggtgtgaagcttgccaattcttgtcaaagcagcagcatttaccagcacagcaactgcataccatacccgtaacatggccgtttgcgtgttggggactagacatgattggacccttcaagaaagctcagggaggatacactcacgtgctagttgccattaacaaattcactaaatggatagagtacaaacccattgcttctctgatttcagctaaggcagtggaattcatacaagatataatattcaggttcagaataccgaatagcattataactgacttgggatccaacttcactagctcggaattctttgatttctgcgaacaaagaagcatccagatcaaatatgcgtcagtagcacacccaag

SEQ ID NO: 70150 - DNA, 558 bp, Zea Mays
atgatctaatctagagtaagttacttaatgctggtacaaaagataaggccatacccctcatgcacttaaaactaaactagtgccttaaaccaactcagccacgtgcatgagatctaacccaaccaatagagtcatgatgaattacataatcggactatccaagtttttgaccaacatcatgtagtatatctcacctatatctaccttaaccatactccccactccgataatatacactgatgtcgaatcagtaagaccaagactggagaagaaaagatcaacatcaaatgaagcatggaaggataagattcaagctagatcttcaaaagaatcaagagccacaatcttggatggagtcttttcttatcctactctttcttacccaaacctataaatgctttaaagatatcttttatcctgcataataaagtggctatacccatgcttttctaatcacctgataatttgcgataaaaaaaagagaagagttttggtattaaaatcaattagaaactaacccatagacaacaaacaatttcttctacatcctcttacaaa

SEQ ID NO: 70151 - DNA, 446 bp, Zea Mays
cgtgatcctagcacataaggaagaaattcatgtaaagatagagtttgattccctgttagactcagttaccaccttcatcttgtaaccaacccggatacaaaatcttataatctgccacccctctttagagtatacaaggaggatcaaagaagctccatgaggatagatctcatagcagataatacaatcacagtcacaaatagaacgtagggtattatctcaccttgagagcccgaacctatataaatcttcatgtctcctatgcctttaccttcaactttcgattacgcaacctgtagaagtaaccttcttacacatttatttgatctcctttagtagagcttcgtgctggtaacgaattgaggaccccttgctacaaagtgtagtccaagagctacttaactaggataaaactgaatacaaggagacaaatgaggagaatggtg

SEQ ID NO: 70152 - DNA, 425 bp, Zea Mays
gccggatggagcaacgccggcgacggtctccgcctcgggtagcgcacgcgccgccgtctgcgcggggtcgaataggggattagtcggggccgttggatctggcgtttgtggctccgatcaaaagtcgctcacccgttcgggctgattgaatctagagcgttggcgctagatcggacggtccgagttgcatacccattcggattattgcagatctaatcgtagccactgattaacgatcgggcggttcaggatgcttggtaccccttggccgtgcacaatttgttaaagagtccctggatttataggatatcaacccgcgcttcacaactgtgtaaaagtaattcggtataggtccctgatttttataaagtgcaccctattctttccggaaattgtgtccgcagcccaggaagtgaatcaatgga

SEQ ID NO: 70153 - DNA, 497 bp, Zea Mays
acaaattttccgatctagcttgggattaaatcgtgcgattcatctcacaacctaatcgaccatttcctatacatgcgttttataagggtgtgtgtacatatatagagagcctgcagtacatggttcaagctagccttttcagtcgtcgcagcctcaatggacccagtggatgccatcgtagcgcatctcaaggcacgtacactagcggggtggctggcaacggatggctcatatatcgctgccacctcgagctccggcgccagtcgaggctcaatcatcaagacgtcgtacgtcgtattttcatgtgcgcctgcagagttctctcgaagtgttgctgtcaacgtgtcgccaccacgggcccatctactcaccaccatgatgtgggctccttggcttcgacgattgcacgtgaggttgtctccacgcccgtgcatgtggagctggcagcgccagtcatcatcctctcctacgatgaagatggggaggttgattggacg

SEQ ID NO: 70154 - DNA, 452 bp, Zea Mays
aaaatatctatcaagtcttctcttatctaaaaggattgactctctaaccaaccagatggtaaatacccgctcaggtgcaggacaggatcaaggtcaacactctggtcagcagttgccaccactgccacctaacccaacaatggaacagttcattgctgagcagatgcgttactacaaggcctcactgctttagtacaaaaactccagcagaaccaacaaaatcaacagaaccaacaccagaatgcaccccaagccagggacaagcatagggaattcatgagccaccaccctccaaccttctctcactcggttgatcccttgcacgcggatgactggcttaaggtaataagtaagaagttggatatcactcaacgcaccgatagggaaagagtcatgtatgcttctggaatacttgagggagcagcatctgactagtgggatgactacactgc

SEQ ID NO: 70155 - DNA, 782 bp, Zea Mays
agattccctttcatccaacattcatttcatcccgtctctcttcctggtgtcgtttttctttcttcctagaatctgcgtattgattttctccttccctttccagattgtggaataaactatatacgaaatcatttcttctctcttttgcatcaaatccatcccaaaaaaatctggttgcaaccacttcggtttcatgttttgcccgtagcattttttcatgatctttggttatgatttttatttaccacggatacccatcagcatatcacacacatatcgctcttttatttgggttttcagtgctttctatgcttttgaaatgatgatgaccattcaatttagcatcagataaaatggcatactggtatgatatttctttcgccatttttttataatttcttcttaaaagacccaaaatattttctctatattacctgagaacttattgtaacataatgtaaataaccttcggtaaggtgaaatggggaataactgaacaaggtctgactcagcaatctacctatagatggttagaacagtgttatacattttgtagaatgaattaggacagataatttttcaatctagttgtttcctcttggtactagactgtagtttctttgtccctccccaatcatgtgcgccttcctgttcttgatatgcattccttcccaagttgcagattgagcatgctgcttcggaagctgaaattgtgttcactgctttatactgaattttcacgttcttaagataagatgtatcagctatgcatctttgtaatc

SEQ ID NO: 70156 - DNA, 506 bp, Zea Mays
ccaatagagaccatgcatttgggccacatattatccgacggtggagcgacacagcgagtcagcgatatcatctccagtggtgatgacgagggtggcaaggggtagcaacatggtggcaacggggcggtggcagtagcactaggcataaaaccaaagcccaaatcccgaagcctgaaatatccgagaccatacatgtttaatccgaagcctggtactcgaataattcctatggttaacaaaatatctgattttaatttgggcctaatcgggtatcactctattgtatacaaactacccaaatgttgggcctgaatttttttttactggcagacctccaccagcacacagcgccacagcccagtatgccgcagcccacaggcccacgaccaagccaggtccagcgctcgtcgggccgtcggagtgagatagctgtgtgctaccttgaacatgaacccagaaccctagccagtatccgccatgaacatgaaccccattgccatgaacat

SEQ ID NO: 70157 - DNA, 802 bp, Zea Mays
gtcgccctgggttgaatcctagccgcgtatggaggccgttgccgagcatctggtgccgagcagaacagacattggtgtagggacagaaatccgccgccaggggcgtctgcctacaacgatgctcggggcacgatagttggttaggggagattgtcatggcgctctagacgcgcgtgcattggtcctagggtcggatgactgaccggggtggcggggtgccgctgttgttcgctggaagaactgctccactaggaatcatcctgctcgtgtgggcagcctcattggcacattcagctccagtatggctgtctcctgtcgcttcactgtctcctcgccatgttttgagccgttcgcattggattccagggcctggtatcgggggaatcgggtgctcgccggcgcggcatcaccgcacgaccagcgcgccaccgcgactctgctcgagaggaagaagagggggtaccgtccgattgatcattaacggttgagattagacataagggcggagttgcgtgaagccgttgatcagctaacgtgcggtagagattaaatagttaacgtacctctttgccacttgaatccggtgcgtggatcgttgatcgaacgactcagattaagtcgagcccgtagccatagatcctcgacccaacaaccacgattacattatggataccgattcacttaaaacaattggacctaatcgtgaccatcgaagttttatcgggcgggtgatatggatccatacccttcagccgagcaggattacaaataaaccccagagttcttaacaaataaacccgct

SEQ ID NO: 70158 - DNA, 660 bp, Zea Mays
tgagttccaagtgaagatctggtctggtttgtgagatatggtggcgccaagtcaggtctatcggcattgttcaccctgagacaaaacacatgtcaaaccatgtcaaatggttttggtttgggttcaaaattttctagggtgtgccttgggtaatttggcgcccttttgtcaattggaccatgttgatttggcgtctgcaactaagtgaacacagggggtctttagaagagggctgaaatttgacttagagaaaaagaggttgttcttgagtgctttccacttgggtgattaatttgaggtttttgtgggacctttttgggataacttccttactatttcttgtaggtatttctatgtgctataacttttgtaaaaggtttaggtcatgatttggtaatttacatagctctcccactaatccaatcttggggctctaatgcctcaaggagggggtctagggttttgagtatctttctcaattagagatgtatgaaaaggctaggatattccttcttgtatgatcaacacttgattaagacattgcttctcaattttggtgcttcattttcaaactaaatcacatgtgataataggtcacaggtgaatgtgtttggccagggcattgagtaacacatggcgtgttgcagccctcccctctta

SEQ ID NO: 70159 - DNA, 528 bp, Zea Mays
cgggggtgccacgtcgccacacgttcctaggcctgctccctgcctaggcagtggtctggtgccaatgatgtgtggctaggggcacctgacggaagccgtcgggtggcacctaatgtaagcctttgacatggggcctgccagcattaagtgtggacgggatgcacacttgctcgtgctagtgtcaagtggcgtgcaccccacattaaattcatgcaatgtgcttagtctgcaacgcatgggctacactgttagtcacgtgttaccaaggcaagaccattgactcattgcaccacctgggtgaccttcattatggcctctactattcctcatgatttgccgaggcatgatgagataggtggaggagacaagatgactacatccatacactcctatgcatgacatggtattaggctacgtcgcaatctacgccaaggcctatgcctgtgttccaattagacgaggcaagaggataggatgccaacagcctgcacgacgatcaagaggagatacacgcctagaagatctagc

SEQ ID NO: 70160 - DNA, 623 bp, Zea Mays
catgaacttcaattcgctgcaacctactcgaagggtctttcattccactgcgatcagtcttcgagtagagtaagaatttttagttttaagtgttagtttttatttgcccattcaccccctctaggcgacatctagatcctgttcctggacaaaaggaactttcaggagtcggctcctccttgtccccatgggtgagccacttagggtgcgccccgaaggagcgggggcaaagcagctccccattgaccaagccctgcaggtcctcgtcggtcacagaggagaagggccatggttcacgaggagcaaggatgttgagcttctcagcgatgacaaaggggggaggcggcgaagaagaggtgcgtgggctctttttcgctcccctgtctcggtgcacgactcttggctacggccgaaagaagcagaggcagctagggctaggaaggcaaaggcaaggtaagaacatagaaggattccctcccagacatatatatagggaccgatggacccactaaggtcagggccgagtcctcccacattgaaagatcaaatccagaaatagattttatctcttcaaattccacgcgcaggcgcaccgcaatggatagctcacgggctattacgtc

SEQ ID NO: 70161 - DNA, 363 bp, Zea Mays
gggcgaggtgcataaggcttgcacgacggcggttgggaacgcatgcgagcgaggatggcaggcacgataaggttggtgcatgcgtcgaatgcgggctgccgatggtggagggcacgataaggctgttgggtgagcgtaaaatgcgtagacaacaggcagacgaggatggcggtcacgacatgcacgaatgcggttggagcagacgcggcaagaacagagcacgacatggatttcgggaggccatggttggagtgcctgtgggcgaggatggcggctgttgttggagcgcccgcggttacgggtgggtttatggcgagcagaggggttgcgagatatgtggagcgctcgagtcggttgcaagct

SEQ ID NO: 70162 - DNA, 445 bp, Zea Mays
cggaattggacaagttcgtggtggttttcatcgatgatattctggtgtactcaaagaacgaagaagaacatgtcgggcatttgcatgtagtgcttcaacgtctgcgagagcaccacctttatgccaagttatccaagtgtgatttttggctaaaggaaatcaaattcttgggtcacactatctctcaggctggaatagctgttgatcctgataaagtacaagaggtgatgaattggaggccaccaacaactgttcgccagattcggagttttctgggattagctggttattaccgaagatttattccggacttctctcgaattgcgaagcctattactgagttgctgaagaaagaggtcaaatttgtgtggagtcagaagtgcgaagatgccttccatgcattaaggcagcatctgaccacagcaccagtattggcacaacccga

SEQ ID NO: 70163 - DNA, 451 bp, Zea Mays
gacggtgctggagaaggagaaagaggacctcgaccgctagctcaatgatgagaaggaagatgcggagaatgcccacgcgaaggcccaagctgcccaccagcgtgtcgctgacctagagcttgaggtgaggaacatgcgcggctaccgcgagaagatgaagtcggccacccgtgctagggtggatcgggcgcacacactttttgtggatgcgtaccacgaccttggtgcgcagactacccccttcgacaagtcaggggaggaggtgggtacccgtttccttgggtggttgcaagaggagttagagtcactcccgtccatcgtgacaggccttatgacctatgcgtcgcttgtgacctgtgagggggctgcaaatgccttgtcccacaagggatgtaggcacttcaaggccttcgatcgaggcaacgaagacttcaatgctggtgtattccag

SEQ ID NO: 70164 - DNA, 454 bp, Zea Mays
gcgatatgagaacttgccagctatgcacaaaaaaatgaggcaatgcattagtggattaacaagaactcaacatggaggacatcggaaatgggtgttggcagttaacacatgtgcaaaacaatatcaacataaggttatttactgaaggcagaagagcaccaatctatccgagcactacaggtgcaagacaagcgtgcaacagaggctcaaaaattgataaaaacttgcaaacgtataatttaatgcaagtataagccactatatgtgaagtgatgcaaaataattatgtaaacatagatatgaatacaacaaatcaaggtcacacaacaaagtgtacttagcataggccaatgaataaaggtaaagaaacaaccttttcaatcagatccagcatatcctgattgtcaatgaactcaatgtagctccaatcaatatcctcgcttttgtacttctc

SEQ ID NO: 70165 - DNA, 433 bp, Zea Mays
tagcaatccaaacccctctccggtgatctccctcaccggtggtcatgctccggtggatttgctctagctcctaatcggccgtggttcccctatggtgagcagctctacctccctctcctctctgtgtggttcacagttcactgaagcctgcccaccccttgatttcccaattcaaattcttgtcaaagctatgtgaatcaagtgcatgaatgagtccctagtcctctcttggatcctcctgcaggttttgagctccctttgggagggtttaaccacctcaaataggcatttctcaagaaccctaattcaccgcacgccacatgctcggtgaaatgtccacaccactcaaaattgctccgattaaacccaaacttttcaggaaccttcacaacaccttcagtaatatattcacgcaatttcacgccaatccgat

SEQ ID NO: 70166 - DNA, 779 bp, Zea Mays
ctttagagatcaacattctatctttaggggttgaggattcattgggtgggtgtagctcccgagctttgagtggattactgaaaataatccactcaaaggtcttcatctcatgctttcagaagttattatcttatcttcgtctcgtgccttagaactcaacattatatcatcagcttatgctttagagatcagcatgttgtcttcgtttcctgttttagagaataacaacgtgatctgcccatgtcctgttaggtttgaaatttatttgatcggcgacagattagacgtctggtagatggctcttggctggtcttcattttgctttgtgcttcaatgcttctattgacttgtacttcagtagctatatttggctttcctccgatctccatcgatatctttcttctgtcttgatacattcattgcgtgtactgtatggatgtgactgcttgggaaaatctattgaaaattcatggacgtcccctccccaatgggtgtaaccaagggacgtcttggtacgccgagcgtttagctgactgtcctcgagtagtagcttgacatgaccgtggggtgtaatcatatcgcccaagcagttgacctcagtccaaatggtgtcatgttacgtgaaacgacgcctgctgcctgacttgcttccagacgatttgaattgcctattgaatatttgcgactgttcgatgaccgtggtaggagatgagcggttgcttccggcctctataaatagactgcctgcctcgctggtgtcttcacatatctcctggccg

SEQ ID NO: 70167 - DNA, 388 bp, Zea Mays
attttcgagcaaacgctttatcactggagattagcttcgtcttagaaaaagcgtagacacaaatggccagagttcgatccactgctagggtgtctcttgaggaggacgaagccgatgctgccgaaatagtgcccatatcagaagtaatgaagcgatcaggtctagttgtgccaagggaagttactaacgaaggtgcttccaatgccgaagctggacaaactgtggttgagggtgagagtaataatgaaagcgaagaggataacaacattctgaacccggcaaagcctagtcatcttgaatttgaaaaatctactgtaacagaagatgacatgactatgatgaaaaaactgggttatttcggggaatctgagagcaagcttgttcgatt

SEQ ID NO: 70168 - DNA, 589 bp, Zea Mays
agaaacacctttgcaaaagtgggtttatgccgaactaccttgtatggtactggcatggagagtctattggacatgttgacgcaaaggtggaacttgatgatgatcatgataggatggacgacatgttgcatgatcttggtagggagtttgaaatgaacgctgaggagccggggcagcttccatgcgatgctcaggaattcttccgactactcgccgcgggagaagagagactgcacaagcacactcaaatgttagttcttgggactctcacaagactaatggcgataaagtcgaagcacaacatttcaaacagtggttacaacgacatcgtccaactgatgggcaaggttctcctggagagtcataagttgccaaagaatatgtacttcgcaaagaagatgttgggtggtcttgggatgacatatgagaagatcgacgtgcgtcccaacagttgcatgctattctttgaggaggatgacaagctagaccgttgtaggcattgcgaagcttctagatatgtcgaggtgacaaatgatgagggtgaattggtagttatgaaggtcgcagctaagcaacttcgtcggttgcc

SEQ ID NO: 70169 - DNA, 570 bp, Zea Mays
gtatcacttctagaatatctgaaaggaagtgtgatgtaatgtcgtcagtaacttgctgctgcaagcattctcacttggctgatctaaatcatctaatttcctccccttctcctaggatgtggagtacgagcacattccatatcttgtaggggtatctccactctctatgctgcattcgtcacacaaatatgcgactttaacacttcttttatatcgataaaggcatctgataaattatttgttaagttttgctaaagtattatccgttgaactttgagtttagtttgtctagtacatgggtcaagtgattggatgctactggcactccattcagtttccctaatgttaggaaatgatccgcatcaaagatgctatcagcatatcgagtcatgaacatatgctcagttttaggctctaaaatatttgattatgaacgaagattcatgaccaacatatatccccaacttcttgtgggtcccatggatgtacgctagagtggtgatatcggtacatatacaacacaactgaatttatgcacatgggaaaccaaccgatgttgaccacacgtta

SEQ ID NO: 70170 - DNA, 686 bp, Zea Mays
ccagggcgagctccgagaacgccgatgaaattctggacgtcgagaacggtggatcaaggacgagcgccggggatctcacgcgtgtggctgacggggagatgagacgagcgcgtgggatgaagctcggcgccaagttgctgctgtggagggtttgacaccagcgtggacagagaattttgtcaagcacaaggcaaacacaggcttaaagcttgaaggcagcaaggttctctgaccacgcacttgaacgcagggataaaggaacatgcagtggctatgtccggaatcacgctgagtaggggtcttgaggtatcaacagctgcatgagtatggttacgtggcttcacacacagactccatgccggagcacaaacacagctagtcatcacttggtcggattccctctgccagggataagcagataacgtttcaccgtggataggcaccaactgacccagtgcatggatatttactacagagacttggccttctcaatttttttgctgcccagtccaactccatctccaactgatgcgcaagtggaacacagcagggatataaagatctttccttaccctccatgccaatgtttatccacttactcaaagtgtccaaaacaacaagagcacacagtggttcagacctatcttatttctctacaaccaaaattttaaaaccccaactaaacc

SEQ ID NO: 70171 - DNA, 399 bp, Zea Mays
gaaaaagatccaaaaataacattaagttatatatacgtctaaagttaaatttgtttcgaaaaagatctaaattgcaaaaaataaaaaaaaattcggacgtcttgttcacgcctcaacgctgatggaagggttcgggaatctagatctgctacacgcagtttctcaataatttgaacatccacccgaatgccgacgacgcccaccgcaccaccccaaagcccacaggaggaagacctagctagacacctgacctagggtttcccttccttggtctccttctccagggccgggagggaacccgtccatctctgagagccgagatcgctccatctcccccacatgccgctccgggagggagccaagcgtgtctccagcgcgcgccactatgcccccgccgcg

SEQ ID NO: 70172 - DNA, 680 bp, Zea Mays
tgagagcatcccgattctcccatgttgctaacgaagcatccaaacctgaccagagaaccagtacttgtgccacaaaagagcctccccgctgcaccaccatacgactctgaagaatttgaattggaatctgaaaaatattagcatcatctggcagctgaggaatcagtttatgttctctgctcaacacagtcttcatttgagaaacatgaaagactggatgcacattggaactgtcaggtaactgtaatttgtatgcaacatcaccaatgcgttgtagcactgtgtaaggtccaaaaaatttgaacgccaatttctgattgggtcgagttgcgacagacgactgaacatacggctggagcttcaaatacagctcgacacacttcggtggttgatcgggtagcttcactcaaaagttatcgaagagcaaggggcttatgtgatcgatgtgcagagaaatggtctcatggtcacagatgtgctactacggtgcaattgcatgcaattgaggaagtctgggaactattgggttcagaagagataactgaagaagtttttgaacctgaacagcaaataatgatggttttatctatggctgcttgggtcggtcaggatactcctagcacattttggatgcagggaatgttgcagaatcaggaattgttggtgttaattgattctgg

SEQ ID NO: 70173 - DNA, 522 bp, Zea Mays
gctcaactattccatcaactggacgtgatgtcgcaccttattcatcgtcagctcgaacagcagccccaccttctagcgacaagcctcgtgacaaccctgcaaattgagcagcaaagagaacgcaaaaacttgctgcaaccacttcatcggtggcatccacaagtagaacaagagatgttcagtgccaccgctgcaagggatttggacatgtcatgcgtgactgcccaagcaagcgtgttttggtggtcaaagttgatggtgaatactcatctactagtgaactagatgaagatatacttgcattgcttgcggctgaccatgcaggaagtgagggctacttggaagaacatattaatgcagctgaagccgaccgctctgagagcctaattgtgcagcatgtgctgagcgcacaaatggagaaagcggagcaaaatcagcggcacacattgttccaaacaaagtgtttcatcaaagagcgttcatgtcgagtgatcatcgatggaggtagctgcaacaacttgg

SEQ ID NO: 70174 - DNA, 1087 bp, Zea Mays
acattagtaaatgtcataccgaccttaggtaccaatcgttgatctatactatcatcctattcaattaatggagttgtcatgcagtgcacatattcaaaataatattacagcatgctaaatttctatgacttcataatttactgtataacaaatacatgggtattcgatgaacttacatggctttggagaatgtgtggtgtgtcctgctcatgatcaccaattgtcctcatgggtatccgttgagttgctccaaccaaacttggatgaactgtgttgttgtcttcaaggattcctagcgccagtaacgcagccgggggagttacatcatgccgaccatctgacctacaaggtaatgtcgatgttgtattctctccacactgcactggtccgctagccgtcgccatggtgtatgccctaaccctcctaggtcaatgaactaaagcggcggctgtgtgtagccctgttttattttttggagttatgctcctggattggccaaaaccgtcctggccaatattcatggtctgttcaaaatatcctgcatgatttgcatgtcccgagatttacgtgtcccgaccaatttacgattacctgcctattctgttacagcaacataaactcctcacccccacgtgcgaccccaccacgaaaccatgatcccagtagacctgctcgccacccacaccacgatatgcatgcgtcagatcgttatgcagttgttatcggcaatttaaacaagcataaatgtccaaccacatcctgctcgcgtcccgacataccaatatgcccatttacgcacccactaacggtaaaatacgtatacataaacgtgtgaatcacgcctgaccccctattccctattacgcatccgtttcaggcaaattacttatgcataaccattgaactccacacacccgaccccaccatgtcttggtgctccgcgacatcgcaccgcgcccgcagacctaacttgggcggggctctctctagcctcgtccctatatatatagtttatatattatgagcactgggcttccaataatagaggaagcccaggctagtcaatatgcacatttggttgaaccag

SEQ ID NO: 70175 - DNA, 602 bp, Zea Mays
ccagctcgctcgcgctgcctgctcgtctaggcgcgtagctcggcacggcatgacttggtcagccgacatgacccagctcacgacaacccctgcgcagagacatgtagcgttgttcgcgtgacgacacgcatattttagttctgtttttatgagtagggtcgcgcggcgacgccctgcaccgcttaaatggctagcgctagttggtttacgtcagaaagcgacatgttaactaagcgcaaagctaattaaggctagataacaactataactgcacctatattaaatatctgttagtatgactacatgaaatgtagtggctaagttcgttctttctcttaacaggaacatagcaagtcgtcaatgtagtaagagttatgattctattagcgcatgtgactaatccttattattggaacgaagcggaactagagcacgtaatggttagttatgcgtctacccgtaatacgccttgagtaaggctttagccactgcgagacctttcttctctaatcttggcatatgcaatatcgtatgtggtactctatgcatatttactctatttgttctcttgtaatgatgtattgtttgtttcctaattcgaa

SEQ ID NO: 70176 - DNA, 403 bp, Zea Mays
gcgtaattcttttgatgcatttagatctgaatttaagcaagatataagcaacaacatgcctagacagattcgatctatagttcaatagatacaagaagagagtcagggtaaacgtgcagcaaattcgctagtcacacctagcttcggaatagcagctgcacccaacactatagatgcatcgactaaggatacgagtaggagtgcaatagcaaattataatctgcagcagccatattaccaaagtgtggcttatggaccatctatccatcccataggaaacggagtgccgcaaggatctaccccaaacatgcatgtggcaggggcgcagggagcattgtgttcagccccttttgtgacacctatgacttatgatggtgaagcatttgaaaatgttagggagcaa

SEQ ID NO: 70177 - DNA, 1266 bp, Zea Mays
cctccctggtcacggcacgctcgccgttcatcccggacgaggtctgtaccggctatggccggcgataactgcccggactaaccatcggggaggcttcactgacctaagatggccccggaacacacattaatttgacccgaacgcactgagaatggcatgtccacatgcacggcggacaccgagcttgggagcacatgttcccgccaaaccatggtcgattagagcgaacggacgccaccatgagctttgcaagcacgcagaggcatggaaacaacactttaattggataggaactcactagagtggcccagccacgggcgggctgttctttgcgatgcggtggaccaatttggggggaaacggcgtcgcggtggctctggttgaaattggggttggggattgaggctactcggccgtaagaagctgtgctttcaccgtgcgcaaatgatttgggagaaggtggagggggcggtgcgaatttgacttcgatctagtcactgtgtttgcgatgatcatccttcgccgtgaacccaatggctatttatagccgtggcggtccggcgatcacctcgcggctgaggatagtatcgcaatcgcatgtcgaccacgtcggtagaaggtacagtgagggagaactatggcatgagcgccaccgcggtggaattcactgagtcacggcggccgccgatgagtaactccggctgggccagggagatggcgccacgtacgggttatccctccccaacgttatccacaccataccgcccacgaatcaggacggcggtggaactaattttggcgcagagaggtcaccggcggtgagcaagccgcgctggcaacctgatccacattggctactgtaccatcagtccccattcagtcgcctgacaaagcattttgcaggggaattttctcccagatttctatggcaacaggtccaaatttctgcagcaatgttgtagtgctataaaccagctacaactttgctatatggtgttgtcacaaaaaggcagcagatcatgcatgaacttggtcttgaagttgctgtcagtccactgtcagtctgattttcagacttaatcagcctgacagcctgacttcaggcttgattatctctcatattttcttaacaacaatgctcacactcttaagcaaagttgttctcctttgattgctctacaaatttggtgtggtgacctagggcaaagaccctatattttaaaagttgcaaggctccaaagttgagctcatcaatctaaaattcag

SEQ ID NO: 70178 - DNA, 613 bp, Zea Mays
gctactcgctacatatagatgtccttgatatgtttgagttactggtgtgggggaatctgtataaaagtcatgttatatattctttgccctgctctactgtcatccggaactgcagtcctttgtgtcacaaaagaaacacggcaccatgatactaaattgcttgctttaaactctaggcgtattgcgaggccgatgaggatgggtcagacggttcctagtgaggtcaggatgcatgggaaggctgccatctgggtaaggagcgtggggagaggcgtgtgcctgtgctcctgaaatggtgcaggcggcgcagtggcacttgtgaatcctgtctgtccgccccaatctagtgcaaccgaatggataaggagatggtggaacttctgtaattttcagcaaaacaaagcaataggtgaaggtgttggctccctgaattggtgcgaaacccacccaaacaatgttttggccaccaccgaaggaaatgcatatcatttccactctgattccagcggcagtattcccattaggagtcatttcttacgattctgatgaaaaacggtactgaacggcccctaagtcccaatagaggaatattagaagtagtcaaaattacagc

SEQ ID NO: 70179 - DNA, 508 bp, Zea Mays
tggaccgaaccttctgaggcttccccatgtccgccatcttcccctcttcgcgtagcaccgtccggagcgatggttggaacattggagcgctggttcagcgatcgccggcgagtcctccaccgtgaggaggggcggtaccatcgctgcttggagtcgggtggggaaagatggcccctgaccgtagatctcataccggatgatcgtgattagatcgtagtgtacctcttcacgtaataaaatcgagaccgcagatctgctggcttttaggtttgttaacagcatagcgtctcgggggccgtggggtcgtgatccattggccgaggttggataccagttcatgaaaaaaaaatcagatctaatctgagctgtgcgtagtagattaggaggtcgggatttaatggtaccccttcggttatggagtagttgcaaaagagagctcaagtttttaggatctaacctgtcgtccacccagttccatggaaatcacggttaagccctcagatttcac

SEQ ID NO: 70180 - DNA, 343 bp, Zea Mays
ctacgggcatcgcctcccggccctcgtcgacatcaccctcgtctacggcgccatcgacaagggcgcaggtcagtcacgctcctcttcagcttcccgctgcttgtcccccatcctgaaccatcagcttggctagtgtgcttggatggtacgccgcctgcctaccacttccttcctggatttggggacggatcccacaactggctcctccacttggagggcggaagctggtgccgcaatttcgaatcatgtgctcgccgtaagaaaacaaatctcggttcctctgcccacatggatactcgtgctgaattcgtcggcatcctaagtgacgatcaatctcaaaatc

SEQ ID NO: 70181 - DNA, 564 bp, Zea Mays
aactcaccatttaggccctactgataattcattgcgaacgtcacattaaatctacgggctaactcaattgaaacactacatatgccattcacatttttagttttatcgtataacaaagcttaatctaatacatcatgggcactaacgatgcctaccattccacgttgcgaacacaaccaactacgacctaccaccaaacatttcaaccatagaggcgatcatctccataacgttctacacaaaatcatccctaccaattattatgcgcatagcatctagttaaccatattcgacacatacagtcttcgagcacccttcatataatctacaactaccgaatactaaacgatattgttaaatcatcacctattgctcgagaatcatcacgattaccacacatctatttatttatcaaacttgactcaaaacaacaaatcaacttaccacaaataacttagttgttgctattgtttgcatggcacgaagataaacacgccatcgagcgttggagaccaaagcggagtcggaggagcacattccacggaggggctgctgcggctgtcg

SEQ ID NO: 70182 - DNA, 415 bp, Zea Mays
aagtactccgccttccgaccgaagcggatttgaaagttggccgagccaacgtacagctgatcgcccccggagtcacccatccgctgaagaaatactgccatagcttccagtggggatcgatccccatgaacgtttcgcatagcgtgatgaagcaagctatgtgaaggacggtgtcggtaccacggaactagggtacccttcactactgtgtcaaaacgcagtacccgcgcggttatctgtaatcgcgccctaaggaactgagcagcccggtgccactggactgagcctgtcagctaaggccataggcctcggggcctgcccccgccctacgggcaggtccgatggtgccatgtgtccaggaaagccatatgctcagggacttcagcaacgagtcaggacccccatgggcgggttc

SEQ ID NO: 70183 - DNA, 708 bp, Zea Mays
cccgagatgtagccatagatgtcatccaagggatgaattggctgaccagatatcaagcaagccttagctgtgatgagaggattgtgagattagtgtccttgtctggagaagaagtgtcggtggagttggtcttgttcagaccaaggaaaggaagttatcaccagatcactacccatagtgaggaagtcaatccactagaagttatcagagtagtattataatttctggatgtgtttcctaaggacttaccaggcatgccaactgagataaaggttgaatttgccagagaacttatccctggcaccgtccctatttccaagagagcctatagagtgtccgaaccagaattggtgtaactcaagaagtagatagacgagttgttggagaaatgttacattagacccaacgcctcgccttgggttgccctagtgttgtttgtggagaagaaagatggtacaaagatgatgtgcatagattatagagctccgaatgaagtcactatcaagaacatgtaccccctgaccaaaactgaagatatgttcgatcaattgagaggagccagtgtgttctcgaagatagatctgaggtcaggttaccatcagctcaggatccagccttcggacataccaaagaccacatttatcaccatgtatggtctttatgagttcaccatcatgtcattcggtctaatgaatgcgccagttttct

SEQ ID NO: 70184 - DNA, 541 bp, Zea Mays
tgttatataagagatggtgatgcaaatgacatacttacacaatttcatcatagcatggcataacacatatcataggagatcatgatggataaagcttatggctaagaggatcataaaaaaactagctattacaataacgatcatcatcgcataatgtagttcatggtcctaggccatcatcacaagcacagataaatgtaaatgtaccagagttattacagaccatcattgttcattacataaataagtagttcagccccttgggctactaacccaacaactacccaacaacccttctcccctttttggcagcgagtaccaaaaaacaggagaagacacagccaacaaatcaccaagatggagaaggatcaaagaaccaagacactagattaacagcaaagttttcctccccaggcttagcaggaggaggagtgctacctgatggatccaggggaggataagaaggtgaggggccccagatcaccctggtggggaggcggggcaaactgatctctatcatcaaagaattcttcctcaacat

SEQ ID NO: 70185 - DNA, 952 bp, Zea Mays
gctgtttggttcacgttttacgctgaaatttgaccaagccaaaatccgtgcacgatcgaacgtgatcaattttcacgccgtaattttcagaccccattcgctgttacgaaacaggtctataatttacgtaaattttgtattcatttacgctgttttagctcacgttttacgccggaatctgccctagccagaacccgcgcacgattgggtgcacgcgatttccacgccgtaattttgggcttcgtttgttgttacaaaacatatatatgatttacgctaaatttcgtactcatttacgttgttttagctcacgttttacgctggaatccgcccgagcagaactcgcgaactgcggttgtaaattaaaatttatttccttctactaatgctcctcaaaccataactgtccctttatttacgcgattatgcagcacgtctttccttatatcaaaccggtcaagatttatataatgcatggtttatgctatcatgttacacatcattatgcagtcgttaatcgccgccaatatcacagatacgaacatggacgagcggctgtaaatgagaatttgtttcctcccgtaactgtgcctttatttacgcggacgtggagcacgtctttccttatctcaaaccggtggatatttaaatgttgcatagtttacgctatcatgttacacaacgttatgcagtcgtaaacggtgtacacatggtaatatttgttcccgtgattcgtggcccaaaagattccttctatgcatgatttatgcacatttctacatatatttatgcgtgcgtatatcgcctgtcacgtctcattcgggattcgtggctatcatatgcatggctgacgtatgctcgcgtacagtgggccaaccgcgacctggttggcgtcctggctggggcttggatcccccactaacgaaagcccagtacttccattacctcttat

SEQ ID NO: 70186 - DNA, 468 bp, Zea Mays
gggtaaaacccgttgggtattcgggtttcgggtacccattgccatctctaagtgctacccaccaacctaatattcagggcgccgaggttgactttcgaaagcatagccgaagcagaagctaccaggctagaagatatcgatgtgctggaggaagaatgattgaacacagtaattcagtcggctaggtaccagcagaccttgatgcgttatcatgacaaagctgtgcgacaccggtcctttgcagtgggagatttgatccttcgcggaattctaacaggggaaggacggcacaagctgtcaccactatgggatgggccattcatcgtatcagagatcacttggccgggatcataccgacttactcaaatggatggcacggaagtggggaatgcatggaacatagagcacctcagaaagttttatccctagcgaggcctcaaaaattctcgaagaaacattataccctgt

SEQ ID NO: 70187 - DNA, 789 bp, Zea Mays
ggaaagaagaattttgtctttctctgcagcttcgttcctcagtctgataacctccgactgaaggttgctaagggctatctggcaactttcatcctcagcatttttttgtgctctcaaagcgttgcttagaataaggccctgcaaaaagaagggagacaaagcatcagcacaagaataaaagacacaagaaataatctgtctataagtccatagcttccgtaccttcagcctattgtacgcaagactgtctgcgaggtcatccttcgacatggcagagaggccatcttcaagcttcggaagtcccatattttttgccatctcccggcaaatagatatttccttgttgtctgggagacagtatagaaaatcatcttcgtcggtgccattgtacaccaaggcccccttcggatactttggttcctaggtgtagtgtttggcttccgcaatttcctcttcagacaacctcttacccgaagcatgtcgtataataaagtcaagatcttcggaggatgcttcgggagtaggatatttaactatttcgggtgcgtcctttttctccagagccaaaccaacatctgaagttcctttagttctctgctcagtttcagcaggctctcctcagtgggcactgagggcctagcttcggtttcagcgcgagctgtagcagcttcggcaatcttctttgcaggggcaggagttaatgcccttgttgactccatgatagcgtccatcacgcttgccatcctcctcctcttgggagttattgcaggagcttttggtaccttcggc

SEQ ID NO: 70188 - DNA, 718 bp, Zea Mays
gatgtttgcgtagtgacgaggaagaaggaggcgaagaagagggagaaggagaggatttgtcacctacacatgaagaacagtcgagcaggcacgcaatgaagaggaagacgacgcgaggaagacgatggggctgctcttccgacgacgcgaggaagacgacgaggcggccccttagaccatgaaggcacaatgcatagagaggaaaacgcgtgggctgctcatgtgtgagaaggaagagggaaggggttcatggcaggggtgtacgattgtatagaaaggagagggtatgtatagaaaggagagggcgcgagaggtggttgtcaatttcacgatggctcttgtcctggccgagcgagagagacagctgcgcggcgagttgcacgagatagggttagacagagttagatgggtggtagacagggttagataaaattagacgaagacggtcagagtcggcccgtgggcccaagatgatgaggtggtcgccgaagggaaagacgaggatagaggaggatcgccgaagcgagcagcatgccgttcgcgagaagacgcggttcagtaatctcgcgaaaaggggcacgagatctggaataggttcgacgagaggaagaaatatatatatatatatatattatcgagttccaaaaattttatagttttcacaactaccacattttaggtatttaattaatattagaaaaactgaaattcatatttc

SEQ ID NO: 70189 - DNA, 679 bp, Zea Mays
cctggtttgattgaaatacaccttcaggtttggggacaagtttgtcgaaccagatgatgactggctgaagtgcattgaaaatactagcgatgagttacttggagcatattccaagtccgaagataatgcactatctgcggccttcgggagccgaaaaaagaaaagattaaatagggtttttgatgctattggatttgtgtaccctgactatcgctacccaccacgggggcagaaaagaaagggtgcaacttctggaaaggttgctgcttcggctgctccaagcgagcccgcgccgaagagtaaaaagttgaaggtccttacccactagccgcgttatattgaatcggccgtggtacctgagcttggcgagaagatttcctcagctgctgactcaaaggagcccattcctcctacgcagaaaactgaagaaccgactaccatgccgaaggcaccctcagccgagcaagcagaggcaaagactggtaaagataaggccgaagagccaaaaactgaaaaatgttagaaattttaagcccttcggcggaagtaacagtgtcgaagatacaaaaaggtgttgtggcaactcccaaaagaaaaagaatggcaagtgtactagatgtgctagaaacagtaaaggcttcaagttctactccagggaaaattgccaaggcttcgaaaa

SEQ ID NO: 70190 - DNA, 567 bp, Zea Mays
ctcatcgtttccatataacttccctcggtaataatttcttttacttcaaccattctgttggaaccttacctaccttacccgtgattgttttctgcatttcgtcatttcacgagtcttgccttaactcaatcatttgtcatgccttttgttattatcaccttcaccttagacacctctatatcttacttgatgcttgtctcatacctgccctttaaaatcacctctcttccgtcttattctgagagctatactttacctatctttaccttggtcgtatgctcttctttggcttgcgagtttgtgacttcgtcctttgttgtgcttttgtttgttattgcccccatctatcccatctctcgatcttaccttggtgattaccctatgcccgttctctgaaatctccaatccctatcccaattggagagaggtgttttgcttatctcgcccttggcaatgtcctcttcttcaccgcatgcaggccttgacgtaactccattccttgtgtactcataccactagctcttcagttgccttcatcttttctctcatacccttgtcagtcatcgc

SEQ ID NO: 70191 - DNA, 667 bp, Zea Mays
cctccaaaatcgcctccaatggaagctggctgcgagcatacagttcactgtcgcggggaagatgggtattttataacagacagttcactggcggttggtttaaaaaaccgccagtgaaaatgtgtttccactggcggttcctaagtcgggtccaccttgttttttttactggcgcgtgataactgaaaccgccagtgataatttatgggtgccgcaggctttgagctcttttctactagtgcatggaattggcgcattgacattattatggattttactaattgacacactgattagaaaacatgtgatacaatattgatttttcctattatacaaaaaaatgtatatatttcacctattacctcgctcctatgttatagatgatcataacgcctttgtcaaaataaatgactgctcatagttactggggagtatatatctcagcgcagaggccttcaaattctcaatagcaacagcgcagcgtcaagcatgcgtcgtatttttaagtggcatcagtattacataatcattgatgcttgggatacaatcaaactacacacacaatcaaggattgcaatgtatcaataacaaattacatgtagtaagtagtaaccactataagtacgtagtagttcaagtgttcaacatcatccaagccaacaaagcg

SEQ ID NO: 70192 - DNA, 588 bp, Zea Mays
cgccgggcgagcagggctaccccgcacaggagcatccgcaacggaccacttttcccgcgagaccccaggcggccgcgacaacgatcgagaagagaacgtgccgaggctgcatcgggtgccggcgtggagtatgtggcaacggcggagaggagggggaaagggactcgacgaggctgtgtatagactccaagagcacgggatgcgcggtgtttattaataaacagggtgatgaccaaatcttaacaacttcccctggaatcccaacgaatccaacggatatggcggcaatacaggccactggcagcatgcaagccacccatggcggaagaagagggcccagtcccaggagccccacctgattagccggctgtgaaattggcaacgttggtttctcgcggccggtatacgtataatacttatacggctgtgttaatttgcatgcttatgtcatgctaatgtatggtgacaaaggttatggcaaatctctactattacttaagacattagtgtagacgtccacatttttttggtgcacggttctgccatccgtcgccctctctcctctcttgcgcccccgctctctcgtcc

SEQ ID NO: 70193 - DNA, 597 bp, Zea Mays
cgacatgcccatgggcctccatgcgaagacatcgcagtcggcctagaggaagttgatgagcgtgccttcctatttgttggagagtgtcgccccgatgcaaacctgcttagaccggtcagcagtgtcgatggggacttcctttgtgtcctcatcagacttgaaggtgtcaatgttgactttgggagcatctggggcatctagggcacgctcttctggtgctcagccagctccttggcggctatcatgatgtcgcgaactcgtagttggcacgctcaaaggtgtatgctgctttgaaagagtcgcttgcggtgatgatcccacgtaggccaggcatatccatcttgaggtaggtgtagatgggaataaccatgaacttgatgtagcatggcctcccaaggatggcgttgtaggaccctgggaagtccaccacctcgaaatgtagttgctttatacaaaagtttgagggtcatcgaatgtgacgggaagtttgatctgcccgaggggataggcttgttgcccaggtatgatttcgtggaacggcaccgggctggggcgcaactcggtgcgtgcaatccctagggtgtcgaacgtctcaac

SEQ ID NO: 70194 - DNA, 780 bp, Zea Mays
cgtttgagctgggggcggtggtgggtgaacatgtttgttttgcccacggcgggatctagctaccatctgaaaataggaattttttgatgttacttaagcccaatatttcaagtagtgacttcatatcatgaggaaataacgacacaaaattatattttccgggttacaacatattaggagatccaccctatagtctagttcaatagttggtgccaaaagctaagcttatgtggtattcccatcctcctaacatgtttaattttgacccatctaaccctgagtagtagaggcagcactgaccgcaggtgtagggggcactctggagtaagccgtgcctagacttgaagctgactcaatctcctcgagatcctcctccttctcgatgtttccatctacctccattgcttggttcatgtcctggtggtgcatttctagatgagcattggcctcatccagctcctcttgcacgtcaaggagctgattttccaggacttcaatggtgttgtcccggatttccacctgctgctccaactcttgggtgaagttgctcatttgctcaatctggagatccttctccaccaactctgaagatagattgactacgaagaccaccctatcatcaagggtagtctttgtagtctgagcgagcccagtgagatgcatcatagcatcgctttacagggtctgctggtggtacagtgcactcatgccctagatgatgatcctcccaacctggtcggggtgcatggcccacacatccttggcatggcgcactctgtc

SEQ ID NO: 70195 - DNA, 667 bp, Zea Mays
atggcaatgaaaaaggtattcattgatgtgttttccataacgtgcatgatactctctagtttgttagtatttcaacactaacatcttggttgaagcctgaggccaaaggatcttcagttaagttggttatatggtataaatagcattcgatcgttcttacatgggttctagtggataagggttcggaggttttctccacctgcttaggcattatttcggtactctagtattcacttaaatccacatatattgtggtaggttggggagtaagttaaactaatttataccagaatctgcttcaaagcatgtggattggggttaatattagaattctcaaacaaagccttaaaaagttattcttagtataatgctctcgaggttgccttactcccatagatcaagttttttaagactagaacatcaccccacattcgaatagtgtgaccatcttcaatgattgctttggaaattattcttaaggtattcaggttttccatcacttctttccaccagaaggaccctacctttttattacaaggaacctttccagacttgtagtggttgttctagatcaggctcacccaaggcatatcaagcctgttgaagaatttatgcaaaattttcatcaacaaagcttcattgttagttgacagctaaaggattccca

SEQ ID NO: 70196 - DNA, 484 bp, Zea Mays
cggtcaccccggtgccgaatcccacttcccggtcacgggtacgtggaatcactaaccatccccatcatttgccttctctcctcgcagtagtggtccatgtgattttgatttgtgtgggttttcacctcatcaaatgggtagtctcctgaagttgaacttccctatcttcgatggaactaaccctaaactctggcaaaagtagtgtgagaactactttgagatgtatggtactgaggaaatcatgtaggtaaaagttgccatgatgcattttgatggggttgctggacgctggctgcagtccattgaaccccggatttcctatatgtcttggcgatagttttgtcacgctatacacgagagatttggccgtgagcaacacgaattggtgattcgtaaattgtttgacattaagcaaacaaccactgtccaggattatgtagatcgcttttctgaactagttgacttacttgttacatatgagcac

SEQ ID NO: 70197 - DNA, 384 bp, Zea Mays
aagcgtttgacgaaattttaaatgatcgaggagatttctgtgccttcgctggtgcacaagggaccacggcgatcttagagaaagctggttgcgatcatgccaaggctgtagttcggccatgatttgttttctcagcggaggatattaaaaacccttcggtcgaagcttctgcgctaggcaggaaattttactccgaggtgtggatgaagggcggtcgtcagatagctaatgaagctattaaaaagattgaaaaaggatctcatgatgctcaagaagaagccaaacaagctgaagaagctgctgagcgtgcaaggcttataggtaccactactgaggtttagcttcgaaattcgttttcagcttcggaattaataaatattttct

SEQ ID NO: 70198 - DNA, 340 bp, Zea Mays
cattccacatggtgcagactggatccaatgtatacaatcatgacacacttctctgtgccgtgctcgacgaattcacgaccatcatactctggctggctcctgatttcgaggcgaactatgcatgctctcagcaacttggggaaaaccatcttcattctggcaaaagttggtttggcagcgaacctccatctgacttctgagagaaggaaagggggaaaacatttttgaaatggagggatgagagcaagaactttttttaagaaaatagttttgactcaaaaacttttggatcaagcctaagggttacgtcctgcggccaacctaacagctccgataccac

SEQ ID NO: 70199 - DNA, 690 bp, Zea Mays
gaggtttttaacgaggcggagtcatgtaatatacaagagaaaaatcccccgcaaaatccacgtcgaaacaagaccgcacagacggtcttcgacattcgactaatacaaagtcaccgcgaggtctagcggcagccgccctcgcgtgcgacaactccgcgcagaagtcgcctaagggtgcagccggagtagcacaacaagtgcgaaaaatcgaagtcttccacgaagactatccgcgcagaagtcgcctaagggtgcagccggactagcacaacaagtgcgaaaaatcgaagtcttccacgaagactatccacacagaagtcgcctaagggtgcagccggattagcataacaagtgcgagacatcgaaatcttccgcgagggctatccgcgcagaagccgctcaagggtgccgccggattagcactacaaatacgaaaaatcgaggtcttccacgaagactacccgtgcaacaatcgcctaagggtgcagccgggctagcacaataagtgcgaaaaatcctagttttccgcgaagactatccctgcagaagtcgcctcagggtgcagcatggacagcgcaacaagtgcgacgaatcgactacaatggtacagccggacgaagcctaacgagtgcaaaaacggctacaccaaactgtccgcacaaagaccgactacatgcgcaccagaccaac

SEQ ID NO: 70200 - DNA, 720 bp, Zea Mays
ccagggatcattatgcaattactagggactcctgtgtaatattcttacctctcgggtggagggcgggctcattctttgacaacggaggtgctcttatgcaaatgtaccacgactgtttaacttgggcctgattcagactgttggatcccgatccgaagcccatgatctatcccaccgaaacggtaagcagtgttttaatctaggacgttggattccgaatcaatgggtatgatccaaccgagcgaactggtatagattgatctaatcccaaccgtccatcaccaaaagaatggcgcaggggccaccctcctcctctctactacccggccgacaacgctggtttcccccgtggcggtgctctcgccggtcagaggcgcacacgaccgtcggtaactttcccccaaacccgatagctcaacgtgtgcaaggacccaaggcgaagtaacagaggggtttcataccatgcttcaaggtggtgtcagacctgggccactgcgttatgcggtaccgtggcggtcatggcactccagcgagcaatttggccggagctggtggcccacaccccatatcagtgccacgggtatactccccatgctacgacaaatcactctgacccacatcaacagccccataatggcgtagacgtgatctagatcgcgccggtatgtggtgttgagttttcctcctgtgcaaacttttgctcctcccatgaggactagc

SEQ ID NO: 70201 - DNA, 326 bp, Zea Mays
aatccttgataaaggtgacattattttaccaagttggattgcagtgaagtagcatgccttatgagaaacttgttctcatacaagagactatatgagattactaagatagcgtgctagtctcaaaataatcaagatatagaaataggctccccctagagatatgcatcaagaatgaaggaaatgggtggatgcactcacttttaaaggcaaatagggagaagcactatttatctcgatcaaggcttaaaagatctgcaataaacaatttttgcctagtatactcataatgaaaagtttttgaatgcttacaaccacaccattgaatg

SEQ ID NO: 70202 - DNA, 792 bp, Zea Mays
aagtgcgcgtggtgtgcggtcggccacttcccccttttctgccagagacctaccactaccatgccgccgcgcttgagagagagattcggtgtgggctcgccattgcggccaaccccgctgtcggcaaaaccatgcatccactgccgttgtgccatccatatagctttgagcgcttcgtctcagctagccgtaggagtccgcaaaatcgacgtgagggattatcggctgggggatcgtgaattcttcgtcggagaagttgctccgctgtgggcacatccgccgtcgaggctaggcctattcatgctactaatctcggtgagatatcccttcccagtctcgctttcaactctgctttgaaattgccgtgactggaggaaggtttcgtacggggattgggaggtattggtctggctaaccatgacgccgccgcgggagggggctgaactccggtgaccaaagctgggtgggcgtgaccgagcgttgtgggccatcgatcttcctaaggatgatccagattaggcgtgaccgatgagatccgtcgatctggcgatgaccggtttagattaatagtaggcaacacatttcgcgtagatagatctggtgcatccaatcccgatcgtgcggttgtcgttttgtaacggttcgtgggtatgtagatctaatctgagcccttgattcccgatcgggcggtcgtggtctgtggatacccttgcggccgagcgttttgcttaagagtccttagagattttgggaatcaacccgcactctgcagtatagtattatgagtcttag

SEQ ID NO: 70203 - DNA, 322 bp, Zea Mays
aaggaatgccatggaatggccggtgcctgcatttgctgtggatgatgagccaccagaggaggaggaggagcgcagattctgcgcttagttgtccacacgggagtcactggtaggtggtgatgacgaagtggtggtggggatcaggaggaggagatctgctggtgttgggcagcacgtcggcgtgttgtttggctcgtcaaatccgatgcaaagcaggcatgtcttttacacctgttcgcatgtatgaagaaattggaattaaggaaatggaaaggaaaataagagacaaacaagagagtaaaactcacggatgcaatttgtt

SEQ ID NO: 70204 - DNA, 979 bp, Zea Mays
tgatttccgcggcatggccggatgggctcctcctcggtggtataaacagccaattagggccgccttctactcaaccactttagcaccgagatagggggcacgagagggagagagggagtcttctccgccgttctgcgctcatcggtgatggtgagggaaggaagagcgcctccaccaatactcgcggccagcgccgccgcgccgtctgtgtggggagccatgtgttccgcctgagctcgcgcttgcggtggatacactcataggcaagaccgagggaggaacgacgtctaatttctcgtcgtcgatcgccctgtgtcacgatttcgccgtgtgccgcggacaaacatctccggtcgccgattgctggtgagtaccctatacccgtgttcgccataccattgtccatatgttgcatcaatcggtttagagattagggcgagggaggggagaattgtgtgtcgccggtgagagctcaccgggtggcgatggtggcaccgccgtcgggctggattggagggagagggtgtgatggctgtcgatccgtagatgggcggccaagattaacccgtgcttactgtttcggatggtgcggtctggttcgttcgatccggatcatgcgaatgggaatagatccggggtaaatccaatgtgaaccgtcgatccatttgcggacgatcatgattagacggtagcctaccccttcgcccgataggatatcggtcgttcgattctgatcctgtgcgagtgaatcaatggcgttgtgttaaaatcgtgcccatccgatctagatccggtggcctctattcagtaccagttaggagttatgaaaaatctaatctgaaccatcgggcgctgatccaacggcctgaattgcctcataccccttcgcagacccacttttgcagaagactaggccttcacataattaacctgccgtctaccgcgggttaaatctgagtctaggatatttttatacgtt

SEQ ID NO: 70205 - DNA, 373 bp, Zea Mays
tatgacccgactgcacaccacggggttccccacgtgatgcctttgagtaggacgacgtcgttgattgcgactcgatggtacgtgcggatgcacgtcgaatcacacaagggtttatacaggttcagtccgctagaatgtgtaacaccctacgtcctgtcgaggctgagtatttgagtattactggtgtacacgtgttacagataagctatggcggtggagggtgagttctcctatcgatctggtagtggtgtagttgctatgagaggactgatgagctatgaggtggtgatgggatgtgtcgatatgagatcatatgagatatgcattcgtaggggtaccccctcagccttatatagatgactatccatttaca

SEQ ID NO: 70206 - DNA, 393 bp, Zea Mays
ttaaaaatcattttataaatgaatttctctgattttattcgttgcatggagtgagtatgctaatattcacaagtgcaggggctgtttggagaaaataaggtccttatggtaatgatctttgcatacagatggactgcgggttggttttcaaattccagaagggctcaattgcaaaatgagcaggccgaagaggtatcgggttactacagccgttggatttgggttcaagcttaggattagatccaatcccccctgaaccaggacgcaacgatagccgctggatcctatatctatggctcggatcctaaataaccgagatcgaatcgtagtcatcggatcgcagatctacggtcagggttcttttaaacgaaggggtaagctaccttctaatcc

SEQ ID NO: 70207 - DNA, 468 bp, Zea Mays
atatgattacgactagtatgagaaccgaccaggtagaccgtattttaagcttagtatgacttgaactgacttattcttcccgcaaccgcaattaccggcttaacatactctcattcggttcagtcgcttgtaataaccgcaccaaataaagggaaagctagttgtgggtaactgacaagatctttctatctgaattgactattgaggcatcagcaagtaggtttggtgatgaaaaaaggtcaacagttctcaaactgcaaagcatcattgcgcttggtggacagcaaaaaaaaagcgtgctatggtcgtcgagcagcagcagttcagctgtcgatcgatagcatttcttttctgctgcaaataaaggggtacccaggagaaacggatagctcttcagaactatatatgcatgcatctcatttttcgatggtccaaacggccggtatcttgggacagagacgaattgac

SEQ ID NO: 70208 - DNA, 390 bp, Zea Mays
caaactatccgatcacagagcccaactgtcccgcatctcacaggtgtcacatatggtacccaacaatatataatcctttgtatgtgtatacatgtgtgtacgtacgtgtatgttcttgtgtccacataacacagcagacggaactagggcattctgagcattttggacgtgctaatgattaatgaatagccaaataatccatctcatgtgtacagttgctgccaagccaacagcagagtccacagaagcaaaagcccaaaacatcacagctcagctacagcgcacgcgcgcacgcacaaaaaggtgagctctgctgctctgctctgctcccttctccatctcccactcctcctatcccagtaaaaaaaaaggaaaaaagaaaaaaaaaag

SEQ ID NO: 70209 - DNA, 822 bp, Zea Mays
atttagtggatgttagagcaaggtctttgtaacaaagttgtaactggtacattggacaacaactttgatataggcaggtgagtgggttgttgcatgaaaaattgagaacaaggctctccaattcgctctgtcagaacgtctgacaaaaatcaccatggtacagtaactgaaccagatcgcggatttagtgaacctgtcgccaccagtgggcatgcgccgcgatcctcaccggcgttatgatttgtgcgctctggatgaggataacggccagcggtgaaaagatcttgaccgcgtatgaggccgtgagctggccaccgtacccacttgccctgcggccggtcaagatgaccctcgctggagtctgtcacttgccgcctggacaccacatacttagaagtgttaccacatcgcagtagaccgccataggtagcctgtccatcgcctgagacattgccccagtgaacgccacagtagttcgcgccggtgactcaccccctctttggccgccagcttccctcttctaaattcagagccaccgctcacggatactataaattgagtgcatagctagctctgttagtttgttacgaagccagagcgccaacccttgccctcgattagccaccacagccggagaatttcgttcttcccccaaatctgttgtctgcgccaccgtgtgacgccgcacagtggccagccgctctcagttccgtcctcgtccttcttgcccatgtttcaacacccccgttcgttcgtgatgctcctcggctcaaccaattgagctaggccgtgctggaccattgggaacacatcagttcaccc

SEQ ID NO: 70210 - DNA, 325 bp, Zea Mays
cgttgcttcatggttgcaggatgcatgggcgctcagacatggcgttggctgagtgcgctgcgcagcatatttttgagctggagcattccaacgcagggcattatgtgcagcttgcaaacctgtatgcatctgccgggatgtggagccatgttgctggtgtcagggtgtccatgagagagaggggcattagcaaggcaacagggtggagctccattgatattaatggagagatgcactccttccatgcaggggatcattcacatcctagggctgctgagatttttgccttgcttaatcttctttctccaactccatttgagagtgg

SEQ ID NO: 70211 - DNA, 315 bp, Zea Mays
gccaggtcgccacggaaaaaacgagatttgggcggagagtttggtgcgccgagtagggttggtatatgcaggtgattggtcgttgtgcagcgtaggtacagggtcgttggttgtttgaatcgtacttcgtgagcagttagtgctgttgatcggttcaggatctcgtatctggtagaaggcacggatgaggcatgcagactcttcgaggcctcatgcatggtagactggtagacgtctgtagctaaagacagactggtatggttttactgaacttgaaaaggttgttagctagctaatcaatcgatgttagtttcg

SEQ ID NO: 70212 - DNA, 440 bp, Zea Mays
ctctttctgttttcttctatcttaagatagagtacatgttcctttataaagagacgtgagaccactaaggataaaagtgttatttgaccataaaaccatactaggttttttaacaaaagtttgtctgccccgatcgtgcgtgcatttcctatatattaaatatattaaagttggttcaaaacagggacaaagacagtgtccacgtcagtatcttcaatatcaatcgcatgattcggcatgaacggccacggaacgcaaaagaccagcatccttcgcttcctaacctcgattgcacggaaatcttctagagagcactaaggggggcgtgtgaaatctttgcggttccaccccatccgcatgctcctgccatcgccatgtcgtcatcttgttctctatgccgctcccgctcactctcgcgctcagccttggcttgctatcgc

SEQ ID NO: 70213 - DNA, 450 bp, Zea Mays
aatcttctccctagatcatgatcaaggaaaaattgagggttaagagaatctcacaaaattcataaccttgttttacaaagatttgttcggcccccaccagtgaatgtctttagcttggttgaaacatggatagatgactttcctcaggttagcctagaagaaaatgtgcttctaacttcccctttcactaagaaggaggttagggaagccatttttgggatggaacacaacaaagcacctggactggatggtttcctaccagaattttaccaacatttttgggaaaccatcaagtcggatctgatgcatatatttgatgatttgtccagaggggcctaccagtttttagtctcaactttggagtaataacgcttgttcccaaagtacgagaggctaatctaattcagtagtatcgacccatctgccttttgaatgtgagttttaaaattt

SEQ ID NO: 70214 - DNA, 815 bp, Zea Mays
ctgctgaatccagcgagggtggcctagttcgattgaaatataccttcagattccgagaaaagtttgacgaaccaaacgatgattggttgaaatgtattgaagctaccagcgatgaactgcttgggacatactccaaggccgaagatgatgcgttgtccgtagccttcgggggtcggtgcaagaagagattgaacagggtgtttgatgcaattggtttcgtataccctgattataactaccccttgaagaaaggaaagaagaggaaaactgccacttcgacagccaccgctgtgccgaagggcaagaaaatgaaggttttgacacacctgcctcggtacattgagacgaccgtagtgcctggtgaggggacctcctctaatgccgaaggagaacatgccgctcccgccactcgaagtgctgaagggtttactgtagtgccgaaggtgactacagctgggctaaccgaagccaaagatgagtcggccgaagagccacaagtggaaaggacaatgaaaatgccagaaattctgagcccgccagcagaggcagaattgccgaaggtgcaaaaagctcctgccgcaactcccaagaggaggagaatggccagcgtgctagacgctgtcatggagaccacaaaagccttgacccctgctcctaccaagaaagctgccgaagctatcaaagtccaggccgaagccaaagctgggtcttcagtacccattgagatgaaggttgtcgcgcctgaggataaaactgagcaacaaacttcagataccggcatggtggcggggcaaggtataatagaagaagcaaaa

SEQ ID NO: 70215 - DNA, 816 bp, Zea Mays
ctagcgtggactcactctaaatggtgaatcacagggactcgacgatggatctgagacacagggttatactggtttaggcttgtgccctagtctaatgtagtgctgatcgtagtattgcttgtggggcgtgttacagtagttgtgcttgtttgtagagagatggttgtcttgtccttttatagctcaagggtggacttgacagtgggaacttcataatctacttgggggctcaatttgttgtcaccgggtggcgtagccctcctaacaccgtccataaggtcatgcgctgccgtactcctgatatggcgtactgctccatccgtccagtatacgggtccctataccatgtgtttggttccgatgctaggcagagcctagttcataagctcatgcaggccaagccaagcctgtattagtggatgcaagtaataatttgtgtggttgtttggttgactgcacgtaactagccaggatttggtgggcacgtgtttggtgggcacatgtataactggatgcaagtaatataggacacacttgtaagtgctactggctataccttaggtagtagaaatacaagtcggctgataatttaacaaagaacagatctttgccagaacacacttgtaagtgctacaggatttctgttaatacaagaacacatgtatatctgttctttgatatcaaataacagatctttgccagatactacaagtcggctcataatttaacaaagaacagatctttgccagaacacacttgtaagtgctacaggatttctgttaatacaagaacacatgtatatctgttctcacaccg

SEQ ID NO: 70216 - DNA, 299 bp, Zea Mays
agatttctggttgaacttattggagcgaggtttatctttcatttctttccttctatttcgcttatgcttttaaggtgggtttgaactacaagttaacttaataattttccaaaaattcggcaacaattacaggggcttcttactggtgtataactctttgtctcaaaatttggggttcaaaaagtgaggggttctctctgtataaaattatcaaatattagggcagagggggtgttttgaactacaactcctttttaacagagggttattctctaagacatatttttgctggcatctag

SEQ ID NO: 70217 - DNA, 342 bp, Zea Mays
cgccgcttcacataggtcattgaatataagctgggaccaatcgttctcatgaaaaagatgcatttcttccttcaaaagcacttcatggtttgtatgccccagctagcagtaggaaacaacaaacgattgaatagaataaggaagaaacatttgatggtgaggtcgtcatcatcacatttccttaaatgatcctgtagcaatgtaacattgaactcatctttagccaatccaagttcggacctcaaattacttgcagcaactgcttcatcaatccccaatggttttcacccccatgatttggtacaccaaggataaggtgcacaatgtcctttgtgattttta

SEQ ID NO: 70218 - DNA, 633 bp, Zea Mays
gagagatttctttgaattgaacatgttacagatagaagctcatcccacttaaacaagcattagatggtatgctctctaaacatagtctctctataaataacttacgagggcaaggatatgatggagcatcaaacatgagaggggaattccatgggttacagagaaggatattggatgaggacccctatgctttttatattcattgttttgcccatcaattacaattggtagttgtgtctgtggccaagtgttgctcctcagttatgatttcttcaactatatcaatttgattttcaacatagttaatgtttcttgtaagggacatgatcaactttcccaatgtcaccatgataatcttgttcaaaggctagagaatgatgacatgttaagggggagagggagaaaccaagcaactaatttaacaagagttggggatactagatggggatcacatcataaaaccttatgtcgtcttcaactcatgtggagtgatgtcttagaggtgttagagaatgtatgtcaagatgccactaatatagcacaaagaaccataatgacaggtttattagagaaaatggagagctttaagtttgttcttgtgttacacctcatgatcaaagttttgggtaagac

SEQ ID NO: 70219 - DNA, 646 bp, Zea Mays
aaaatctgttatggataattcttgcaggctaacaagagcagacagagctggagaaggaatatcactatcccctctgctacctctataacgccggctattcttgtagattagtgggacttcttcttattcttcttcgtccccatcaaaaatgcggacaaaggatggtgcaggatcacacccattaggctcaactgcaacaggattacacccattggggtcagcttcagcaggattacacccattggggtcagtcggtgcatggtcacacccattgggctcaacttcagcaggtacaccaccagtgggattaactatagtaaagacctctactggtacttcttcacaagcaggagcagaaggtccagcatcctggtccaaacatgacaaccgccggagccgtctctttttcttcttcccttcagcaggtgcagttgggcggctgacctgacgaagacgctttgggcgagtaccctcaggatttcgggtgtccactattctgtcaagctctggtataactgcaacagccattgtttcagcaagggccgagtctgaagattctccaggcaacatatcgagcacaacattcatctctgcatcatccggactcgctggcatctcaaaatgaacttgcctctcatcattggga

SEQ ID NO: 70220 - DNA, 322 bp, Zea Mays
cgtgtggatcatggtctggcatgggcgggcgggtcgaatgacaagttcgaactaggtatgacaggtcaaaggcatcgtcttccatggcatgggccccaatatgagactagccaacccctcacagggaagtcaacaaaggatgacacataaccagccacaagataggacaacatgtaacaatgatcgaggcatggatacaggactctaatggaagaaggaaaatatagttatgtaataggctccccttgtcttagtccataaaagggagggagggtaccgatccaagacatgggcaacaagcgcacaccagtagccgacactt

SEQ ID NO: 70221 - DNA, 400 bp, Zea Mays
aaccaaagatgaaggttaatcatgtcatgaatatcgtgatgatattgagatccaccgacatttcaggtgtttccgccagagcccctacctagtgtggcagatgtcggtgtgtgacgaccgacaatcttactacaaggttatctagagtaagttttagcgaccttcgacaaaaaccaaacaggatagggaacatgagtcaacgatttagatagagcgctgaatagcgtaataccctacatcctgatgtaggattgccttacattgaattgttgaatatgagatgtcacgaggagaatattcctacctctctttacattgtatagatgacaaccgcatgatactactccttgtcagctatgatacatgtgtcctgaactattatgaagcttgtcttttttta

SEQ ID NO: 70222 - DNA, 958 bp, Zea Mays
ccgccataaagctccacaatgtccatgcaaatcatgcgagcaaactgccgcccaaacacatgtcgcctgattcggatcacaccacacgcggttggcctctcccgtctccacctccggcatactacgcattaaagctctgctatttttttttaaaaaaaaaagaagaagaaggatcattagcaccgaatgccagacaacatctccgatcgaatcagtaggtgggatatatacatttgcgagttcaatttatgacacctgtccctgatccaaatcattaaattcttatctgctgcttacagctcagccaagccaactttagttcttggatccgtctaccggacgctaagttctctggtctttttgacatgcagctgatacatgtctacaatgtttaagtgtgacgaatacttgtttagaatatattgtggtttttggttgcgttgtctaactagccatgatatgagtagtgtgcatataatatgtcactcgacttatggtgcatagctagtgtccgttatgagttttctacgggacgtagagcgaaactcaaaatcgagacctgcatgtctttttattaagctcaccgaaaatgagaagaagagaaaaaaagaattcaagtgttagaacactcaagtgaggtgtggctttttttgttataaaacctgtggcaagggaatgccgtaatcaagacgagtgatgccaagaagagcagtcagttggaacacatcgctagctagcctccaaaggctcaatcagctttatgagagcgcattggatgatgcacggaacccaactgaacgaaagacgagttgatatggcattgtttgccgcgcaacgcatccgtccttgctaccagcaccggccggcccggcccggcccggccctgttgtttgttattaatctcaaaaaactaaaaagaggaaaatatactgcgtttgttcgcgtactacgtgtcgga

SEQ ID NO: 70223 - DNA, 429 bp, Zea Mays
ctaagagctatagtattggagtctcaactttctagcaatgtttcccaactcccatacttgagaaatgaacggttcaatggtatttatagccccaaccccaaaagagccattgtaaaagtttagacttttctgcgcatcactgaacatgtcaattgccttccacgtggactagtcgttggttgagcctctatgtatccggtgtgccactgttgttaccatcagacatgtctggtgcttataactagctcgagtgtgttttacacttactttgagtggcgtatctggtgtggcatccggtgcgccaccaaacatgtcctacattatagccacccgcgcatgccctacaagggaatattatgaatatgtgatagccctataataagagggtacctgctcctaagtcctaactagctatctctctagcccgag

SEQ ID NO: 70224 - DNA, 399 bp, Zea Mays
ggtagatctatctaacctaaactcgtctaaactagtcataacaatctaatctagatctcatctagtctaacatgatctaatctagtgtgagttacttaatgctggtacaaagaataaggtcatactcccaattcacttaagcctaaattggagacttagatcaactcggccatatacaacaacttgacctacacaaaaggttacatagcttatccaaccaatctagaagaaaacaaccaaactaaattctgactaatcagctacctactaactctcttgtccctaactcagataaagacaccaaggtctgaaaagaagagctcaacctcgacaaggaaggagatgggtcaaatccaacttcaagaggaatcaagatccacagttcaggatgaagtcttt

SEQ ID NO: 70225 - DNA, 671 bp, Zea Mays
cgaaggggtatccgtagatgtgggccattggattagatccggacgatgcagctgaatctatcttcataccaaactggtattccttcatgatccttggattcgaaatcaacggcgccgtagatattccaccaacgccctatcggcaccactcgattccgatccaaaggctagtgttgatcgcagtgaagcggtattagctgatggctcacggtcgtctgattccgcccctacggaccagctcgccccagcgcttggtgatttcccagactaatctggactgtccaacaataacttcagaccgcggcctgtggggaaacgaccaccacggtggagtgccacccgagctaagtctgttagcgcccaaacgcccaacgaccaaattggaaagtgctaaacgcgtactaaaatactacaaatacacagggggcccataccggtgatcatgacatggtgagggtggtcgcggcgtgtggtggatcctacggccgagcggcgttccgatgagcgattgccgagaagctgcccgccccagagcttccgcaagcgatgaaccgacaattcccaaacttgtgcaccttcccgacccctttgcccaaggttgaactggcggcagcggcggaatcacgaaggctgctcggtccgatggagatctcacgtcgctctcgagtttc

SEQ ID NO: 70226 - DNA, 424 bp, Zea Mays
gaggttccggggatgggagtgggaatttcttcgggtcgtcatcgctgtgcagttgggatgggagagaaacaatgttgttgtgtgtgagcgagcggttccagttgagatttgtgatgggagagagacaatgttttcttgtaaaaatactttgaacgaccatcatgtaacacaaagtagacttagttggagtggttaagtgccaacgcctgtagagaattggtcacagttcaatccctatatgcctcatatttttgcagcgcgggagggacaaccacggtgggtggcagaacagccagaggcaggctaccttgtagccttaataagtcctactaggtatgtgcccgtgcgttgcgacgacatacaaattattcgatacaaagttagtgtataataattacatgaaaacaataaatatatatataat

SEQ ID NO: 70227 - DNA, 568 bp, Zea Mays
ctgtttctctgctgtcgtgcatagcgctggggaggctcttcccccaacacggtgggttcgtcgtcagagacaggcgacgactctagtctcccctgaatgaagaggacgtctgggaagaaaggagttggtgcagcggtgcactccctcccattctcctttgagggctgaggaatcagggtggttgtccgttgcgctgctctgccctggttcagagtgttcacccacttttgccgggtgatccgtgtccactccttagtgggcaaggtggacaacggagctcatcgagatgaggaggccatggttgatcggccttctaccctctgggggtctcgagtctagccttgtgtgggaccacgccttgtcgcgccatcagtagggttgctggcgcgattcatggtttcaccatagcttcttttggtgatcctgaggaagatttcttctcatgtgaagttgctatgcaatgcagagttccctctacatccaccacataggagatggtcccaaagcagaaaactgcccctcgtctgaaggtgatcttgctcttcaaaacgacgaccatggagtcagc

SEQ ID NO: 70228 - DNA, 467 bp, Zea Mays
ctatcattggtagggtaggacccgcagcctaccaccttgaattaccagaatccatgtcagatatccataatgtgtttcatgtatcccatctccgcaaatgcctgcaagtgccagaaagtcacatcgaagaggagtcaattcaagttcagaaggatctgccgtaccgagaaaagccagtgaagattcttgactcagccgtccgaaagacccgcaactcagaagtaagactctgtaaagttcagtggagcagagaaggagaagaggaagctacctgggagagtgaggactctttgaggagggaatacccttaccttttctcaagcccagtctgaatctcgagggcgagattcctttaagtggggtaggtttgtaacatcccaaaatttaaccccaaggttagaaaccctaatctcctaaccccccttttttcttgattatcccctagaccccacctcataagacatttc

SEQ ID NO: 70229 - DNA, 503 bp, Zea Mays
cctgcctctacagaagtacctagcatgggtgagaaaatacaaaggaaactgccgaagctgtcataactcgggttgaagctgaagctgggcccttagttcccgcagaaactgggcctgtggagcttgttgaaaaggatacagaaccaggaccttcggatggtgcaaaagctctgttaccgttagaaaaagagagaaccagcaaagaatctaaattccctgtcgttgaagcttctactgagagattggaatttatagtgcgtcacgcggcagggaaaaagctatcagaggagcaggttgccgaagctaggcaatatgctaaggatctgaagtatcccccaggatccctggtgtttaatggcactgacgaagacaattttttgtattgccttccagacaacaaggagatatttgtttgccgggagatggcagaaaatataggattcccgaagctaaagcttggcctgtctgcaatgtcgaaggatgaccttgcagacaaccttgcc

SEQ ID NO: 70230 - DNA, 411 bp, Zea Mays
gtgttacatttgagacatgagctatgggggaaaaatgtaaaaataaggtagttacacagtagaatatgctccaccccttgtcccatgagaaagttagaaaaatttaggaaatcatacaacccatcccctatgagtaaaaaatgaccaactttgggaatgattactcttgcgcaaagaagaaactagacaaattaggaaatctgttgtttgacatttttcaaaaggagtgttagtagaaagcacccgctaagctcccaaactttagaaaattgccattaaataaccattaggtttccttgttcacaatttggcgcagaagcatgatattacccataaacatcagcaaaaataagctatagggcagaagccacttctacacaagggttgtagttcaaagtgccctctctgccc

SEQ ID NO: 70231 - DNA, 546 bp, Zea Mays
atttgatgaccatatgttcttcatgactttgcttcgcatcagtgaaaactttgctatgatgctatgtcccacctctgtttcctaccagaattccacctaggtttcgaagcccataccaagaaatcgttcgctagcattttggggcccaaacctccaaaccgctttagattaccatatcctttatgctccccttatgatctcggtatgtgtcacctcgagtcctccattatccaatcatcaagttctttagcgccttcgtttgacttaattgaccaccatcttaaattggtcaacatggtctactcctccacatactcttgcacttgtcaatgatccaaggtggagccacccatagttcatcctctagcttctctaatccttcagttcaagccttggcctccatccttcactacttcttgttcatcgatacgaacctgcttgaccttcaccttcaccgttgatctccacctctatgctccacacctacacaccatgatccaagatatattgccaaaacacatgccatgattagttaaacaactcaac

SEQ ID NO: 70232 - DNA, 551 bp, Zea Mays
attcaccacaatactcagacccggtatatatgtatatcgatgcgctcttcacacactagttttcattttaacttagacatcacatgagcactacaaatttttacccgcgaccataaccatgcgcatttagaccataacaagcaattcatcgtgaccacgagcttaaccaaaaccatctaacaagactgctaacccattattatcgcaacctgagacacaatatgtatataacaattacttaacgcaatcgactcctacttaacatgagttggctaatgacgtgactatttcccaattaccaacatacaccacctttcgccatttttggataacctgcacgatacacaactattctaatacatctcaagttcattcaaccccatcagtagagcactagcacatttcagaaaatttcctgagactacgacgataaggcatcaatcttatcatgcacataaaagcatcacaagcatatttacggaacctatctgttaacttgatcgacacactacacatgttcttcacctttcaaaatttatctcacaaccgaa

SEQ ID NO: 70233 - DNA, 347 bp, Zea Mays
cggaggtttgctcacatacttggattttatgatgaagatatttctggggacaagattaaaattcatgactttcgtcaacccaccaaggatgaagcccgagatcttcatatatctgagactggtaaattttgggagtccaccaatctacataagttttacagatatcttaattctctctgcagaatgaccctcattcccaaagggggtaatcaaatgaacatcctgggagagagcaaagtcttgctctcatttatgaagccaaatagctcagaaagcatcaatgtttttgacatgatttggcaaaaaattatccatgctgcctgctaccctctaaagggatgtcttca

SEQ ID NO: 70234 - DNA, 426 bp, Zea Mays
ttcttctcgggtggatctgctatgcggtgcagagttccctctatgtccgctatgcatgaaatggttctaaagcagaacatagctcctggctgaaggtgatcttgctcttgaagatgatggccatggagttagcgttgatcgacgacacacccctaacctggtgcgccagctgtcggcgtttggtatccgaccacacacccggggtaccctcatggtgcttttgggtaggacgatgtcatagattataactcgatggttcatgctgggggcacgagaagagaaaaagtcgagagagtttcagcaggtttgggccacttgaggagcgtaataccctacttcttgggatgactttgtatgtgggaggtgtttacaagtggtgtctacctcgtggtgaagtgctagtgagatgaaaacgatggggacccc

SEQ ID NO: 70235 - DNA, 921 bp, Zea Mays
atcaaccttccctttgggatcacccaaattatccttatctttcctgctgccttcttctccgtcctgatcaaaagcaagcggcaccgggacaccatccaccaggtgcttctccacccagtaatgcacttcataaataactctgttgatctccacctcaccagcagaggggactgcttctggatcaattacacccaccatcatccgacagatgccatgcttccggaagaattccatgtcaacctccatagtggtgccaagcgtagacccaactccccaaatatgtggataagtgcacagtgccgacggtagaccatcaaactgtatccaaacgtcagtaagagtggccttcactcgacccccggatgaactagccttgaactcaagaattgccttctgagacttagcctggaccggaccccattcgatcatcctttgcaattccgctgctgcaggaaaggaagtccgaaacacctttggggtgatttgatccacgttccatggaccaagtccgggtagcagcctttccaactctcgaatcacattgtccaggctaatactcccctccaccacttgtattattgccaacctgttctcattgctacccttagtgagcttcttgttggaggggatgtgaaagaaaccgccatttttatggcaaaaccagctgggatagcatgcaccttaggagcgttaaacaccggacatttcagcttgatatggtgtcagtaccacatacttcgcagaataactccgctgtacactcgctcatcacgtggcctttcccgtaacacctatggcagtaccccttgctattcagcttgccctcctccttggtaccttccttctccttgttcacagtaatcttcttctcttcctttgctgacgctgaaggaaggagtggtccagcatttgcactcgcct

SEQ ID NO: 70236 - DNA, 598 bp, Zea Mays
caaggtgacggcacttgagaaggaaaaggaggacctcggccgccggcttaatgatgaaaaggaggatgcagagaacgcccacgcggaggcccaagctgcccacaagcgtgttgccgatctggagcttgaggtgaagaatataggcggttaccgcgagaagatggagtctgccacccgtgctagggtggatcgggcgcacatgctttttgtggatgtgtaccacgacctcggcgcacagactgctgccttcgacaagtcaggggaggaggtgggacccgcttcttggggtggctacaggacaagctagagtcgctcccgtctattatgatgggccatatgtcctatgtgtctcttgtgacttgtgagggggctacgaatgccttgcccggtgagggatgtaggcacttcgaggcctttgatcagggcaacgaggacttcgatgctggtgtgttccagattgaagacgacgtgctaaagcactctatgggggcgcttaacgataggatgtggggtcctcacggccgcggcttcgtccgagagagagccgatcgagcgctggtgtaggttttttgtttttgatgatggtggtgtgtgtgtg

SEQ ID NO: 70237 - DNA, 454 bp, Zea Mays
ctccacattttggcccagtcatctaccgcgcgcagcctagctcttgtctccgagcaccggcgccaacagcctgacctacctgacagcctcacaggccgttccttccgtgcccgcatttacaatggcatccgaggcccacgcgccagcctcctctctgttgtgcagtcaccgccggctaggcccacttggctggttgtcatcaacaccagagttggcggagctcgcaaccaccttcgttgatgttgtcagagcactaggtcagccccagatgggttctttgcttcgtccatgggatataaaccccccaaaccatcgtactcctaactcctccattcgaatcacacccaggaacatcgagagtcacggtgaggtcaccgtgcagtgagggtattgggccgtcggagtcacatcgcgtattctgtgtcatcaagttgtcaaactcaggattgtgagc

SEQ ID NO: 70238 - DNA, 323 bp, Zea Mays
atcgatatctctttctatctagtgacaaaagaaaacaggtttttgtccatgcgaattcagggttgtagtagtggaaaacacataccattgctaatttttggttaaacatgtgcatttgctgtgtaaaagccactctgcactgtccaaataggtgattaatgcaacttttaggatagcacatgtgtagctgttcagtagcaggtgtagttgtctacacgtaatttttgtagttgtatcctatgtgctaggataataaatccaatgttatttgttatgaagatacaatccctttcatgactaagtacttttagatctgcttcccg

SEQ ID NO: 70239 - DNA, 484 bp, Zea Mays
atgaaagcctttttggcatagaagatatcacaaattgggattatattagtaagcaaaaagaccttaccaaatgatttaagatcagaaatctcagtcatacattgctcaaccagatgttagcacattgctctctttgtcgctggatgacatgaagcaaactatgagataaaaggacgtgtaaccgctagcaacatgaagttgcgagtatatcgagaggttattttgagaaatttttcactatgttggtgtgaaaaccatagtgtgttcccgtcgaaccactttactcgttctatctaggacctctatgcttgtgtcgcatacatctctcggaattgtaaatacttatagtcactgaattgactcggaatagtcctttgacaagtttggtatacactgtaagctaaatggtaaaggtcggtcatgaatggacacatacctagggtttatgtagccaaactacactgaattccaccctttggcatgc

SEQ ID NO: 70240 - DNA, 593 bp, Zea Mays
agttttatttgattctggagaatctcgctccttcataacaaagtcatttgtggaaaagaataatataccaaactatcccttgaagaagaaactattaattcgatcaccgggaggtgaactcacccactcatgccctcagactaagattgaaattagaggcctaagctttttagtagagctgataatcctagaatcaagtggaatcgatgtgatacttggaatagactacttaaccaagtatgatggggtaatatcttgtggtaagtggatggttacattaaccagaccgcaaggagaaagaattgaagtcaatgtcagtatgccagcaacagcagaagcaatggtaaatcaattggaggagaaatctttggaaaacatcagaatagtgtgtgaatacccagacgtatttccagaagaattaccaggtatgccagctgatcgtgatatagttttctattgaattatacccggaactacaccaatttcaaaaagagcttaccgaatggatgtcatagatttaattgaactgaagaagcagatagaataattactataaaaaggttatattcgccccaaatcgtctccatggggag

SEQ ID NO: 70241 - DNA, 408 bp, Zea Mays
cctgttcgagcgaatgcctggatccctaaaccatgggctgccagtgaggtaacctccgtaagttttctcccatcttgtattgtaccatgcgctttagattgtgagttccaattggttgtgttttctacttatttagcagcaattttaactctaaagttagcatatagccatatacaagcacaaccatgaacagcaagttcttttatctaggtgggctgattttggtgatgtttcttctttttgggttttgagatagactgacaagtcattaaccatggcaaggagataaggaccagcgctagtgcgaaactatagcaaactagagggggttgtgcagttgtgcctgccttgtagatgcgttgacttaccacaaccatggtaaaaatttgatcctactaactgtcgttc

SEQ ID NO: 70242 - DNA, 475 bp, Zea Mays
actaagcacaataagtgcgaaaaatcgaagtcttctccaaaaagactctccgtgcaaaagtcacctaagggtgcagccggaataataggtgcacaaaatcgaagtcttttccaaaagactctccgtgcaaaagtcgcctaaaggtgcagccggaataataggcgcgcaaaatcgaagccttttccaaaagactctccgtgcagaagtcgcccacgggcgcggccggatcaacgaaggcgcgcaaccttatcatacaaatagcggttacatacacacaacgagggcatcatatattacattggctcaaccttcgggatgatacccatctccctgtagttgaacagcattatcctcagttcctcaccctcaaacagattttgcagctccccctcacctacactcaccccaatcggcgaggataacaattctcgcttaccagtcccgtctacgcgaagacgacctctctccgcctcgc

SEQ ID NO: 70243 - DNA, 406 bp, Zea Mays
gcgattaatgaggtatgcagctatggaaaaggcctcatcccagaacttaagcagcatggatgcttgtgcaaggatagacaacccaacttcaacaatatgtctatgtttgtgttcagcagacccattttgctgatgcgcatgtgggcaggacacataatgaatgatgctgagtttagtaaagaaagaatttaggcattgatactcgcctccccagtctgtttgcatagcaataattttggtgtcaaataggcgctcaaccatggtttgaaactcagtaaaactttggaacacttcagaattatgtttcagcaaataaatccagctgaatttgttaaaatcatctataaaactgacatagaatttctttcgatcaatggactcgagggctgggccccatacatccgag

SEQ ID NO: 70244 - DNA, 419 bp, Zea Mays
tggagtttatggggaacggttggtgcgtgccattgctgccgcggtggtttgaccattagtttcattgcaaggacagcagcttttggtctggactctggagatgtcagtcactatggaacagtggtggtgtaggtcaattccctgtgaggtttcgtgttgccttcaacatacgtgcaggagttgccaacttgccacattccaactactgctgtagttgtagctgaaccggccggctacaaaacagtacagtaattcactgttatgaagcaatgttccgcagtgaagattggcactgctattcacttgaatgggtcttctttcttgataaatgaatcttgatattcgaaatggaactctaggcagctttatctttgaatttgctttctttaaaatatcaacatgagatcggtagaactgag

SEQ ID NO: 70245 - DNA, 544 bp, Zea Mays
gtaagattgatagcttgagtcaataagaattgaattaacccgctcaagcacctccaaagcttcatatcatctcctttcccctacaaagcttgtcaagcacattttggtccccatctattgatggatccatcaaggttagtcaacaaaaatctaggaacccaaatgttttggattgcctagttacatatgaattaattgacaagctaggagtggaatagttaccaataggacaatccttacatagatgtcccttctttcggcatatgtagcaaaggcgatcttcatgttttgaagatttcttctttcctcgtttcttgcttgctacatggttagtaaatattttcttttctaaaactatgcctttttgttttacatagggacatgacttaactaaatgttccttctcagagcatctaaaacaatttttatcatccttgttaataatcaagccattttctttaatatagggacatgacctaatcaagtgcccattttcaaagcattcactacacttcttacttttcttagtgtgaagtgtggcttg

SEQ ID NO: 70246 - DNA, 447 bp, Zea Mays
gaacaagtgaagagaacagccagggcaagcagtatatttatagaagccgggggtgaccgtccacttcctacctcgctcgccgaacagtcgcaagaattcaataagcaattcaagccacctaaaaatgagtcaggcaacaggcgccgcttcgcgtaacacggcaccggttggacctaagtcgactgctcaggcaaatgattacacctctccgtcacatcaagttactactccaggacagcgcgataaacactctacacaccaagacaccccttgggcacacccattaggtgtgtcgcccagaattttcaaagattttctgaagaagtgatatccacaaaatatacgcaatgaatgtaccacgacaaaagaaggatatcggcagagatggaaggaagtcctaatgtggctactgaagcgcaagtctaatcaatagaagcattgaagcac

SEQ ID NO: 70247 - DNA, 1365 bp, Zea Mays
acataaccaacatctcatgtcggcatagagaccacaaggcgacgaagtagcaaaagaatctcttatgtatctaaaccactgatttcaagtcgggcgaccagctagtcgatcgacaggaccgaccaggcgcctaatcgcgattagggcgacaattaggtcaactaatcggttctagtcggcctctggtcatccctagtcgtcctatgtatattcctaggcatataagtcatgtcaacagatagaggtcaagtcactactgggcactagatatgtgctactgctagactgatggaaactggtaagaataagatcattggtgctgctggactggtgggataaactggtcgctgctatgaagctaagaactatctaagtaaggcaatagaacatagaagtatagaacactagatgagcagggccagggcagactgcaaacaaatgggtactgctgcgcagaatgcaaaactgtagagtgcatacaagggggaaggaggggagcagggatgaccttcggatgacgagctcatcttgtgccttgtagatgagcagggggcagggatgacctttaaggatgagctgcacgctggcactggtggagagccctggaggctggagcagcagccgccggcagaggacataaagtttaggagaggggtgcaggcacaggggaggctttagggtttaggggtgccaacagatttattcggctactgggcccaaaaaacggtgaagcccaatagcacatctagcccgctgcgcactggtcgaccagagatggctaatcggacgactaatcggatgatttggacgcctaatcgacgattaggacgaccagaaaaacaaatcgcgtcgtccccctggtcggccacttacaggtgaccagcccgactaatcgcgattagtcggacgatttgaaaacagagatctaaaccacccgaactccgtcgttaacctcagtactactagcaccattagtaccctatgatgattgatgagcctaagtctttttcttcatcaaacaatgtgactccacatgcccatctctatcacaatggtcacaatgaagaccaccacgccctcgtgctgaaggagggacacttggagaaggcattgtcggtggagtagcaaccggccgagaggacgaagaaggcggtcaatcatactccgcccgttgagaggacgaagaatgagcagctaaaactgacgaagactgcaacaggccagcagcacatgaacgagtttcctcattacgaacatacaagagcgtccataagagaagcacaagggtgacgagcgaagcctgaagaggtttacactagtcatgaagtcgtagatacaacgaagctcaagtgtagcccagtggcg

SEQ ID NO: 70248 - DNA, 374 bp, Zea Mays
ccacaagatatatggctaccaccctcgatgggctggccgttatgatagtagggaggatcagtgcccctcccctgagccgccgggtccacgggtcttcagcactggagagcaccattcccaccccggttttgggccctgactactatcactaagtgtttaggggaaatgaagctattgctctagctcgctgactaccaactgatctgcctgctcgggggaatgaattatgacagcctcatcatctgtaaccttcccctctttctgtccggctctgcccaagcctggctcgagcacctcccgccagcacaaatccatgactgagaagacctagtcaggatcttcagggggaacttccaagccacatatgtccgccc

SEQ ID NO: 70249 - DNA, 299 bp, Zea Mays
ttatatcaggtggatttccttcagagaagatgaagtgttcaacaaggatgccaaaaggatagaagacatactttttcctttcattgtagagatccctctctagtttcttccaacgggcaaacatcaaaagaaagctttcactaccacaaggtaatccagccaaaagacgatccgtatcaatttctgctttccccagtgccttggctatatcgtaaggaggatttggtgaatcactacctatggcagctttctcatcttcatcatcagaaagcatctttacttgcgcggttatttctttt

SEQ ID NO: 70250 - DNA, 361 bp, Zea Mays
ggatttttatgtctctttgacgtcttctaacccttaggtgtcttcgcacatatttatgataatccggctgcacccttagtcgacttttgcgcagatttgtctgtctcttagacatcttcaaacccttaggtgtctttgcacatattggtgctaatccgagtgcacccttaggagacatttgagtggatttttatagcacatgattgtttttaatgtgtaatgttatggtgacctcgcatcttgttgaacgtttatgctctcctagtgagcctttttatggatgatggagtttgtagggggatttcagatttattattacaaggctctatcttattaaaaacctcacccccttggagcaaaa

SEQ ID NO: 70251 - DNA, 337 bp, Zea Mays
gcgtaaagactccagaacacgttgttttctgattgggccgacttttgtcatagtttgttgtgcgaaaatggtatccattgacgtcatacctagaatatttcttgaccctataagcaaagttgttggctacttgtctcaactcggcactcatagacggatctctttggccctgcaagtattcgcaagttaaaagatgctaaattgagttcatagacgaatctctttgacaaactaagcacgtaccttacgtttgaaccaggaaatgaaatcaggcaaaccatttctcgcaccctttctaagatgagtgtcatattcctgtggagtggggtcccttgat

SEQ ID NO: 70252 - DNA, 310 bp, Zea Mays
ggcaatgtctcaggcgatagacgagctatccacgacggtccactgtgacgtggtaacactcccgaatacgtggcgtctaggcggtaagcggcgaactctggcgatggtcatctcgaccagtcacggggcaagtgggtatggcggccagctcacagccccatccgcggtcaagatctttcacccgccacggttatccacttcacaccggcacgaatcacggcggccggcgtgaatcgcgacgccagctcaccggcggtgacagattcactgaatcagtgatctggttcagttactgtaccatcagaatcac

SEQ ID NO: 70253 - DNA, 1223 bp, Zea Mays
ctaaactatccttgtttccggcagtttggaaccttggggcgccggtgccggccggccggctctcgcttcgtgggcggagatcttgaagcttccgacccgaaaggcggatcggatgggtgatgcttgctttttcgtcgctctttagtaatctttcccggctgaaaaaaaggggctccacatcctattcacgaatcaagaaaagcttcccttcgtgcttaagcttgcagttgcaaggcactgtctatagccgctattgcgcagacttttaattcgtgaatgtatagtgcgtggaaaataggatacacgttttagatgcaaacatcttaatcagcggagcgaagtggtagcctatgtttcctttttcatcggttggttctggtacgttttaatcgtcgtatttcaaacagctctagtacgttttaattaatccttaaaccgtttgggaggaaaaaaaaggaggtggaaaaaacaaggagtatatatataggggagattttgcatgacttgcacggcagttacatgtactacgaagatagggtctctggcttgctgacttattcccgtgccacacgtactccttttccagcatttttttgaattcgagatcacggcaagcgaggctcgcgatcacacgctaaaacaaatagacgtgtataatgtcgtggccctattattctatcagtagagaatcttgtcagggagctgctcgcctcgcctcgcctgctcctaatccatatggtaaaccacgcacaaatcttctgttgttacgctgagctcagcaataaacatctattcattcgtacgtagcctagccttaagcagccgggtggaagtcaacttgcggttgcggacaaggcggcttgggcagggagcggttgacgacgtcaagccgcctcccaccctctatctaacgcccatattaatcagcgccatgtaaacttgcattggtgacaggtcaccccgtccctcgcccgtccgcttctagaaccggatcatcacgctcacgcatgacgaccgtgcttgcgttgcactcctggacgtacgtagtacgccctgtccaagcccccatgaccgatgcgatgcgatgcgacggaccatgcatcatgttcgcttcagaaacgtgccgagcctgcatggtcctattggtttctaggggaaataaaaaacaattctagctgagctgatggatggcgcagtatatcaatttttcattcacagtaggt

SEQ ID NO: 70254 - DNA, 491 bp, Zea Mays
aatcaagttcccatggtacagtgacctgacgaagatcgccagatttagtgtatcgccgccggtgatcccgcatcgtgatcgtcactgccattgcgattcgtgctcagtgaagtgcagataattgctcggggtaagaaatatcgcattggggatgtgctcgggacactgtttcgccctggccgtcgtacccccttgccttacggtcggtccagattacctcgccggagttggccgcctgccgattgggtgccacgtgcctaggtgctctaccacgtcgcagtaactcgccttaacgtgtccgttaattgccagtgaccttgccacggtaacagccacagtcacccgcgccagtgactcagtccctctctccggccgccgcgcgtcttctcaaaattagctgccaccgcctatggaacctataaattgccgccccagtgagctccgctaagtagttgtgcaccaagtgaaccagccctcacctcaaatcgtcc

SEQ ID NO: 70255 - DNA, 317 bp, Zea Mays
gagagtttatcggtcaacgagcatcgagttgaagatctcatgaatcgggctcgtgaaacggcgaaggacaaattcctgttacacttcaaagtggaccaacaccagaaaatcaccaatcaaggagagatgaaccttgagcccctccctcatttgcctccgactgtcactataagtaaatctgatgatacctagtaccttagatagtttgtagatttacaaagggatcgattgaagtagtacacggggatggaagaatcattcaagaaattcacatatgtgcattttaagaatctactattactagcttcccatctcat

SEQ ID NO: 70256 - DNA, 348 bp, Zea Mays
cgatcgaaggtttccaagtgctattcgatagctttcatcctttgcatccttttgggcctttagagccttgattagaattaagccctggcaaacgaatagtgaacaaataacgacgataagaaataccacaaaaatagttcaccgtaacaaaaattacaaaataacaagccaaagtatacaaatcttcaagctgttgtaggcaaggctatctgcaagatgatcctttgtcatcgcagacaagccaagttcaagctttggataccccatgttatccatcatttcacggcaaacattgacctccttagtgtctggtagacggtagaggaagtcatcttcattatctcctcc

SEQ ID NO: 70257 - DNA, 516 bp, Zea Mays
agaaaactctatatcacggtcaggtggcatacctggtaattcctccagaaatacgtctgggtattcacacactaccttgatattttccaagggtttttcttccaagtgattgatcactgttttccctttttcatttgttgacttctctatgttaacttggattctttcaccttgaggacttgtcaacataattgttccattggcacactgtatcactccatcacaacttttcaaccagttgcatccaagaatcacatcaataccgttggatcctaggaccattgggttgactgaaaaatctatcccttgaatcttgatattaacatgggggcatgagtgtgtggcctacatgtcacctcccggtgaactaatatgtaatatcttcttaagggggtacttaggtatgttgtgtttttccacaaatgactcagttataaacgaatgcgatgctccagagtcaaataaaactgatgcaggtatggagttacaaggaacgtaccatacactatgtcggca

SEQ ID NO: 70258 - DNA, 464 bp, Zea Mays
gtcgatcgacccacctgaattaaattctcttcggctgtttttctgtgtttcaccttgggcaaatcctacgccattgggagagacgtacgtccaacagggaacatcacggtgttttccatacagacacacacacagagagaaacgtgtgtataacggagaaaactaggtaatttcagcaacaatttaatcaaaaatagctcacgctgttagatatatatgtgcacgtgtgagtgtgatctaagcacgtagaaaatagcaactaattaacatgattatgatccaaaacctgattggatatagatggtatcaacaataatagacatagtgcctaatcggtgtagtcgtcctattcgacagtgcagagaggtagttgtgccaatcaccactaattcatcgtgccaaaaaggagaggacgtagcgtcaacactaggaaagagaggacgaagcgagtagtcatgtcgctt

SEQ ID NO: 70259 - DNA, 500 bp, Zea Mays
ctcttaccttgcagagtcgaggatgcgtttgtgtgtcgatccctccttgcttgtggatgtcgcattcttgtaacagcttataaatgtaagaggggggcgttggccatattgtttccttcgcgccttctgcctcccgttctccccctctgatggatccatgcaatcgtcggtcgtcgagtcttcatggaggaagaggtcgcgtcgtgttgtgtctaggtcggagtaaggctttgaccttggagtttgtttttctttccttcacaacgttatgacgtctagttctctactttagcatggcctccgtcgttcatagtggcctgggcgtgccacctcctcttgggtcgtcgtggttgggcccgtgggatcctcccctgcattctttcgagtttgtagagcgtcttgccgcttcttgagcagccctggacacgacggacaccgaattgggccttcttcgggaccagctcactgagtccgacgatcgtgtagtaggtaatgtcctt

SEQ ID NO: 70260 - DNA, 391 bp, Zea Mays
gagtttgacccttctggtttttctgtgaaggatctggccaccaggacccctctcgtccgatgtgacagcaccgagccactctacacgcttcgcccttcatccaccagcgcgtccccacctcccgtcctggtctctgccaccacctccaccacttggcatcgtcgtctcggccacccaggacctgacgtcatgaccaagctttccagtagtctagattcttctcatagtaggggacattttgagggcctctgtcatgcttgtcagttaagtcgacatacttgtctcccgtttcctacttcgtcttctcgggctgagcaggcttttgacttggttcattgtgatctttggaccacccctgtaatcagtttttctggatacaaatactatttgg

SEQ ID NO: 70261 - DNA, 959 bp, Zea Mays
ggctcgcctctccaccatgttgccactcatccgtagacaccagatcccgatcggtgaatggttgggcactcgaggccacactcctcacataaaaccactcacctttgtgtcggacgaagggagggagggggatcttgaatgatggcctttcgactgaagtgaagctaagtgatggtcgaaccgacgtacaattgattatcgtgactcggggacatctacgcactgaagaagtactgccacaacctctagtgggggctgatcccaatgaatgattcacattgcatgatgaagcacgctatgtgaaggatgacgttggagtggagactctagatctctagttgataatggtgtaggagtccgcgcatgaaggcatgaaggggtaaactgaacccgcactcatagaatgacgcgagctcgaccagttcatcgtccccagggtgaggcacctcgccctctccttctagcctccacctcaaaagatcttttggagggaggaatccttttctctctaggccacgaagacgactctcacggatcatgaaggatgggaataacaccatgtgaacagaaggcaagaggacgggcgctaggctgggaggagacaaagcaatcaagagggatggctcatggtgcaaaatacgataagcataaccatcctcgagcaccctcctagtctactggggggaaaggatggtgcccagaaggcgggggccaccacaaaacaacatgggggaatctgctctttcgaccaagggtcaccttgggagttaggcaaatgtgaccgtgtgactaccaggatcccgtcaccaaggacagagcaccgggaggacgcgccacagaagttgcaccagtaacaagcagggttgttaggcagaccgacacgccatctaggcatgatacggcaaatgggtcgtttcgcgtctgtgatacccggtttgcaaagaggagaagtggaggtt

SEQ ID NO: 70262 - DNA, 718 bp, Zea Mays
gctttaatgacccaacttagaaggtccaatgccatatccgggtaaataatcctagttgttaatacaaactgaacatgagtggcacagccagccctagacatcaactctgccttccaacccgtcagcatgcaactgggttgtgttcaattttcccaaggacacgggaagacctaaatatttgcacgggaactccgagatttcacaaggcgggagcccctgaattacaataagatcgtccttattacaatttacacctaatgggctagaccctacttttctagacatcggttttcagccccgacgccttgccaaacaaagacagaatgtccactatcaagttgatgtcagaatgaatcggtgtaaggaaaaccatgacaccatctccattgatagacatgtgatgctacaagtgcctagtagaaaggggttacagaagatcttcagaggctcgctgaaccaacaataggagaatatccatgacaaggataaaaaagcatgggtgaaagagaatcaccctgccttagaccccgctgatgaataatgagatcaatcggagagcccttcaacatgatcttggtagaagagcaagcgacccactaatcatgtcacaccaagtagccccaaagccaaggttcttcagaacttcaagaagaaaagcccaagaaacttagtcaaaagccttttcattatcaagcataaaaagaattctggacccgct

SEQ ID NO: 70263 - DNA, 747 bp, Zea Mays
ggcgatttgaaaaacccttaaagagtccgtagcattatttccttgtctcactgacattcgtagataggcccttccctttctattccttcgcaaggtgaggtccccgaccgtggacggtggagcagtggcaccgacgagcctgtaccggccggaaaacacaacgactatgcctctgcattgctcaacacctaattctaccctcggtgacactaatttctcactcaattgcggagttctagcccacaatccctctgtccacggtgatggcgcaaaccgaggacaattcaaagtgttcctagtgatcctacatgttctagctcaattcgctgggctgatgagcatctatagcacataggggtattgaaacgagagcgaggagggcgtgaacggacctgtagagagctagccacggcgagctcacacacggcggtattcttgactgatttggggaaaactctaaattagagctctctagtgcacaatctgaggcacgggctgttgcgttgggtgtgtgattacttagcggagctcactggggcggcaatttataggttccatcggtggtggcggctaattttgagatggcgcgctggcggccagagagaggggagatcactagcgcaagagatgcgtagctttcaccgtggcatgaccaccggcgatgagcggacatgctaaggcgattcactgcgacgtggtagagcaccaaggcacatggcacccgagaggcaggcggccaactccggc

SEQ ID NO: 70264 - DNA, 1177 bp, Zea Mays
caaagattgatcaatgaacatcagacaagttttattaaaagggagaaacattatgagtggggttctgatactccatgaaattctgcatgaaacaaataggagaaaggaggttggtgttgtcctgaagttagatttcgaaaaagtgtatgacaaagtcaattgggacctttatgttttactatctgcagaagataggcttctgtcaaaaatggttatcttggatgcatgctattgttgaagggggtaccatcagggttaaagttaataaccagattggaaaatatgtcaaaagttttaaagttgttagatagggtgattctctgtcacccattctcttcaattttgtggcggataaccttgctagaatgttgtataaggctcaaaaaatgggttggtgactagccttggtgatcacataattcctaatggcatcattattattcagtacggtgatgatactatcatttgcattaaaaatgacttggataaagctagacatctaaagctgttgctctacatatatgagcttatgtctggacttaagattatttttcagaaaagcgaaatatgtgtgatcattggaagtagtacaatcgcagaacattacgccagtttatttgccagattagtgaattcaccttgaaatacctcggagtgcctatcagcccgagtagactccatgtcagagactgggagaaattagaggaaaaattggataaaaggttgcaaacctggaaaggcagtgcattatcagttgctgggagaattactttgatcaacgctttgcctctcgaatgcccttatctatcatatgtcgatgtatctcttgccaaaaactacaactaaaaaacttggtttgaaaagaagaaagtttcttcggtagggggaggtgataagaaaaaagtatcatttagtgaattggcacaaagtgtgcgctgagaaaaataatggtggcctgggcattaaaaacctcagggtgctgaatattagtttgttatgcaagtggtggtggaggctgaagaatgaaaatgggacttggcaggaaatcataaaaaagaaatatcttcaaaagaagaatattcataatgtgtcaaaaaatattggtgattctcctatttggcatgatctattacaagttaaaaaaattatcccatgggcagacaagtgcatattaaaa

SEQ ID NO: 70265 - DNA, 515 bp, Zea Mays
tataaattgagtgtccccgccactccgtaggataattacgcatcagttgcaccaaaccttgcaccggattatccaccagtgactgggaattgctcatttcccccaatcacggtttccgccaccgtagaactcaaccccgccgcggtcagcccaactcaggtcagctcttcccctctgctcccttgtctaagcattcttatgcgcctgtgatgctcaccgacccacccaattgaattggaccgccaccaatcgtcgagaacgcgacgatccagccgccatgttctcggtcaccgtgaccagagagttttagtgcgcgattggtgaaattaagttaggggaaacatcgattaaggtatgaattaggtgttagtcgtcggagagcgccagtaatagccccaatcggccggcgtaagtgctcgccggagctcagccgtgcttgaacgccgtcggggacctcccagtgcgaggaaacagaagttgggggacccctgtgtaaagtgtcagcgactgttttg

SEQ ID NO: 70266 - DNA, 569 bp, Zea Mays
cgcgatttggctgtttgtttaagacaaaggcgaggctcatagtcatctgagcggaggtcgtctggcatccgatcctcgcgccatttctttcgctttcgttttgccgccggccggcgcacgtggagattgttttgcacggcggttccctgcatttccaaagtgctcgctcgctcgccatgcacgtacatctagttggtagtacaccatcattgtcatgggccactaaacaaagcaaggttcgagacttttgtgtcggtacgtgattatgactgactggtggtgcttgtgcaacgtgactgattatgaatgactggtacgtgcgcgacgtgtcgccagggaagttttccggtgccgcatccgtgggccgggagtggtgttaacggattgcaatagatttaagcgaagagctaatttacttacccttcttttcaaagttagatttgttctgaaccgtcaatacatgggcggggcgttgatgctatcactttcctttatatcatccctaccactatcgaaattcagctcttaatttgccgagtgtctatctctttgccaagggcattttattg

SEQ ID NO: 70267 - DNA, 486 bp, Zea Mays
atcgctgacggctgggacccgcttgtcaggagtcgtcttccccaacggactctccgcattttggggcgacagacggcgccagcgctgctcccaccgcgatttcctccgatctggtagccccgtccgaggtataaacgccccagcgcgtcgccatccttggggtctatccatccgcctagtcaaccagggttcatcccctgtaaagataagtcgggagagagagagcagaagcaccgccgccggggattctcgacctgggcatcgctctggtctcggcttgcggttgcggatgctcgcttgtgtcgtccacacgtctccatgtaccttcccgaagaggatgtcctctgtgggtggactaattgcttgccagagaaatactcggccgcggatttgcagctcgccgtggaccgttcccaccactacacccttgctggtaagaccatctccgcatcctctgcgtcgtccttctcgttgcgatcgcattcg

SEQ ID NO: 70268 - DNA, 391 bp, Zea Mays
tagatatccagctacttattatataggagataagtgatggataggttagggcaagaatagccaggagtaagaaagtttatggtaaggaagaacttcgtgttgggtggtaatgcatctgaaggttgagtttgacttctctccttacttgacgaggttgatcttttcttctccggtcttggtctcattgagtagtgtatatcatcagagttgaggaataaggttaagatagatatggatgagatagactacatgatgtaggtcaaaagtttgttttaggtgggggttgatagattatgcaatccatcattactctattggttgggttgttatgtaacttgttatataggtcaagttgttgtgtatggccaagttgatctaagtcattgtagca

SEQ ID NO: 70269 - DNA, 430 bp, Zea Mays
acctaccgacctatttattacccggttttctgcttcgcaggagatcatctcggccaggggattggcttgtcgggaggatgtccgcctgctcgccacggtgtattttaagaacagtatcaaccgctactggcggcatcgtcgcgattcgtagtgagtccagatacctcttctcaattctaagtgactgattgatttccgccctgcccacccgcacccattgagaaatgagaatcatagtaatattgtctgctgggaagccttgcaattcttttgggtggcggcattttcgatatggtatcacttatatgtttaatcccattgccacttctgtttgagtcattgctaattctagtttaataacacatggaacactactaaccggtctccagaggacccctgagcttcaacattcatattgattagttcctgg

SEQ ID NO: 70270 - DNA, 490 bp, Zea Mays
cgaggaatctaggcatgaccgtttcaccatcggccgagacaacgacatggtcagggcaatgcccaccggacctgtcccatctgagggcttctacgtcgtctcaacgacccacggcgctctcagcctcgccctgcgcatggcccagaccggccctgctttctaaggccgacgaataaggcgatagattgcaattcatattggccaaatccctcgtgtgacgaactatcagtcttttttgcgtcctacgcagagatgacgccctaccgcggtggctttgacgcctttccacctcgactggaccatgccccaatggtaatcgccgcccttgtgtcccgcgaccacctccccactataaacaacctggagtttggccagtggcgacaaggacctcatctatgaagcgctctacacggactcggatctaggtccctttgggagcgatggtgagtagtgccactggcaacaatggaacgaggatcgtctagatacc

SEQ ID NO: 70271 - DNA, 776 bp, Zea Mays
gctttttataaggatttgtttgtaattaacatattctttttatgtaatgatgtccctgttcatataataaagttgttggcttgtctgccctgatcgtcgagttcttgatcgtgttctatgtttgagaactgattctagtattgaactcctgattttgttcgattctctatatgctgaaactgaattccaacgaaatgttcccgactgcttttgtgtcgaagaatattctctgtctgactcagtttgcctgactaaatgtcccttctcttattctaatagcagtttcacttgtgttgacgtcatcacaactctagtatgtatatcattcccgactgtcggtttttggcagaaaccatagctctgcttccgttgcactctcttcttcaaaatttgtccgcctattgtgaacccttctatggtatcatatctgaaaaggtgacagtatccatgttactctgactttgttatcctttggaagcacgaaaccaaggatacgtaatagctcgttgaagttagtgttagaccatccaaaaaatgagctttcatcatcaacacctcgagataaaaatgcaacaccatccattgccttggatagtccttataaagtggatcctttgccgcctactttcatccctttgaagttctatagtcacattgggctcccaaatagaaggttagcattgttgaggcaaataatgaatttctccaacgtccttagtgtcctctaaggctgcatcaccaagacccccatcatcgtcactcacgtcgtcggtcac

SEQ ID NO: 70272 - DNA, 743 bp, Zea Mays
ctggcctccagttggcttggtgaacggcatcacctatggttgtgatgtgtcgtccgacttagatcaactccaagagaatgcgtaaaacaccccaaaaacatttattggccaataatcttctcgttttcaaccctccaacagtccctccattttctcccccaaatcgagctcaacccgaatacgcgctcctcctccctataattttttgccttggcgattccttccccaattagcatgagcgcgcgaaattggtcactcccacgaaaaatttctcgtgcaaggttttgtttggccttgaagtaggcgcgagaagcataaatggcgtctatcttgagtggtggcggcagtaccggcgacgacgaattgagcgccggtggaagaggaggctaaggtggtggtgactacttggagttggagatgtagcctgatggatctgctcctccaaatgtgaagacacaatccatcggtagtagcttcccccaaatacaggtgaccgacggaggagaaattgacctcgacggcagaggtaccttgcgtggaggtggagtacctttctatccatctatgcctagacgttcgagagtcgtcgcagatctggcttcatccttgttcgggtttagggacgagttatgttcatccttcgacttaggggctaaaggtatgaagcatgaccttcatagtgctcctgttcatagtctgcatgaatcaaccttagtatgtgataccgtcaggctgtattactg

SEQ ID NO: 70273 - DNA, 427 bp, Zea Mays
ctcacttcaactcagtcctgtgcagcccagccaccgtcccaacgcgaaaaccctctctccactcacatttccacttccagaccccgctaatccatccgtccaaattcattcaaactttgaggcattcttcctcaagggattctcctccatcttatcaaatttggtggcagttcgtccggtggattttcagatcgaggtatttccttgtttttcactcttttgccccaatctacatttctagccatcattttatgaatcccttcaaggagtaggctaatctatgcatattgaacactttccttaagaaatttagccttgttcttcacgtttgttgtggtagagtgtgtacggtgttcatggccaattgaattgctcatatgaactgttgaactgtttatgccactcgcaccctctcctagcatttgtt

SEQ ID NO: 70274 - DNA, 786 bp, Zea Mays
ataatattgaaaattcactaaagatatattgtattaatgatccaactctattttattcctacaccaacatgtcaagtggcactatcaatacattgacattaattgctatgttgttaaggagaagatctaggatcaaactattaaagttaagcatatcctcataagaggttagcgtatccgctcataaaaggtcttctacctagtgtgtttagagagcacgtagccgacatggaattaaaggaaagcctatgattctgaatcaagggactatgagacaaccatttcacaaggttgagaagattaccccacctcaagatagagagacatgttgtggtcaatgagttgggtggcacatgattgatcttcgtaacacattaggcttgatgtgttgatgcatcaaacgatcaatcatagagagtttataataaagaatgttgagaacaaaggggaaaatgttagatatgtccttaaactcgtccaagcgatcgagttgggctctactacaagccttgtttgggggtgcaaattctccccatgtttgtgcctcagtcacaggcgctatataaacaaggtcagtgccgacatggaaggcaacacttttgccaatcctagttgtcgtacctagatatgttctgatcaactgtacccaattgaatagaaacatgcccaatctattctatggcgtcagtagaccacagatcctcgagacgatgttgacaccttctacaacaatgactaatgttcaccttggtcctaaaggtctaactctctctgtctctctctccc

SEQ ID NO: 70275 - DNA, 484 bp, Zea Mays
ctttttatttgtaattatacaagattttcttgtactaaaattgtcttgtatttgcatttcagcttccacgcctgtgccatcccttcctatagacatggagattttagatgtgatatctaattcttcggatgtcatagaagatatatcaagtgatccagacgacatgccacatgatttctagtttatgtatcgtgtgtttcagacttatatattacgtggttaaaacatctgtgaacatgtatgatcatttatgtgtggtcaagactcaagactatgtattgtgtatttgtgtggttgagacttttatgtggatgtgaatgaacaatcgtgttttatgacttatgtattgtgtgttaaaatttgagtggacatgtataagtgtatggccaattatatgtggctgtgaatgaacaattgtgtggttaggatttgtttgttgcgagcttttccgattacaattaccatttcccgatcaattccgagc

SEQ ID NO: 70276 - DNA, 482 bp, Zea Mays
cttctccttcctcttacgacagtgtttcttccccttgcaacggaaacccctccaatccaccaagcattcatggaggatattcttctcccctccttcccctataaaatgagcataactctctcctccctctcactcccacttctgctcccttgttgtattcatgctctaatcatctttggctgccacacatttgttagtaggtgccccatctgctggccaacctctttcatgaccctgaagtcgtggacttggtccactagtcctattatatataatatagaaaatttgctccattattatcaactaaaatttgtgcatccattattttattgcatatatatttgtatttcttctatgtgttttcttgtgtgtatcggtggccgtagacgagagcatgttccaagaatgttatgtggatatccaagaacaaagtttagagttcaacgagcaagaactttaagacaaaggaaagtgtccttgac

SEQ ID NO: 70277 - DNA, 685 bp, Zea Mays
ttcaaatttagtaaatcccctttcgttattgagttattttgttgttatatgcattatagagtggtagttacttgggttgtgatctttgtattattgtttgatcattgatgccaaattgcaagttccctagtttcattttgcctggttaaaagcataatttctattagaagtcatgctaagtgatagctcggttgattgcgcctcctgttgattaggctgcccacctggactcagtcccaggtgccggcgaagtggtacatccctgagaagaatggctagtatgtctcctatctagccagggtctggtgcctccctatattaagggcaatgtcaatgggtcgtctatctatcgccatgtagtaccttgtttatactactggctaatcttttgacagcatttcatgcatcataaaatgttctactttaatgttccatgttacttgaaattctcagaaattcaagaacatggtacttgagtgtttttcctttttcagaagaatattgcttgtctgcaacactgtcattcttgactactatgttatggtatgtaaggaacacattatgtgtttaaagtattttgtttactgctgcttaccagtgaataagtgtttgcacctatattaagaagtatcttttcaagaaatactatttcatgaaatgcactaataacattattttctttgct

SEQ ID NO: 70278 - DNA, 860 bp, Zea Mays
ccgaagcatggcgaatgatgtaatcagtgctttcttttgaagcttcggaggcaggagcttcaactttttcaggcgcaacttgctctgtcgccttttcttcaactacgacaggctctatcccagtgggctctgaagacccagcttcggtttcagattgaattactacagcttcgacttctgcctgctttgtttcagcttcgggttgcgctttcgaagcttcgacaagttttcttgaaggagtagagctcaaggtctttgctgtctccagcactacatctagcacatttgtcatccttctcctcctaggagttgtggcagaactcttttgtgcctttggcactgttacctccgatgaagggctcaaaatttctggcacttttatttcttcaatatttgactcttcagctttacccttaccagccttcatctcaactagctcagctgaaggtagcttcggcattatagctggatcttcaaccctctgcgcaggaggaacagtttcttttgtcttggcggctgaggaggccccttcgccaaattcaggtatcgcagccagttcgatgtaacgtgaccggtgagtcagaaccttcatcttcttcctcttcggctcagccatgatggccgaagcagcaacctttccagcagcagcaatcttcctttttaccccttgccctcatagcgggtaacaatagtcagggtatacgaagccaatagcatcaaatagcctgtttaaccttttcttattccgacccccgaaggctgcggacaaggcattgtcttcctttttggagtacgctccaagcagttcatcacttgtagcttcgatacacttcagccaatcatcatttggttcatcaaac

SEQ ID NO: 70279 - DNA, 401 bp, Zea Mays
tagcagaaaattattaaaatgcatgtgaaggttatattgtgtatactcaaatcgctctaaatatttgtgttgcgttgaacttttgggctcacgtcgtcgagcgattaaatgatatagtgggtacttacacacgtcgatcagactacatttttaattggctgagctatggcattggctaagcattgactgcgcccaggcaacacgatgcattatttgtgtcgtaagaacttggctgcgtcatgtgattgctatgttgtactctcgcttaatcggaccactcctgttgagttggaccggcatcgtcgagtcacgtatttttcgcatgccctgtaggcactgttcgtctgtcgttatcaccgagccacagttgcgtctgttgcgcacgttgtgtggacttgtcg

SEQ ID NO: 70280 - DNA, 388 bp, Zea Mays
ttgttatgtgtatctcttaaagtcaaaagacgaagctttgcattattttaagacctacaaagctgaagtggaaaatcaactcgagaggaaaattaaacggttaagttctgatcatggtggagaatatttttcaggtaatttttctgatttttgtgtggaacatagtattattcatgagaggacaccgccatactcatcagaatctaatggggttgctgagagaaagaaccgtactctaactgatttggttaacgccatgttagagacttcaggactatctaaggaatggtggggtgagacgattttgacagtgtgtcatgtcctgaataaagttcccacagaacaaaaaaatcacaccattcgaggaatgagaaaagaggaaattaaa

SEQ ID NO: 70281 - DNA, 469 bp, Zea Mays
tagtgcaattgtatgaacatggatggaagaatcaccaccctatgtgatgagttgtgcaaactaaacctagaagttgtttcctcgggtgctttaaattatatctcgctggagcccacgttacaagagcaaatagtcagggcacagattgaagacaagggtgttcaggtcattaaggaaatgatcaagcagaaagcagaaaaatacaaatgcttccgtcaggacatcaaaggaatcctatggtttggagatcgattggttgttcccaagaaccctgagctcagaaagaagatattggatgaagctcacctttcaaaattctccatacacccgggtagcaataagatgtatcatgatctcagatccttatactggtggaccagaatgaagagggaaatagccaagtatatatccgaatgtgacacctgccagagaatcaaggccagtcatttgaaggtagcaggccctttgc

SEQ ID NO: 70282 - DNA, 774 bp, Zea Mays
tcgtgtcccgccacggacgatcgcgttggcatcaccggcgttcgccgttatccagccaggctatgtgcctcgacgctttaccgcatcgcggtgagtcaccataaaccgctccttagtcctggctcgtcgtcggtgggtctgccacggtgaaggccacgaatcaccgcgccagtgactcagttcccctcccgaccgccagcgcattttgtccaaattgaacaccaccgctcaagcacactataaattgaacacaccgacgggtccgtagggtagtcaagcaccaagccaccaagtcgtgccctcaattgttcaccagagctcgctaattccaaatttcccccaaatctgctttgcgccaccgtgaaagaaacctcgccgtggctagctcatctcaggtccgctcataccctctgctctttcgtttcagtgtacttgtgtgtccctgatgctccccaaccccgctaattaagctaggaacccttagatcgtcgggaacgtgttggattgtccgttgatcacacggtcaccgtggacacagcgcgctagagctccgttagtgaaattagttgggggaaaactcttgttagggcttgaatttggtctcagccgaagtataaatcggtcaccaagtgatccggccggtataagctcgccggagctcggttctccgctgtgcagtgtcgtggactacgggttgtgaagaaatcaaagtgcaggggtgtatttgtaaaggtcgtggactgcgggatgtgaagaaatcaaagtgaagaaatc

SEQ ID NO: 70283 - DNA, 952 bp, Zea Mays
cattcagcgctagtgttgagtcactagcaggtgggacccacttgtcgggttcatccccttcgcgtaacagaacccgcgcgggagcttcggctgccgttgcggacctcgctgaccgagctcgaccgaggtataaaacccaatcacgtctctcctcctcctcaacccaccgcgccgcactcctctgccctttcgcattacctagaccatcctgggcgacacgagaagggcgccgccatcgacgtctgggatgaccactgccgcaaccgtgctctcccctatgatccttgacggtaactccctcctctcgcttgcggaatcttctctggatgataggagtttataccgtgccatgttcgaaccataggaccatagtaattgctcgccgtcgcgtgtgtccccgccgtggattggactgcaccatgggtcgggggtctacgctgttttgcggctgaaattgatgggcaacataggttcgggccgtcgtaaatctcacgagggctgagcgaattagagtttggggctcggggatttggatggacggtggagattagtttggggtgtaccgctttaggcgattggatccgtgctgtcggatcgttatcctgcggattagaacagatcatgtttcattaagttgtagccgtcgatctctgatctagcggccaccagcgataccggttcatgtataggaatggtctaatccgcgccactgattctaatcatgcggcccatatataaccataccccttcgctgaagccattttacaaaagagaccccatgaatagacataataaaccctccgtccagtggaactattctctgtgtctaggttatcttgcgcagagacccttgagcttaccagaaattgaggcccagtccagagtagattaaaaacagtgaaataattatggaaatttgtttttaatacaaaaacaaatctagaaacttgta

SEQ ID NO: 70284 - DNA, 1039 bp, Zea Mays
gcggacctatgtgtaacccagtgagggcacatgccctcgctcatttctcgattacaagtaatacagtctaaattttcactattaggtcctctgctcggtctaatttaaatgccctcgctctgacattttagtgttggttgttgtaaatgtgccctcactcctatttcatcctgggtgtgacccgggggcagataattcttttttatgctcgttctgcccttattactacgttactcaatttctttgctcctttcaggaaatttttcgccaactcaatgaatgagttttggtcagcttgggacccaacaaagaataatagaattccagtcccagggtaaagtagcagagtggtgacaacaagcgcttgacgcaccatgcttgaggatttcttcactctcactgagatgaaggatggcatctcgacggttgcaaggatctcagagctcatatctaagatgcgcaggctggagagctccacccacatcaacacggccgatgtgataaggcagtgctccacggctgccaacacactagcatccacgaaaagtgaagcgtgtcttcagcatttcgttcagctaaacggtgtttcctttctcaaccgttggcttcaggatgctcaaaattgtggtggggctgtttgttagcaggtcagcagaggatcttatagttgcgatattgactgcgttggagtgtcttcgatcagcaatgagcagtcagcctcctgtagagttattcctactgttgatcatctgtttgctcattgaaatgccttgatcaaccaaaaggcgagagcactctgtcacaagtggagcgctgtaccaaaacatggtacaaatggagagcattttcacacagaggataacaaagcaaccaccagggataacatcaccgaatttaacaactggaaatgcaacattaggggatgcgaaaaacttggtcgcatcccctacgtgtgcaggtcatgtgggtttagaaggtgggcagtccatcaccaatgaaacttcttccaatgatgtagaactgcccaccaatggcatac

SEQ ID NO: 70285 - DNA, 422 bp, Zea Mays
aagcattccgtcttctcagatggggctaagcctgagggatttcaggaggatggagtacctctcacaggcacgcggcttctcaaatgctcaacgtattttaaccatatattttaacgtattttaaccatatttttaaaggtcatcgatgagacgctgcgtctagtgaacatctcttacgtctcgttccgtgaagcgaccaaagacgtctttgtgaatggtacgcttaatattgatccctctttctcccgtactgataattccttcctaaactacataaaactcaatcttcgcctgaacaagccacgcgtgctataggctacctgataccgaagggctggaacgttcagctgtggtacagaagtgtgcacatggatcctgaagtttatcgtgactccaaagagtttaacccatcaagatgggag

SEQ ID NO: 70286 - DNA, 379 bp, Zea Mays
ctgagctcttccattggtaactgttcctcagggacacgaagatacttcttaagttgagacacatggaatacattaagcacatcagatagattatcaggtaactcaagttggtatgccatctccccaactcgcctaaagattctgaatggtccaataaagcgaggggacaatttgcccttaactttaaatctcctcattccacgaagtggtgacaccttgaggtacacatggtctccttcctcaaattccagtggtcttcttctattatcagcgtagctcttttgtctggtctgagctaccctcaagttctcccgaattatatggacttgttcttctgcctcttgaataagttcaggcccaaagaactgtctttctccag

SEQ ID NO: 70287 - DNA, 1016 bp, Zea Mays
gaaaaggtaagggtattccctcctcaaagagtcctcactctcccaggtagcttcctcttctccttctctgctccactgaactttacagagtcttacttctgagttgcgggtcttttggactgccgattcaagaatctttactggcttttctcggtactgcagatccttctgaatctgaattgtctcttcttcgatgtgactttctggcacttgcaggcatttgctgagctgggatacatgaaacaaattgtggatatctgacatggattctggtaattcaagtcggtaggctgcgggtcctaccctgcccatgttaggataggggccgacgaaccacagagctagctttcctttcacttgaaaccttttggctccgcgcattggggagactttgaggtaaatgaagtctccttcctcgaacctgagttctctccgcctgttgtctgcataactcttatgccgactctgagcctcaagtaatcttttgcggatcagggcaaatttctcttctgcctctttaacgaaggcatgcccttctagtgtctggcactttcgtccatacaatgcttcgaacgatgacatcttgatattggcctagtagctgttgttatacgagaactctgcgtatggcaaactggactcccaatttctgtcaaatgtcaacacacaggctcttaacaaatcctcgaggaccttgttgaccctttctgtctgaccatctgactgggggtgataggcggtgctgaagtctagcttggtgcccatggcttgctgaaggctcatccaaaattttgaggtgaactgtgtccccctgtctgacactatcttccgtggaataccatggagtctgactacctctttaagatatatccgggcaagggtggctcctccgaaggtagtgttcactgggatgaaatgggctaccttggtaagacggtcgattatcacccagatagaatcgttccctttttgggtctgaggcagtccgattacaaaatccatgcctatttcttccc

SEQ ID NO: 70288 - DNA, 734 bp, Zea Mays
ctcgttttattaggcttctctcttctagtattcataatttcttcttctccctaatagtattctcaagtgacgttatcctttaaaatagcactctgaatcattttaatcattttattttcttatttctcatatctaaatagagcatactatgaatgaatcggagttaaatagttgtaagtaaagagttgcagtcaagtgatagtggaaagtaaagaatcggagtcaaataattgtaagtaaagagttgcagtcaagtgatagtggtaagtaaagaatcagagtcaatcacaattgcaggagatctgctaggcaagcaactcacgaggaggcagttctgaagatgacgacattgggagctgttcatcggggcaaaggaaatggaggctaggatggggaggtaggattctgattcacaccctctttctataaatttctggatttattcacgtacatggatgagttgaaaggtggtgcctaagatcaaatttgttatcaaatatcttggagggagaggtgtgtacaaatgtagttcccagattgagctaatttctacctagttcatagaagtttattcaaacttttatacagacaattggatttttttggtcagaggtgatggaaaagaaaatgataaataaaaaaaataattaaaatgagtcagagtgctattttaaaggataacttcacttgaaaatactattaaggagaagattaaattgtgagtaccggaagac

SEQ ID NO: 70289 - DNA, 436 bp, Zea Mays
agaggcggttgcgagcacgacgagggtagacacaagcagcacggcgtttgcgaggaaagatattttaacgatcccgcgaaaaggacacaagatctggaacaggcccgacgagaggaaaatatatatacatatattatcgagttttcagaattttatagttttcgcaaatactaaattttaggtatttaatttatattagaaaaactaaaattcatatttaatactcgaagaaacattccaaagattccaaaaactcttgggaacatcctcaagatattttaatctgttacgataacattttgtactcataaacactatgcattggcatgaatgcaacaatcaaagttcctctaatattttattttactaggcttacacatagatataaaacaaaataactctccactgtttaggaaaaaagaaaagaaaagcaagg

SEQ ID NO: 70290 - DNA, 816 bp, Zea Mays
ccgatcccaattccactggcatcacattcaatttcaaatgtcttactgaagtctgggagtacaagaactggggttgttgttaacttcgttttcaagtcttcaaatgccttttgttgtgcttctcccccatttgaatggtacttcttttttggtcaatttgttgatgggagcagcaacagtactaaagtcttttataaaccatcggtagaacccagcgagcccaaggaagcttctcacttggctcacattttatggaggcatccagtcgcgtacagctttgatcttttcttcatctacctccacaccttgtcctgatacaacaaatctaagaaacactaccttgtcggtgcaaaaggtgcacttctcaaggttagcatataatttttgttctcgaaggacagcaagtacgtatcggatatgttcaacatgatcatcgagggttttactataaattagtatgtcatcaaaatagacaacaacaaatttgccaatgaaagttctaagaacatgattcattaatctcataaatgcactaggtgcatttgttaacccgaagggcatcaccaaccattcatacaacccaaattttgttttaaaggttgttctccattcatctccctctttcatacgaatctgatgatagccacttcttaagtcaattttagtgaaaataaaagcaccactaagttcatcaagcatatcatataatctaggaattggatgtctataccttacggtgatgttattgatagctcgacaatccacacacattctccaagatccatctttcttaggaactagaaggacagggacagc

SEQ ID NO: 70291 - DNA, 292 bp, Zea Mays
cattgccgacttaagccgattgctccgttagcagggcatagtggtcacccctagttaagtaagcgcgagcatgttgcaccggcttaagtcgttgccgacttaagccgattgctccgttagcagggcatagtggtcaccccaagttaagtaagcgcgagctcggctaggctgggtccttaggctccggacgacatagggcaattcccttatccactttcccgcaaacttttcattcttatcgaagacctttttcctgagtgcctccaatatcatcccgttagctcgttcaacc

SEQ ID NO: 70292 - DNA, 583 bp, Zea Mays
gctgcctcacgaaaagtcggtagggtgacaccatcaactgtccttagatccacataggaggtggcgccagtcacgtggtttaggagaacacgaagatagtagcgctccccctcggccggatgagcagagactatcctaccgacttgtccacctgtatctcatttcctccgttgccatactttgcccttaccactctgccaagtgtaccacttagggaagtcacgatataggatgccacgagcttcctcgtgtagcctattcacctcaaaatatgctgtgagcatcgacctatcaacacctggacggttgatgactcgctcgaccatttgccgctcatgaaacgccaccatgtgcatgtttggaagatggagttgcaactacataacaggtggagatatctgactaagctcaaagccatatatcctccacaaggcttctggaggagtcacccaccttgcatctctatactacttgatctcatcaacatcatcgtctgccttgctcgtatctctcataacaacagacgcacgatcatggcctttgtatatacacttgaacaggtatttaacagccttgatgctcc

SEQ ID NO: 70293 - DNA, 566 bp, Zea Mays
gcacgttcatggacttgacgtctctatgaagaatggacacggatgctgctgagtggagatacgtaagcgcgccggcgacctcagctgcaatcctcaggcgtgcctcccagggcagctcgcggtcgcggtggtgcaagagatcgtacagcgtgccattggagatgaactcgtagacgagcagagggacctcggactcgaggcagcacccatggagcttcaccacgttgcgatggttgatctgtgagagtatggccacctcgttgatgaactgctcgatttcggtgctctctacgagtttcgatttcttaattgccaccacgcgctgatcagccagtatgcccttgtagaccgtgccatggccgccgttgccgaccacacgtgtgcggtcgaagttgttggtggccttctgtaggtcgtccagagagaatatcttcgtaccgttgttatttgctgatgacgagaacagttgttctaggagaatacccttgttcttgtgaaagtacctctttctaagccttttctgaacgattctctgccacctccgtgtaaagatagcaacagctgca

SEQ ID NO: 70294 - DNA, 279 bp, Zea Mays
gtcattttgtaacttttgttatggtgaactatttttgtggtaattcttatcgtcattatttgttcactcttcgtttgccagggcttgattctaagcaaggctctgaaggcccaaaaggatgcagaggatgagagctatcgaatagcgcttgcaaaccttcgttcggaggtcataacattgagaaatgaagctcttaaaaaggataagatcctactctctttggtggagagattaaaatctagcgaagccaggctttctgctcaagctgaagcccatgaa

SEQ ID NO: 70295 - DNA, 287 bp, Zea Mays
cgctccaatatattagagaggagaaacatttacaagacactcacacgaagacaaagagggagaaaaaagagagcagaagggcaaaaactcaaacgcctactgaggttaaacacaacactgagcccaacaggccccaactaacccaaaatggcaccaactagttctttcactaaagaagcgacctggtctggattcttctgttgattcctgaagatcctgttgtttctttctaaccataagctccaccaaaaataaatcagaagaccgtcgaattttttccgagattg

SEQ ID NO: 70296 - DNA, 766 bp, Zea Mays
tatacattctagttgtgtagaggacggaagacttcttagtgtaattgtatcactcgatgtaattggctaagattaataaagcttctttttaaagagtaaagggtgaaatgaactgtccctcatacacacacggaaaattaaaaaaaaactaaaacacaacgctcggcgaacttggcggcgaaccagattcagttaattcctaattgaagtccttttgagtaataggctgcttcacactagctttatctatcaagtttcaagtagtgatgtgcctgcctactgcgagctgcgaggtagtctgctcgcgtgtcactcaaggaaagagacggtcctagtcctgcgccgtcgcggctttaaaacaacctcacctcggtgctccctgtccgaatccacaccactcgcacaagcgcgcccactagagtgtgtgtgcatcgtagaaagagagagagagggcagcatgagctcgccatctccgctcgccaggggcctcatgggctaccactaatattgatatgcatgtgtactaccactaatattgatattgcatgtgtactaccactaatattgatattgcataagaaacaaagtaaaagctggacaaagaagggctacgcagtgtacccatacagaacgtccaagtggcaaaacaaaattgtcattacaaaaacaagatgaccaagaatatgaaatatgagataacaagatatcaatatgagataacaagatatcaaatataaactaagatatctactataaagaccgttat

SEQ ID NO: 70297 - DNA, 540 bp, Zea Mays
aagatagtgggtttgaggtgctcttttacttggctatttgcactttggtccaaaaaggtacatttttacagataaccccctagggttttagtccagggtttttcaggggtctatatagggtttttggtgcttctagggtttggatgctacttgagtccatccatggtgacattttatgattatttcaactaagttttgaagtttttcccttggttaaactttggttattcttttaagcccagcctagggttaagcactgtatcctagggtttcacccataaaatgtcacatcaatataactttgtttgaaatttttgcctagtgaatgcattctaggtgtgacaaacacatgatatgccaatgcttatgatgttatgctcatgttttagtggtagtaacaccaggggtgttacagagaaattggtggtagcaagttggtgcgagcagtaaatgccgcgatgtattcacggagccaaccaatatatatagaccggtaagcgatggagtcgaggagtcaccccgcttcagctctctacctag

SEQ ID NO: 70298 - DNA, 469 bp, Zea Mays
ggtgggtcgtgatatccatccacaccacgttgggatgggggagtgcgaggtgatggtcgacaacagggtcatggggaggggaggaagagggatgaggatgatctcaacaataatagtgttgggcatcatatttggcatttgggtatgaccgtacggttcagccatgtggcccagatggtccgcgcctccacggccagattaacacgggcgagagtagttatcccatgcgggatcatcctaacctatccacgggaatctgttggatcacgcctaagaaaaggtccaaacctcctcccctataaatataaagggttacgacggattgggaaccccgaacacattttaatcgaaccaatcaatttactttctttatcattcatgccttaggagtagacatagcatatccgtaattgtagtttctcaatctcaatcttcacctcgcttcgattccacgtcatctcgaggcatc

SEQ ID NO: 70299 - DNA, 527 bp, Zea Mays
tgcaaagagcagcctgtcaattttcatgcaaggcgagtcgatcccgaggctaggacaaataatggttgtccaatcctaccataaccacctcaagcacaacgctcatgcaaaagattgcaggtgtaggatgcccaaacctcctagggcttttggtcttgctgaacaggtccagttcactttgcatttccctctcgtgactctctccattccagctcaaaataattgcctccgctttgagtccacgaactccataatttcatttggtgctttgagggcagataggaggtagatagtttgagatgtaatcactaacttgaccaaggcaggcgtctcgccatgttcaaatttctttcgttccagctattaagtatactcaagactttgtctagcaagaactgaaagtccaccttacggagtctggagttggataaaggtaggccaataaatctgatcgaaaacattgtccttttggccggtagcccctccagaacgctagctaggtctatgccatcgcagcaaattacgac

SEQ ID NO: 70300 - DNA, 402 bp, Zea Mays
ttttgccatcatgagtagtgatagtgacttatttgttgatgctcatgatctatggactaaagttaagttgaaatttgttaagtccatatgcacttcctctgctccctctattactagtgatactaacttgtcaaagggagaagaacaagaacgatggcaaccaaacgatgaatccacctcatcaacaggtttgtcttccactagtaagaaatgttttattgctaacaatgatgatggagacaaaagcaatgatgagggagaggatgaggagtctacatcatcacaaggtacattttcctgttttgcttccactaatagtaatgacagggaaaatgagaccgacgatgtggaagaagaggagattcgccgtttctacacccatctcaacaaagaagacaaagc

SEQ ID NO: 70301 - DNA, 497 bp, Zea Mays
tgtagcacccgctcccaccctcgatcgtccaccagcacgcccgaattgcgcattctccccaattcggttctaaaacaccgtgaactcaaccccgccgtggtcagccatactccggttagctcctcccctctgctcccttgtttaagcattcttacgcgtctacgatgcttgccgagccactgaattgaactaagagccctctggtcgccgggaacacgatcgtatagccgctatgatcacggccaccgtggctagagctacgtagttggtcttagttgcaattaggttgggggaaatggtcaggctagccccgatttcatgtctgccgctcggagaacccagccgttgccccgttcggccggtacaggtgctcgccggagcacggccacgcgtgaacggcgtcggggactttaaactcagaatagatagaagaggaaggacttttatgcaaacgtcagtgactgtgttaaatagtgaaagggctcgttcgctgtttg

SEQ ID NO: 70302 - DNA, 647 bp, Zea Mays
agcagaggtgatggacttgttagtggtcattgaacgcgactcaaaagcctcgactaggtgtttcatgtactcttctctcatatcttttttcttctttggttttggagaatcatgacgcaccttacacgcttctcagtcgcatttgagcatgggtcaggtgtgctattttcacccccatctaaagtggcttcgacatgatcatcggatgatgaatttgcatcctcgacgctaggaacaagggttgtttgatttgtgcagacaatgggtccaaacataacctttagctcgtcctcattctctagggggcagttttgaacataatacaccctgacattgcctgcagcaacatggtttttcctactttgagaaggccattactattgttaatctaaaaaatgtaaaaaagtctacttacttcattttgcttagcccaccactcatctggagcactgattgaaccagtatgagggtctcgaccaagacctgtagccctttcattaagagttttccactgtgtgaacattctctttaagttgtcccacctattcttcatttgatccctggtgtaagtgcgcccagtgcgttccttaaactttcttatgaggttagcatacccttccgcatttagaaattgttgtggcctgttc

SEQ ID NO: 70303 - DNA, 317 bp, Zea Mays
ttcggcccagatcagtatgagcaccgcgcagcccaaatggtgctgacactgaggacccgctgtcagcctcttcgtcgcgcgctagagccgtgatgactgcttccttcgtctgcgtacccttcactgcccgtgggccatccccgtcagtatctccttccctcgctcgatgctggcagtccttcttccctgcggggatcgggtcgcgctgaccggctcggccgtgatccccggaaacgcgcttacttgcttggacttcggtcgaagcctttcgcgcgcttaaagctgactggtggtccattcggtcagctcctccccac

SEQ ID NO: 70304 - DNA, 969 bp, Zea Mays
gcgagaagtgggaggctgctgcggtcctcgcccgcgtctgcccgtcgtctccacgtgggggcgtgcccggtaccggcgcgacgagtacgtgcgctatgacctccactctgctgcattgtcctcacgctttccctgcactctatctacgcgtttatatgccgccaacaaccggtcattgccagtttttgtgttgcggttcgtaattatatttggacggggctttggcggacaatttaatggtactactacattagtgcatgatttttgtgagacatagattcgtattgaagcatgcctgtttataattatgatgttatatacatatcacataaggacataatagtggagtaattattgaataaatgtttccccactctcgaacacgtaggagttattatatgttggataaaggcatcaagcctcgtcctaacgagatggaaatatggaatacgcctgagatttcaaacgaagacaggatatccttttcttgctaaacaatacgtgttttttgtaatcgtgtctctcagtgtttacttctcttgagttcaacaggaagccttacgcctgttcaagacgtcaggtgttggtatttgggttgcaattgagtgattgggaaacctgattggacagaagcattgttggtcaaccaatgggaagcaatgaccctagcacaccctccaaggcttcaaaggcatcaaaacaagtacttgaaacagtggtaacacactgttacatatttacttgcattcggaaaaaaacttttgcatatttataaatggcattgtcagttcttaactgtgcttctgttagtttcctaaagagataatcgtcatttttttcccaagcaataaccttagacaccgtttggatccttggaattaaattccatcgtaatttaggcatagatcaattaagctaatatagttttatacagtatatttagatactacggttggtcatatgagagag

SEQ ID NO: 70305 - DNA, 817 bp, Zea Mays
caacccaccgcgctgcactcctctgcccttttgcattacctagaccatcctgggcgacacgagaagggcgccgccatcgacgtctgggacgaccgctgccgcaactgtgctctcccctgtgatccttgacggtaactccctcctctcgcttgcggaatcttctctggatgataggagtttataccgcgccatgttcgaaccataggaccatagtaattgctcgtcgtcgcgtgtgtccccaccgtggattggactgcgccatgggtcgggggtctacgctgttttgcggctgaaattgatgggcaacataggttcgggccgtcgtaaatctcacgagggctgagcgaattaaagtttggggctcggggtggcaggaatttgtgcgctccggcgaagctccgccgtgggggtgctgtgcggcgccgacggcgcagtgtttgtttgggggaaaggagaaattgggtcctggccgtaggatttggatggacggtggagattagtttggggtgtaccgctttaggcgattggatccgtgccgtcggatcggtatcctgcggattagaacagaacgtgtttcattaagttgtagccgtcgatctccgatctagcggccaccagcgtataccggttcatgtaacattaggaatggtctaatccgcgccactgattctaatcgtgcggcccatatataaccataccccttcgctgaagccgttttacaaaagagaccccacgaatagacataataaacccgccgtccagtggaactattctctgtgtctcggttatcttgcgcagagacccttgagcttaccag

SEQ ID NO: 70306 - DNA, 984 bp, Zea Mays
agaagatgcaatcctaataagcctttatacattagaagttctattgaatgactatattctttgattaaagagtcagtgccttgcatcagactaagtgcttatttcgggaacaaggcaatttgtgaaatatattgtataaaaaacactggtagtacatgtgcttttggttcacttagcttccccgaaggcaggggcatgtgttgagcaccaaatttggctcttgagtatgaccgggtggtttggccatgtgatcggatggtccacgggtgtatcccggatggtccatgattagattaattcaggcgatagtcctatcccactaatgcttatctaactaatcacatagtattttgttgagaagcgcctaggaatgggtccatacctcgacccttatatatgaggggtatggccgattgagaacacacacatccaatcgaatcaatccaattaccttattttaatttaccttatgcattagatctagatgtagtgtagcactagttgtagctccccaactcctatcttcaccactctttggctctatgtcgtatagaggcactttgggtagcctaccgatccgaaagcaaccctacaatctctcctccccgacggggtccctccctagaggcaagatttaggttcaccttagagctctctgtgccattgcagatagtctagtgccctcccgcggactgtctggtgacatatcacggaccatccaacaccttaaagagatgtccccaaggtctcgactccctgtgagctggatctagaaattattagtgtttagcacaaaaaggtgccaatagtgtcgcttcggattatggcctctttggacgctggatgtattgggtatgctaccataagtcgttacttcagtactagcacgatccaatggaacatgtcttttgtgtcgtgccgttataaggctgactctagtaacacccaaagtttacccataagcattgttttgcattattctgc

SEQ ID NO: 70307 - DNA, 380 bp, Zea Mays
gttttggtattttggagggattgggtgaagatttgggaaacaagttgagattgccttttttatttgcccccattcattcctgttctagtcacctgtttgatccttaaattggtattaaagcgggtcaaagatcaatccacctttgctggttcttgattcgagaaggcgacatagagtgtggcattgataagcaacaattttttatggatcaaactacccatactagaattcgtatatcttgagaaccaagtttaggagatttgtgttgacaacacctatgtggtccttccaattcgagctccacccttcaaattggagaggcatatcatagtgtgtaatattattatatatctgttttcctacatttgtttatactcgac

SEQ ID NO: 70308 - DNA, 442 bp, Zea Mays
gcggcgtcacgcgccgccgaatgagcctgccatgttgggagtgatgatggccacctccatccctaacacccgctctgctgctcccaacaatgtggttcgccgctgtgcacctcgttgtgtccccctggccttctagggctcgtccaggcgcgcatcgacgtctacggatctgcggagatccatggcgcgtgcggtcgcgtcgccaccagcagtaggagaaggaaaggcgaggagacggcaccactgcttgccccgacatcatggtgctgtttgagcggagggagggagaatgaacctcttggcgacaacccgagccgacaccgtgacgacggtttggggaaggggggatgacgctgccacgacgcgacgtgatgcttcccgaagcagcgtacgccgagtgccggcggagagatgatattgtttgtgtctgtggttgatatgc

SEQ ID NO: 70309 - DNA, 929 bp, Zea Mays
ttcgctaccaagctaagccatgagcgtcgtgcgtattgttctcctggcttcgcccccagggatcgctgccctccccttttatagacaaaggaggggtctggttacaattggcttcccgtagaaggagttaatgtgttgggatagagtgaagcatttacccccggtagaaacgtgtttgtcggtatttgcctcggtcgtctgatctctttggtcagactctttatgtctggctgcgcgtgggcggagaggaacttaggcgtcatcattacttttcctgtagatcgcgctgacccatagtcttcatagcctaagcctcggcgcggctcatcatgttgcaggtcctatagatcgccggggtactccagcgtaggctcgattggccataagtgggtcgtaggcctacaacctcataggccatgagtggggttctagcacgggtttgcatgtcatgagtcgaagaaggaccgactttcccaccatggcttgacaccaggtgtatttaatgtgattagtcatttatgagaaggcagtcccaggccgggtgcaaaatccactagagtggctacctcccggttccccgactccctgctagctccgccttgcccgaccctaggctcggtgctatgagattgctcgggggcaggtccttccgaggtgggctcttcctccgtccatgctctgactcatgggccccaaggtcctgaggatcttatcctcgacagtagccctcgaggggagagtatgtcttcccttggtggtttccttgagtcaggcggcgcttgcctcaatttttaggttctgtatcttagttgagctgtagcattcagacctttgggaggcagaacatctcctacttagccctctctcaaggggtgtcgaatatcttgtcccgctttataagcatgggcaagtgtcgcttatagtcattc

SEQ ID NO: 70310 - DNA, 341 bp, Zea Mays
gggaagcttgcattgcgcatggatactagctgactcatgacgtgacgaccggtaggcagtagtagccgccggcctgccgctcgctatggagggcgtggccggggcatccccagaccgcacccaggtagatgtagatgtagaagatgcggtcgggccatcggggtcggggaacattgcttggcctcgtcctgcgctgcgtgccattccatgacgtcaggcaactcacgtcatcatattgtctcatatcgctttgcaaactttgtgcctgtccatgagttcttcaaagaatccaaatgtgatgatacacatgtatcctatgctgaatgaatcacgtacttgag

SEQ ID NO: 70311 - DNA, 415 bp, Zea Mays
caatgacttcacgactctccaaggcagttgcacgggcttgagctgtggtgagatccacatggagcttacggttgcgcttctctgcatcttctgctcgggcaatcatatgacggtggtgccgagccaagaaatcatattgtgtatcaagggtgagcaggtatgcagtgaggtacacgactgtggggtcgtcctcaagcagctgctgaccttccaatgcacgcatcctggccatccaaacaggacggtctctctgaaacggcggaaagaatctgagcggtgtgtcggccacttcttcttcatagatctgacacaggatcctcaatgccttgcgggcaacgacttggcaggtgtctctgaatctgtgcccagcagcagtgacactccattccacatggcgcggactggatccaatgta

SEQ ID NO: 70312 - DNA, 901 bp, Zea Mays
cgtcgagccacaagctacggaggccaggggttggcttagctcgaatgatagcactcggtccccacgctgctcgcgccatccgctataaagaatatgagacaaccagaccaccccggagcccacaggcgcacatggctagcttcaccccatggtggaacgcttggttttaccatcgcccggttactccttgaggacaccaccgctggcggcccccctccttggcctataaaaggatgaggtcgatccccagatgaatgagaggacagtgagacaagagagacccaggcagacattcagacgcgaagacgatgggccgacgagaggaaggaggacgcactgacgaggacccacaaaccggagccccgcctcactctgtagcccttagtgtcaccacctccacaacaagagacttgggagcctctcctctctctctctctcgttcgcttgtaacctctactacgagcattggtcagaaatggtgtcggtagcgcaagccaccaaagactgaatgagaacgttctgctcgaaccagtataaatcttgtgtccaccgcacacaccgtctggagcccgaaacgcacacacaaatttacttgtcggagtgaggtttaaaacaccgatactactctaacaaagtttaggggacgaaggatgtaaaataacaataaacaattaaacacaacaattgtcaattgagtgactgacgctatgatgcacacacacagcaggctcactgccattcctagctatgacgcacagttgcaaattgctcactgctaactagctaacttctaacacatgacatgctcactccacacttccacaatccacagaccacacattgacatagttgcatgctctcactcaacacacacagcagacagggaagacaacatgctcac

SEQ ID NO: 70313 - DNA, 1221 bp, Zea Mays
ggagctggtcggcgtggagctacgcgcggatatggtcgtggttctggccgcgatcacgtctagaggcgtatcgaagatggtgatgttcaaaatcaaagaggtggtcgcaatattgaggaggcgaatatgggagagggggtgataccttgaatcaaggtaacccatctccctgggaaggtcaagttaacagatctgaggaaaagaatgaagatagttggaaaggaaatccccatcctatgggagaagatggtcccaacgattcgcatgtgaaaaaagaggtaactcgcagttttaatctggatagatctggctgtgctttttgtcactttaaaaatcatcttactaaggattgtcgacatcgctttccttgtgacatttgtggttgtgatgatcatgttgtgtttgattgcaaaaaacgcttgccttggaattttggtccggaactttgtgcgacacaagttgaggatcatagttttttctatattgaagaaaaagtggataataggatgattaaagaaaaatccagcactgctattatcactgttgttcaagggaatgttagtgaaaaacagattgaattggaattcatgaacatgttaggcaagaatttatggcggtggtctgctagatctgtgggagacaataagtttgttatgagatttccagatcctaaaatgataggggatcttggatactttagacctttgggcatgagaacagcgaaagctcagattacaattgatccttggacacctgctgttaatgctaaaggttgcttgcaaaaaggatggttcagaattagtggcattcctatggaacaaaggtctctggtgacaatcgctaaagttggtgggctcgtgggtaaggtgattgaaattgatgaaaggactagacttagaaatgaatatgtgagagctagaattgcttacagggatgtcacgactgttcctggtgttgtggaaggctcccttggattgtttttgtatgattttttctttgaaagggaaatacactcggaagaggatgaacaatttcttgatactgggattagagttgatgactctaaccagaaagctgcaaaaagatccaagtatgaaggtaaaatgaagaaagataagaaagtggattatgggaatctggaggatggaaatattaaacagcatgatgagtgtagcagaaaatctcaaagttatacttatcaaatgcaagggcttgacaaga

SEQ ID NO: 70314 - DNA, 450 bp, Zea Mays
aagaagtgttagtggaattggtcttgtcaggaccaaggaaagggaattgtcaccaagtcactgctcgtattgaggagattaaaccatcagaggctatcgatgtagtatcagatttcccagatgtgtttcccgaggagttaccaggtatgccacctgaaaggaaggttgaatttgccatagagtttattccaggcaccgcccctatttccaagagagcctatcgagtgtccggaccagagttggtggaacacaagaagcagattgatgagttgttagagaaaggctatatcagaccgagtacctcaccttgggcagccccagtattgtttgtggagaagaaggatagcacaaagaggatgtgcatcgattatcaagctttgaatgaggtcacttttaagaacaagtaccccctgccgagaattgaagatttattcgatcagttgagaggag

SEQ ID NO: 70315 - DNA, 1151 bp, Zea Mays
cttctagacactcctgaacaaggcaattggccttgaaagcaaaagaaaggaattatctgaccataaaaggaagttccaaggtcagtcaagcaggaacacccggccaaacaatgctcaaggttcgcagttccgctctggaaatcagggtggaagcaattatcaagtgcaacgctctggacaacaaggccagagaaataatcagagtcaaaaccagcaaaggagcaactcccagaccaaccagaggtctggtggacattcacagaatcgtcaaggtggcaccaataacacgcaggccagaaacaacgcacctatccaacccaacggctgcttcaagtgcggtgagctaggccactatgccaacaactgcccaaggcgcaaccagcagacaccccagaaaggcaataattagaggaatggccagaacacccccgctcgtggatctgctcagaacaagactcctcagaaccagagcagaggaagggtcaatcacgtcactgcggaatcagtgcctgaggatatgctgacatagtgtatggtatgttccttgttaactccatacctgcatcagttttatttgactctggagcatcgcattcgtttataactaagtcatttgtggaaaaacacaatatacataagtatcctcttaagaagatattacatattagttcaccgggaggtaacatgaaggccacacactcatgcccccatgttaatatcaagattcaaggaatagatttttcagtcaacccagtggtcctaggatccaatggtattgatgtgattcttggatgcaactggttgaaaagttgtgatggagtgatacaatgtgccaatggaacaattatgttgacaagtcctcaaggtgaaagaatccaagttaacatagacaagtcaatggatgaaaaacggaagacagtgatcaatcacttggaagaaaagcccttggaaaatatcaaagtagtgtgcgaatacccagacgcatttccggaggaattaccaggtatgccacctgatcatgatatagagttttctattgaattagtacccgaaaccgcacctacctcgaaaagaccatatagaatggatgtcaaagatttagtagaactgaagaaacaaatagaagaattactagaaaaaggtttcattcg

SEQ ID NO: 70316 - DNA, 281 bp, Zea Mays
ttctgaagtttggcatctttttgcttaagggaaggggtggtatgcattaattggattaagtggcctttcttataaattattagcaataggtatgagtttgctcctttttcatgggtttgcatttttctctggtggtttatctcattatggacttagcaaattttggttgcccattattgcatccttaggggttattcatgatttatttggaaaatgtctcatcatcattttatttttattttccttacttaaaatgttgggctgaggtgttcattattttt

SEQ ID NO: 70317 - DNA, 733 bp, Zea Mays
atcagatcctacaaaaaaattacttgtgtttccgaatgcgattcaataaatttcaaagatcggtgcgctttcacttgtcaatgaggcggtactatggatagtgatagatattgcgatacaatcggtggattatgcgaaattaaagcgtaaatgggagggatggggatggggcatggcgaacctgaaggcgatggtactatgcgaaagaatgtagggaaatggaacgaagaaggagagggggaaatgaaccagggcggagaacggtggagggcaaacgatgaagcacgacgattagggcgagtgggggcggtgggggtggtcgtcgatggcgatcgtaggagcgggtgacggcgacggcgaggagcggaattttgagggtttcggtggggccgcgatgagtgggttgattgtggtcgggtgggtcttggacattgaccatattggctcggtcggctagtggggagcgacgcataactgtggggacccatagtgtgcgcacgatcagttggtcagtgtgtgtacgtcgtgttcatatgaagcataaagtgttgtgcaaaggatcgtaaatagtttatacaagcattaatcccgaaccacaccccggatgtggtataaattgttgtgtgtacatcgtgttcatatggagcataatttgttgtgtaaaggatcataaacactgtgcgtctgattgatatgtagttgttatcatcaatttatacaagcataaaccccg

SEQ ID NO: 70318 - DNA, 387 bp, Zea Mays
gatcaacaaggggttgatctcataatcattgttagaaaactaaccgataaccttcactgtttgaaccccaattaattcattattaacatgttgccctttgtaggagttgcatctcctaaaatcacaatttctggtacatcaactatcaaagaggtgatattggcgtcgcctagaaaatttgatagtcccaatacgagcaataaaaacatactatttatgaggactacataatgttagggtagcaaatgtagccacaatgcgacacacaacaacaagaaggaaaacacatccaaacgattaacacgggtcataaagaattgggatgataaggtgaaaacaaggcaagatgtggaatcttcaagcatatcgtcacaatggaaagtttgc

SEQ ID NO: 70319 - DNA, 653 bp, Zea Mays
gtttatagcaaacactttctttaggaagaggaaatcccacctggtgaccttcagtagtggccaacacactagccagattgatttcgtcctcttgagaaaagaggacaggcatgcctgcttagattgcaaggttatacctggagagtgtgtggtaacccaacataagcttgtcgtagctgacttccgttttaagattcatttacaacggaataagcataacaaggtcactagaacaaagtggtggaagcttaaaggggatgtggcctaaactttcaaggagagagttattgaggagggcccttgggcagaagagggagacgcaaacatcatgtggaggaagatggcgacatgcatccgaaagatagcttcagaagagtttgggttgagtgaaggaaacagaagggaagttaaagacacttggtggtggaacgaagatgtccaaaaggctatcaaggagaagaaagattgctacaaacgcttacatcatgacaagtgtgcagacaacatagagaagtacaggatagcgaagaaaaagtctgcaaagcgagcggttagtagagcccggggtcaagcctatgacgacctttatcaacgattggacacaaagcagggagaaaaggatatctttaggatggccaagattcgtgaaaggg

SEQ ID NO: 70320 - DNA, 484 bp, Zea Mays
agacactccaactagctataattttactatgttgctcttcgtaaatctcccgtatggaatgatcacaagagctccccacaatgagtgatcggagctaacaataatgatcaaagtagttcaacgatcttttgttgccttaaaatcgtctaggtaacagcaaccaccaagaataacaagaatcatgcagctcaagatgatcactaatgtcagtagatgcaataactcaatgcaagagatcactttcactctctcttttgatgaatcaacgttactagagataagtgaaataagatgttttctaggactcgctaggatgtttatcaggttggaaagccaagatatataccctaaggtcaaacaagctctgtttataaggacctaagaggcaaagagtcattgaggtctttattataggaaagttgagtgtcagacccgtcgacaccttccatccaaccatacgtccataccttatgggttatcgtgg

SEQ ID NO: 70321 - DNA, 447 bp, Zea Mays
atgcttctaacagtcctctaatctaatttggtcctccctaatcttacatcctagcttcacccctatgcgtccccaggctcgggcggtcaggtcggtataggccccacaaccaacctatgccttggctgggccaaaagctggttcataggttgagccaacgagcctacctaagctctatggaaagtattacatagccatcggtgttgctaagatggatcactattatttcttttctgtcgggccatcaatctgcatgacatacaattagaatgaatcttgcgctcgtaattcgtcttctgtccactgactaactgagtgtgtgtatgcaacacatgtaactcaacgatgactaccactcttgtcttcacataatcacatctatgtccagtttctgcaccaactgttgtgcctaggtcacccgacctgatgggatctccctcagctctg

SEQ ID NO: 70322 - DNA, 426 bp, Zea Mays
ctcaagagcacgctagtgatcatctcccagatttgaaacaaaccggctaagtttgctcacaacaaacgagatgtcaggcctcgtagcgctagctaagtacatgagtgaaccaattatttgggaatatctcaattggtctctagatatccttcgatttttcttaaaaagcttactaggatcataaggtattggagcaggttcacatttgctataaccaaagcgactcaaaacattttccacataatgggattgcaccagtgtgatcccaccattgccttctctcagtagcttaatgttaagaataatatcagcttttcccaaatctttcatttcaaaattattaaacagaaagtcttttgtctctttaatcacattaagacatgtccccaagattagaatgtcatcaacatacatgcatacaattac

SEQ ID NO: 70323 - DNA, 1121 bp, Zea Mays
atcgagacgctggtccgccagccatagcggggcttcctaatttttccgtcggatctcttggcgatccttctccataactattgacacaatagcaccaatatttctcccataaggaaagattttcagctcatgagccaaatgggacgtaaaatagtcatcgccaacggcctggggtatagggtccttcctatgcaatcgacctccggtatccttcagcatgcatgaagatgtttcctggagctcgggcgaagtcataacctccccgggcccagcgcatgtccccgtcaactcatcaacaaaaagcctagaggccttcggccccatcttttccccctccgtaccttgtacatctattttcctttttcgagtagctacgacagcctttcccttcgaggtgccctcttcagaccgggtcttcacctgctttcctcggtcatccccggcatcagcagagtccccctccgggtaaggaccatagggcaagctattcagttcaaaaacccagttcaacctgacgttggaaccacagatatctcaactcctcaacatctcagtcttcgtcacatattttccaacaatcttaattgcctctgactccacctcccccacgaaggaggtcgtgtcccatccccgcaaatcaatagcgaaggttgggctccgcaccatatgatcccctaaagatggcatcagatgaggcctaacctcgcccagattctaacctatgcaccagcggccacactccgcaggaaacgaattcttccactaagtctcgactgctgctcaatcaggttgcatcgtgaagggcttcctcgttctgatcccctttcttcactttaaatcgtgggaaggccatataacaatgcaagcacaaaatggccgggggcaaggcaggcaacccttcgacatcccccggtgccacataaaaccaaaagtcccaccagttgccctacttattctttacataaggaacaatctcaatcacttcggctgaagtcttcctagtcctcggcgtgaatgtgcaggacccaaattgtgcaatcaaaccacctatctttttcttctaccaatgcaagcaataattcttggcgaagatctcagtagacggctcaccaccatacaac

SEQ ID NO: 70324 - DNA, 1430 bp, Zea Mays
attattttcaacaagattcacgaagataatcaagggtatagctaccctcaattttagtttcaactttatgttcttcctcttgttctttcaccatcttctcatcaatcaccacttgtttcatctttttatttttgcttttcttactcataaagcaagtgtggtgggaagatccactgttgtagaggtggactctttggctcaaagaagatccaagtcttacagagaagcaacaacatcgaaagagtcggcttcaccagcactagaatctagcctaatcgataaggtagctttgttgacatacacacccaccctggctaggtatgctagtgtggtagcaagtaatccatgattgtttgctcaatttttcttccttattcttatagtagggtaatgcactggtaatggtggtgttggccttgtccttgccatgctcctcattacatttgtgatgtccaaacttttcacaaagtttggcccaaatgagatgagcatcctcgatgagctcaccatcataaagaataatccaatcaatgatctctacacacattgttctcaatagtatgttataacttgagcattaagttgcaggcacataatgcttgaaataacaaaatccacaccaatcggactcatggtccacataatttcaagaacatgtgatgaccaagaagagtctgagccatgctcgcggagtagctcaaatggtatctcacatgttgtagacattgattatcacaaacgattaagcttaaccatgagacttcgttttatacaaattggaaggactgatttgatgcctagggatgggtgaataggctctataaaatttctcaataagtatcagcacaaacaaagctaattaataaatctaagtgggaaagtagacctggttgactgtagatctcggcttagctggatttcccttgttagctgaggtacaacccaaacccggcttagctacttggatgtctataaaaagcttcaagcctcctcctcttgcaacattgatacaacttggtgtgtggtgttcttataagtaggtaaatactttcactcacttcctataatcacaaatcaccacatccaagtagcgcaactggtagcacgagtaatatatgcaataaaaacaaatgcaatgcaaacaaaggaggagacctcaaaaatgtgaaaaacatcctaatccaatcaatttgtgcattgtttgccccctacaacgaaaaaagtgaaaaacattgaatccgaaacagtatgtgtatctttatatctatcatttgagaaaatataagacaaatttataactgtaaagcgcatgaaaaaaacatcacatgtgacggagagagcaagggcagatctacaccccagccatcccgtccaaagcccagggcttgatctcattagcttcatatgagtctctatttgttccattaaga

SEQ ID NO: 70325 - DNA, 495 bp, Zea Mays
agacggtgatgattaattggttgaagaggagtgatcatctgttggtcgatttcgcgacgctctctcgttggttgagaccgacacgcagaacgaagaagaaccagtgttcaggcgaatgagagaccagatgattaactagaccgagaatttgattttggcgtcgctcggaaactctttcgtgcactattagaaaaatagtcgacttgagatttggctgggtatcggaattgcgatcgaaaaggcaagatgtttgtataaatttgtgtcgatttaaattgtgttgagaattaaaattgctttgatataagacttcattcttggcttggattttacaaatcgagtgcttcaagaacggggcgttatattcaatttcaaatgttagatccgaatttgaattggatacaattattaagaagttagattggatgcgattttaaatagacatcgacacattaaagatcacgttctgagaatacagattcagataaaattttg

SEQ ID NO: 70326 - DNA, 891 bp, Zea Mays
acccggccgaaggggtatcgttgtatcgtagccgcacggtctgatctgggcggccaggattagattaggttgacactctaaccggtacgcaacgcacgccgtaggatcaaacatcgacgacacagacttcattgaggcgagatatgatcacgaccccccatctaacaccaatggtcccgagccatcctttcccagatccaatcccagccgtaaactccaagatctatggtcgtgcacttctctctctcactcgatcctgaccacggcggcgatgcaagtcctcgcggcggggcacgccggcgagagaacgaaaacgcgcctggtgaccctaaaccccacgccgattactccaaattggaccagagaaaatagctagcctgggggtgcattcaatcggaggtccgaggcgacggaggcggccaacactggcgccgtgtagcatcccaaaaatcctaacccaggtttgaaaccctaatctacccctttcccctcccttcatcctttaattccaatacctccactagttttctttcatcatatgcatgcattttgtttgatcacaaagcacctcacttagattctattttctaaacacttagagtattcacaaaatatttttgttcaaagaaaaaggggcaaaatgggaaatagaaattagaaagtaaaaagaaaaagggaaaagctctctcctccccctgctggaccgaatcccggcccaagcccgcgacctctcccttcccacgcgcccgcattcggaccaacttcggcctgcttccgcgcgcgcgacagccgctccacaccccgccctccctctcgctgacaagacgtccccacccgtcagccacccgctctctcgcacgctcgctccctctgaccaagcggccccacgag

SEQ ID NO: 70327 - DNA, 544 bp, Zea Mays
cattatttttggctggagctgcgcctccattctcggcaggttgttgccttgcttgtacatatctgcatgtatcttttgatctataaatacatgcacagccccatgggggtagatgtgccttgcgccattcaacatggtattggaaccattgatccagtagacgccaaactcatccatcacatcttctcttatgtctttctctccccagatcaccatgaccgatacttcttcttccctgcccacatacagccattcgttgctggcacaaaaacgacgacagctacaacactgatcctccatcgacggctgtggcgcacacctcctcgtacacaattgatccaaactggtatgtcgacacaggtgccacagatcacatcaccagcgatcttgaccgactggcgctgcgtgaacgctatcacggtggtgagcaagtccaggtcggcaatggtgcaggtttgcagattttacacactggtcattctacaattaattccgatcatcgcccacttgcactacgtaacattttgcatgtcccagatatctc

SEQ ID NO: 70328 - DNA, 561 bp, Zea Mays
tcgctccccaccaccgcgaggctgatgaacatccttgaagccaagcaccggtggaagagcgccgctcccacaaggtcgcgcacccccggtagagggaagacaagaccggtaacactggcccgctagggaggacaaaaggcatgaactctctagcggcaagctcatcggagtggataacaccggcgcaaatccttccgccgagcgccagcgcattccatctaagcaggcggtataccatttcgagcactcactcggtctgggcgtgctcgggatgaagtcacaaggccatggaaaactacgacaacgcgaagcagagaccttgaaggcaaacgggcgcggagcactcggaggcgaaagagcgccgcgagtgggaaagaagcaagacatggctgctactcgaggggtgaaccccattttaaaggcagatttccccactcgcgccccgaagcgtcacgggcaaggtctcccccgatgcgcaccagggttcccatcctatgacacgggggccaggcctcacatgtcatacaagctggcccgaagcgcgaagaaggcgaatcgtcg

SEQ ID NO: 70329 - DNA, 768 bp, Zea Mays
tcaagtgctccttagaccaacaaacactggagtctatagaacctgacgacatgttgtgcctgattggagtcaacaatactggcatcccaaacaatcaggatgatgatcctcctagaacttgtttctccaagggaaaatgttggtgaatgaactgctataccggcttaggcggattgttttgctggtagctaatattgaacacatagaccaaatcatacaaccaaatcacaaggcatatagagaaggtggggggaaaacagacctcctgaaaagcggcgaggagctcaaccaaatccagacggggcacgacgctttggtggtggcaaagtaatcctcgttgtcattctcgatgtctgccgagatgggggattaatagactgttcgttgagctcaacctagaagacctccttctgtggcttgcctgtgttttccctttgtattaatatatagcatcggccagatgggggattgaagggcaccgtcgatgggaagagactaccgaggatggtaagatagcgcctaggatggaaggggctagtggtttcggcttggatttcgtccacctccacggcttccatcctggccacagccgaggatggaaaggatgggcgtgctggtgcggtggggggagagggaggtaagtgtcgcagccccgtcatgtggacacggcttggacatggctggaggtgcgcgtaggcacgacgagatgtgcgtgggggaggaggtggcgggggcatgatgaggctacgatggacgccctttctcacg

SEQ ID NO: 70330 - DNA, 911 bp, Zea Mays
ggaattttaggttttaggtgatttactttttgtgatactgaaggtcggttgctgcgcaggttccgacgtcctggcctgcgcaagcaaaccctgatgatgttgatactaatgttttgacggctgcaaatgcaatgtctcttaatggaaatgtgtctgaggggtctgagcttgggtcatggtcctaggacggggaggaatttgggagtcctttctcgtgggttgaggaatcttctgaggaggacttagattattttgctgcgctagatttggccgcgtcggagtatctgctacgatctgctcctcgtgaagcgctggctacctcggccgaggcgagtgctgaagactcgcagaggcgaagggtggttgtctcgaaacagagcaccagtgagacgtcaagaagtggaagacgtcgttgaatgggtatggaaaggtctcgtctttgactggttcgaggtgctcagcgcgagctactttcctcgacgtccagaacgtgcattggagagtgggacttgcgggacctgtttgaaggcgaagagttaatgatgatgttgtttaatttctgggaggcgggtcttattccgaaggtagagcctatgtgacatttttgttgccctcactcctcttgttgcgatagtgagtgaaaacgctgcgctccccctcttcgcaatagagttgtgagtgtaacagccgtgatttgtattattacgcgatggtgttgttgagcccttcatttgttgtttatttgtgattgcgtgttgtatgttgtgcttattgcgagttggcttcgatttgtaatcgtgtttgtgtcgtagggatgactgcaagacactttaattatcggttgcacccctaggcgatatctgttttgggagttgcttttgtaggggacttcacaacctgtcggtggtgac

SEQ ID NO: 70331 - DNA, 333 bp, Zea Mays
atgaagcgctttctagaaaatgattttgattttatttatgttggcacttgtagtggatcagaaccatatattctttgctgtagctgtatttaatgctctttcatagagggttaacaactattcaatcgcctagtcggtagggatcccctgtatcacttcctggattagtgagcacaagatcctatattttaactgacacagtgttctaaaaaagggctaagtggcctcctggtgctgtctaccaccagattgtgtttctgttatccttttttggtcttttgctgtgaagcctacatgtataatcggatagctccacttttctattttctttaa

SEQ ID NO: 70332 - DNA, 316 bp, Zea Mays
ctgatgttggaaactagcggctcgcctacttcagttgagtgcaaagctgccaacatctgatccatgcttttgggttctttgtatctgtatctatcaattcattaagtgcgggacaatccacgttttttgttttatatactataaaaaattagtctgtatcgagattaacctgtcatgctgcaaataaggcccaaacacgacacgatgatcggaccagaccggcacggacccaatggacaactgttaatcacgttctaactataaaaaccaaatgtttttgcaagatgtttttatgatattttcattgtagtataat

SEQ ID NO: 70333 - DNA, 353 bp, Zea Mays
taagacaggggcggcccaaggtgaggtgcttggccggatgtatcctttctctatcagctcatcgatctgcttcttaagctcaaccaactatggcccagatactctgcaagctctcttaaagataggggcggtgccaggaagaagctctatgccaaactccacttttcgctcaggtggcatacctggtaggtcctttgggaacacatctgggaactcggacacaaccttgataatctcaagtggatctgcttcactgctatcaacagccatctgataacaacttcctttctttggctcaggcgggactaactcggtcaccacttcctctcctagtggggacaccagcttgattg

SEQ ID NO: 70334 - DNA, 779 bp, Zea Mays
ccatcgtgcccctcgccacacttcaaggaaaccgagagagcaaatcgctgccgcccaaccattccattgtcgccgcagtggaatccccagcagtgcctccatccgcgcctcgtgtggagtccgtgcccttcaccaggcccgggggaaggtccaccatagcatcgcgtgcgggactatcctctacaactccggggattcgtcgccggagatccccttcgttgcttcatcgtgggagcgggtctctgcaccaccatcgggggtaataacccatccattctctttgtttctcgttgtgcttcatgtagcgtgtctccaatccgagattagctcactaggcgatgatcggggcgtcggaggaaggtctccgccatggggttatgcgctgctgccctcggtttggtcggaggttgaagacgcgccttcgaccgtccgattcggtgggcggtcgagatttaacgaaaagctggtctgtgtacgtcgttgattttggagtgagcggtagagattataaattagcatatcctttcggtgctttatcatccgaccgtcgaagttgaatcggatggtcgcgcgaggttgtagatgtggccgaactctgaccctggatctttgatccggtggcggctactgctcagggctgcggctgctgctttaggtctaatctggaccgcttgtgctcgatccaacgaccgagggatcaaggtaccctttcgtcgtgaccattttgcataagcgcccctctgttttagggaaacaaacccgcgatccacaggagcagt

SEQ ID NO: 70335 - DNA, 373 bp, Zea Mays
aaagagacacgagtatgttatgtgtgtactgtagagagtataatatgtgagacaagaaaagaaaatggacgtgcagagagacagaaattatgtctcaaaagttgtaaatgctgtcccgcatggtagaatgttggtgtgccaatgtctagactttcactttgagttgcaattgtaaccatctcacttccagcagcctctgtaaggcacatcctgcaaagtcttcatagcaggtaaagtgtcctggaatagtagcttataataataatttgttggcatttgacggagagcactagaaacatggggaaacagtaataattagcatgacaaatggcatgccagtcaagaaaacctcgatcttcagtcacaatttctc

SEQ ID NO: 70336 - DNA, 1886 bp, Zea Mays
gctctttgtagcccttcaacatgtcaggcaatgctattgttgtcaatgttgtgctaaatagtcagaactaccccgagtgggccttttgtgttcagactgcattgagagatcatggtttactattccatctagctgaagatccactagttctcgctgtgtatctcccatttgtgggggcaagtggtggcattttgattgcttggaggagacacattggtcacacaggacaacaaaaagttaacaaccacagcatttcagttcagttttgtaaggcagaggagcaggcctggtggctaacttgtgtgtatggcccacagggagagggagaaaaaatacagttcctccaggaacttagagatattagaaatgcatatgatggtccttggatggtggctggagatttcaatctcatctatagctctgctgataagaacaattccaatattaatagggcaatgatgggccgttttcgaaaagtaatcaatgaccttgctcttaaggagattccattacatgggcgcaagtatacgtggtccaatcaacaagtaaatcctgttttagttaaactgttctgctctgtgacttgggagcaatggttcccaaatgttctcctccagagcactgcatctcacgattctgaccattgtcctctccttttgggcctcacaggaaacaaacctgggaagaaacgctttcattttgaggctttttggccaaaactggaaggtttccttgaggttgtccatgcagcttgggattcggttcaaaatatcaggtgtccattccaaaccctggatataaagctaggggtaacagcaagaaatcttcaaagctggagtgacaaacaggtgggccatgtaagaacgcagctagctttggcaaaagaactacttcacaggcttgagatggcacaagatgaaagagccatctccccagctgaaaattggttcaagaaccgtcttaaaaaacactcattgctgctgtcatccttcaaacgcactatggcaaggctgagatcaaggatcacatggctgggagaaggtgatgctaatacaaagttttttcacatccatgctaggcaccgcaagaggagaaactttgttgccaagttgattgatggagaccatattctaactgagcatggtgaaaaagcagcagcagtggacctcttctacaaaaatctcattgggcaggatggacagagggatgcaacaattgacctggaagctcttggccttcctagacacaacctggcggtcttggactccccctttgcagaacaggaggtcctggaaaccatcagaggtttaccctctgataaggcccctgggccggatggcttcactggccttttttataaagtgtgttggaacattataaagggtgatgttatggcagctgtttggagcaggagattcatcaatttctggaagcttaacactgcctacattactatggtgccgaaaaaagaaggggctgagcaagttaaggacttcaggccaattagcctcgtccacagctttgcaaaactgattacaaaaatcctcgcgaaccgattggcaccaaggttgaatgaattggtttccccgaatcaaagtgcattcattaaggggaggttcatccaagacaacttcatgttagtgcaacagacatcaagactgtttcaccaacaaagaatgtcccggctgctcctcaaacttgatatcaccaaggcctttgactcaatctcctggacctttttaattgaagtcatgcagcagcttgggtttggacagatctggagagacatggtttgtggtctccttgcttcctccactacacaagttatgctaaatgggtttcctggagaacaaattcagcatagaagagggcttagacagggggat

SEQ ID NO: 70337 - DNA, 595 bp, Zea Mays
cgatctcgacgatcatgtcagtgagctggaggccctgatggcgctcgacgccctctgcagtgcagctcctcctgagatggtgtcgactctcgccatcaagccgactgcgaagctgacgtgggagagcattcgcctcatgcggatcagagacgattgcgcgaggaagacaagcgtgtaacgtgtgcgccgtcagtacgaggagttggcactcaaggacggtgagggtgtggaagacttcgctcttcgcctcaccaacatcgtcagttagctcaccataccgggcgatcctgaagagcctacgaagatcgtcgagaagtattttcgcatcgcccgcggaaggtacaaatagcttgttgtttccatggaaaccttgccccctgccgttcgaagacgacccagagcccaagcaaaatcaagaatccgggaaggtgtaccgcacgtgccgcacgtcatcaggacctcgccatgctcagagtcgactgggtgacggcgcaattgctcgtcggagcaacgtgaccaccatcaatccacgctgcaccgggaactggtttcatcgcaacctaataaacgataaagactcctcctcaagctccgc

SEQ ID NO: 70338 - DNA, 272 bp, Zea Mays
ggaagtaatgccctgggtcactggatcgttgatctccggcgtgatcaccgcatcggcacggtggcgccgccgtgcgcggacagccggaggggggaatagtgcttaccgttgatcgatgggggaacgactaggattagattcttctgttactggttggggtatggaatctgcaccgtctgatcgggagagagcgggtgagattataggaagtgtgccgcttcgaccacattcgttttgagccgtcgatggcgtgataagcgatcatgagtgag

SEQ ID NO: 70339 - DNA, 702 bp, Zea Mays
attcctataaattcctttatcagtcttacctctttgaaattcaactgaattgtctcttctcttgtagatggttcgcactctccaaactacccgcgtcaacaccagctacgtcccttagccccggcagatcccggtctacccagtggtagtcgaggaagttccgacggatctccctcccatccgagtggagaatgtagtcatcctggaggatagctcggaggaacagctgccgacccccaccccgttggtagagtccctggccttcgcagctgggtcatcgacgtcagcaccgtctgcactagccttccaagcacctgcacccggaggagacgacctcgacaactccggagacgacgatgacgaggatgaagacgacgaagaaggtggagacgaacacgtccacgaggaagctgactacacccagcagggacaacttcatggggtttggtcctgttgtcgaacattacacatcaatgttcgagacggggcacttccccaacctgctacaagaagtgctgcacgcgctaggcacctacgtccgccccctgtacgaaacaaggcgagtgagcgagcctcctcgggcttgctattacatcactcgcatccacgtcagggtgatggatgcaggggacaggggattcaggactctgtctgctcacgagtccctgacaccactatccacctacgctgcctcggtcagcg

SEQ ID NO: 70340 - DNA, 1115 bp, Zea Mays
gccaattctggtgaagaccatactgcctcttgagttttcagatagatatcattgtaaggatctgggaagtccctgccattgaaaagaaaggcctttggataacattcgcctgttcccttccggtaaccaaaagcttggcagtccgtatcgttcaagcacatgttcctgcacatcaaccatggcaccagtttggaatagtttaagtcatagccccataagtctgttccggtaagcttcctaaatgaaaagggtgtggtattagtcttgcgcctgcaccctttgctccagtcacttggttcaaccatctcaaatccttcaaggcaagaacatgactctagctctggtctgtatctgcacaggctgtttgctccacacagtccatgtattttgcacagttgagggaatgccatccaagagactgaccaattgccactggtcatgtttaggctatacaacctaaggttaccgtcatagtctagggtcaatctcctcatcgtctcatcaccaagatcagaagcttcaaacttaagctggtcacttgccacaaaccgtcctgtctggtcaagaaccccatacctggtactattataggtagtcctaccattatcccatggcatgtggaatggatctggccaatatatgctactagtctcaggaccgttgtaaataagagttaggatattgttagtggcgaagtagaaggcatagaaacctgaatagagcaaacccctagcagaagcagataccaacctagtatctctagtcatcggctgccatggtagaagtgtatcagttggtgagtcgaagcttctccagaggtgacgcccatctgtatccatgacaacaaggttgccgctatcgagaagcatcgcacgatcactgccggacgcggttgtgttggtgctccatatgaccatgccattatagtccacaaggatcaaggcccccttcttgtggaagatgagcctggagcccctgccattgagtggcgcatcacggttagccgtccaggagacagtcttgccagatgcccacgagaaccagatagaaaaggtgaaggcgttggtggccaccttgtagaagccgcaggtgaaggcaccattgggcgacactag

SEQ ID NO: 70341 - DNA, 493 bp, Zea Mays
gatattttccttcaacgggaatatacgtcaacggtagattatgtgagctgttggaattagttgcatatgtgaagtggtcatctgttgaacagacatcgcactcgccaattgctgcatcaattttcaaggagaattcaatagcatttgatatattaggtctttgaactcgttcttagcattttccttaaaatgatctgccatatctttcttgtatcgatcacgtttcctatacagaccttcccactgtggtccaaatccttccttccatccttccttagacaagatgcctcgtacacaaccaggatgctcagggttaccgagaccaaccgttaggatgtctctctccctttgtggcttaaatattccttggctctgtttagctgccattgcaaatatattctttgtcgcttctttgagagtaggatcatcaaaagatacaccagcctcggttttccatggttttctaacacggatccaattagccgtcttaaac

SEQ ID NO: 70342 - DNA, 356 bp, Zea Mays
ctggtgtatttgttatgttggtctggtgcgcatgtagtcggtctttgtgcggacagtttggtgtagtcgttttcgcacttgtttaagcttcatccggctgcacccttaggcaattgttgcacggatagtcttcgcggaagacttcgattcgtcgcacttgttgcgctagcccggctgcacccttaggcgtcttctgcacggatagtcttcgcggaagactacgatttttcgcacttattgtgctagtccggctgcacccttaggcgacttctgcacggatagtcttcgcggaagactacgattgttcgcactcgttgtgctagcccggctgcacccttagatgacttctgcacgga

SEQ ID NO: 70343 - DNA, 499 bp, Zea Mays
agagttaaagaagctatgagaaggagtggaagcctatgactgcttcaagaagcagaaattcaatctttgggttgtgtatatgttctcggttcatgattttatggcgtatggtattttctatggatggggcgtgcatggtagattgacatgtccttattgtggcaaagatacagattgttttcatcttagggttggtgggaagatatgttactttgattttcatagatgttttctacccttgaatcaccccttcagaaggtagagaaaggagtttaggaaaggaaccatcgtcacgaagggaccgcccaagcgatgtagtgggatataattacagaagagcatagaacgcttgccctaaacgagagtgggaaaaggtttcaaggttttggtgaggagcataactggactcacatatgtggcttgtgggagcttccttatgttaagtccttgattctgatgcacaacatcgatgaaatgcatcaagagagtaacttttgac

SEQ ID NO: 70344 - DNA, 559 bp, Zea Mays
aaaaaatactactttatatgtatgctggagttttgtttgtgtatttaaatttggtttggaagctcaaatctaagattaaatctcaactggaatgaaaagcttaaaactaataaagagaagaaaaaaatacgattgagccaaatttcttctctagccaaccacacccatacgattgttattgcctttttattatttctttaatcctcttgccgtgatctgtgtcagcatgaaacggttgctgacatcaacatgcaaattacttagctgcactacatggccaaacgtcgtgcgcatcgtgtttctcaggttttagctccaactcttgctcccggggtggtcccagcctgccagctaaatctttctgctcggactcctgtaactgcctcgcataaccaccggctccgccaacaggattccgtcgatctcgcgctggttgttgcgccggtgtagaaaaccacacagactctcctaggtctctataaattctcggctgccgcacctccccttgtcaaatcccaagcccaatcccgcggaggaagccacctcgtcgccatggccg

SEQ ID NO: 70345 - DNA, 361 bp, Zea Mays
ctgaagaggtattatggtcaaactcacagcccttcgctaactatccaatggccccaaggcctttcttctacctatccctcggctaccatagcaacggcggccagaacacggcggcgccatgacagtgctatgcaatcccccactcacaatgcataaactccaaaccagaggcggaaatccctaaatacggacggtacgaagtagttggggagttacttaccgagatgtatgcagcccagtgcccagacaacggtgaggagtggatcacggtggagatttttcttcgatgagcaattaacgatgctcagatgacccctacgccagtctgctagcacgaaaacgatccgggagtgcccgcaac

SEQ ID NO: 70346 - DNA, 502 bp, Zea Mays
gaagccactgtcggggacgatcgcctgtgaagcagcgcaggtacatgacgatgacgtggttagcagcttccgtctggccgtccgactggtggtggaaggcggaggacatgtgcagcttcgtgcccatgaggcgcatgagctcgcgctagaacgtcgacgtgaacactaggtcgcgattggacacaatggactgcggaatgccgtggagacgaatgctgttgggtaaagaaggcttgcgccacggacttgacgttgtacgggtgtgccaaggggatgaagtggaagtacttgctgaagcattcgacgacggagaggatgactgtcttcccgtgcacccggggctgcgcctccacgagtccaagccgatgcctacccatacgatggcgagcattggcaactgttgcagtaaaccagctggatgcaggtgttccgacttgtacatttgacaaatcgcgcatgcccgcacgaagtcctgcaccagacgacacatgttgggaaaatg

SEQ ID NO: 70347 - DNA, 702 bp, Zea Mays
gtcgtcttgaccgtccctggaatggactattggacgaagctgccactgactcgattcatgttgcacggcttcatgacggtataccatgatcttggtcgtactcctcccgacgccttatctcattttcgtgctgttggtcacgcgaagcgctgatggtgcttcgtgtgtctcgtcggctgttgatggcgtgacgcagatcgttcgctagatgagcgaggggtagaagatgattggccgcctgtgtaagcatccgccggtagccttccgtgtctggggttcacggaaggccgtcggctatctgcgccagcactcctccaacttcactctgcgtgttcaacgctcgggcgaagttggggtacaggtttcgagcgagaagagggttctctcgccggagtctagcatcttgttttgttagttctcactctcgctcttgagcctcttggcaatcacagcggcgggagttgcgtctttctcggtgtactcgttcatcaggtgtttctcccacttccgaagctttgtcctgggatacaggttgtgctgggtcccgttccctagcttcatgatgccgccacacattccggcgtctgtttctccgtcgccaggcatcacactgggggctcctccccttgcaggttcatcgtcggagacgggcaatgactccaatctcccctgaatgaagaggatgtcggggtagaaaggagc

SEQ ID NO: 70348 - DNA, 851 bp, Zea Mays
caaataatagagaaatcagctagcgatggtctaggtactaaatctaaacttaagaagcccaatgtgcccaaacaaccaagaagcccactcggattatcaatctggcacaagaggctagaaaaactcactgcacaagagctggagatgggaggcatgtcgtgggcatctaatgggagttctcaagatcaaggatgattcttttggaagaagtggagcaaaggcaaacaaaagaaagaaagcaagtacaagatgtttgggtgaaaggtttgccccagctcaacaaagttattggtcattgcatcgtccatattcttcagctatgacatatacgtcgtcccaaggtatgttcggttatcctttatggcatcattttgctccatatgcgtctttatattatggaggagtgcaactgaattattatgcatatggatagttgcgatatgctgctgcttacataattcatcgcgctattcggttgttggtagtaatgattcttgctacaatttgcttcggtcatgtttattcatgagatgaacatgcttataatatttgcttatcactattcggttattgtttaattgcaaactgcataatcaatattgctgaatagtttcaagtaaatgattcgttttttagtacaatcaatactcgaacttatgcataattgagttggctattattatgttcgtccatgggagcaagctttatagttcaatagacatctttgctctcagtgtctggtacgaccgatgaatcctttctaatcatcgcgctaagtttatgtccccatccaaagggtaggatggacgctcggggggcaagcacgatcggacacccgatcacggtcacct

SEQ ID NO: 70349 - DNA, 293 bp, Zea Mays
gccatcctttggctttcattagtaaacctcttgctgttaaaacacaaggactctctacttatgaaagggagtatttagctattttattagctgtggagcactggcgtccttatcttctgcatgggaagtttttgatttatactgatcagaagagtttgattcaccttaatgagcaacgtttgcatacaccatggtagcagaaggttttcacgaagcttttagggatgcaatataaggtggtttacaagttgggtcctaaaaattgtgttgttgatgccctatcccgacgggag

SEQ ID NO: 70350 - DNA, 878 bp, Zea Mays
tgcaattctaggtgaacgttggcctccgcaagctcctcttgcacatcatggagctggttctctaggatctcgatggtgttgtcccagatttccacctgctgctccaatgcttggatgcggttgcccatctattccacctgtagatccttctccaccaatttcgaagacaggtccaccacgaagtcctccctatcgtcgagggtgatctttgcagcttgagcaagcccagcgaggtgcgtcatggcgtcgctttgcaaggtctacgggcggtatagtgcactcatgcactggacgatgattctcccaacctggtcgagatgcatggcccacacatccttcacgtggctcactcaccaatttcgaagacaggtccaccacgaagtcctccctatcgtcgagggtgatctttgcagcttgagcaagcccagcgaggtgcgtcatggcgtcgctttgcaaggtctacgggcggtatagtgcactcatgcactggacgatgattctcccaacctggtcgagatgcatggcccacacatccttcacgtggctcactctattacaccacattgggtcatccctcttctcggcggggaagagtccaagtgggtgcataatcatctccagtgggtggtatccatagaatgtcgtcaaagcttttagtgctgcggcctcagtggtgtcgtctgccctgaacccgacagttttggaatcaagtgaacgccacccaggctgcagagggtgagactccaggatctgccaaaccctacaacgtagcacccaatgctcctcgtacaactgcatcgtgtatagagggggtgtggcacccgatgctcctcgtacaacaacaacagcacgcaccccaggctagagacaagcatcag

SEQ ID NO: 70351 - DNA, 358 bp, Zea Mays
cgaatgtagatgggaaaaacgcatgagcgtgtaactgtagaagcccaaacataagtgtattcttctaccacttctgtaacttatccatgttcacctcccctagtttatagcctccttaaaggtagctcttcgttcaagcagaagccaacactttgtcttcctcttcattcctttgcattcttgagcttttgcactgctctttgccctctccggtctgagctccttgtgcgtacaaggatcttaagagaccatgcctccgaagctctatccatttgtaggaggatgatcatgtttttgcgggattgcttatgtgcgactactcttcgtttgttttagagactttgatcttatagctgtg

SEQ ID NO: 70352 - DNA, 610 bp, Zea Mays
catgctttgctaacacaactcgatgctaaaattcttggattagaaagtataaaggaattatatctgactgacttaaactttgctgaaccatattctaagtgttgtgatggcagaggatgggtaaaatttcatgttaatgatggttttttgttccgagctaacaaactgtgcattccagaatgttccgttcgaattttacttttgcaggaagctcatgcaggaggacttatgggtcatttttgcaccaagaagacggagcaagtgcttgccgatcatttcttttggcctaaaatgagaaggggtgaggagcgacatgtccttcgatgtgaatcatgtcataaagctaagtttcgtttaaaccctcatggcttatacactccactacctattcctagtgtgccttgggaagacatatccatggattttgttcttggtttaccacgaaccaagcagggaagggattccatttttgttgtggttgattgatttagcaaaatggcacattttattccatgtcacaagagtgatgatgcttcacatattgctgaattgtttttcaaagaagttgttcgtttacatggcattccaccaaccattgtttctgatcgtg

SEQ ID NO: 70353 - DNA, 930 bp, Zea Mays
ctttggaagcaaacattctctttagcctagggatcaatggaaaatggtgcaataccttctgaggaatccgtctatttgtatcttttcatcttgattcaccgcaaattggacattgatcgtgctttgcatagttcttccaaaacaaaacacagttatttaggcacacatggattgaaacatacccaagtcccagtgcaggataagtttatttgcatctccaaaagatgaaggaagggagcaattaggaaatgctgatgtcaacaacttcagtattgtagtgaagccaacattgctgatacaataaaacgacttaatatgaagcaacttcaccacaaacgaaaatcttgtataagttgcagtaggataaagttcttgtttcatctcctctagtacatctccaaacatagatttcctttaatcttcatctttggctgtgtataactcctctaccataccattaatcctatcaccaagatcttcatcctgattcataccaacatcttcattgaaactcacatgttcatcctgctggtcaccattttcattaattatgccatccatggcttctccatgatacatccacctagtgtatgtactagccatcccatgaagatataagtggtcctccacctgtcctctatgtccactaagacgattcaaacacttgcggcatggacaaagtatctcttcgttcacattaaatcgctctgttacaagcttcatgaactcactaactccttccaggtgtggcttgctgaatagtgttgcattgatccaagatctatccatctatggatggcaaaattattttagtgccaaaaacaaatcaatgttgcagcaaggtaatagaagtgaacaactttgtagtattattgttatgctaccacttaccactatcaaacaatatgccttttctacctaccgaatcca

SEQ ID NO: 70354 - DNA, 608 bp, Zea Mays
gttggctcccgcaactggaactatttactggactggagagtatcctggtttgtcccttcttatgcttatatagttcattttcaaacggcaatgccattcttttccttgaaagctatattgaatatcacgtgagatattgaccgtcttccaggggaactgtcaaatttgctgtccagtagtgatctggacgactttaccgtagatgagactgttgttctaactcttttatctgcatcaagtaagtccttgtatatatatactcaagttgatcgacagtacaatattccaaatcaactaatctgcaatgacttcatctcctgaaatttctagagacagggatcagcaacaccacacagtgctgtacaagaagtacgttatcttaagcatcacatttgtatgttgttataatgtggtactgacttccttgtgttgctagggcaaaagattgcttcgacttgcaggcaagccaaagccaagtttgtgcaggctgattcaggtgaagttggacagcttccccttctgcttttgtgtcaaaaaattacgtcattactgactgaataacttatgtcgattaggagaacctagctatgttctattgttgatcttcc

SEQ ID NO: 70355 - DNA, 735 bp, Zea Mays
gaaaacatttatagctgttgtaactgaaaaccgatattaatttataggggtggggcattcgcagcggttttaactaagaaccggtactaaaaagtgttaggagggaaccaacgactaggttatgctttaaacctctgctttgttgtgtgacaaaagagaggactcgaggaatattacatagaccagctagatgtgcttttgcacctaggaagtttatatgattattcccaatccggcaatccaccgagctggatcctcccaatctttaccggtactcatcgacaggccgattcattgcaaacggcttcttaactgggggcatggaccatcgtggattgagcctgattcccaattgggtaatcaattagtttccgtacaagaagatgtacgtgtaggtggtcagtgcatgaactgaactgggcatgaattctgctccgatccgatccgttctttgagcttttaaccctctgacgaactctgaaaacatagctgctcgagaatcagaagcatacgccgcaatatgcgtgtctggtgtagcagtagcatctctagtaggtttgtctcaggacatgcaaacagttccgtttgtgtctgtttgctaacggcaggaaggctacaaaaggccgcgcgtcaaatgattcccttggtccaggtaaagagctaacaccagtttttggggacgatgaacatgctttattggtaaccaaaactatcacgcacagtgaacatctccga

SEQ ID NO: 70356 - DNA, 421 bp, Zea Mays
cctgcctgtctatagaggaaaatagggttaaattggctagccttgctgataaaaaagaggacgaccgcctgggtctagaaacaagaattcaacaatggccctgcagtggaatgagacatccacatcaaaaaagcataaacatattgattccggagaacatggtttggatgacgataatttgacatgattgtacaacatttatacagaaatatttgatgatattgaaatgttatgatcatgatactatttgatgaatatgaatatttacgttaaaagctcactgtatggattatatctattagtgcaacgtaattatttcttatgagctatgctaatgttgggtttgtttggccatataatcagatattcactgcatcacatacagtatttatattgaaaaaattaaacagccggcgtactg

SEQ ID NO: 70357 - DNA, 621 bp, Zea Mays
tggggaggcactatacagaaggggcacaataggagtcctcatgaagtgcattctttcggctactgggaagcaactgctagatgagatccacgccagacaatgcgggatacacgcagcatataggactctggttgggaaggtcttcaggtctggtttctactggccgacagcaaagagtgatgcagccgagttagtccagaggtgtgaagcttgccaatacttatcaaagcagcaacatttaccagcacagcaactgcaaaccatacccgtaacatggccatttgcgtgctagggactggacatgattggacccttcaagaaagctctgggagaatacactcacgtgctggtcgccattgacaagttcactaaatggatagagtagaaacccattgcttctctgacctcagctaaggcagtggaattcatacaagatataatattcaggtttggaataccaaatagcattataactgacttgggatccaatttcactagctctgaattcttttacttctacgaacaaagaagcatccagatcaaatacgcgtcagtagcacacccaagggccaacggtcaggtagaaagggctaatggaatgatattggaagcactcaggaa

SEQ ID NO: 70358 - DNA, 459 bp, Zea Mays
caagtgaaggcaaaggtaaaacataggttttgcttttggcggttagcaggtgtttagagaagaaactgactggaataataggatagacagtcgtaatgttaagaggggtcaatgaacttgaatggtgtataacttagtgcctcgtagagcataaacggtaacatgtgcatgagggctaacaacactacgggtttcaaaattaaaattcttgtgaatcagcgcaaaactttctttctctgaggacggcggaccgtccaagccagatgcccggaccgtccgcgactctgccagagaggtcagctagtcgtctgtctctgcctccttctagcggaccgtccggccccggcaggcggaccgaccacataagaagaatcaagtttgggcagggacagtgtgtttttgagactttgtactacggaccgtccggggtctttagccggacggtaagtggtccatgtg

SEQ ID NO: 70359 - DNA, 474 bp, Zea Mays
cttgccggcgtgatcgccaccgttgtgcggtcagcgccgccgtggcgatagctgaacggaggatggaaacagagagatcgcgtactccgtaggatccataacgggcggttgtgattagatcatgacataccgattcgctctatgagatctagagcattaatgcggaaatgaagggtttagatcaaggtcggggcgtgttcctcccacatccattgagatcagatctaacgatcggggcgggttacctatgacataacgcggggggttcaatctggggcatcgcatcgagatcgaacggcgctggttgcataccggttcaccttatataacttttaatcctaagcgctcagtttagatcggacgactgaggctgccccacgtatcccggccagcgtcttttgcaaaagaatccctctgtttttagggaataaactcgccatccacactgactatgcactgagtctagaaggtttt

SEQ ID NO: 70360 - DNA, 513 bp, Zea Mays
accctaaaaagaccactaaaaaccctgagttgaaaccctagggggttatatgtaaattttgcacacttttggacccaagtgcaaaaaccaaggtattagggtacctcaaatcatatggttcacatatttgaagattttcaaatcaaatcatgagatttgtgcttatttgcaaaaagccactctacacctctcatgtgactaagtctgaaaatcagtgaaccaggctgactttggagctctgtagttctaaaaatacaaagaatttgcctagggtcaacacatcaaaagtctagagctactataggtgtacaactttgcttaagagattaagcattgttgacatacaaaaattggagataatcagccctgaagtctggatgtcatactatggctccctgatattcagagaaggcagtagattggatcaactttggcaccttgtggagcccgatttgatggatatttaaccaaaacctctgtcacaaagttagatctggtttgttaggctacaac

SEQ ID NO: 70361 - DNA, 739 bp, Zea Mays
acgccagctgcgtctcaatcgctagtaagttcacaattatcggatacgccttcgttccctattcgcatagcattcgttcaatcgggctttgttgctcttggtcacgatgcggtgacctccggcgatggcgcgaccatggggaggctctgtgccgccgtggtttgggtctacttggcaggtgggacgaagaaagcgcctgtgccgttgatcaaggcgtcaatgactaggattagagaaccttatcgctttgtgcattgactcctggccgtcggatccgacttgcacaatcggtagccgtaggatctcaaaagaatgggcggccaggattggtggatgggagcggtctgaccagatcctatctacaccgttgatcgactacttcacgactaggattagatcctcagaaaacgtttcggtcgggtggcagttgtcgtttgatcgtggatggacggtagagatcgaattgaagcatacctcttcactctgccgaatgcgcaccgttggatggcgatctgatggccaagataggataccggttcatttaagagtctggactaatctgtgccgtgtgctttagatcgagcggccagaatcctacgataccccttcgcgagacaaattctcataacaacccttatgtttttacagaataaaacccgcagtccacaacagaggaggtctgagtctatagaaattttatattttcacccctgtgctctctgaaaattaatgcgcagtc

SEQ ID NO: 70362 - DNA, 621 bp, Zea Mays
gaagaatccgaagcgtcacatgagtcgcttaaaaatgtgagtcgtgcaatatgataaggcatgcgggtgaaactgtccatctaatatggtgattatgcccaagattattatcgtattgataggacaactatgtcaggcatgcttagcgcttgagatcacactcagagtctatgaggattattatattaattgccccaccaagaaattagtaataattaagattcattcatgtaatgattgggttcctagcccaaagaatgtcacgtcttcctaaacggtgagagtgtgaagtgtgaccgttaccatccttcgacttccgagttaaggttagtgataactggtaactagacccacatgtacatgtgtaaggcttagagatgaaatccaagggacaactaaaacatggcatgaatcattttttccatcatgttcacttatggtgagatgcacatacccatttaaacctttttgccatgatgttccttagcctggttcaatcttcctcttatgctcagttgcactagggacctagttgtcatgatgtctactgaatcccctaatggtgacatgtgaagaattaggtctcgcattctcgaattctgtttcactagtcatccaacg

SEQ ID NO: 70363 - DNA, 442 bp, Zea Mays
gaattacaagcaactagagcatgatagtgttgaccacccacttcactccatcccctacctgctctcgatccctcaaacctcgctgcaaccatgggcatcggcagcaatataaatagccatcaacattttgaggccaaaaccatccacatcctctccttctcccgctcggcaaagcacggtctagctatgaagatgagcacgagaggccagccagcagagggtcacctgtggctggtcttcaccatgctgttcgtcacttctgcggtgcgcagcgtgggggcgagcagctttgctcctccaccgtctgtctccgtatcatccccagcgtacgatcctgttatcaaggtggtagggaaggtgtactgctacagatgcttcgatgaggcgcacccagatgaatcgcatgggaagaagcacctgcaaggtgaaacttcgtgcctgc

SEQ ID NO: 70364 - DNA, 352 bp, Zea Mays
atgcaatgtgtcacacaacgaaggtctttaagtatatgtttcaggatttattcgttagcttcagcttcggttcctcactcttcactgacattagtgtgaatataacatcacatcaatattgagaaataacaaacaggaagaaggtagaagaaaacaagtatacaaaaaaatttcatacttcatcaagtacaacaaatttgttacccacacttctggattcaccaggtatgttgcctaggtcagacggggaaatgctgaaggtgggcttgttaacggtcttcaagtgattgcacccagcttttgcaaagatagcagcagtccctcgggcagctactagtgcacagaaatcacc

SEQ ID NO: 70365 - DNA, 812 bp, Zea Mays
acacaccactctcaaactgggtcggaaaagagaaggctctaaagggtaagttcaaagggagcatctaggtaaagacataaataccacaagggtcagaggcgataaggtcaagggtgtaagagaaaagataaggcatagaagaaccaagggtacatgcaccacgaagaatggagttaagacaaggcttgcatgcgataaagaggaaagtgtagccaagggtgagataagtaaaacactgctcttaaattgagataggagagaggagatttccaaaatgcagacctaagataaggatcaagtcgaggtgtgcagattgcaaaggtagggatgatatcaaaaaaaatcagcaaaggatggagttaaggtgagacaagacttggaaacgacaaagagggtacaaccaagggctagataggtaaattgccactctcaaattggggtggaagagagaatatcttaaagagtaggtgtaaagatgagtaccaaggtaagatcgatggatgtcaaaggtaatgggaatagcaacgaaaaacacatcaaaggatggaattaggactaagcttgcaaggcgacactagggaaaacaatcaagggcgagatagtaaagcaccgctcttgagctaggatggaaaggagaaggctccagagactagattctaagtaagcgtcatggcataatgtaggtattacgagggttgaaggcgataacagaaaagggtgtaagggaagaggtaaaagtatagatgaaccaatggagttaagacaagatttgcacgtggcaaagatgaggttatggccaatcgcggggtaag

SEQ ID NO: 70366 - DNA, 545 bp, Zea Mays
ttgagctatgggatcggcgggaggcatctcaatcggtcgtacgaacatcctacactcatgttgcaggtcttcaagcgcgattggccattgtaaaggcccatgtgacgagtatcccactcgctctgcttctcatttccttccttcctatcgggggcgttgaggcttatgtttcttttcgtctctgagcagggcaggaagccaagttggtggaattgcgctaggaggtcgattcggtgacccagagcataagtgcacgcggagcaactcgcctgtagcgcctgctcgacattccgagccgcgttcggaatgtcatggacctcgacattcactgtggggctgccattgccctggttgttgcatagttttgcaatggggttgacctccttgccctagcgatgcctcctcagggtgccccacccatggtctttgagaacctaatccaaggaaatgacgaggccgcttgcgaggtggcagcgccatgtcagcggaggaccttatcgggtgggctccctagggcccttctccgacgctcatcttttggtttc

SEQ ID NO: 70367 - DNA, 378 bp, Zea Mays
attaggtccccgaaagtcttacttatcgcccgcaggaatgtcggcaaggcgtttttcagaccgtaaggcataacaacatagcaataaagcctgtccactgttacaaaagtggtatgcttcctatcttacctagacatctggatttgatggaaaccagagtaagcatctaggaacgacaataggtcgcacccggaggtagaatccacgatttgatttatacgtggaagtggatacgggtccttgggtcaggccttgttcaggctggtgtagtcgatgcacatccgaagcttcccattcgctttgggaatgatgactgggttggccagccacattgggtgatgaacctcttcaataaagccggcgtctagcagcttccgg

SEQ ID NO: 70368 - DNA, 333 bp, Zea Mays
attattacttcacctcatccttgattcttcttcaaaatattagtcacctcgactaattctatgttgtgctcctatatgcccccttgccaaaagtattttattccagtatgatctatacttctctcaatctattagatctgatctcactcttgtgcttgcgacatctttatagatgccccctgaccataacctttttgtctgtttggattcttccttcctccgtcattaatttgctacccctggactatatttatccccttggtattgacatgctcgtacccctagattctttaatactcttgctttaaatacctgcctaaaaaaactctgtta

SEQ ID NO: 70369 - DNA, 1035 bp, Zea Mays
ttcgatatacgcgcaacttcgtgttgctagaggttatatgtccttttatctcagagtttgcttcatgtcattcagcgacaaagaagcaatgtgtcaacaactggttgagcaatgtatggctgagatttatagtcttaaatcatttggtaagaccttttgcttactaatagaatcccaatttgtgatgtcttctatgccaaaaaggctttcatgcattctattacatatcttcgggttacttcggataaaactttatgcatgaggagagagcagaaaaattaacttacgtgtgtttaattgtatttcaatttaatttcccagatttccaagcactatagagcttgatatagttgttatggccacttggcgatatataaatatataatgccacacaacacagtcaaataaaatataaagccaaataaaattgttaacgaaggttgcacataatgtgactttaggggcttgaacaacccaccacaatccaagcgagtacaagctctagcgtatatggcgtcaacacgtgtgcggccatcagggcaacgacaacacatcaaaccttcgtaaccagcgcaacagacgcagttgtggcttggtagtcggggtacacgataagtacgcaataggcacaacaggcgcaacaagtgcaactgtgactcaatagttacgacatacatgcaatgccttcagggcccacgaaaaatgtgtgactcggcgatggcggtccgactcaacgggagcgatctgatttagcgagagcacgacatagcaatcacatgacgcagcgaagttcgaacggcacaaatactgcgtcgtgttaccaaggcgcagtcaatattcagctaatgtcataactcagccgattaccaacgcaacctaatcggcgtgtccgagtacccactatacaatttaatcgctcaacgtgagttcaaaagctcaacacaacacaaatatttagagcgatttgagtatgcacaatataggcttcacacatttttaataatttctgccaattatctactacgagaaataaag

SEQ ID NO: 70370 - DNA, 597 bp, Zea Mays
aggaatatggcgtcacgttgggcccaatctgactagcagcccaactacacccgcccacgctctcatctacaccgagaggcagggcccacctgtcatgctccctttgtgtgcacgcatgtcggtgcagagtcgctgacgtgcggggcccatgtgccagatctacgtccaccaacgggacgacgggttcctaggccaccgactcatgggcccgtgttgctagtgcaccactgttgatcttcctgtaacaaacctgatctctcgaaatcgccgactgcgtgatcctcgcgggtgcaaaaccgacttcaccggactataaagtcggacaaggagtgctcctctcctcttcccatcatatcgccatgaaccgagccgccataagtgttgagagccctcgttgtgagagaaggaagtgccgccgccatcggtctgcggataaggccacactctatcctcggccaacaacataggaggatcgcagtggcgctcagattgtgttagtgccttccctacgttcggagccagtgctgatgcgtcggaattgctcaccgtacttgctactccgtcgtggacccaacttttctgtggattgccaccctc

SEQ ID NO: 70371 - DNA, 323 bp, Zea Mays
cctcaattcctcacccttaaaaagatttcgcagctccccctcacctacactcgccccagccagcgaggacaacaattcccgtttgccagtcccgtccacacgaagacgaccaccctccatctcaccatgatgacgcctaccacttcgcgacaattcactcactctctgcttcgccaccacccttcgccgcctacacctagtactcgcacccggaagatcctcagcacccatcacacgtggagaagtctccgccgcagccacatccaatgctgcaaaataatccaagtcctcatctgaagactcctctgtccacacaatcgaac

SEQ ID NO: 70372 - DNA, 979 bp, Zea Mays
ctgaatctggcccgaaccggcccatatacaggcgatagcgcgcccgcgcgcacccgctctgtccattttgcgcagcggaccctgacggtttgaaatacctataaagaaccctccccactgttcgtctgtctcgctgacatttgcacagagacccccaaggttctaatgcttcacaaggaaaagtccacgaccgtggacggtggagcaggaactccggcgagcttgcactggccaggatacacgatgaccggtgctcccacatggctaacacctaattcaacccttaataactgtttcccctcaatcaatttcactagtgcagctctaattcgtccagtccacggagacaacgcagacaatggatgaacaaacatgttcccggtgatctagggtagtctagctcaattgaatgggtcgagcagcattaggagaacccaaggatgctgagacaagagagcagagagtataaacaaacctagaacaagctagccacggcgaggatgctttcatggtggcggaaaccgatttgggggaactttgaaattggcgcgctctagtggatgatttgaggcacgaattgttggattaggtgcttgactacttagcagagccgagggtgtgcgcaatttatagtgtgcttgagcggtggccagtgaattggatggagacgcgcggcggccagagaggaggaggggcactggcgcacacgattagtggctttcaccgtggcagactcaccagcgacgagccagggctatagagcggtttacggcgacgtggtgaagctttagggcatgtggcatccgatcaacggcggcaaatcccggtgaacttatctgagccgaccgcaaagcaaagggatacggcgaccagccgccggtgttatccccaggcgatgatcttttacccagaagcgttatccattcatcggtgagcacgaatcacaacggcggcgtgaatccgggcgcacggtcgcctg

SEQ ID NO: 70373 - DNA, 567 bp, Zea Mays
gaagtggtatcaaagccaatgtgaccgtaggtcgctagattagttagaaatggaaagcccagttagtctttcaaagcctgatatattttcctccataaaaacttactttatatcatgacccgtctcttttattttcaactctacttatctgattcttcgtctatcagaagattctaatgagaagcattgcaagatgatcaagctaggattgcggaacttgaagcgaagattgctagaagaaactctttcgaggctatcgacgatgccctattctttgtcttatccccactccacaagaagttttgttatggattccctggatctattatttgacttcttggttaggttgataggattgttctttagtattaagattttcgactagatcggtaaaggcgattttatattataagtggttttctaatccctaatattgctatataacccttgacttctactcttgttttcttgccatggtattgccatccttgcgcaatatctaccttgatatattaaacttttgcctctctacttttctccttgataatgctttctccctattgaatt

SEQ ID NO: 70374 - DNA, 554 bp, Zea Mays
cacatggatacttaaacaccaattcgaaggcatataaccatacagggttcgcctagccacggaaacacggagatgagtgcgctctacggggttcgattaggggaaatgggcgtcgtgatgaattccggtggaaacggacagtcatgctggggatatacggccgtaaggactactaattaaccgtgcactaccaatttggggtgaggaaggggagacaccacgaattttggcttctactgatcacacccgaagatagtgaagacttcacggtggttcatggcacaatttaaaggggtggcgacctagctagctattcgcggtcacaatgctcgacgttagtgcatggtgaccacgtaacaaaggtgcacagtgtggtagaatttaggcgcgagtgacactgtgatggaagttatgagccacggcggccgccggtgagatattcttgccccgaccccggcctaatccgcaagatggtgaatcggctcgaagttatcccgccctggccgtccctatctccagttcgcttggacacatctgaatcccacagtaccgcg

SEQ ID NO: 70375 - DNA, 565 bp, Zea Mays
tggaagcatagatgattagcatcgccaatgccgacatacttacatatttatattaaactgtggaagcatagatgattagcatcaccaatgcccacatacttacatatttatatgtcttataaatgtgcatatgtatatataatacgcacacatatgtgctcttattaattaaacacaattacctattttctatgtcctccttactcaagcataaatcatcagatcatctctatttaattctctctttatttctctttgcctgttgaattcctattcctacttaattaaaggtcattgaacaataacaggttacgagtataacttaattaaaaaataatgaatccccaaacgacagatgcagaaagcagcaacaacaaacgcgtgaacaaaaggaaacacagtatgttcttatcttgcacattcgtagcagattaaataatgaatatagaaaacagtcagttattgacttggtagatggcctctgttttcagactcttttactccgtatataccactacccacaaatgttgtagaagcacggaaaacccgaagagtgttacctaac

SEQ ID NO: 70376 - DNA, 518 bp, Zea Mays
ggaattctatggtttggagaccaactggttgtccccaagaaccctgagctcagaaagaaggtattggatgaagctcacctttcaaaattttccatgcaccccggcagtaacaagatatatcatgatctccgatctttatactggtggaccagaatgaaaagggaaattgctaagtatatatctgaatgcgacacctgccagagagtcaaggccagccatctgaaggtagcaggcactttgccaccccttcccataccatcttggaaatgggaggatatttgcatggattttatcgtgggattgcccaatacctcccggcaccatgattctatttgggtcattgtggataggtttaccaagaccgctcatttcttgccagtgcataccacccacaagacagagaaatatgcagaaatctatgttgatcaaatagtgcatttgcatggcattccgaagaccattgtatctgacagaggagcactgtttgtggcacgcttttgggagcagctacaagaatc

SEQ ID NO: 70377 - DNA, 445 bp, Zea Mays
ctgattttcctctgttcctgggttgcgcttactaatattgaaaattacgggggctaaatcataactttcacaagactcagacaacactagaaatggactgcgggttctatttcaagaaagcataaggtttcttatcctaatgtgccagagcgaaagggtatcatgatctcaaggccgcccaatcagagatggacgcgccagattagatcatccatattgtgaaacggtacgcgatcacgaccgcctatcaacagatcaacgatcgagatttttaagtaacctagattttatcccgatccacacgatgtaggatcgacgactcagatcgaacacgacgaagggttaagtaatgttatgatctaaactgttgccctagctaccaatggtcatgatgatttccccccggtcgatctaggccgttgttacaaacatcaacgccccgaag

SEQ ID NO: 70378 - DNA, 332 bp, Zea Mays
gccggatatagggttatcccgtatcctaccctaatgtatttctctcggacagggtaccagatacgggtagttaagattcaggatggatacagaacgtgatcggataataagctgggcgggtaagaaacggataacagatactattcgtgtaggtacgggataattgtcgggtagttcgtccgatgatattaattgtccaaccatccaacaaacacataaattaagcaatacataatcatgtatatgatagatcaaatgtaagaaatgaaaccaataaaattgacatcatgtagttcaaagttactaatcatgaggacatcgtaaaaaccaac

SEQ ID NO: 70379 - DNA, 602 bp, Zea Mays
gcctggagacgactggggatctcgggggcgagtagaagaagtcacggcttcggtgccgccgcggctgggcgttcggctggggaagaaaagcgccgcctcggtgctgttctgtctgcgcagccgtgccgaccatgtgcagcgttgtggtcacccaaatctacggtatggcccatctggtctggagttcgcgcttacccccgccctctcttacgccaatctacggttgggagatacgtattcgatgggggcggatgttctggcaatggcggactccactgcgatctctctcgccatcgtgttcaatggtctgaggtgggggatgacctagtaaccgcccattagaaaatgaacggctgggattagttggcacatacctattcgatgcattaaatccttgacgtcaaccagcgatcggacggttctggggtcacgtgatgctctgaccgtggattcctgatccaagggctgatagtacataccggttcatgaaaggtcataagttaatccgatccgttgaactctaatcggatggctcacgtggctagataccccttcgtcgatcccgttttgtaaaagagcccctgtactttcacagaatcaac

SEQ ID NO: 70380 - DNA, 748 bp, Zea Mays
gtgtcctacctaattttccatcgtatgcacaatataacatttcataccatctagctgcataatattaccctcgatttaatttttctatcgtatgcaatttaatctacactaatgaaaatccaaaacagttataaagtacttacatgtctctgcagaatcactggtgtgtccggttcatgctcaccaatagttcgcatagtagtaagttgctgtcctccttgatttatggtcatcctcgacgcatctgatgtgttctaatcatcaacccccggcgccctcaatgctgctggtggagtaattgcccctacggtagtatctgtttgcctatgtgcatttgcatccgaggcaaactggttccctcctggttgatcttcctgcaccattggtacgatctccatgcatggatttgatcgatgaactgatgtcggcgtcgcgtactctctgattggctctttaccccatggctctttacttccttctgccaggcgcaccctaacaaatgattcttgttgtctaacttttctggaagcgtgggattatttcctttttcccatgctacaatataggccattatcgtgggcgcgatattcacggcgacttcgtgaatgtatctgctacaatataggatcgtgggcgcgatgatcgtgggcgtaataacaatttacgacatttagacgttggtcatatgctatcataaatactatttcgatccgcttccataatactcgggtgacacatcaccggccca

SEQ ID NO: 70381 - DNA, 425 bp, Zea Mays
ggcacattacccttcaaaggtgagagcatcgactaacatttccaaatacgacaggtcttcgaaccaggcatatggctagaagattaccgcctcgcatgtcacatggcgggaatcaaacatgaccacctcatcatctagttctttcccatccacctgatgaagggagcgagggcctagctcgagcacctgccagccagaaccatccacgactaggcagacttatggaaggcctttgttgggaatttccaagccacctacaagcggccaggaagttcctgggacctaaagaggtgcacctagaagagtggggagagcatccaggattacatccggaggttttctcagaagataaatgaactccccaatgccactaacaccgacatagtgaatgtcttcatctatggcaccacaaacgaggctctcac

SEQ ID NO: 70382 - DNA, 464 bp, Zea Mays
ctgatattccttcatcaacttacccctgaagttcttatcatagtgggggtttttatatgggccatgaggaatcagggactagagccgaatgctaagtgcttctgcaacattcacgagttatcttaccagacaaaggcgaccgaaaaagaacaatatcataataacttcggctgttacagcttcgtgccctgctccgaggcaaattaccatgtgcctacatttctaaagaagtggccaggctcttggatgaaacaatggttttatgtgaagaatgacctaaatcagagggaggacgtaaggggtgtcattcaacgtcttatatggtcacgctttggcattaaaaggacatcaatcgcacttgggaatgaagtgcaagcatgccaaatggctttcaacaccatatgcacctacattggcacgagagatttagttcaagagcacattgcttataaagtatggcctct

SEQ ID NO: 70383 - DNA, 526 bp, Zea Mays
aaggagtttttttacagggctgacctaagaaaattctgtcccaattccttggatgcgttcgcttttgttccctcggtgggaaattcgggtggcttcattactgtttggaatagcgctaagttggtgggcactgttatttttcagaatgattatcctctttcggttgaattccatgctaattcgtccaatgaatcctggattgtcactaatatttacgcgccctgtactccgcatgggaaagtcgaattccttaactggttctctgctataaatatgccctcggaaaagctctggctgattgttggggactttaatctcattcgtaggcctgaaaacagaaacgttgcagggggatcttaatctgatgttgaaatttaatgaggccattagtgagcttgacctgctaaaaatcccccttcatggtctttcctttacttggtcgaacaggcaaagggagcctctccttcagagacttgactggtttttcatctcgcaagaatggtcggttttttacccggacacccac

SEQ ID NO: 70384 - DNA, 454 bp, Zea Mays
tggacctccacaagtgccatccaaacccctagccaggggaggtccggtggtgccatgtctatgtatgctcttagccccagctctccactcagacggagatacggtgctgccatgtggcctgtggagcttcgtggaagctgctaggtgacgcctgatgcgtgcctctagcatgggggtcgcattaaatgtgggtaggaggtgcacctgttcaaccagtggcagacgacgtgtgcagttcgcaaggcctaggtcgtgcaagtaacccacacgttatcgaggcggagaccattgacccactgcgccacacgtgggcaactcccatcatgacttctactattcttgctcagaggcaagagatggagataggcggaagggactggacgacaccacatgtctactctcctacgcaagtcgacaagccaatctacgttgcagcctacaccaaatctttcac

SEQ ID NO: 70385 - DNA, 286 bp, Zea Mays
agcaaactcattagtatatttttatttgttttgtccattaatcaccaaaacccttaagaggttgattgcacttacacataggcacccagacagtcttcgcgtaggtctaccacccactatccaacggggtggtagagcgcgcaaacggtaaaatcttcacccacatcaagaaaagactgctcgaggataagaagggcaactgggcggatcaattacccaaggtactctagggcttaaacataatggagtcctgagcaacaggatccatgcctttcaggctcatgta

SEQ ID NO: 70386 - DNA, 888 bp, Zea Mays
atcgcaatacacatcaaatcctttgtgaatatcaggaataattaacactggtgcagtggttagcctttcctttaattcctcgaaacatttctaacatgcttcatcccacttaaactctttacctttctccaatagtgaagtaaggggtttcactattttggagaagtcttcgataaatcttctgtagtatcctactaatccaagaaaactcctaaccttggacacatttgtgggtcgtttccaatttaatatttcacttttttactggggtctacattgattcctccattggtgataatatgacctaggaaagcgacttccttcagccaaaaatcaaacttccaaaatttcgcatacaactgactgtcacgaagcttctgtagaactaatctcagatgattttcatgtgcttcttcattctgagaatatatcagtatgtcgtcgatgaataccaaaacaaactggtctaggtattccatgaatactttattcatcaagttcataaagtaagctggtgcattagtcagtccaaaagacatgactaaaaactcatatagtgcatatcttgtagtgaaggccgttttaggtatatcttcggttcgaatcttcaactgatgatagcctgatattagatctattttttagaatactttagctcctctcatctgatcaaacagatcttcaatctgaggtaacaggtaattgttcttaattgttacttcgttcaagcttctatagtccacacacattctccttgaatcatctttcttgttcacaaatagaattggggctccccacgaagacaaactggggcgaataaaacctttttctagcaattcttctatttgtttcttcaattcaattaaaactttgacatccattcggtaa

SEQ ID NO: 70387 - DNA, 813 bp, Zea Mays
atggtagtaaccgtggcacatatagattcacctctttagagccgttgcaccggcgagcgccacaactaagccaccagtgatcttctttctctccggccgccagcgcgccatgacaaattcaagagccaccgccaccaggtcctataaattgagcgtgccatcagctccgctaggtagtcaagcatccagcgcacccactcgtacctcggattgtccacctgagagctctaatttgggatttcccccaaatcagtcaaaactccgtcgtgtgtgagctcgccgtggccagctctccacaggtccgatcatgccttcctcgctctcgtttcaacatccctgtgtgttgtagatgcttagaagcccggccaattgaactagatcacgctagatcaccgggaacacttcggattgtccttggtttgcgctgtcaccgtgggcagagagattaggagctagaatcttgcaattgatcgaggggaaatgatcgtcaggggtagaattgtgtgtcagtccggccagagcactggccattgtgtatcttggccagtacaggctcaccggagacttgcccatcgccgtccaccgtcgtggacccggcactgtgaagaaatagaactgcaagggtctatctgcgaacgtcagagacacatgtgaatagtgctaagggctctttacgggttagtcgaacagccagggtcctctgtgcaaagacgccagtgcgggtgcgcgcgtgcacgtttttgcccagacacgggctgacttgggctagttttcagcctaacactgttcattattttcctttttccttttcta

SEQ ID NO: 70388 - DNA, 491 bp, Zea Mays
tttcgtaggtgatgagggacgaagagatcgaggacctcgttgtcttggagagcttaatggctacgcaggatgctggtgcggaggcagatacgaaagagcagtcgtcgcacgcgagggtcgatggtaccgaccttggagtgacggggatctcgtagtcgtctgcctttgagcaggtgtaaaaataggattaggcttgttgtgacaatacttttgatatttgttaatacttaaagtcggctgctgcgtaggttctagtgattgggcctgcggaagcaaattttggcctcttgaaaaaggggaaagaaattgttggggctgctgaatatgttacaccgttgtcttgtcggagtccaacatggtttagcgatgagggctctgaatttgattcatggtcgtcgggtagtgaaggatggttgagccccttcacaaagatggacaaagagtaatcagaagaggatttgaatttctttgttgctttagatatgtccgtg

SEQ ID NO: 70389 - DNA, 350 bp, Zea Mays
cggagttcagaaaaatctcgccggggataagattgccaccgcggctggggattacactgcggccgcggtaaaaatcttccgcgacgtggcgcataaactttgaggtggcgctgctcggttaatcggtgatcaccggacgctcgccgtggctctgcccacgcgggtgagctcgccagcgcacttgaagatccttgaatctcatccacctctggccatcttcctataaattgagcccgagcgctgcttcttcaccacatcacacacatgagtacttgcgcaatcgacccaattccaccgaagaactcagataggccataaatctcctcctcactgttcttagcgccaccatg

SEQ ID NO: 70390 - DNA, 457 bp, Zea Mays
tgctgcattttctctgattgttcatatatgaaaactgaaacaaaatatatcgaaatgcaccacacgcctagcttcccgatcgcgtctatccccacgacccacacgatgttgactacacccccatcgactcactcacgttgaggtaattcctagcatgcatggctagcaacaactgtttgacgtctaactgaatgaagcaaaaactaattaatgaaaatatgaaaacagacagggcacaagtttattttctaacaaccaatatgctatagtaacaaacacggggccgcctttatcccttccaaatacgaccttgagctgctcgagggctgcctagtacctcccaaaagaatagttgatgcatactcactccatacacctaatttgtctatctagttttttttggaaagaagccatgatgctaaaatcgacatccttagataatattattgtgtctccg

SEQ ID NO: 70391 - DNA, 405 bp, Zea Mays
cgaacgcatcagcatgcggcgtgagcagtcttccaaggacggctccccacctcatcgtcgccctagcaaggaaaaggtcgacgacggcgaggtagccgcggctaagcgagacctcggatactaataacccgaaggggatctaaaggacgtcttcactagagactcccactccgatggcgactagacgaaccaccggcggaccccatgtcctccggcctacggagctgaagcctgccttcctccggaaaccattctgggtcccccatgggtccagacttctgacaggtttatccaggagtgaccaaggccaaggacgggggctccttcgtcaaacgcagatggaaacccggggtcgggacctaatcttatggaaataccaaaccagatcagggctcagcaacactc

SEQ ID NO: 70392 - DNA, 327 bp, Zea Mays
gcttactcataatttctaccctttatattctttgtatcctttttttggagattgatgacaaaggaggagaaattttgcattaaagcttacctttagtcttatgtaactaagtgttagaagacttttgaaaaggggagaaataattaacaaaaggttgaatcataagtaaaacataagatgaaggaaattgatgagtgcataatatgtcatgagcatcacgtttatttatgacacaaagcaccctatgaatagtatgatataagttgtcttcactctttgacccaaatatgtgcttttggcatttgagtacaaaattggtattttctg

SEQ ID NO: 70393 - DNA, 415 bp, Zea Mays
tttgttgtcagtgcatttctgttttcactgatgaaaccaccatttctgttttcaatgaatctgttgaactgaactgcaaaaatagaaattgttctattttgtttgagtgcacaaacagaactcaacggaactagatctgaatatgtttgagtgcacaaacagaaattgttttgttctggttttagtgaactccacaaatagaattgaatctattatgtttgagtgtagaaacagatactgaaatgctacatctagcacttaatctggcagaatcagaaaattggggaaatacaagctgtttaagagcacaaacaaaagctgaatctgtttgattgcagaaaccgataaaaacagaaatatatgctgaaaataattcataagtaggcagtggtggtgctatggtgcataccaggtt

SEQ ID NO: 70394 - DNA, 646 bp, Zea Mays
gatccattcaacatctgtattagatagagttaaaattgcgatggtgttagagtgttgtataggagttacatgttttgccccttcgtaatgggctttggtccacttgactctatataatagagacccaactcatgaattagggttagggtttcgattctccaaccaacagccgatgcctgcgatcagtatccacgctaactaggcactattcagaacggagtgagtttggctggaattaattcgtcacgaagtgccctgatctagtgctcctctcgtcttcctcaagttccaacctgtaccgcctgacagcagagacggcgtcccccgggagtgaggacgttgtagtttggactttgtatcacgtctgtatcagcacgtgcgcatcccatttagcgccttgttcaaaggcaaaaaatggtctcacacacccagcagcccagcaccaggcccttcaccagtaatccttgcaggagcaaaccccaccatcgaagcgatggaatcggctcgcgtccctgaccaggaacgaccggttggtagtggccgaaaccgccttcaagaacgagtggcagtccccgcaaacccttaggttcttgatcaccacaatctcactgccggcctcggtgttcagcaacccaaacgccaccgc

SEQ ID NO: 70395 - DNA, 596 bp, Zea Mays
cttgagtgctagtgagcctgagtgctagtgagcctgagtgctagtgagcttgtgttgtaacgttgcatgcctccccttttatagctcagggggtatgcacaagggtactgagccccgacatgtgggcccaggaacataacggatgtagcacttggagccactaatgtttgctgttggagcaatctccttgcgccctgacatccgagatctgcatagtatcgacgtgcaggggaagcttctcgtacaagggatgatggacacagtgtgccgcgtagcacgggcgcactgtttgacaatggattggacaggtgcgccgtctgcaggatggacctggcgccgcctgccagcggagtggataggacacattaaatgctgagggggcacatcgcctgtcagcagggtggacaggcggcgcgtcctctccgcaataaatgcagagaccgcgcgacctagaggccttacgtcaggctccgccagctggcttatgtcacgggcaagatgccacgcggcatcatcgggactccgcctgagcggggagcgcaagcgcacgagataaggcctggacacgtgtcagtaccggacccttgcttatgcca

SEQ ID NO: 70396 - DNA, 427 bp, Zea Mays
ggcgctctcttaggattgggcggtgcaccagctggatgtcaagaacgccttccttcatggcactcactgggacggtgtactatagccagcttgtcggctctgttgactctactcacccgggtatagcttgcaaacttaacctctctttgtatggcctaaagcaggtgtgacatgcttggtataatcgcttcgcctattacttggtctcactaggcttcgtcaaagctaagttggacacgtccctgttcatcctccggcacgacgctgacaccttctacttgctgttgtatgtcgacgatattctgctcacgacgtccagtcccgccctccttcagcgcacaatcgcctcctggcagcaggagttcgcgatgaaggacttgggtcttctccaccgctttctgggggtcgacatggagcgccgtccata

SEQ ID NO: 70397 - DNA, 412 bp, Zea Mays
cagacagcaacctgtgcacgatcataacccttggcatcaacatcaggaatgctctctgtcggtacatcatcaggaaccagagcagaagggcctgcaccctggtccaagcacgacagtcgccgaagtcgcctcttcttccttttttcctcgacaggtgcagtcgggcggctcactcggcgtgaacgctttgggcgggcgccttcgggtctctgagtttccacctcttcaccaagttcttccccatctgtgatggccattggcttggtgtgggttgattcggatgattccccagccagcaagctaagcacaacatctatctccgcgtcatcagtgctagccggcatctcaaaatgagtctgcttctcatcctctgtaagactccgaagtggagcaatcaaagcctcaatgtcct

SEQ ID NO: 70398 - DNA, 564 bp, Zea Mays
gtccgcacagtcgcctggtctcatacaggggtcggatgtaggttcccaacgcatgtagaacatcctgcagcaggttagggaagtgccccatcttgaacattgatgtataatgttcggtgacaggccataaccccacgtagtggtcctgctgttcaccgttggcttcttcgttgatgttctcctcttcttcttcgctgtcatcttcatcatcgtcactagggtcatccgggtcatcgcctccgggagcaggggcttggactgctggtgctggcagtgctgaagatgacgatctagctgcgaaggctagtgattcgaccaacagggtgggcgtaggcagaaattcctccgagttgtcctccagaatgactccgttctccacacgaatgtgagggagatccacagggatttcctcaactaccacggggtagacgagaacttgtcgtggcggagggatgtagttggtgttggtccgggtggtttggattgtacgaaccatctacaagagaaaatgtcaacttagttgaattttaaagaggtaaggttaataaaataattttgtaagaa

SEQ ID NO: 70399 - DNA, 464 bp, Zea Mays
gtcgtccgatcctcgttgaacggttctgattagaacgtgacttaccccttcgccgcgttgatctatgccgtcgatcccgaagcgaacggctggatagcacaatcgtgtaccgaatcagtgggattgatcccgaccgtaggataggaatccagcgatctatggctatccgcgtcgtgttggtaccggaaccgtagatccgggcagctgcggctcagatcggataccggtttaaaatgatatggatctaatctaggacataggtttctgatcggacggctctggcctgccgatgccccttcggcttgcacgttttgcaaaagagcccttccagtattgataaatcaacccgccgtccacaccagggactttctgagtcttaggaatatttgcaccgtagcccctgctctttctggtatttgaggcctagtccagaaagttggaaaatcagagaaaatagattagaa

SEQ ID NO: 70400 - DNA, 814 bp, Zea Mays
ggctaattgagggtgagaacgggtgcttcggcttcgtgataacatggtgcaactgacccggccttcaatttatagaaatactaagcggtggtgtccaattttgaaaggagagaccggcggccgagaagagagatgagtcatcggcgtgaactgtcgtggcgcttcctggggtaattactccggcgaggaactgacctcctacggatatctacggcgacgtggtacatcttctaagcacgtggcgtggttataatcgtcggcgaactccgacgaggacactgtcgtccactgcgcggcaggtgtcgtggtgaatagtccggcgataagcttctctcctttccccgagttgagatctttctctgcccttgattatccgtgagtcccagcgcacgaatcgcaatgatcggcgttaaccgcgacggagagtcaccggcggtgagatgcgttgcatccctgatattttgttactgtaccatggcgcaacttctttagttgacctgacagagcaactttgagctcgttttctcctaatttcatgtaacaaccggttcaactctctgtatcaaagttatagcctaataaaccagctacaactttgctacatcgtgtacccacaaaaagtcacgagatcatgcttagaactgagtcccaagttcatgcaatctcactgtttatttgacttcagactttaaatagtctgacagcacgactttgggcacaattttctccaaattttccataacaacaatgtttaatcccttaaacaaagttgttctcctaacatagctctatatatttgatgtgttgaccctag

SEQ ID NO: 70401 - DNA, 1820 bp, Zea Mays
cccctgactatgatgtcgtagggacatgaagaacacggacattaccaatggcaacatgctcgcgaacaaagtgaaggtcaatctccacatgtttggtacgctgatgctagacagggttagatgacatataaattgtgttgatgttgtcgcagtatacaagtgttgtcttgcgcagtggtgtatgtagctcgatcaacagctaacagatccaggtagcttcagcaactacattggtgattgatgatactcagttttagcgcttgaacaggacacagtattctgacacatggacaccaggatacaagattgtcaccaaggaacatagcatatccagatgtggaattgtgggtatctgggcaaccggcccaatcagcatcagagtagaccaccagctcaaaatgagaagaggggcgcacaagaaggcccaaatgcaatgtacctcgaatataacgcaggctgtgcttgagagtggcaagatgaggttcccttggatcatgcatgtgaaggcatatttgttgaactacatacgaaatatctggacgggtaacactgtgcactttgtgttctaactttgacaatgaagtttttttttttttgatagggaaaacggcaagggagacccttgctatggtatatatttatatatgtagtcacagaaaaaaaaagtaacactgtgcacttgcaaaacagaggctgaaggttgagctccatcaatttctgattgcaaattaaccaattagtgggggctgcagggctgcatgtaattgttgtgccttggaagaaatatggaatagctatgtgagtaccaaatccacaaccagaaccttgcccagcacagacaagggtaatggctgtggtagctaatgcatcttgttgtcacctctgatttctgggttagagacttgtaaaattcaaatgaaaccattttttatttttaacaattatacagccaccaagtcccactggtaattgcaggtaccaaccctctttgttaacgaaatcccaacagtaaaaaatggtataaatggcacgtccataacatgacctcatgagtataaaaatatatatccatacttaacttattacaacaagcttgttcaacaaatcaggtataattgctttcaagggaagaatatcagttttggcaaataagtgaaactttagagaaatgctagtttgaaaggaagtcaatcttagacataaaacaggcaacggcaacaaatgaaacaacaacgagcaaaaacattgggacagcacaactgcatatgccataatcatgtaccccccccccccctccttatgattcaacaataattcgaagaagaaaaaaaaggattccaaggagacatacaagcctgaaatagatttagattgtctatataacgtactcatctacaacaggcaataatatggtctaataatatgatgcaaaacatgccttccagtaggaatagtcattttgtaatgtcaattggcattcaagaaggaaaccattgtggcggagcatgacaaatagtggggaagaactcaaagaaattggtcacaggtacctgagttgttttcccacatccagtttctccactaacaacaactacatcgttctctttcagcaactgtaggaagtgttgcctctgtctagctattggtagagaagctcttgcttccagcattttctaaattcaaggtcaaaacaaaaaaccattagtaacaatacagaagaagcagtgcttgattctgaacaaacaaatattcttattagtttgcaaatccattgcttaccaagtaatttggtagcttccttttatcttccaactgctttt

SEQ ID NO: 70402 - DNA, 882 bp, Zea Mays
gctgttttggggaaatttcattttgcacttgtattagttagtctttctactttgttggacttctcattagttagtcttacatttactatgccttataccattgatccggtgacagaagttttcgaacgcaggtcggtgcgcatgatattgaagatgcattggcatggaaaaagaaaatagagctcctcattgatcaggtgcacaagtctctgtttcagcctctttttttacagctatggcacaatcgctacaagcatgtcttgaaaaagcttggatttcatatacccttttccatatattatttaggtcggttaacaagttgacaacaacttattactttggtaattaaatacacccttcgtattagcagagcatcaacttcaggcacaactacaagagcagcacttgaaggggtaaaatttagtgctacctacgtaaatcataaaaaaaattatttgtttgaattcaagtgttttgggggttcaataatgattctatgtagctataatttttttgttgatttcatgtcatattttcggatgttgcaaggaaggcattccttcacagtgtatgtgatagttctctttatacatgtaagacagtgtataagggcaaaactttgtatgaaattactccgtactggtttataatgattacagggcatacttgtagtgtttgaggagcaagagacaaaactctacattttagatgtacaaaactctacattctaataatcataataactgctttagttaatcacatcttttagtttagcactatgctatgatagtttacaaagtacattgtcagcttattttccccataggttctttaatcatatctattgtgctagattttactctgtcccattaggagacaaac

SEQ ID NO: 70403 - DNA, 455 bp, Zea Mays
ttcatcttcttgcccttcggcacaacagtaatggccgaagcgatagtttttcttttcttcccttgcctttgcaacgggtaatgataatcagggtatacgaagccaatggcatcaaatactctgtttagtcttttcttccctcggcccccgaaggctgcagacaaggcatcatcttcggccctgctatatgctccaagtagttcatcactgatagcctcaatactttttagccaatcatcatttggctcatcaaaacggtctctgaacctgaaggtatatttcaatcgaaccaacccaccttcagttgactcggcagtagtatccttcggcatatcccagtattctacaagtggccatattctgtacgctatgtggtcttgaactatatcccttatgccaatgaaggcacaaatgttgctaaaagccttttggcatgcttcgtcattctgatcgat

SEQ ID NO: 70404 - DNA, 1267 bp, Zea Mays
ggcgttggtgatgggcgataggcggatgccgaggtccagtgtgcctttgatgtagcgcagtatccgcttcagcatggtgtcgtggacgtcgcggggcgcatgcatgtggagacacacctgttgaacagcatacacaatatctggtcgtgtcaaagtcagatattggagtgcaccagcgatgctgcgatacgccgatggattggagaggagagtgccatcagtcgtcgaagatttcggcttgcagtcagctggtgtcgaaacaggcttgcaatttgacatgccggcgcgatcgagaacatcagcggcgtacttggcttggttgaggaagaagccagtaccatcccgacggacttcagtgccgaggaagtagcgcaggggtcccatgtctttgatggcaaatgcagtccgcagctgtcgaatgatgcgttgaagcacaacctgagacgacgctgacaaaatcatgtcgtcgacgtacagaagtagataggcggcatcgttgccgcggtggagaatgaagagcgacgtgtcagccttggattgagtgaagccaataccagtgacgtgtctggtgaagtgctcgaaccagacacgtggagcttttcgaagaccgtagagcgatcgggagagaagacagacgtcgtcaggcctgtgtggatcgacaaagccagtcggttgctgacaatagacgttgtcggtgaggtggccatgaagaaaggcattggagacgtccaattggtgcgcaggccacccgtgcgtagcgacgagagtcaaaacggtgcggatcgtcgtaggcttgacaacgggggagaacgtctcgccaaagtcgacgtcggcgcgttgattgaagccgcgcacaacccatcgcgcttgtagcgttcaagggtgccgtctgagtggaatttatgttggaatacccatttaccggtgataatgcgagcacccggtggacgaggaacaagagtccaggtttgattgtgttggagagcatcgaattcaagcttcatcgcagcaagccagttgctgtcacgaagagcctttcggactgaggtgggcacgggagaaacttgtggtgcggatgtgttgctggagataggcatagcataatccgtgaaacgagcaggtcgtgaaggcacagcaccggtgcgggatctagtcaccatggaatgaggacgtagcggtggatgcaaaggtgctgcagggtgggaaaaacctggagaatcagacgtttcgtcagggatgggcagctgggttgctggttgttgtgcgg

SEQ ID NO: 70405 - DNA, 378 bp, Zea Mays
cacagatttaagggaatttacttaactgtcactcacctcacctgcattgatagtatcttgttttgatgactcatagtttatttatatgacaaatgaaacctgatgggaaaaactaaacctatggtgttgtagaaagtagaaattggttagacatacagcttggagcactcgtccaagttttgctatatgttccgcaaagtggtgttcaccgaagtgtggacgccatcaattgttttgcctttgtgtaccttcggctgcttcttgccacaatatattatataattttctaaaggttgttcttgtaattatcttgttgcacatagctcattttggtactcctaagtgcaacgtagctttgcattcagctcattattcatg

SEQ ID NO: 70406 - DNA, 704 bp, Zea Mays
tcgaattgcaaaagaatgtgatatgccacagcatatatcttcgacagatataatttattatacgaagctaaccttcgtcaacactggcataaggaaaattctctttgcgaagcataaaaagaaggaaaggtgtttttcaccaaaggctcaaaaatggtacgtacatagatttcatgcatcacaaaggaatatattacattagtatacatacaaatatttgatgtttattccgtacatatgacggcgaccatacacaagcattacatttcttagcatacaagaatttaatcttccttcagtattttttcagcggcttcatgtaatagtctgtcgacgacctcgtcaacgacttagttggcaatcttcattacatctaaagcttcttttataaccaggttagcttcagggttgtatggatcgggtgatggcgaaaggccgtctgcaataaagaacaaaatggtgagcatcgaagctagaaacaaatgacgaattaaaactttaaataaaagtacctataatcatggcacgttcggcagcctcttcggcttgcttgcctcttcttgggcgtcgtgagattctttttcgttctttttaatggcctcatcggccatctcacagcgcccttcatccagacatcagaatagaatcttctgcccagcaaagaagcttcggccgaaggttccttcatgtcttcagctgagaag

SEQ ID NO: 70407 - DNA, 290 bp, Zea Mays
gtcattttccttatatttagattcaaagggcaagggaggggttgggcatggttatgtaccgattccctcaggtagacaatcggggaagttcaaacgtagaaattcctcagtctcccaagtagcctcttcctctgagtgattactccattggatcttatacattttgatcgatttagcccgagttgatctctctttgaaatctagaaccttggaagggtactcttggtatgatagatctggctctatctccacttcgggttctgttatgatctcggtcggcaatcgaacac

SEQ ID NO: 70408 - DNA, 310 bp, Zea Mays
cgagggatgaccaggggtacgttctgtcaaacaattaagcccagctccagttagttcagttactgcatattgcatattcagttaagttacatgtctgcatttgagttagttagttcagttagtctatattatcagtcaagggtcgagccccgatttgtggaggccaatgtcctgtagaataggtccagtttgttatccacaacggagaactcgcgcagcatgcggcgtggggatggacgcgcactcgagcacgtcgcgcggcttactcggtcagcttattttactgcatgtacgttccacttctactgta

SEQ ID NO: 70409 - DNA, 429 bp, Zea Mays
gactttttgagttttcagattgggaacagtgaactgaaactgagatttcagtatatatagctgtttttggagctcaattgtgcctaatccatgaggttttgggctgtagaatatgtagaggaattaaagaccatgtgatgttaaataagtctccttaagttactttggtttgatcctacacaaaagttggagagaaagcttgctaaaggttggactgacagacagtgctttaactgcatttggttcagttctgaaatctgaaatttgtggtatggtgccaagtttggagcctttttgtggttgttctataagattttggactgaggtgtttgtaggggaagtgaagaccagataatggtgaacaacgttccttaagtgtgtttagcatgatcctatacaaaaagtggtgtaaaactggctcaaagttgg

SEQ ID NO: 70410 - DNA, 388 bp, Zea Mays
gttcgaaataggtgatgtgatgggagagaagatgaataagctgttggagatagtataagaaaaatttccttcaaagaaacaacattagcacaactagtttgacaataatatgcccctagttacaactacttgaagcttaatccaacaagagaaagctttacacaattcaagtataaaggatatctactacactaagcactaataccagaattgatccactaacaaaaccattagctacgaacaactaaaacaagggaaataagctagagatctagactagaacatctatacaataaacttactacacaacagtaaagcaaaagtatagagagctcaagccacataagtagagacacaatatttatcctcatggttcagtgacccgcgt

SEQ ID NO: 70411 - DNA, 1247 bp, Zea Mays
aaaaatgtgaagaaaaatacacccaaagatgggctgtctgggactaaacctggtctgacagtgtgatgaggcaacccttgaaacccagaattgaacatgatccagtgcaagtttgggcatgatccccatagcaagattgcagttggttaattgggctataactttgatgcagtgggatgatggggttgttacatgaaatcaggagaaaatcgagctccaaattgctcggtcaggtcaactaaagataaatgccatggtacagtaactgaagaagatacctagttcatcccccttcgccgccgatgaccgtcgcaccgcgattcacgtcggtcgccatgattcatgcgctgtgacttgtggataacggtgaacgagtaaagatcttggcgcctggatcaacttgggtccggccgcggctaagttccccgtaccactagctcatcgaccgatcgggataaacctcgccgtcattggccgattaccaccgtgcgccacgtgctaaagtgttagaccacgtcactatgaattgcgtctcgcatgcacggtgatcgccggtgtactgccacggtgaaagccactaacccgagcaccagtgatctcccacccctccgaccgccgcgcgtctcaagcccaaattcatcggccaccgcttagcgatcctataaattgatggtcgggtctgttgtgccatgtaatcatgaagccaacgcaccagctattgcctcaaatcgttcaccagagaccgcgaatttcttacttcccccaatcctgtttctaccaccatagagacaccctcaccgcggccagcttattccaggttaattcaagctccccgatcgtttgttctagcatccttaagttctcctcaagctcctcgacccctctgattgaactagaccaccgtggatcatcaggaacacgttgttcctttgattgtccgcgctgtcaccgtgaccagaaccaattgggtagccattcgtgaaattgagtgaggggaaacgctcattaggtcttgaattcggtctcggctaagatagggcgctggtctttgagtgtattggccagtacatgagctcgccggaactctacgcgacgatgtccgcagccagggactcgattcgtgaaggaatagaactggagggacctttttgcacgatgttagggactattttgaatagtgtcttggactctttcgggttatgccaaaggtcagggactttcttgcaaaggctacacgcgggcgcgcg

SEQ ID NO: 70412 - DNA, 1541 bp, Zea Mays
ccccgacagcgcaccgcacagggagccgagctccggcgagctagactggccggagggagccaagaccagtgctcccgagtgtctgacactgaattgaacccttcccgagcatttcccctaacttaatttcagaaatggctaactggttgactctggcaacgacgaccgcgagcggagcaaagggttgaacgcattcccggcgattaagggggactcagttcaattgggttggttgaggagcattaggggagtatactaatactgaaacaaggtaacagagggcgtgaacaaacctgggagtggctgaccgcggcgaggtgttcttcgctgtgtgatgaacccaatttggggaaactcgaaattcgtgagctctggcgaacgattgagggtgggagcgggtgctttggtttcgtgatgacatagcgcagccgactcggccttcaatttatagagggcttaagcggtggtgctcaatttggccaagcagtgctggcggccggaggggagaaagagtactggcgcaacgaattcgtgtcccacgccgtggcagttactctggtgatcaacagagagcgagagcaggtcacgacaatgcggtggaaaggtataaacacgcggcacgaggccgagaggcggcggtcaccggcgtgcttatcggatttcactacagtgagcctggtacagcggccggatttatttactggccgaagttatccacggcgatgatctttacacgacttcaagtgttatccagccgatctggtcacgaaacacggtggcgagggcacgcatctacgagcggaggggtcgtcggcggtgagattgccatgctggcagtctaatccacttcggtttactgtaccatcgaatcaccatcagacaacctgatagagcaagttcaggtccagatttctccacattttctatggtaccaagcccaaacatctatagcaaagttgttctactacaaaggatctacaatttttctatatcgacctggggcaaattccttgaagatcatgatctgtagagctccaaagatgacccagtaccactgttagtctgaatttcagactccaataacctgacagctcgactttgagtgtgtttttcttccatttcttcataacaactatgcttacactcttaagcaaagttgttcccctttcatagagctacaaagttgatgtggtgccctaaggtgaattctcactattttgaaagttataaagctccaaagttgagccaaaatactgattttcagacttatgtgtatagggtttaagtggtgctttttgcaattagacccaaaacttagggtttaacttgcaaatccacatatttgtgatccatatgacttaggacactttattatcatggtttttgcactttagtccaaaagtggactaattttgcacttaaccccctagggtttggatttagggttttccagggtcctttttagggtttttggtatttcaagggtgtgaatgtaatgcaagtcccttcttagtaacattttatgactatttttcttaagc

SEQ ID NO: 70413 - DNA, 404 bp, Zea Mays
ccaaaattcaggaaatgcaggggccctggcgcaaaaataaataagacatagagaccagcttcgtggtccgcggttgattcattaaaaacggggggactcttttgtaatacacgcgaggtgaaggggtatcgagcgaccacagccgtgggatctgattctacgcctaggattagatctaaatcctagtgaaacggtgagcatccttagccgcagaaatacaaatcgacggtccagatgtccttgctacgtgcttggatcccatccatccgccacggattaaacgctcgggatttaaaacgccaaagcattttcttcctatctaatctgtgccgtcaatcacgagatcagcggacctgactcgtcttctccacatccaatggctagaacccatcgtctacctgact

SEQ ID NO: 70414 - DNA, 497 bp, Zea Mays
cttgagggtcattttgcgagtgatcctgtccttgtgatccaagactcgaatgggatgttctgaataagtcaaatctggttccaaagcaacatccaccgcatcgatggttcgatcaagaatccgaaggcacttctttaattgagatacatggaacacattatgtatagcagacaacgtttcaggcagttgaagtctgtacgccactggtccgcattattcaagaatgggaaataggccattgtatcggggtgccaactttccttttaccccgaattgattaacacccttcattggtgatactttcaggtatacatgatccttgacttgaacgaacaaaggtcggcgtcgcttatccgcataatttttctgccgagcttgagcttctttcaagtgatgtcttattcgttgaactctctccattgtttctttgactaagtcaaacctgaaataccaccgttctctaggttctgaccaatttaagggtgtccagcatcgtc

SEQ ID NO: 70415 - DNA, 1321 bp, Zea Mays
tgtacgcccgcgctgaggtcacgaccttcgcaagaggatcgacgacatgcttgccgctattcagactgtggaaaaggaggctgccaacacacgtgctcgcatctaggcagccacccttctcaaacgagaaggctgtcgtcgccgccctcgagtaggaggtcaccatcgttcaatagggtttgggcctacaacaccacatggccgttgacccccaccttagggcacccccataggatgaccttgttgtagcctatgaggctgctatcgtcaacctccttgtccaggccccatcgaccacatattgtctagccctctgttagacatcgattcatgctgggatcgaatggactacgttgtcatctccgtgatcttcagcaccatctcccccaatatatgtcggatggccagggagcaatggcacggcacaccacctctggctcactctcgagaaccagtttcttatgaattgtgacctgcatcctctaactcaacgccaccttccacacctttgtccaggatgacctctttgttggtgattactgctacaagctgaaggggatgtccgactccttggctgacatgggcacgtcggggccatcattcgacgccccccttcctatccttccttaagattcaatacgatcttgttctggaggatctcaacatgaccaccactggtcttgctgttgctctaatggccttcatcgccactcccccgtcgatcgcccccacatcggctgccctagctcctttttattttggcacactccttcgggacttgaaagcaacccactcccatctcacgatctgacaagaagaaaggtgtggtcggggtaacactctttggcgggccttctacaaccggtggacgggtagcatcaccatgctcctggcctggctcctagcagccagcagcaatagctgcgccaggtgtcctaggccatgatggcggcgtttgtactgtttggaccgtctgacatacttgtctcttaacccttataggcttcaacattcccatcacaaccgcctacaccgccaagttgaactccatgaaccgatagctgggattagtaaattcttgctaactcgtttagcactatggctctgcatccacatgttacgttcatcaattgggtggccgactctggcgcctccaaccataccaccaacatgtcggcaacatctccctcttctgctcatctaattcaactacaccttcatctattgttgttggtaataactccatcctccccatcacctcaacatgtggcgcggttcttcccgggccattctatctcaacaacattcttctcacccctta

SEQ ID NO: 70416 - DNA, 1050 bp, Zea Mays
ctagagagttgatgagcagctagatgaacatgctggttttcagggcatccgatggcctctaacttcctctttactgtgcgcgccaatcatcagcatcgagcgggttgctggatccggcgaatgtgggtggcttgaggtcttcctccatttgggagctggtctcaaggctatgtcctgaggtcttcctccattcgggagctggtctcaaggcttctagtgaggacttcaatgagtcgagtttggttggccagaacttgggctaggtctaatggcagctctggaggtgcggggaggtgagtctcactcccttctccaccgacttctccttcagcacctaggggagaccttgctccaatccctgaggtggtaggtgtggttttatccgaggccatctgctagaggggagaaaggattactactatgaatatgccatattttttcctcaaacatgttattttattcagcactccagttcattacaagcatacaatcaccactgaccacattacgcacgagcgttctctaaggtgtccccaaactccctgagaagatcgtcaaggctagctccagggacacttcctcaacgtcagaaaagttttctatccctaggggaggcagtgttggcgaggcttcctccttcgggtcagtctggcatccttggctcttgaatcgctttcggatcttcttgacaggggcgagcttctttaacttcttagcacagtccatcttcagggtccgatatgcctcacgagtgttggcttcttcgcctttcgccatctcgaggctgtcttgaagagacgcgttttcttccttcagttccttgatttgttgctctaggatttccacccgggaatttaggtgggtgcagtgggagaaaaggtcatcatagtggttgtcgagggtgtggagatatccggccatgtagactaaggtagggtcatcttcattgggatctcttcctgacaaggcctagagtcttttcctccaagcaggagtatttttgttgctaggtggaaagtagcgaaggagcatctcagagacttccctgct

SEQ ID NO: 70417 - DNA, 709 bp, Zea Mays
cagattgttttgcgatcgctgagaaataatcctccttgagcatgttgaaccagccaagatcctgcccgttcaactgccttcgcatctcacccagaacaccgacgatgatgtgcatccccgctgtccaaacgttcagcacagtttccttgggctcttccttgtggccgcccagaatgttgtccatgtcgaggatttcgaggtaactgtcgcgcacatgcgttagtataggtttttactatgtctatatcatctagtatgaagtacaagtttggttctcgatctttgtcgatgatcccacatggagtgcgaaatcaccaaacttgtatatcttgaactacgttatgaattattcgaatcaactcgggtagagaaatgacaaaatcaaactttttgtatatcttgatgagatacgacttcatagatgatggctttttgtatatcccacttacctggcaagctgagcagagtgtcgatcgatggcccgtcggagcatatcttcgtattcgtatccaccttggatcatgaggcccgcaatgtcattgatggtggacagcaccttcctgtcgataagatccatgcgtccgaatgccttgtcacttcggaccgacatgtcctcgcacagagccgagaggaacccgcttgagctgccagtgccactagtgccgccgaaggaggtagaggaggagctcggccatgaggccaccgaatc

SEQ ID NO: 70418 - DNA, 553 bp, Zea Mays
gttgaaggagaaatgtgttcgacagcaagtgccggcttcagtactcaagcggatgaacttctccggtgagacaagctgaaaccgatatttgctcagcggttcttaaatttcacatataggccactagagaaaaattaaactttaccgacccgtataaaatcgtcaaaaaactggatttatttaaatcgcatgacgccatcaggtacacgtagtcttggaaacttagacatgtcatatcacttaggtcctcaagctttgtatgctatgttacttaggttcttgaactttcattaatgtcctccagtgtggcatgttataccggtatcagtttgagcaaatctaatttttgatgattttaaacgtatcgattaaatcgattaggtttaaagacccgattttctagttttctaagtttaagaactaagtgacacaatgtgctaaatttagagagcgctaatgtattttactcttgcccgtccaacttttgtttcggtgacgccaacaacaagcttctgtgacatttagcattctttctatacattgatttacttgt

SEQ ID NO: 70419 - DNA, 489 bp, Zea Mays
gtcgcgacgctattcccatgtctcactgacagttacaaaaatccccccggacttctgtttctctacaacgccaggtccacgacggcgagcggcgccagaccgaactccggcgaacctgtactggccaaactacgcaatgactagccctcccctttgttggacaccgaattcaaccctacacgactatttcccctcacttaattgctggattccagctctacatcaccctgttcatggtgacagcgcgaggaatggaccgaccgagatgttcccgatgatccaatggattctagctcaattggatgggtcagagagtatcaagagcacctaaggatactgaaacgaggaacccgagaacatgaacggacctgaaacacgttgaccacggcgagggctctttcacggtggcgggaaccgatttgggggaaatctccaattggcgagctctggtggatgatttgaggaacgagttgctggattaggtgtttg

SEQ ID NO: 70420 - DNA, 640 bp, Zea Mays
caaatccgcaccgttaatcacccaaatcaacggcccactggttgtcttcttccccaaagccgtcccgtcgcgcagaaacgcggtggcgcccactgtttggccttgacgccccgccggggaacgtcgccctggtgccctagtgcaccatccgcaaccccgggtggttcaacacgaagctactacaacgacgatcatgagcaggtaggttttatcggcgatcagacctcgctgaacccccgcgaccgaacgcagcggcatcaccaagcctcggaaactccagcgacgaaatcatctatcctcgcccacccattcctccccgcgacagcaagtccaccatccgcgtagctcggtggatcccttaggcccaactccgaggatgaattggcagcgtggttgaggtccacctatgatggcctccggaaacatacctcacctcgacgatgggcctcctaccctactcacgccgcaagttttcccccagaaggcctacggtgatgcggatagatggcgagtatgggcagggggattagcataccgaaagttggagccaacttgatcataactcgccgggccacgccatgataaccctgcggcgacttcccacctgtggcggcccgcccacagcttaacgtggaccagc

SEQ ID NO: 70421 - DNA, 714 bp, Zea Mays
gctgtctggtcctctagcgcggtgcggtagatccctgcatcgaaagcttagctttccgctcaatttctgcgggggcttgggcgtgaatcacctcctccggctgcatgtctgctgtgttggctggcatgtgtgtggtttgtgatcgccgattttgacaagaaaaaggtgagcttcctgccgccgatgcgcagatttgttcccggctcgacccaaaatccccacctccaaacgccctatccttttcgtctttgatgaggggcctctttcaggcttgagctgaactcccatcccaaggcttccgaattccgcgttctttggaaacccgaaaaagattccaccttcagttcttgttcttgtttaccaccaagtaagtgataccacttgcttgtttgtggggtcgctatcatcataccactgttgcctgttacttacttcggctggtgtgaattactattgctttctcgggattattatgttcggttgacaaagacaacgccatgttacgtgatgtagagttgtagacgcgtttttctttgatgggtacacgattctagacagtatctggcaattgacttgaacgagtatcaggttcccactcgatggtgcccccccctatttttactctgatttggtcatggttgacatcttctgttcctgacggtccaattgggctgagtgtgagaccaattacaagacttgtcatacctactggtc

SEQ ID NO: 70422 - DNA, 451 bp, Zea Mays
taagaatgcaagtcaatcgtgaacaaactgagtatctttgaagcccttttttattgatgacatatttccattttacagagtacatcgtcgtcccgatagcttttgaaatacagctagggataaaacttcctgaggtgttctatgttccaggagttcccgacttctgtaccgtccatctgagtgagatgatatgatcctggccgagtgacttctgctactatgaagggtccttcccataagggcgataacttgtgccgtccctccccgttagaattcggcggaggacgaggtctcctactgagaaggatcgctgtcgcacggccttgtcgtgatagcgccttagagtctgctggtaccgtgctgattggattactgcattcaaccgttcttcctcgagtataccaatgtcctccagcctggtggcttcgacttctgctatgtttttgaagat

SEQ ID NO: 70423 - DNA, 783 bp, Zea Mays
attcgtgttcagctcggacaggatattaccgcggacgtgaaaagatcggagggggagtggattgagccgtcgtcaccgtacccacttgcaccagcgacgtgttcgcgcgaccgctgtcgtcgtgtcgccgtttacctcggtcacgacacaccttatgctattctaccacattgtcgcgggttggggagtataaccaagtgatggcagtaaccttttgcctagtgaatgccacgatagcgcttgtcagtgacttccccctctctccggccgccagcgtgtcttccccaaattgggcgccaccactattgatctatataaattgagtgttctgtgtgctccgctagtttgttacgaaccttgagcacaaaccctcacctccgattagccaccatagcgcctgaatttagcttttcccccaatttggtcgccatcgccgccatggatagctctaccgtggccagcgtcgcctgaggtagttccagcctaattaccattttgttctagcttccttagggtatagtgatgctccccatacttataaattgaacgctaccgtacctagtcatcgggaacagctcgacctcccctcggtattcgccgtcatcgtgagcagagggtattctgggtcggactagctcaattaggggatgaactaagttcgcctgggatcagggatgctattgcaacgcttggtttagacattcatcgctgtttggggcgagttcccacgaagagatggccaacggcgagcgcgccgttgccaggattcggtttggatcggag

SEQ ID NO: 70424 - DNA, 659 bp, Zea Mays
caccatgccttcgtttgcgcttggaaccttttaatgcttcgagggcgagaacacggtctccatcgataaggtccttggtggttggggtagacaattggcttgataaatttcgcttctaacggacggtgcacttcggcttttgcagcttctatcttttcatcggacattttttgcagtctctgtttccttgggcgcacaaaggagtcgatgcccaggctgtgctcaatgattgtgcagctgaccccgactaggtctaaagtagaccatgcaaagacatccttgttgcggttaaggaaggagagaagtcttgcttcttcgttaggtaggaggtcttcgctgattaaaactgtttgcttgggggttgcgggatcgagggggactgttttagttccctcattgctcttttggtgtcttcgcattctatcgtgagacaatgcacattgcgctggcctgggatgaagtctctttctatgttcttggctgcctgttgatctccatatattgtgattacaccttgagggcctaggactttcatgcataggtagagtccgtgtattgctacctcaaacttattgatggatccttgccgcattatgacattgtaaggataaaccatgtcaactatgtcgaaggtgacttgctcacttcgtgtgttgggc

SEQ ID NO: 70425 - DNA, 1265 bp, Zea Mays
ttagattaacaaagataggtgattcagatattgtgagaaagatcgtctccatatttccatataataaatatgtaagtatcattgctatccttcacagcatggaggacttgagcacactaatcctgacgtttatcattgataagttggtgaaatttaagatgtcatgaaagatgagtcaagaataagccacttcatcaaacaaagatacaactctcacatgtaaaaaactcaaatccaagcttctcaaatgaagataaaagatgaggaggatgaggatcaactctacctcatctctcgaagttaataaagatacaatcaagggagtcagaaatgtgacgagaatgattcacaagatgaatttaatggttgtgcccattcaagttgaagacatcctattcaacattgatggaaaagaaaaaatggatgttttggatacgacaaagattgtcaaaacaagctcacaccaagaacaagaaaaagaggtgctaggtttaagctctaatatcaattaagacttgagatgattcatcaagtgaagatgaaacccaacatccactagtttggcagaaccacagagaagggggagatggggggagtagaaggaaccttgagatgacgagctcatctcctcaatggtgcaggtctgctggagcttgggaaggggtagggtggagactggagactgcagctggtgaaccttgagacaaccgccgcaggtggagactgcagcaggcgagcagggaaggggcagggtggtgtagccgttgatgatgtagccgccggtgagctataggtctgaaggggcagccattggtgagctgtaggtctgaaggggtagccaccgacgaccaattgtgaataagggcaagggctggaacagtcgggttggcaagagaggagagtaggagacgtagtgcactgtttggcggctaggtattacagagaagagtgggtagtctaaagtatactgtagtgggctaaaaatggcccaataacaaaaccctagccaagacgaccaggaaacagtaatcgggtgattagtcggacgaccaagacgaccagcctatctagtcgagtcgtccagctaatcgagcccaaatagccgaccagcccggacgacttgaaatcattgctactattgataagcgcctatttgagaaaaatgagaagttaaagttaaagttagctcgctctcaaaatgcatatggtgggttactaaataaaatagaaatccttagcatacacaatgataagctaactaacaa

SEQ ID NO: 70426 - DNA, 313 bp, Zea Mays
ctctgtcgcatcaagtaagaacacccttatctgctttgggttgattctcgtgtcgtgtaggactagtcgaatccgtgaacgaggcattgcggtgccgggttggccaacgccagccatggcctccaccgtgcagcgagcggcaccgccgtggtcagcgtcgggggaggacgttgatgtttctgtctggtaatcctggcctttgaacaggtcgagcagagtagaatcttggagggatctcggcctcggatcaagatctgtcggtcactcataccggttcgcgatctattataccccgtagatcagtgatacatcg

SEQ ID NO: 70427 - DNA, 663 bp, Zea Mays
aaaccgacaggtaccaaatttttttgcactaacaacaccggtgaggcaaacagactaacacttggtgtaatcaaccctgcccttaaaagcgcagcaacttggttctcaatcttagccttgtggtagggagaatatttatatggtcgagaattgacaggaacagaacctggtacaagaggaatatggtgatcaaaagacaagatggaggtaaagctatgggcaactcaaaaacatccttaaattcctccaacaacccttgtaattccttgcaatcaaccggattgtcagccacctgaacctcctctaacactgccaaaacccaaatttcatttcccttcagccacttctccacctgcatcttggacacctccttaacctctcgaacatcatccgaatcccctaccaactgtactaactgccccctgtccacaaaactaacaatccttcccttccaatcaaaattcatgggactatgactttgaagccaatcaaaacccaaaatcatatcataagctcccaagtccaaaactctcatatcatccgtgaacgagtgaccattagatcaccactccaaagcttccaccatgcgatcactttgcataagctccccattagccattttaaccttaaaaggttgacactccttcatcaacaaccccaaac

SEQ ID NO: 70428 - DNA, 312 bp, Zea Mays
ttacttctgatcattagtgtctagcagaaggctattgagtataatcatcaaggatttgtagcattctataactgcatcatatctgtctccatcaagtttgattttctcaataagctcatgctcatccccttctttggaattcatggccatatgaacagctgcgggtacctggtaaatccaaagtccataagtttcctagtttacatatttggtcatttttgtgaggtatgataattattcaccttgctagcaaggaggaaaggtggccactgaatgatggataaattgcttgaatatgacggagccatcaac

SEQ ID NO: 70429 - DNA, 780 bp, Zea Mays
gggatggtaaaaatactttgttttgggctgatagatggttggagggcaggacaatccaagagctcgctgctaacctctttaaaaccattcccaagagaataattaagcatcagactgtgtcccaggtgctgctaaacaggggatgggtggctgacattaaaggcgcctttaccattcatgttcttagtgagtatcttatgatgtaggacttgctggatagcttgcacctacaccaaggggtcgctgatcaacacctctggaatctctctgagaatggtcctacaccaaatcggcttatgaggctttctttgtaggaacaacccaatttgctcattggaagagggtctggttaccttgggctcctcctaaatgcaaactatttatttggttggcactgaaaaataaggtgtggactgtagaccggattgcaaagcgaggcctcccacaccctacagcctgcccgctctgtgaccaggaggcggagaatatacaacacctgttggtctcctgcgtgtttaccaaacaagtgcggtttctaatcctgcagggcctaggactttcctctctatctcaacctgagtaaagaagcttataagttggtggagtagcgctgtttgttaggctcctaagaatataaagaaaggactcaacaatctctttatcctagtggtgtgggaggtttggaagcaccggaatgcctgcatgtttgatagagctattccggaggtcttagtggttcttcaaaatgttgccaatgaaggctctctgtgctgtgcagct

SEQ ID NO: 70430 - DNA, 274 bp, Zea Mays
cagcgccccccgccatgcccctgtatctcgcctagcacacgccgcgcccacgcaggcagccgtggatctcgcccccaccgtcgagcttccatggtaggcatcctcttccatactaggcggccatggcatgaacccatcccctatccgcgcccccatcgcacgggccctaatcctagaatggtgccttcctccttctctgtcgcctctgccctactcagaccttcgagacttccactggcgatacacacccactaggtacgtgcaccccttctcc

SEQ ID NO: 70431 - DNA, 627 bp, Zea Mays
gggatgggtgctacagccagtgtttcagcaggggctgcatcagaggaatcttcagccaacatatccagcatggcacttatctctgcatcacttggattcaaaggtacctcgaaatgaacctgcctctcgtcgtcaggaatttcaccaagtgaggcaaccaaagcactaacctcttcgggagagggtcgcactctaaggcccaaactgctatcaccagcaggaggatttgacacaaaactggtaaaaaccttggaaggaggcagattccaggctgaatatgcaacaggagcatcgatgttcgacaccttgcctctgagtatcatctcgagtcggctgaccaaatccacagcaggaattcttctgttggtaacccgggtcgaatcagcaaggcctcgatacagataagctgggtacgctctgtcctttagaggttgaatgttcttgaaaatgaaatcggcgaccacagcttctgtagtcagacccctctctttcaacaatccaacctcagcaagtagagcccctgcctcaaccacctccagatctgtgggggatttggtccagctcggagtacaaacatctggctgtctccctgaccgtggggggagggaattgtggcggaactgcccg

SEQ ID NO: 70432 - DNA, 469 bp, Zea Mays
agagtagtgtaatgatgtagtagtgtaatgtagcgagaaaggggaagaaggctggctcataatgagttggtctttgagtctgtggaagaacttcccttcttaatacattgaagaaaatttcagcttgttctgagtgtctcctttgcttttccatcgttcttttatagtcaatcgatagcttgtattcatgcccagcgttgccattgttcttagagataatacccgagtaacgactggtaattgctgagtcgtatttgattctgccggcgtttacatggagaaaacggttgagttatggcaggcattgccgacgtcttttagaagtaactgccgagctgctctggaccatgccagcgttttagaggtaacaactgagttacgctaggccaagttggcgttttagaggtaacagccaagtggtgcttggcgacgtcggtgttttggaggtaacaaccgagttatgctgggc

SEQ ID NO: 70433 - DNA, 465 bp, Zea Mays
gtgttactggtcaagaagaaggatggggagtggatactttgtgtcttctgagcaaggcaattggagtttcttggccacattgtgagttcggctagaatatctactgatccctctaaagttctaatcattcagagattggcccacacccacttgtgtaaaaggatatgagaagtttatagggatggttggctactatagaaagtttgtggctcagtttaggatcatttgtaaacccctcaccaatttgttaaaaaaggatgttgtcttcacatggacttatctggcaaactagtctttcctggctctgaaaactgctctatatcaggctcctgtcctagctattcgtaactttgctaagcaatttactatagagacagatgctagtggggctggaattggggttgtcctacagcgagaggaccaccccattgtcctacaacacggggagttcattattaaaactat

SEQ ID NO: 70434 - DNA, 430 bp, Zea Mays
tgcaaatattataaagaaggttaaacaaaaaaccaacacacatgtaccgatgtacatcctgcatctctgatgtcggtgcagggtgctcacagagctctcccttgacgacaactatttcaccgggttcccgacgacctgtacacgttgcccaacctgaggagagtgagcttacatgaaaatcagttcactggcaacctcggcagtgaccttggtaacctctctcagatcatgcaacttgacttgtcctataccaagttcacaggctccatccctgatgtctttggagagatgaggaggctagagtctgtaaacctggccaccaataggctggatggtgagttgcccgcttccctgtaaagttctccactgctgagggtaatcagcttgaggaacaactcgctctctggtgagattgctatcgactccagct

SEQ ID NO: 70435 - DNA, 320 bp, Zea Mays
ggaatgcccatatagtgtaatgcctcaatattctattaaacgcacaaaagccaaactgaacctgtcgttcggtgtgtactcctgtgtatatggagtttgtcagaaatcgttgaggagtaaccatattggtttgaatgcttctacttgatgtagatgtggatatacccgggattaatatcatatccacatttgacttattggtatttgatctattcttggggacacctgcgaatatgatccatcagccttagtcaaagcatatgttctgatttcggattcacgtggtctgtgataactctcctccgattaattcaccctga

SEQ ID NO: 70436 - DNA, 329 bp, Zea Mays
taaggagcatgaaggtgttgctactgctggttcgcaggaacgtactactaccactacgtctatacacccttctttcgctacgttattcctctgatggtaatgattcatgattatcttgttcctctgatggtaaggatttatgattatctgctagtatgttataactaaaatgaaaatcttccctaccacatccgaccattttatttacttttattttcttgttcctaaatgcatgtttgaaagagagtaggcatgcttggaaaggaataaaactaatattcgctgaaaacctttcccctcacaccttgtctcgtttcctatcaacttac

SEQ ID NO: 70437 - DNA, 811 bp, Zea Mays
gtctaggccataaagaagtggtagagcaaggtcacacatggcctcaccctgacaaaagcctcgcaaaggtagataagagtagataaagaaaggataacattgagcataaggcgcccaagctagagaccataataataaataacacatagagaaagtgagaaagagggaagtgagctcggactgtaatatgaggatagaaggcaatatacttgttagtcttctcctatggaagctacgacgaaaaagttattgggtggacatgaccatggagtggctatgaaatctacctaaggattactcagaccttgtctagcccttcattgtttagcatgcgcactcgtgggacatggtcagggatggaaggatcttccatcgtagaaagagaagaacatagaggagatctcgagcaagggtgagtggagtaagactactagggaaggaaaaggatataagtctatggctacaaagggtcagatcatcgctatttaaagaatttccctatgtatctctatctatcgagcacagaaatcaaagcgtcacacaacctgagtaaaaaaggtgagtcatgcgacacaatgggtgtttggaagcttagccacttgggtgattacaccttataatctaatcatacatgatggtatgtctctatcatatggcctcaggtcctaagaattcgcttaagaattacaatagtagttcaagttattttcttgctaagaaatgattggtaattaagtttcctcctacgtaatgacgagcctctcaaaccaatgactggcatgtattgccaatataatgggaatataaacaa

SEQ ID NO: 70438 - DNA, 476 bp, Zea Mays
aaagctggtggccgttggggaaatctgactgaaaaccgtttgaaccggttctaaaaccggttgaaccggattccaccagggggttttcggttcactggcggactcagccggagactggactggtcccaaatttgtttgagccagaccaaaattcggttgaaccggttgcaaattcgcttgcaaatctggttgagccgggccaaaactcggttgaaccggttccaaattcggttgaaccggttgcaaatccggttgaaccgagccaaaattcggttgaaccgtttttccaaaaatctgcacacgactttttctgacaggactgactggcaggtcagacagtgacagaggggaacagtgcagaaaccggttgaaccggttttaattccggttgaaccgatttttgaaactgttgcacagattttgagaaaattgaagtgaaacaaaagtaaaatggaagttttagatcaaggattttg

SEQ ID NO: 70439 - DNA, 404 bp, Zea Mays
ttgggtctgcatcaggaacatctgctcaatggtcatcgggggtggcggtggcaactactgctgagctgcatcttcctggggtgcctactgttctggctgagcacgccttgcacctctgcgcatgttctcagacaaatgtagaaatcacacacatatcagatctgactctgcagtctttcaacataagaaaagatgtatggaaaatcttcataacactgaacaattgatcattctcactgatagcttctcagataacgaggaaagtggaaataaagggattgctcaactaaataactgactttattaatgactataccaagttggtacccacaccttagtgacaatcattacaaagatccaacttcattacatgtccatcatgacaagcattccaatatatgata

SEQ ID NO: 70440 - DNA, 553 bp, Zea Mays
gtggtgtcaaagcacaatgttggcgagatgtgcgaagtgggaggcgtcgacggatggggatggaacgatcccgtcttcggctagaccgaggcgaccaacgagatttgctgtcctcgacgttcgggacatgtattggggagggggatctacggaatctttttgagggtgaggagttgaagatgatgttgtttaacttttgagaggcgggtcttattccgaaggctaagccgatgtagcgtgcttgctgccctcgctctcgtgttgcggtagtgagcgaaaacgctgccctcccccggcacgcaatagagagggagggaacaagacgtgatttgtattatttatgtcatgtggccagctagcccctcgctgtgtgtatgtaaactatgatgatatcgcgtgttgcgcttgttgtgaggttttcccgacttgtaatcgtgttggcgtggtgtgtaaataggatgtggacttcactttccatggtgcttgaccgtgtaaaatagtagagacttcgcacctttaaggtgattgtatagactttgcaccattagggtgt

SEQ ID NO: 70441 - DNA, 547 bp, Zea Mays
attatccaagtggcggatgttattcatcagaccccgccgccggcatcagcgtcaaaaataccaattactgaagacgctggcgctgctgaagctgaagccaccgaagccgaaggtgccaaagccgaaaccgccgaagattctgatctagaaaccacacttggtgatattaataacatgcttctaaaaatggctgaggaagaagctgttgcggccgcggtggacacaacacttgagaaaggaaaagagccaattggagatactttggaagaggaaaacttcaattttcaagatatactagggcaagagttatcagaaactgaaaaagaagaactgaagaaatatgctgtatcctgtgggtacaaaccaggggctttgctgtttggcagagtcaatgaagggaaattgagatgcctttggaatcgaaccgaggcaaaggtcgttaggactctctcgaagagtgttagcctgccgaagattgaggcagacctctgcaggtaccagcgacagcatgtcaccggtagcctattctatgctaattttaaggtaa

SEQ ID NO: 70442 - DNA, 695 bp, Zea Mays
gtaagcttcagcatcataagaaccgatgaacggtggaatagagaacttaatcttaacaaatggatcatggtctagttcaggattatgacgatgtctaccattacctcccataccttgtcgattacgtgcgaggtgttgtcgcagcggtgcttaaacatcgtcgtcatcgttgccgtcgtcgtccacaggagagtgagctagggctggagttggtggtggggaacgagccttcagtacgtccatgcgtgtaacaagttcagcaactcgttgatcaagctgctcataggatgtcgccgtagagtcctagtattttttaaaagcttcagtcatcgtgcgcatcgtctccttcaattccatttgagagacacactcatcgttgttaagcttaggccccttgtccttgtccatttgattctttggtcctgtcattgttagcacaaaacagagacaaaaaggcaacaaacaatgtgaaccctacaactgtctctcagggtggtggtggaggtggtggaatacaaattatgaagtgtcttaccccgctcttacaaggttcttaccagcactgcaggtggcaaacggtgaccggtgtgactgtccaacgagcgtgggtgtgattgcaaaggagtacatgttctgctcgagagaaagctggagctatgggaaggctgactaaatatatatatgtggcacacaag

SEQ ID NO: 70443 - DNA, 362 bp, Zea Mays
gaacaggctcgatgcagcgtcctgactcccctttcagtttcctttgtcttttagagcgtgtttgctgttattttctcttgttcttgaaagatatggtttacctgtgccttcttcatatttgtttttctttgtcctcttattgctcgtgtattgctacgatttctatatacggtttttggtaagtataaagaagaagaagaatgagatataaaggagataatctttttaataagactataaagaaggcatatagaggatatgattgaagatagtctagtccattcgtcatctgagctaattgataaattatgatctaattattcatgaaagatggcatctaaatctaaagtaaataataataa

SEQ ID NO: 70444 - DNA, 446 bp, Zea Mays
cactgtccctggaagctataaatcgagcccgccgttagctccgcaacctcattacacatcacaccgtccagtatcgcccccaagcttgcaaccgtgagctccaatttcaagtttccccaattctgttctgaaacaccgcagggtcgagctcaccgcggccagcccctttccggtgagttcatccccctctctccctcgtttgagcactcttatagctctgtgatgcttgccaagccaccaattcgaactgagagatcaccaatcaccgggaacgcgatcaaatgttcataaccttcgctgttctcatgggcagaatagaataggtcaccatttgtgcaattaagttaggggaaatactctttagatcgtggatttggtttagtctgaagctgagcaccggtcttgatcttctccggccggtctagctcgccggtgttgggtttccc

SEQ ID NO: 70445 - DNA, 417 bp, Zea Mays
ggcgcttccagcgggatcctgctgacgatgagtagctaggcctacatggagaaaaacgagggttccgctagggagcaggttgcaatatgtctttgattttgtaagataccctttaggtactacttgtcggtgacattacaacttatctgcatgccattttttctctgttgtgtgcattgtttccagcttcttccctggtacttggcccccctgggatatggcctcgacatgtcggggccgtatgccaggattcttaaggtggcactagtgtcatgacccccaaggggcaatccctattgggacccaacctgcacacgacctaggcgaggtatttttagcagcacacccatatggtccgctagttggtaaaaacagctatgtggtatttttaccagctagggagggagactgcctgag

SEQ ID NO: 70446 - DNA, 365 bp, Zea Mays
ggccaacaacagccacaaagttgacaataggtagctccacctccacacctctcgcctgctcgcggggcatcgacaattccacctgcacacctccatggcatgttggtgacgccgcggtggctccattgctctaccgcccctacacatgagtacacgctcacgcccacacacctagtcccccaccgacacctgtcaccatggtcaacaattaggagtaaatttaggccttgggccatggctcggggcctggtccatgtaactaaaataggcacatcatctttgttgggcctttttctcttatttgttggcggttggcgccctcccgctctcccagaccatctccattcctcgccccaagccccacc

SEQ ID NO: 70447 - DNA, 919 bp, Zea Mays
gtttagttctataaaaaagaatatcaaaaaaagagaagaaagaaaagtaccaaaaaaagtgttgagcaagattgtgaaagaaaagtagaacgatcagttgtttatgtgcatcagtgctgaaagttcatcaaagtttgttcaactagtttgctattgtcatttggtgcgaaattttggttgggtctgatcgcaacacttgcattccaatcatactccttgatttgcatcaaatctaaaatttctttgcgcgtgtgtttgatctacttacatcactcgaatcttgtggtcagcactaggcagtgaacttctagttggattgttatttaactttacaacaactaggattcagattgcattccttgtttactattccccaccaagctccacatataagccatcgtaatcggtactctggtcttgtattcgcttaaccatcactttcttgttaccaccacacatttttcttgcaacccgcagggacctcataagagctttggttggtaagagtggtgaggttgtgagattctatatagcttcatattccacctatatttgttgccttgtcgccactaatttcacaggaagatggatcccaacgctaagattgaagaatgtgtcaccatgatacaattcaatgagctcaaacaaaacatagaagacaagcaagatcggttagcacaagatctttagacacttatggccgaaatcagaggtcgtcgtcgactccctgatggtgcaagaaaccatgatgaagatggggaagaaggtgaaggaaattattctagaagagcatgtgaacatgggaggaggaatcagggtgttgcacgtggtagaggaagaggacggaatcgaagaaatgatgacaatgaagaatctaaatttggggatgatgatccgtcccaacttcgccatggtcgtc

SEQ ID NO: 70448 - DNA, 699 bp, Zea Mays
gtttattataagtcattggaagctcgatccagtttaagtcgatttgtacatctccttatgtactatattgctgttttcgcacacccgtattttctttactttatttttatttgattctgattaatgcgcgttctgtgcgatgctgatgattccttaccttgaaggatacatctcttttttcgttttgaaggattaatcttctttattacaactaaatgcacggttgtatttcttgtggtgatattgattggaagtcatgtgattttacatagttatgtggcgactggcgatatatgtggaggacatgatgcttgttttaagctatgcaacacatgtatttaaattgctatcaacttattccatggctgttccaatagcagcacctttttattcttttagggcttctgtgctatgttcagatttcatcaagtgaaagttatgcaatggtggtttagttatgtatttgctcacatatatattgtccagagatgattttggctccagaacttcaactctctttttgattgcaatcgcaaagtttacaaacaacagttgctgttgcttgtaattgctaatacatattggaaatctaatgaccagcttgttgttggaatatactaatattgtatgggatggatataaatacttttgtgtgcattagtagctgaagtttgaaagatcaactgcatggaccaggag

SEQ ID NO: 70449 - DNA, 1818 bp, Zea Mays
aatcaatacacttttaaggtgctctatcctaggtacataatcctatgtttggttcttagatttgatatggcatgtggagtcaacagccaatacgacataacatttgccaagcaaatgcttgtgcctcgaccacactaccctccttttcgccgtttgaagcttgacatatgtgcatctactctagagctcaccaccaccaccaccatcgagctcctactatcatcgttgttcttcgccttgtgcttcacatattatcctaaaaatgagctatactgagtttgtttctttctcttctactctttgcgcccattgaacacatagaaaccatgttggagctccaagcctattgtactatagcttctatgatagaacttttgagcttgtgtgcatcgttgttcccattggtataggccatcaccattcaacaagtgtgtggttgagtccaccgcgatcccctcatcccctgtgcgcacacatatgagacaagtctatgccagaccgaccaattttgacaaaatcttataccttctgcccacttttaatcgttagacaaaacatgcatgcttgtggccagcccgctactggtctccatcgagtagattaaaaccaccctcatgcatgggtgagtgatgaagctcacattcccatccattatagatgagaagtgctccattggtcgaatcaactcctctgtgccatacttgggcctatgctgatttagggaataaagaagaggaaggatatggctatctagaaatgcatatcgcaacatcttcctagtgtgccccctataattgtattgtatgtttcgtgccactaggcctccattgcgtgataccgtctcctacgcttgtgtcacttgtcgacgcttgctctcaccatcttgcacgcttagggcatgtacaaccccatttaatatgggcggacttgagcatgtgtcgtctgacccaaccaactcaatctggcccgcctaaaaaaacctgacccgaccgaccaatacaacgggcgagtacgagccattttttgacattcaataatttacgacctgacacatgccatgatgtttttacccaaaacgcgaaaaaacttgtcctaaagccaaaaaaactcgacccgaccaatacaacgagagagtatgagccataggttttgacctgcaataatttatggcaggacacgggccatgagtttttacccaaaacccaaaaaatctgtcctaaagccaaaaaaaccctgatatgaccaatacaatgggcgagtacgagccataatttttgacctgcaataatttatggctgggcacatgccatgctttttttacccaaaaatcgaaaaaatcagtcctaaagccaaaaaacctgacccaacccgacatgtccaacagagaggcaccaaccaactcgacccgacactaggcacgaatcgagacacgagccatgctaaacaacccatgattcgaccttaatctgacccgaccttacatttcaataggtctaaatatggggtctcttgagaggcctatagtggttaactaaaagaagtataagggacatgatctatgcgaagagctggtctctgtacaactctctatacatattatctcttaactacatttataatttaaagactcagagttatatcatacgatatcttagttgcctcttatatttagaaaattggtccgagagctatgagttgtatataccccagataatccagagaatgaaggaacgagaagggagacatgagagacttattacaaatttcgtgtcatgcgtgttgttggcacttttatcacccccttttcatatgtcaacg

SEQ ID NO: 70450 - DNA, 544 bp, Zea Mays
attgtgttccaaatgaataagaccaattcgcactaaaataatattctctttggcatcgtcatagattttttaagtttcattccagctttgcattgtgttcgcttggaacttgtattatgcacttttggattaccatatcctctttcggcacgcttgccttccattgaacaattcaaccacttgcaattttttctctccctatatctcttcaacggaaattcaacttcatatgcatatcggctatagaattggtacgcctcgtccacattactaaatgtcataccgaccttcggtaccaatcgttgatctatactatcatcctattcaattaatggagtcgtcatgcagtgcacatatatataaaataatcttatagcatggtgaatttctaggacttcataacttgcacggacaatataacaaatacatgtgtattcggtgacttcataacttgcacggactgtataacaaatacatgggtattcatttgaacttacatggctttggagaatgtgtggtgtgtcttggtcatgttcaccaattg

SEQ ID NO: 70451 - DNA, 303 bp, Zea Mays
gtcaagatttcatgttgaacttattggggcgaggtttatctttcatttctttccctttatttcttttgtgtttttaaagtgggtttgaactacaagttgacttaataaatttccaaaaattctgtaaacattacagtggcttcttactggtgtgtcctaaaatttagggcttaaagagtgaatagttctctctggacaaaattatcaaatattagggaagaaggggtgctttgaactacagctaccatttaacagtaggttattctctaagacttatttttgctggcatttaaatgttataac

SEQ ID NO: 70452 - DNA, 407 bp, Zea Mays
gagctcaagaacaagagaatggaagaatcgagatgaaattgacagcgagttcgatcgagttcacctcacaccaaaggtccttcaaatgattgaaggggatgcgattgcgggtgtgaaaggtgaagtgaatgctcttgtttgaaggttggtcagccaaagattcatgggagagacagaagtaaatgagagagagagtgtgagggggtatataaaggatcccccaaaagctggcagccgttgggagaaaatggacaaaaatcggttgaaccagttttcaaaccggttgaaccggtttctgccagggagatcccggtccactgatctactcagccggacactggaccggtttcaaaaccggctgagtagggacaaaattcggctcaaccggattttgaaaaatatctgct

SEQ ID NO: 70453 - DNA, 460 bp, Zea Mays
cgctgatgaaaggaatcaaacgcaaacttgagggcaagcaggaatttcaggaaagtgtttacgacagagaaaagcagagttagggtttgttcgctaggaaactacaagcaaggatgtatatgcatgcaataagtagggtgcatcacgacagacgaagtaactcgaaccaaacctcaattgagtggagtaagttggatggatttgttagtcagatctatcaaatgaattcatcaaacagagttatgagccggatctaccagtaaggcttgtcagtcggaattgtcagttgggttaattctattggatttatcaggcgaaacataagtcgaacagaatgaggaattcaatatcaagcacaacaaccacgttccattcatcagatggagatcattacaaaggaaaagtgccgactcattatgaactgaccctaacatccctcacttctccactaccatttcca

SEQ ID NO: 70454 - DNA, 320 bp, Zea Mays
tgggcagagcaaacagaaccaagtcaagaagatattgatctctctcttctctatcattaaagatatacaaattgcggatcaactcacaagatgatatatgttcatgctaccactccactcatgtcattagaatacaatcaaatctctgttttgcctacagaaaagagctcaccttgcatacaatcactaaactggcttgttgtcaacggaaatctctaaacaaaactaagctaatggtggttgacaacaacggagaaggagcccttgtcaggcttgtcaacagaaaccagcaacggcagcaaatctagatcaaaaggcaa

SEQ ID NO: 70455 - DNA, 718 bp, Zea Mays
aattcttgcaccagatccctagtaccaatgtgctccacaataactcgaaattcgcccagtgcaacttggcatggactcttcggtttcatgtcgcaccggggcctagtctctccgaagattaattctaagggctttgaaccaatttctcctttttctcatcaactttgacataaaaccattcagtcttctagccagctggccatttggtacgatagctgataactggagacttagcatctttgcgataagcaaaattgtagcagccgaagttctcatgcagcccatcttctctagcttttgtctgataatgaagctcatgtgcccggcagaagccttcagcaagcggttctgcccctggcttcggagagcctagatgtagacgctaagcctaacgatggcgttaggagttagctgatgaagataaatcccaaatttctccaaaacatccgcaatcatctcattcaaaggaaatcataatccttctttaaagaagcttttaaagactaccagctcatccttttctggcttcggagtaatttcatctccgccaaagcgaatcagcttctttttggcttcactgaaatagcctaacttcatcaacttaggcatatcatcttcggtaacagtggacctcccaatctccaggtggctgggtttagatggcagggcactgtaatcatcttcagattcaccttcctcagcatcaacctgctcagct

SEQ ID NO: 70456 - DNA, 615 bp, Zea Mays
ggaaattagagcaatgaaatcaccaacaagttcaccaaatttcacctcacaccaaaggccctccaagtgattgaaggggatgagatttagggtgtgagataggaagtaaatgcacttatttgagagttggttaaccaagaattcatggatgaggccagagtgaatgaggggagagagggctaggggtatataaaggaactcagctccctttcatggatgggctcagctccctttctgctcacatactgtctgagacggtattgaaaccggctgagccagtatccaatagagacgaattcaatcaagccaccggctgagcagcaaggtgaactgggagagaaactgtctgagttgagtctgaaaccggctgagccggtatccagcagagaagaaactggctgactgctcgattgagcagggagctgagcaatgaggaaaaccgggtgagccgagtctgaaaccggtagagtcggtattcagcaaataatatcccggtcccagggtcggctgagtagggggtcggccgactttctgcagagagcagcctagtcgacaacccgactgagtagggaactcgatcgactttcaccaaaatgcatccatgaccaaaactca

SEQ ID NO: 70457 - DNA, 489 bp, Zea Mays
ggaagaattcatacgtctaaagcaagggggagattctgtgatatagtatctcaacaaatttaatcacctctctcaatatgccgttgatcaagtggatactgatctgaaaaagaaaaattgtttcatgagagggttgaatgacagactccagcgcacaatggctacgtgtctggatctcacatatagcagggctgtcaacacagcattgtcagttgaagccaaaaattccggacaaggggagccaaaaagatatgcgggtgaaggatcgacttagggatctgaaaaatggacaaggttggtaatccgacctttcaactcaactcgttcttctcctcgttcgcccacatatcccttccaacaacccatgttcattcgtcccactcctgcccccgcctagaacaatcagccgagtgcccctggtgctcgtttccctgcccttcccagttcctcaagtggctgctttaattgtggcaagtctaggcatttcat

SEQ ID NO: 70458 - DNA, 388 bp, Zea Mays
gcctctggcaagctaagcacggacagccctccgttttcgttgtcggcatgtcaaccctctcctcctcctctttctcccgtgcactccatcagcagtgcttcctcgctctaaaaatgggagccgggcactgaggcggaagagcaaggcgcccttcatccattagccagccaaggtaaggagggaaccacccatcctcctcttccacttcaagcatcatcagtgtcgatccgacgttcccagtcaagaatcaatttcgacgatcactattttggtccactgcaaaattgtaaattctcccatgtcatcagttcttgcttcgttcccttcacgttctgactttattgttcaaatgctcatccatgcaatgggtttacaaccagcattcgca

SEQ ID NO: 70459 - DNA, 286 bp, Zea Mays
gtcccccaacaaagagcatgtgctaagaaagtttatggtgagaaagaactctgtgttgagtggtaatgcatctgaagattgagtctgacttctctccttccttgacgaggttgattttgtccttttctggtcttggtctccttgagttggggtcagtgtatatcatcagagttggggattctggttaagatagttatggatgagatagactacatgatgtaggtcaaaagtttgtttgatgttaggtggggatagacagattatgcaatccatcatgactctattg

SEQ ID NO: 70460 - DNA, 538 bp, Zea Mays
ccacgcaaaagtcgcctacgggtgcagctggaatagcacaataagtgcgaaaattcgaagtcttttccaaaaggctatccgtgcaaaagttgcctacgggtgcagccggaatagcacaataagtacgaaaaattgaagtcttttccaaaagactacccgcgcaaaagtcgcctaagggtgcagccagaacagcacaataagtgcgcgaaatcgaagtcttttccaaaaagattgtccgtgcaaaagtcacctacgggtgcagccggaatagcacaagtgcgcaaaatcgaggtcttctccaaaagaccccgcgcaaatcacgcctacgggtgcagccggtctaaacaaatgcacaaaatcgaagatttccccaaaagcacccgaacacaaagccgcctatgggcgcggccggatcaacgaacgcacgcagcctcatcatagaaatcatagttacacacatacatcgagggcatcacacattacaatggctcaaccttcgggatgatacctatctccctatagttgaacaacattatcc

SEQ ID NO: 70461 - DNA, 542 bp, Zea Mays
ccttcaaaaatcgttttcagtatgctagctatcatgtagatacatatgagaaaaagagggacaagttcaggagtggtcttagtaccaagcttcgagagcgcctcaacacagcccgggccaacatttacaacgagctggtcaatttggcatctcacaagaagactgcattatggcccatagagcaaagaagaagaggaaagcacctatggcaggaccctctacatagcctcagcgtttcaggatgttgtcaaacatctagagcaggggaccacaacagcaataggaagatgggtgattaggccaccacaacagcaagcacccaatcgccctcaagccccagctcagaggaatgccaaaaaccagcctccacaacatcgacaacaatacctcctgggcaatgtcaacagatgcttcacttatggcaatgcaggccactacgctaaggactaccctcggaactagccaaagccagctcaaaatgcaaatcaaaaccagggaaggaaacaaaaagtgcaagtgtggcagggcagattgaactttac

SEQ ID NO: 70462 - DNA, 635 bp, Zea Mays
ggcgacgagcctgttgttggtccaccagaggacacttctgcgaggccgacctgtcaatgtaatgtatgtgtgtattatttagtgtgtgtcgcctatagggatcacggtgctgtaattaccctattacatggaatattcctcggatgtagttggtgagcaagggtaggaccatactctggaccacctactcccgaacggccctataaataccactcccttgtagttggatgggacacacataacgatatgctatagttccctaccaaacgtcttgtgcacctgagcgcatccctttcgtctttgagtgttttggcccacctgaccacgtgttagtacccaacattttgtgcccaccatttatgcgatgaagacaaaacacacgatgccacccaagaagaacactcgagccccttcaccaatcgatggcgatgaagcagggactgtcttcacccaccacctgtaacatcccaatttctaacccaggtttgaaaccctaatctaacccccccttcttattatctttccccaaaactcccctagatttttcccatcatatgcatacactttgtttgaatatgaacacctcacttagattttattttccagcacctagattatctattaaattaattgtt

SEQ ID NO: 70463 - DNA, 464 bp, Zea Mays
agaaaatcgatgtctgtccagataattgtatgttgttctggaaggatcatgagaatgatagtaagtgtctaaagtgtggcaagtcgagatatgtagaggttaaaaacgatgatggtgaaattgtcacatcaactgtagcccaaaagcaactttgttatatgcctcttgcgcctcgtgttaagcgtttgtttctttcgaggaacacagctaggcacatgagatggcataaagaacgtgaacgaggggacactcatgtggtgacgcacccgtctaacagtgatgcgtggaaggctctagatgactttgatctagaatttgctagtgaagcgagaaatattcgaattgggttggcgacagatggtttcacacctttcgatacgaacgcagcatcatattcttgttggcctgtatttgtgattccatacaaccttccacctcatctatgcatgaaatatgattacatg

SEQ ID NO: 70464 - DNA, 522 bp, Zea Mays
ttggagcaaaaggcatttcaaacttattagtttgaaacgtggtgtcgaatgacacaacatcaccaaagcatgcataatccataatagactggccatctgcccaaaagaaattagctattcgacctttattgggtccatcttcctaatctatatcaactgcatagaaaaatgttggatcctcacgctacttattcttcaagtagttgcatagtgtttgtgcgtcattggattctaagtacttcttgcgttcacgaccaatctcattattgcaatccatctttgagtatggcactttgttggcacctctatagaactctttcatgaactcatacacttgggcaggcctcattctagcttcccgtatctagcctattagctttctatctgcttctaagacacgtcgttgggatcttagatttttcttcttatttgaactagcaagataatgattatgctcaagtacaaccttattgactgtccaaattccctctctgctgacaacaagctgaatgtgagcaccac

SEQ ID NO: 70465 - DNA, 1064 bp, Zea Mays
gttgcagaagtcacccgacctgggtcctaccggcttacccagatggatggaactcaagtaggaaactcatggaatattgagcatctcaggagattctacccgtagtgataccataaacttcagtcggcaagctacacattgtaaacaagagatctcatcatcaataaagcttctttgttcatctacttgcaaacaaactctcaaatagcgatcagcttaagtcagaaacgcctgaagttggtgcgacatgctgacgcatacatgcccaagggtgattactataccgtaccctactaatggagcaatcgacttaaatcggtgcgacatgctcacgcatacatgactaagggtgattactataccctaccaacggagcaattagcttaagtcagaaacgccttaagtcggtgcgacatgctcacacatacatgactaagggtgattactataccttagtagcggagcaatcggcttaagtcggaaacaccttaactcggtgcgacatgctcatgcacacatgagtatgggtgattaccataccctactaacagaccaatcagcttaagtcagaaacgccttaagttgatgtgacatgctcacacacatacatgacttagggtgactactataccctactagcgtggcatttggcttaggtcggaaaggccttaagtcggagcaacacgatcaattagaaaaatgtcgtctcaaagagaaaggctttctgtttgaacaaatcaatgtttattttcactccacagttactgtgcaggagcatcctcacgaggaaccttatctgcaggatcaccaaagcagaaggattactcgaattagccgatgcagctggcacgtcagccacaatgttatcaggcaccacaacgccaggcctcttcatcaggatccggccagcacggacggccttgtccatcgctttatcgcaccatgccttcataatatcacggtcgtcctctaagaccttgatatcgcgatggacagtctccgcatcgcgacgagcaacctctagcttctgcgaaacaagtttcctcaaggcacgcagctctctg

SEQ ID NO: 70466 - DNA, 386 bp, Zea Mays
tgagctctcagtagctcatgggcacactttttagacaaggttatctggtgaatatgacaggcagacagctgtaaacactccttatggaaatggtgtgctcctcacgaagtcaaaacttatcgacggtgtatccgaaggatgatggatgtattttattttgttggagttgtgaccatttgcatgttcgtactattctaatagttttaaagtggtccatgacattcttttcactgaattgtggttaacaagcaatctgcgccaccttccctagcacttcactctatctccacacattcagtatgtaacttgtccagattcaaaacatcagcccctgtaacagatctgaaaaacaagccaaattggtgctatagataagttaatttgtg

SEQ ID NO: 70467 - DNA, 356 bp, Zea Mays
ctgtggtctccacagtgccaacaagcattggttggaggttggctgcttgcaacagatggggtgtggagagaactttgaccaggctggttgaaacgtgatggagcagaccctgttggcttactgaagtttgcccctttgggagggaacccaaaagattgaactctctggtgcctgtcctgctgctgagctcgaagaacttgaaacttcctcttgaggtggcctttttcttcttctcgtgccctttccacctggatggctttattcgagaggtgcgagaagctgaggaagtcttggctggcgaggatggtcttgagttcatgtctcaatcccttcaagaaacaggccatcttcttggc

SEQ ID NO: 70468 - DNA, 383 bp, Zea Mays
cttccgttaattgcacaaatccggcctggagcttgtctgcccacgacgacggcgaacgctatgaacaaactgaggtgttctcggtgattgggtgcggtctagctcaattgatcgggtcgacaagcatgccaagtgtgcctgagtgctaaaacaagggtgaggagggcgagaatggacctggagacggcggtccaaggcgtggtggctcacgacagcgcggagaaccgaattgggggaagaaaggaattagggcgctacggtggctaatcagaggcgaggtctggtgctctggctttgtaacaacctagcggagctaacggtgcactcaatttatagcctccgagagtggtggctccgaatttgggaagaagaaggctggcgac

SEQ ID NO: 70469 - DNA, 390 bp, Zea Mays
taggaccagtattttcagcatcatccgccatctaaatattctaaaacacatgggtttccttgcaaaacagcaaggccacatcaactcagaaatctcgatcgttggatcgtcaaccgataaatcttcatcattggatggaggctcaacaatcatatgacgatactccagagtcttctggtatcggcagcccatggaagagtaaaagccaataaagaactctagaaaagggcgcctcagatccagacctcagatccatatctctaatcctctctgcttcggtgagatccttcgctagataaggaaaaccccagagtaggagctacagatctccaaaatctccattctcagtctgcatcggcgagttccttcgtaacccctctgctcccttgc

SEQ ID NO: 70470 - DNA, 515 bp, Zea Mays
gcgccgccgtcgggcaactacggcgaagtcacggcgggggagtgaagacgacgggcggtccgtccgatggtagctgggtggccacgattagatctcaggttatccctagtcgtttcttcaacttgggccgttgattcgagaatggacggtcggatcgttgatgggcgatcggatttgagcgagtgcagctgaaccgttgatcttgagataaacggtagaagtcggatcgcaggatgcgttaaatctggaccttagatcgcggatcctgtggccatcatgcgcgctggttgtgtaaatatggagatctaatctagaccgtggaagcctgatcggatggcctagatctgttgataccccttcgcggtgcatctttgcaaaagagacccctagtttaaatggaatcgacccgtagtccacaacagaggagttatgagtcataggcattcttgcgcaaaagaccctgtactttcctgcatttgttgcgcagtctagagactaaggaaaaccatataaat

SEQ ID NO: 70471 - DNA, 337 bp, Zea Mays
gtggacatcacaagtcaagataaagaatggacattgattatgtgaggatcaatgtccatgacttggagtcaactgatcgaacaaaggacggaggcacgtagatcttcgaggtactagagcaagggagaaggtcaaggtgactattgtacctaaagctaaagtgaagaaggggctctacataagtcaaggttgatcagctaaggaaggtcatggtgcattgaggatcgctacataaggatgtgtcttggaaccattgaagtaattcttatggtttgtggttcaagtcataaggatcaagatactagctcaagcagtaggacaatgtcactagaaagag

SEQ ID NO: 70472 - DNA, 423 bp, Zea Mays
aacaaagtatgtattcttattatagattgataatgacacatacaacaagtaatttataaaaacattacatgcatgtatagcattaacacgaaccaaccatttttattttacatatgttagttatcatacttgcaggatccaattgcatacccttccctatattttaactacttccacctcttgtattttcctccaaagaacccatgacggtgatgcttccaccctagaaggccatgttttcctcctaacccaatgtgtttcccaaattttccatgctttaacttgccatagtgtccattataatgatgtttaaacttgccaaaatgtcctaagtggtgattgtgagggtgatggccatgggttaagtgatgtacaccataggtagcggcggcggcggctgctgctccaccaatgagcgttgcc

SEQ ID NO: 70473 - DNA, 1078 bp, Zea Mays
gtcttataggggtctttttgtaaagttcctttactgtcttttgtaaacattttggtactcttaaactttgattaaggtttaatttatgaaatgtgcatttgcctaatctttctctcaactaaaggcttcaagagaggggggtccaaggttcaatcctcccttgccctaggtggtcattgcctaaaagcttgggtaacactttggtcctaggcattacttaactcactcatgcttccaaggtcttaagtactccctctcctccaaattttaaccacatgtgataataggtatgtgtgccatcaggaagccaacaccttggtaacacctggggtgttacataaataaccccacaaacccagggcaacgaaaggctatcttagatacatcctctccggccataaaaatctggttataccctgcattaccatccaaaaaactaataattttattccccgaagcctgattaacaagttcatccgctataggcatcggatattcatctttcggggtggctctgttcaaatctctaaaatccacacaaatcctgatcttccccgtgttcttcttctcaattggcactatattggagacccactccgcatacctgcatggccttatgaaatttgctttcaacagcctatcaacttcttccttaactctgtcatggatgtcgtggttaaatcgtctaggtggctgcttgtgtggcctaaacccatgcttaattggtagcctatgctcaaccaactccctactcagccctggcatctcagtataatcccatgcaaaacagtctctaaattctctaagtaaatcacataccttttgcctctgaccggctattaatttagcacttacaaatgttggtcttggcacctttccgtctccaatgtccacttcctctagttcatcaacagatgagaacccctgtcctaactttccaagatcatcaaaatcatccaccacctctcccatatcgtttttgtttaaacgatattcatctgtcctctcctgtaaccattttaaactatcgtgttcattcatttataatgttgagtcattgagccgtgctatgtcagcc

SEQ ID NO: 70474 - DNA, 594 bp, Zea Mays
atagaactttctgagatgctctatgttccatgagttccccactttcgtgccatccatttgagtaagccggtatgatcctagcctagtgacctctgatacaatgaatggcccttcccatagtggtgacagcttgtgacgtccttcccccattagaatttggcgaagaaccaagtctcccactgcaaaggaccggtgtcgcacggctttatcatgatagcgcctcaaggtctgctggtacctagccgactgaattactgtgttcaatcattcttcctctagcacatcgatatcttctagcctggtagcttctgcttcggctatgcttaggtcggcgggcagcactgcctctaatccataaaccatgaagaacagggtatttccatgcagagctcgactaggttgagttatcaggccccaaaccacgtatggcagctctctgatccattttcctgcaagcttttcactcttatcaaatactttcttcctgagtgcttccagtatcatcctgttggatctttctacttggctattggctcttggatgtgctactgatgcatacttaatctggatgctccgctgctcgcagaagtcgaa

SEQ ID NO: 70475 - DNA, 434 bp, Zea Mays
tagcacatcggtcggaggctgagggaaggggttgggaataatgtagcctcgctcaacgattgtgtctagaaaaaatggcaatatctgtttggtggcacatcggtcggaggctatgtcagttggaaatggtactttttgaaattttgacaggtcaccactcaaacagacttgcttgttggaaaatcaagcatgagacatgaccataatgtcatttgtgcttttgaattttgatccaacctttgcaaattagtcagcaccagttgatagtattgatgtgaggagcgcgagttctacttgcttcttgtgtctgtagacaccgacccgagtatccgtgaaatacatgaagcatctctgaatcagaaacaccttacttgagtgttttagttaaggctaagtgttttaattccgtaataataaagctctggacttcagtt

SEQ ID NO: 70476 - DNA, 364 bp, Zea Mays
cgcccgtgctgcggcgtacactatgctcatcatcactcgcgcgttaccgaggaagcagcgcggcatatcaatactatatgcactacggacattatggcgctcagagatcacccaggcgttacaggcgttagttacttcctttcgttttgcccctgggcccacatgtcggggcttagtatccttgtatgtgcctcccttgagctataaaaggaaaggcacactatgttacaaggcagactcagacacacatacacgctcacatacactcaagctctcgagcttacagattcaatacaacacacagtggagttggttattacgctccgacggtctgactcactctaaacccttgtgtgttcttgtg

SEQ ID NO: 70477 - DNA, 680 bp, Zea Mays
cccaagttaagcaaggtgggataattctgaggctcacacaatcgccgcctgacttcaactggaccaattgcatctttgtcaagggtaatagtggaggatgacctcagcacgatggctctgcttttgaggtatcagattccgccggtgatctcgccgctaaggtagaagagctgacgactgctttagctagtcaggataagctacttcagcttgttgctcatgagagtaaagagtttaaattcaagtatgagagcacgcttagggaacttgagcctgctagagcttcagtcatggtgtccggcgagactgaatgtgatgagtgtgctctacacatgtcgaacatcacaaccttgcacactaagtatgccaccttgctagatgagtgcgatgagttgagatctaggtctagcttgttaggttcgtgtacggcttgtcctggcttgtagattgagctagcagagagagatgctaggatagccttgcttgagaaggctagctcagtgagtgcccctatacctatgcagtgtgcactttgtgagggtttgtagtatgctcttgagtcctacagacatgacaagactcgaattgaggaagaaaacacatacctatgcaattggacatggttgtcagttagttcaagaggggaactggcggaccggggttaggctttgctgctaagg

SEQ ID NO: 70478 - DNA, 458 bp, Zea Mays
gtttgatctcatcagaaagtatttgtcttcagctcccgtattaaaagcaccacaagtaggagtaccgttcagattgtacattgtagctgaagataaggttattagggctattctgacgcaagtgaccgaaggaaatgagcatgtggtgacctacctaagtcggaggctggtggatgctgaaacaaggtacacttttatcgaaaagttatacttatgcctattttatgtatgcaccaagtgtagatttattgtctagtcattgtaccgttgccagtcaaaccgatgtgattaaatacatgttgcaaaacccaattatgagtggtaggattggtaaatgggcttatgcacttatagagtatgacttggcctatgaaccattgaaatctatgaaaggccaggtcgtagcagattttattgtagaacatcggatcaatgatactcataaactagacatatca

SEQ ID NO: 70479 - DNA, 616 bp, Zea Mays
gtggttcaccatggagaatcacaacaaatccctcctccctcgatcaggaaggcaaccagacgttcgcacgcctagttgggtggagtctcccacttattcagaggtagccaaagtcaaagtactgcttgctaaaatatgctcattgaaggacaagggtctgactgctaaggccgtggttgccgacgttgtcttcaggaatattcaacctttgaaggacagagtttaccctgcttacttgtatacatgcatcaatggttctaccggggtcacaaacaggcagattcccaatgaggacttgctaagccgactagatatgatattgaggggcagggtctcaaatgttggtgctcccttagcttactctgcatggaacttgcctccgcatagtcccttctctgattttgtctccaatcctcctgctcgatatggtagcctgggccatagagtgcggccctccctagaggacatcgaggccttgattgctcccctttgggatcttcccgaggttgagaggcaaactcatttcgagatgccatctagtaccgatgatgctgagatggatgtcgtgcttagcttgctagccggggaattgtctaactctacccgtaccgagtcg

SEQ ID NO: 70480 - DNA, 357 bp, Zea Mays
attgtttgccgcttcggagtaccgtccgaactaacagttgacaacgacaagcagtttgacagccaagacttcaaggatttttgcttctccgttggcaccaagcttgccttcgcctcagtatatcacccgcagtccaacggagttgtggaacgcgccaatggaaaaaattttcacagctgtcaaaaagatgctcctcgacgaaaaaagggcaggtgggccgatttgttacccgaggcggtctgggcactaaacacgactgagtgcagagcgaccgggttcacccctttccgccttctatatggatcggaggccatgaccccacaagaaataaaacatgggtccccgcgaacagttccg

SEQ ID NO: 70481 - DNA, 412 bp, Zea Mays
accaaaatgcttaactttctagggcctaaaacgtaggaagttagagctaaactttcggaagttatcaaaaccgtcggaagttagctaacaccgtcggaagttagcccgtcggaacattttggtcggaagttagggtaacttccgagggcctctcgaaagttagggtaacttcctagagccaagatggtctctcggaagttaatggataacttcctagagggcggcgccctctcggaagttaagggttaacgccgtccggtccagaactcacgccgtaggaaaataacttctggccgttttggcggcctctaggaaggtagcagtctaacttcctatcgtttcactattgctctaggaagtcagcagcctaacgtcctaccgtttactattcctctaggaagttaaattgacc

SEQ ID NO: 70482 - DNA, 507 bp, Zea Mays
tgcgacgggtgtcctagtatttggagctgcggtccagggggtccggacacacaacttggcctcccagactaaaacctataggtcccgtgcatgtatcaaaggatggctaatgacagacgatgggtcctatgggtgtgctactaacgctccctagccgaagctgtgtttaggtccaggtcccagtcgaggctgcctcctgggggctgttgccaactcttttaggtatgctggtatccagcctcgacacgtcgagcctacatcccaggggaccaggtactagggaggtgtcggcagcgccacacacaacagggacaaatagtatgcagataagtgctaatactgctcgataagtagtactcaaaagtaccatacaaaagcaaagttattacatccgccttcaagcgggaccctagccttatgtctacagatatgacctactcggcatcagtagggtcgcgctggaagcgcgcggccgccatctccgcgacatcttgtacgacctcctgg

SEQ ID NO: 70483 - DNA, 532 bp, Zea Mays
agttattttgtatataacctcaattctataatgaagatgtgacattgatttttagcacacatttgagacgcaccagggtttgcctttaaatccgggtgtgacaacatgccggttgtatgaagattgatacagactggagactttggtgttagagcgctccaaaggtgggaacatgtcagactctcgagaatcaaaaagtgtctgtgcaagggcactgttcacctatttatagagacacgacgatgtataccttcgtataaaattacatcaataccctaagttcatgtacacatgatctacaaaacccatcgagggtacgcttgtcttctctcttatgagacatgtcatgtatgtctctcctatgctccttcgtctatgcagcatcaaggatgatctcggtcacgttagggcacttcgccgaaactatggagatgaagctactgcctccttccgtttgtagtagtttttagctgaagacaaccttggaaccagtcagagttcatcaatttggggaccttcgacaagggctcgc

SEQ ID NO: 70484 - DNA, 676 bp, Zea Mays
gcaaatatatctctatactttttctcaatgaacagatgagtggcaaacaaatgtaggtcgctgccttctggtgaaccatcatcgatcacttgttgcaactgcgcactaacctcaacacgcacagggtcggtctcagtagaggtgatggacttgttagtggtcattgaacgtgactcaaaagcctccacaaggcgtttcatgtactcttccctcgaatcttttttcctctttggtttaggagaatcatgacgcaccttacgcttcccagtcgcatttgagcatgggtcaggtgtgctgttttcacctccacctaaagtggcttccaaatgatcatcagatgatgaattagcatcctcgacgccaggaacaagggttctttcatttgtgcagacaatgggtccaaacataacctttagctcgtcctcattctctaggggggctattttgaacataatacaacctggcattgcctgcagcaacatggtagttcctagttttagatgaccaaaactattgttagtctacaaaaaattgatctacttacttcattttgcttagcccaccactcatctggcgcactgattgaaccagtatgagggtctcgaccaagacctgtagccctttcattaagagttttccactgtgtgaacattctctttaaggagtcccacctatg

SEQ ID NO: 70485 - DNA, 532 bp, Zea Mays
ctttgttgtattcatctccaataagtgcacttagcaaagcactagttacttgagcattgagatggatttggcgatactcaaggggagtggggctgctaggatcttgtaattcttacattccatttctcactatcttccacaactctagatgtatccctataagataggttttcatcatatgcttccattttacaaagtttgtcccatcaaattgaggtagctttcctgcataaacatttataagagatctagaatcaatgttaggcatagaaggattataattaaaggatacttttccatagacattcttgttggccatggtttgcctttgatgctactctttgaagattgataggactcatcatcatctccatcctcactactactggaatcaaccacacttgtcagtttccctttcttcctttccaatcttctctttttctcctcttcctctaatctcattttttgctctcttctcaaccttgttgcttctctactaatgagcttttattcttctaatttttacttcttc

SEQ ID NO: 70486 - DNA, 730 bp, Zea Mays
aattgttataccagcttgaacaaccaaatttataatgtggcacacacacacacctatgatggataatataaccttttatatatgactgcaacttaggggtgagaatatcaatagcagttgtgtttgcggaagcattgtcaagagttatagagagaatcttaccatctattgcaaaatcacgaactacctcaagtatatggttagcaatggcatctccagtatgtgactcatccatcattctaaaactgatgactcgcttatttaaagcatatgaatcatccaagtagtgggaaacaacagaaacataacagattttttggtgtgatgaagtccaaatgtccgatgttaaagcaaatgagaactgaacctttttaaatgactctttaagagcagcaagtttatttttgtatattgcaatcaaatcagattttgtagtttttctagtgacaggctgatattgtgggcataaagcacgttgaatcaagttcttaaaattttggctctcacccaacataatcggtaaatcttcacaaacaataaatttgactatttcatcacgcgctacctgtgggttataaacccatgtacttattgtaccatcagcactaaagttaagattggtttgcgtacctcctccttgagtttttcctagctttgtcaaacacgctttgtagtgccgattcaaatgtcccgtgccagcagctgaacttgcactcaattcacttttgca

SEQ ID NO: 70487 - DNA, 1003 bp, Zea Mays
aaaattcctaatttaacctaaaaatcatgaaactatttttattaaattctagggaaaataagaaggctaggaaaattggtctcacaattttaggatttttctacatttttccaaggatttctaaagttattctgaaaaagaaaaggagaaagagtgaatagtattgggctgatttcagcccaagcaacccaacaatggacagaagtgcgcccgcgccagcgcgcgctggtgatttcgcaaaaagggccctgaacaaacgaataactcgacgcggggtcatttactattgcgcagagtcactgacagattgcagataggtccttaaacttctattccttcgcagaccaaggtccacgacggcgttcacgcacggtcgaagtccggtgagcctctgtaccggccgattggggcaacggctaggctctccgagcaatagacatgaaatcggggctaccttgatcattttccccaacttaattgcgcttatgatcaactacggagctttggccacggtggccgtgaacatcacggcaataccgtcgtgttcccggcgaccagaggacctctagcttaattaaatgggttgtcgagcatcacagagctatgaaaaggcttaaacgagggagagaagaagatgagctgaccggagtacggctggtcgcgatgaggttgggtttcggttggcggagaatggatttggggcgaattcaaaattcgcgagttcgagtgaacaattgctagcaatacgtggtggctgggtgcacgatgatgttgtgaagctcactgcggggtcaatttatagaaccccggggcggtggcgctgaatttgagcggacagtgcgggcgaccggagatgaggaagaaccctgggcgcggtgaatacgtgtccagtggcgtggcagttgctccggcgatcaacggggagccgctaaggcttacggcgatgcggtggaaagtgagagccacgcggcggacaacagcgacggcacaacggcggtgaaat

SEQ ID NO: 70488 - DNA, 554 bp, Zea Mays
cgcaggaaacgtgtgttgtcagcggtagcattaactaaggcagcgatagcctcagccaatgtgggaggtacaggtggcgggtttggagtttcctccccgccgcgggaagttcccaccccatcttgagcacacgttcttgatggcatctaaggaagaaagatatactgaattattacatgccgaaagtacaccacctttattacataatgccaaactagtactaattatacatactcattagtacaactcaacttccttatttaatttacataaggacactacttatactacactactctaattatcttcgtccttggtcgctcctgctccactgccagcttcgggagaacgttcatctgcgaggttcatggaaggaggggctccgaaaagatccaactccccatcaggtcctccactagctactctagatgttctggctcccattgttgcaacctcacatggtacattcgaatgcaaccggtcgtataacacgtgcacttcctcatgcatagtgttacagtatgcttgcagattctctagagctgcgcttagtt

SEQ ID NO: 70489 - DNA, 546 bp, Zea Mays
tccccacaaagcccagccatttagattttgagaaatctactgtgtccgaagacgacatgcccatgatgatgaaactgggctattttggagaagctgaaagcaaacttgttcgattcgctggagaagaaactaccccagtgccgaagaaggatgaagttgcggttttcaagagcttcttcagagcggggttgtgattcccctgaatgagatgataggggaagtcctaaaaaatttcgaaatatacattcatcagctgactcctaacgctaccattaggctcagtgtcttcatctgggccctccgaagccaaggaatgagcccagatgccgaagcgttctgccgagtgcacgagctgcactatcagacaaaggccagggcagatggtcttcacaaaaattttggttgttacaattttacgtattgcaaggatacgaaggcaccagtcctgagctaccgtacaaagtggccaaccggctgaaaaaatgaatggttctatattaaggctcatgagaaaaagagagagaagctgatgaccatggtcatgag

SEQ ID NO: 70490 - DNA, 427 bp, Zea Mays
ggaggaggtgcagcgacaattcaaggaacgacgcgaaaaggtgagggaaaagtacttatcatacttcacggtggatcatcaccagaaaatcatccgtcaaagggagatcgatatgacatctctcctacctccgcctcaagctcccattgtaagtacctagatccatattttgaggctttcatagaacaatgagggaaactgttaaaagaacacgtagatgaatctattaaaaaaagggacgctttcatatcaaaaaccaattgcccctacttttccctcgcatgagtctaatacggaaccaccaacgtcaaacacatcggctacaaatgggtctcccttggcctagccatcgtatggtatgccgatgcacacgttcgtgtcaccatcacaaccgccgctgccaggcatgcgatcgactctagacaca

SEQ ID NO: 70491 - DNA, 975 bp, Zea Mays
tgatagtcctcctggagcaatattctaccatagagaacctcctctttggataagtccatcctgtgatgtcaatcagatagtcaggatgagcatgtggaacatcttctgtgtccatagagacactacccccagctgaagattgggcctctgagtctgtggttggattgtagtctgcatcgtctgcacgaggactctttgatttgaaacgaccggcaagcttcttccgaagaccacccagaccactacaatagatgtgagaaataaccataggtgaattgttgataacgccacaatcatagagaaagaaagtgcaactttctgtcagggtccggactatccgcgctaaagggccggactgtccgtgcctacctgacggacggtccgcgaccatccaggggtgattctctagaaccctagctgccctaatcattcaatcaacgatttggcagaaaataaccatccaaactcattcaaatttttgcacaacattcacaatgagtagcactagaaattccaccaatcagatttgtgaatccattactcaattctagatcagagagaaaatccgaagaatccccaaatttgaagaaattagatgaaatccatgagattatgaaataccgggatgaagacatgattgttgaacttcccacaagcttccgaacagtccgtgcgcaacttcacttcaccgtccgctcacaattgacaaaagtgacctttatgcgtgtggagagtatgagaggagaggcaacggatgaaagtgacaagttgactgcctctgccagatttaactgcctgtcgcgaatggtccgcgtaggggcggcggacggtccgcgccctggtaactcagactgtctgctctgctgactcggactgtccagatcctgatacgatggatggtccgcggtccataggtggacggtccgcgacctgatactcaaatcttcaaactttgtccactttctgattttgaat

SEQ ID NO: 70492 - DNA, 433 bp, Zea Mays
attgctaagtatgtatctgagtacgacacttgccaaagaatcaaagctagtcatttgaaggtagcaggtaccttacagcccctccccataccatcttggaaatgggaggacctcatcatggattttattgtgggtttgcccaacacctcccggcaccacgattctatttgggtcattgtggataggctaaccaagacagctcatttcttgccagtacataccacccacagggcagaaaagtatgcagaaatatataatgaccaaatagtgcgtttgcatggaataccaaggactattgtgtcagatagaggagcaccgttcgtagcacgcttctaggagctacttcaagaatcacttggaacccatgtgataagaagctcagcataccatcctcagactgatggccaaacggagagagtaaataggattcttg

SEQ ID NO: 70493 - DNA, 463 bp, Zea Mays
gtctagcgaaggtgacctggttcgactgaaatacaccttcagatatggagataaatttgatgaaccaaatgatgactggctgaaatgcatcgaagctataagtgatgcactgcttgggccatattccaaagcagaagataatgtgttatccacatccttcgggggccgaggaaaaaagagattaaacagagtttttgatgccattggttttgtttaccccgactactgctacccgctgcgaggacggggaaagaagaggaaagctgcttcggccaaagttgctgcttcagccactcccgatgagcctgcgccgaagagcaaaaagttgaaagtccttacccaccggccacgctatattgaaccggccgtggtgcctgagtttggcggggagaattcttcagctgctgaaacaacggagcccattcctcctacgcagaaggatgatgagccagctataatgtcg

SEQ ID NO: 70494 - DNA, 509 bp, Zea Mays
cattgaggatgtatagccgatttggactcctgtgtaccttggcaagaagacgacgagaggggtcccagatcctcatgactccgtgctcgacctccacgcgcgaaccgttctcatccagctgtcccaagcttatgatagagttcctcaacgcggggatgtagtagactccggtgagcagcctgtgctcaccagatgcgacggtgaagacgactgagccgacgcccttgatctctacgccggaggcatccccaaacttgacggagcctcggacgctagagtcaagctcggtgaaaaactctcgtcggccggtcatgtgatgagtggcgccggtgtcgaggcaccatccttcaatcatgtctttgctggagccgtcgccgaagaaagcgcatgctttcgactcatcaaggtggaggagtgccgctgcggccggtgtcgctggagatagctcgatgcttgcatgtgctaggagcagagcttcctcctccgccttcgcctgtgcgacgttggcc

SEQ ID NO: 70495 - DNA, 889 bp, Zea Mays
gtcgggtacctaggaaccgggtgctcagtataggcccaagattcttgatggcccacttgtcgaccaagtctctgctgagcaaccctgcgaggtggagcagacgaccaagtctctatcgagcaaccctgtgaggcagagctaccgaccaagtcctcatcaagcaactcagcgaggcggaggcctcgacccggtactattgacccacgtcagccacgacgggacgcttagtcaccaaactacgtctagaccagtgacgtggcatactgaagggatatagagaagtctctatcgatgtgatggtacaccaccgcatacgatttctaccttgtgggatcggacaaccataatcgttgagtacctaagcatcagagtcgccacagtaactcgcataccaggaaagacgggagaatgcaccatattgggtgtatgcctacgcacaccagggggtgatgcggggtccattacgaaaggcgagaccgggccacatacaactataccatgagactaccccatgggacccaccaagctccactacaaggacaataacatcagactcactatagggacccgtatgacggacgaacaaagcggtatgccacgttaggggtacgactacacatgaccctacagatgctgtcagaggcacaacgtcaaccggaggcaacaactcacgctcttactagtaggaaacatgtctcctttgtaaggtcctacccgtgaactataaaaggacaggacctcttccttcttctcacacacattagctgtaacacggtctctgaagcaatactacgatcaacattatatcagattagggcgaaaacctaaaccaatataactctctgtctccatccttagctcgaatcctaggtggttcaccattcagagt

SEQ ID NO: 70496 - DNA, 652 bp, Zea Mays
gttagaaatgtcttacctcgtgtcagattggtaagtcttgttaggttatgttatgtgtttctcttgccttgctatctaggtggtattctaaatgttcaaccctttttacaaaaaatgtggtatgttctgctcatgaaaagatttccccctccaaacaaccttgagtttagcaagtgaaacccttgtaaaaaaacatgcttgtgttggtgttttctaacccttgtgtgtttcccccttgaagttgcgcctacacggcttgtagacacccatagcttgacccctaaatcgactaaaacttccttgtgcacttgttgtgtcaaaaaaaaattgttattgttggtgtctagttgcgcaaaccctatcaaggccatgtttctttccataaatccttgcccctaaaacttcatagcattcctgttgattatccagctgatcttgttgcctacctctcatttcacctcgatctagtaaatctttacctttgagaatcgtgtggtgactttatcatctgaatctctggatccttcattgattctgccccgttatctgggtatctgctataacccgttctcaagtatcggatgttgatcttgcctaaatctcttaattctggtcattctcataaccccttctccaaggatcatgacgcttg

SEQ ID NO: 70497 - DNA, 781 bp, Zea Mays
ggacaactcaaaggagattctggcgacacccaccccgttctctgagtcactagcatttgcagctggagcatcatcttcatcaccgccagcaccagcagtccaagcccctgctcctagaggcgacgatctagatgattctggtgacgatgatgaagatgatgatgatgatgaagaagaggataataacaacgaggaagccaacgatgagcaggaggataacttcgttgggatatggcatgtcactaagcattatacttcaatgttcgagacagggcacttccctaacctgctgcaggatgttctgcatgcgttaggaacctacgtccgacctctatatgacaccaggcgagtgtccgagcctccccgagcttgctactacatcactcgcgtgcatattagggtgatggatgcaagagatagaggttttaggactctatcagctcatgagtctctgacgccgctatccacctacgctgcttcggtcagcaatgccgctaggcgagctctatggtttcttagccacacttaccggaagcagctgcatgacatgaggtacatgcatcttcctctatgtcttcgtggagaaagccagaccagtgttgttccaggtgaagatggagaagatcgcctcaacacccttgtaggtgtggtgacaggtcttaacattaacctggacagtgctaccctggacctctctagggtacatgtggagctggaagatgcacatgcaaggactatgcagccctggaagctcaacttgaaggaaggaatccatccgaag

SEQ ID NO: 70498 - DNA, 347 bp, Zea Mays
agggatgagcgcacaggagctcaggaacgactagtgagcgctgcaattgacagagagaagggtccggcgatttgaagaagatggggaggagatcggatacgaaggagacgtggacggtggggtaaaaaaatcagtgacgggataggaacgctgaccatgcgcgagggtgagaaaaatatcaggcagagaggcggctgggagataaggatttcctaggatattttccatttttttcagattttgaatttcttaatcacagatatttgtgtttctgatatttggatttgagagatatttaaaaggtcgaaccaaaataagttcgatagaatatttgagaaggatttgat

SEQ ID NO: 70499 - DNA, 515 bp, Zea Mays
ttacgtcgtgatttgcgccgtcgccgctattcatgctctctggtgaggggataatcatggcggagtaagaatcttggcaccagataggctcgggctcggtcgaggatgagtttcaccgtacccacttgctcgtcgatcagccgggatagacctcgccgccgttggccgcttaccgctgtgcgccacgttctcaagtgttgtaccacgtcactgtgaatcgcgtcttgcatgtccggtggtcgttggggagcttgccacggtgaaagccactaataccgagcgccagtaaccttcttcctctccagccgccagcgcatcttcgcgaaattggacgccaccgcaatgggagcgtataaattgccgaccccgcctgctccgctaagtaattgtgcacccagtagagaaacccgtgcctcgaatcatccactagagctccccaatttgggatttcccccaaaccacccaagaacaccgagcagtgtgacctcgtcgtggccagctcgtctcaagtccgc

SEQ ID NO: 70500 - DNA, 471 bp, Zea Mays
ctgagctgcacttttcaaagtgctttatttatctaaaggtatcaaaatacgctaactggaattttgctgtagtgagaagtactgctactttgcaaagttcatgtcagattggaataaagaataggtagatatagtctccatatcaatttagccatgcaaagttgcaaactatttttttcagtgactgacttgcaaattgtcatgcatattttgtgtgcctggacaaaatgaagccacaatagcattgtttcattggtccaatgtctgcttggttattctacttgacacccagcctaactctgctccttaggcttgctgatgatgaaagaagaaagtgggaaattggtggggccaaggggttatctcaccttgttgccccgctgccagattcttgatggctgctgtgagagtaaccttctcggggtggttattttccttatggattttttcttgtatgcttgttactggccc

SEQ ID NO: 70501 - DNA, 440 bp, Zea Mays
aaaaaatgtggtacaatggaaattgaagcttctgaaggtgtgagaaggagtagtagattggaatcgtctgaggaagtgaaaattgctgataaggctgctgcaagagctatggcgaaagatgctttcatcaataaaggtatgtcttgtaatcctttctcggtcttgaatactgataatgatgttctctttgatgtggctaacaaattaggtgttgaattaggttcttcctttaatgatgcagttgaaaatttaaatctgattaaatctttagaattgtctagaaaaaacttagtggttcaatctgttaggattaatgttgataattctaatgctgattgtattgtttctgatgatgataatatcatgcataaagataatcttgaggataatttttctgatctcgaagatgttatgattcttagaaaaggtcgtaaaattca

SEQ ID NO: 70502 - DNA, 862 bp, Zea Mays
gcggaacctgacgagggaggctgggcatgtcagaagggaaccactcgaggggatcctgcgcccagccccggactgacccgccgtaaatgattggccgcattaaccatgcctggcatcgagctacacgtgtgcatcgatccgcttcccactcatgacctacggacccctccggccgcatagcattcatgacctacgagcctctggactgcaaggcattaatgacatacgcgcccctcggcctgcagtgcacttatagcctataggactaggcctcagtgcgcacacctcccacagggcactacacgacgggttgcgccgagccccagaccacagaagtcaagggttagcgtagcccgaatgatggcgcctgggaccattgctgccccacatcatccaccacgataaatatgcgacaaccagaaaaccctagttcccacgagtacgcatggcctcacccgaggtaaaacgttggttttacccctgccttacgactccttcccagagaagccaacactggccatccactcctcggcctataaaaaggagaggctggcttcagggaaagggggatggaacggagagacaacaggttaccttcagacgaagacgaacccacaaggacgaactggaggaggagcgtcgacgaggaccaggaggcgggagccccgccaagccaagacttaggtaggacttcaccttgcagcttctaaactccacttccacctagataagggatctgggagcctatcctccctctctcgactacctgtaaccactactataagtttgatcctcaatggtgccagtagtgcaagccactgatgactggaagtagggacattctgttcgaaccggtataaat

SEQ ID NO: 70503 - DNA, 491 bp, Zea Mays
tggaatgaaaactgctgaagctgaaatcggcggagccgaagctaccggggccgaagccgaggccaccgaagagtcgaacctggaaacaacaattgaggttattgacaatatactgctgaaaatggctgaagaggaagctaccgtggctacagtgaatacggcaactgagaaggggaaagagcaaattaatgaaatttcagaagaagaagatttcaactttcaagatttgctcggacaagaattaacagacgccgaaaaagaggagttgaaaaaatatgccatatcttgcggatacaaatcaggggctatgctatttggtggggtcaacgaaggaaaactaagatgccttcggaaccgcaccgaggccaaaattgtcagaacccttttcaaaagcattggcctgccgaagctggaagcggacttgtgtcattatcaacgacaccacatcgccggaagcttgctttatgctaacttcaaggtaacaaatattt

SEQ ID NO: 70504 - DNA, 320 bp, Zea Mays
ctgagttgggtctaagtcaatctatgtcaatgtgccttgtaacgtcgtgtgccctcccttttatagctcaagggggcacatacaaggatactgagccccgacatgtgggcccaggggcaaaatggagggaatacactatagaagtatctcatgccaacaacgcctgggcaatctccaggcgccgtaatgtccgtagcccatacgatattgatatgtcgcggctgcttcctcggtaacgcgcgagtgatgatgagcatagtatacgccgcagcacgggcgtactgcctgccaacggaatggacaggcacgccgcctgcaag

SEQ ID NO: 70505 - DNA, 493 bp, Zea Mays
ttcttttcagtgtgcatcacgtcaatgttgtgtggaaggagcaggtcgtcataataggggagctgagtcaagcccgacttatgtgtccacatatgctgctcaccatatcccacagaaccaccttctagattggccacaagcccatctatctattgacgattttcggcactagtcatcattgcaggtggatggtctgtcactacgacacctttcgtaaagttcttgatgtctaggcagagtggatggttaggagggacaaattgtctatgtttatcaaacgatgaatatttgccaccccttttcaacctaatgaacctaagagcttccttgcaaactgggcatgggaacttaccatgaacacaccaggtgcagaatagcccatacgctggtaagtcatgcatggagtactggtaccaaacatgcattttgaagtttgtcttcgtagctcggtcatacgtccataccccttcctgccaagcatgtaccaattcat

SEQ ID NO: 70506 - DNA, 570 bp, Zea Mays
ttgagatggtggttctcctagcgggatttcttccagatccaaaactggaaacttcaattttgtcagtcaggtaagcaaacgaaacatggattgcctcctacctttcagtaatcgtaagttctattaaactgatcaatcttttcgatctgatgttgttctgtaacatggctgatcactgtgcagttgcattaattttcttcctcatgtcttgagatagttgtgtcttgttcatcaaccatgcactagtaatgatgtttcaagtgtttgatgtgaagtaactttgactcttttgaagcctaaacacaatgtggatggtctatacaattccaagtggcctaagcagtgcaataaggtcagaggagcataaattcatagtgcccctccttctcattctgggtttttgtgataaaagagacttgcgcttaactacttttggtccatggttcttgtttctttgcagtattagagtgtccaatgaactaggtgctgggaacccacatgcagcacgcctatcagtttatgtttcagggatcatgtgcctagctgagggtctttttttcgctgtcatca

SEQ ID NO: 70507 - DNA, 441 bp, Zea Mays
acacagaatgcctccatatcaaccaattctcctagctgagctaaaaactgatctatatgtttgtcgcgctcttaccgcattaaccagaaagtccaatatccttgttcctggtgggtatggaatggtatcaaattggtgatcgtatggtttccgatacgacgccccagagccagacatattaatcccctatcctttctctaaataattcgactatctcttcccaaattttatccatagtagctagcggtataggactggatcccaaaacatgaagcttggaggaatggacattgttatgttggctgtttgtatgaggataatctactgtgcgtggtggtgggaacccttctattttcttatgtgttgggtggtacttggtcctaggtgcgggaatgcttcgactttgatggaccgaaggtgaaggaggatagtactgatgtg

SEQ ID NO: 70508 - DNA, 795 bp, Zea Mays
aagttcactatttaatctagcaatttcgacctgggcctccgccagtgaaccttccatggtttgaagtacgaagtcttttttctccagggtagcctcatggtctttaatcttcttctcaagtccctcagttataatttcgttctttttgtcctcgaggtcttgttgcatcctcaggactttgctcagcagtaagatctgataaaataagcttcatcaaaaaacaatcttcatatgaaaacaataaaaagttaagaattttaccttaaagttagcataaaataggctaccggcgatatgctgccaccggtacctgctgaggtctgcctcaaccttcgggaggccaacactcttcgatagagtgccgacaaccttcgccccagtgtggtcccgaaggcattttaagatttcttcgttgactcccccgaagagtaacgcacctggtctgtacccgcaagatatagcatactctttcagttcttctttttcagcctttgacaattcttgccgaagtatatcttggaaattgaagtcctcttcttccgaagtattctcggctttctcctttccttttccagccactgtgcccgggatctcttcagcggctgcagcagcttctttcgcggccgcatccagaagcatggtatcaattttagagagtgtggcttctagatttacatcttcagcggtttcagctttggcactttcgacttcggtggatgcagcttcggcagcagcagtgctctcaatagttggagtctttgacgccgatgccagcgacggtgtctgctcgataac

SEQ ID NO: 70509 - DNA, 664 bp, Zea Mays
cagaactccaagtttagtgtattaattaattttcatttagattagttagtttttcgcttcaattaggtaagataccagtcgtacatgtttgtcgaacccaaaaattgatagttgtttactatgtcaaaaactttccaagcgatcatgataagatacattaacacgaaaaaacactgtttgatccataaggcagcaagtttgataatcaaatggattgatttgatcaataactctgattggtagtaaaatgaatttgtttagtatggtgtcctacatgaaacaattttggctgttagaaaaagttgttgcgatggcgtgagagaaaatgaaaagatgaataaatggtagtgtgcatctgcttgtgctctgggctacctgttaatgaactattgcatataggttccttggtgaacattaatgtgaacactcagtgtatcagttgtcagtttcatgatgtgctaagatacaagagtaaatgtggacaagttgatgctaaacatcattctcaatacccgatatgaaactaacctaactgtcaagacaagggaattaaatggaaccttgaactcagaagaccatgcttgtcttcatcatggaggagctaaaatcccaatagatataagcaaacacaagattcaaagagggggaaaggaagacagtgaag

SEQ ID NO: 70510 - DNA, 456 bp, Zea Mays
cttccacccaccccatcaatctcaaatgatattgcatgtcttgtccctctgttttggccctatggtggcggttggtgtacactcaacccacgtgtattcatgttcaacgtgtggactctgaaatagtataatttagattatattcgcttgtgttctttgtatacacatgattaatcgtactttctaaagttaaacgatagattttatttgatttagataagggtataaacatgtaacaaccaaatctaaacctttcttgtctttaaacttgtaaattaagacaactgtgaccattggcgaggtgtattcatagttgctcagctttgagtaacgcatggaactaccccaccaactatcacgcaacaaccaatgtagatagtcgcggacgagaaggcacacgcagtagaggaaaaaatcgaggaggtcatggtccaagaggtcatgagcgcaatggtg

SEQ ID NO: 70511 - DNA, 466 bp, Zea Mays
gaggtctaggtacatcttggtggttcctgggtggatggagtaggctgagttgtgagcttcattgagtaggacttcccgtgcctctccttttggtacacacagacggttcttgaaccaaaggactccttgttcatctgtcctgaggtccggaagttgttccttgagagcttttgccgcaagtcttgctgtctccgtgtccaggcgttgagctttgcatatgaggccttctagtattggcttgacttctaagctgccgctgtctcccagacatgcattcagctgagctgattccttcttccaatcttctaaaaagttggttccctttatcccgaaaggttttcggctgagggcgtctgctaccacgttggcctttctggggtggtaatggatctcaaggtcataatctttgatcagttccagccatcttctttgacagaggttgaggtctggctgagtgaagatatac

SEQ ID NO: 70512 - DNA, 880 bp, Zea Mays
ccccagtcggatggccagaccgaaagggtcaaccaatgcctcgagacttatttacgttgctttgttcactcttgtcctcacaagtggcatcattggctaccaatggccgaattctggtacaacacgacttttcactcagctttgggaagatccccatttgaggtgttgtatggtcgaccacgaagacactttggtattgctccagctgacacaatcactgatacatacctctccacctggctgtccaacaaataagtgatgctcggggttgtcaaacaacacctgctgcgagcccagcaccgtatgaagcaacaagcggacaagggtaggagtgagaggcagtttgctatgggggatcttgtgtacctcaaactgtaaccatatatccagacttccattgctcccagggccaatcacaagctgtcgttcaaattctttggtccctttgcagtgttgcatcgagtgggtgcagtggcgtacaaacttcagcttccggagggttccatggtgcatccagtgttccatggtgcatccagtgttccatgtgtcgcagcttaaacgagccaaatctctgtcccaatcggtgagtgctaccttacctgataatgctattgacaaccaggtgccagatcaggtgttggcccgacgtactatctcgcgcggagggagttcagtcgaccaggtcctcgtgcgctggtctgggttcgacgaagccctcgacacttggaaagacaatgaagctcttcgacaacagtttccacaagcagccgcttgggtgcaagcgacctctcaaggggagaggtatgttagcaccgcacatgtgacgcaagacaaagacagcaacgaagtacaagatatccatgagcgctctcagcaagag

SEQ ID NO: 70513 - DNA, 438 bp, Zea Mays
actaggcgtacgaacgtctggttgccttcttgaccgaggggggagggatttgtcgtgattctccatggtgaaccactcgagacgccatcctttaatgctgtccttgagggggatatcaaggtattccatttcctcccccgatgaagctctaaacttgtgccgccgacaagctgatgctgtcctccagccatcctgggccgacagtgatagaggtacctccagagtctgaaatggtggagaattccaagaataacctcacatagatgtacgaaaatggcaacttgaagaacggagttagggtttaagtgtgtcagattcaaatcgtagaaatcaaagagaccgcaaaaaaggagagatgggaagagcaagtccacggatgagaaaaggaacgtaaacaacggattcatgggtgtcctctgtcggaatagtgaccccgcg

SEQ ID NO: 70514 - DNA, 562 bp, Zea Mays
gcttgcgccggggatcaggaccaacatcctcggacatcggaggcggcagtggattcgaggcaccgccattgacggcgaaactacagacatcgacactgaaatctcataagacaacatgcgcttcaatgacagatcttgacatggatgcatctccggctccgggatcagcagctccagcatggccgggatcagctccagccgccaacaccaggcggaaaccctgaagcaagaaagatcacgccggacggctgtgtccgtgcagagctccaccgacgtacggtacccacgaagcagatcttgagcagtggacaacatccaagcatggacaggaacacccctcatttctatgctcacgcggagggatagtgagactgcttcagcatgagccaatcttgaccagaatttgaacttcaaagagcaactaggggtattaaacattgcctcgttgttgaaaacatttcttgccatctcgcttggaattagcatcaggaagtcttccagcgaagatttgtgcactacgatgcgatccaccttgatggctagagccgtcgcgacttcctcg

SEQ ID NO: 70515 - DNA, 760 bp, Zea Mays
acacctgaatttggtagatattagagaagaaattttatacctctaaattcaggttgttacaggtatctgggaacgggatacccgaaataggcccatgccaccttccggtccgtttgccgagcaagcctgcgaggcagagcggccgaccaagtccccatcgagcaactcgacggagattcagcccagtgctagtgacccacatcagctacaacagaatgcatcatcaccaagccatgtccggacatacatgcagcataccgaatgggcgacgggaggtcaccatcaacacaactttacgcccccacgaacggtatgaggcgtattaccactatcatgtagggtcagtcgacctcagtcgtgggaggacctcagcaccaaggtctctacagtgacctgtatatcgggaaaggcgggacagtgcgccataccgagtgtatgccaacacacgctggctggtgacgtagggctcatgatgacaggcgaagccatgccatgtacgaccgcaccatgagactgacccgcgggacccgccacgcactactacgaagacatctgcaatggactcgctacagggaccagtgtgacggatgacgccataccgggagtatggctacacatggccctacagacaaccctagggatgccacgtcaacccgcgcaacggatctctctctttctctagtaggaaataggtctcctctgtaaggttcttcccttgaaataggtctctagtaggaaataggtcataggaacggacgtg

SEQ ID NO: 70516 - DNA, 332 bp, Zea Mays
aaaagtctctgcttggcagcattggcatgatgtcgtgcactttactaccaatataaacacacattttcctatgtgcctcaaagcacaatgcaaccagtgaatgtctttgtgagcgttagaccctgattgtcattttacttgttgatctgaagtcaactaatggctccaaatgacgaatggtattcatgagcccctgaaggacccttatggataaaatagtgttgcgcatattagtctaaatcttaatgattgactatgcatttagtagtaataacaataattttgcagaattgtaaccatgaagcaacttgttgttgcgtgtctcgctggat

SEQ ID NO: 70517 - DNA, 566 bp, Zea Mays
gttgcgggtcttccggactgctgagtcaagaatctctattggcttctctcggtactgaagatctttctgaatctggattgcctcttcttcgatgtgaccttctggtacttgcaggcatttgcggagctgggacacatgaaacacattgtgaatatcggacatggactctggtaattcaagacggtatgctacgggtcccactctgccaatgatggtataggggccgacgaatcacggtgctagctttcctttcacttggaaccttctgacaccacgcatcagggagaccttgaggtagatgaagtctccttcctcaaatctgagttatctccgcctgttgtccgcataacttttctaccgactttgagcttcaagtaatcttttgcggatcagggtaactttctcttcagcctctttaacaaaggcaggcccttccagtgtcttttcctctacgttggaccacatgagaggggtctggcattttcgtccatacaatgcttcgaacggtgacatcttgatactggcctgatggttgttgttatacgagaactctgcataaggcaaac

SEQ ID NO: 70518 - DNA, 961 bp, Zea Mays
tatgcaaaaacataaaggtcgtttgtgcatacaacatagcgacttaccttcaaatttcaccttgacgattccacacatgctctatcaaatctttcttgagccgcccattagtgtattcgcatatgattttgttatgcccgatcaactcggcaatttccggcacatctcttatcgatgcttcatagtctgtcccagcaagtcgttgtagatttgattcaaacttgacagccatgttatgcaatatgaccacacagtctacaatgtacctcaagtcctcctgataccacatatgtgccggtcctttgattattgcatattgtccttgcaaaacaccgaaacaccgaagccacggattagatgaagaagccatcttgtcagtaggatagctgcaacctaaaaacctcacctctgcaaactgcttgtgttcaattaccaaatccgtgaaatttcttgtccacggttgttggaagagttgacccacaaatcgaagctagttgggcaaccctgcatttggacttgggatcaatttgattgaagtgtagttgcaaacagtaatttgtgggagaccaaacagcggccagcgccagatccggccagcgccacttgttccgtacctcgacggtgacgatggagaagacagggagcacgccagagctcggccgaacatggacactaccaccgcgtcgaggaagcgagcttcaccgccatcgccttcggacgagatccgtttcggacctttggcggcaacagaacgacgatgatggagaagacggggagcacgccggagctcggccgaacatggacagtaccaccgcgtcgaggaagcgagcttcgccgccgtcgcctttggccgagatccattttctgacctttggcggcaacggaaacgaccgcccttccctcctccgagtacggcgccgtatacggtccctgctggaaatgcctacgcaaacgcggaggg

SEQ ID NO: 70519 - DNA, 1751 bp, Zea Mays
tggtgcttggtggtgcaaggcaggtactgccctccgtaggagtttcgaaagggaataaatactttggtcatcctcgtcgcctaggaagtctagaagcataggaatatttatgtgtttgatggagttcggtctaaacaagaagcagtcctagactcgatggctgaggagggtcacctgtggtgtttggctggagcttctaagctacaaagtttctactcgggagtgcttgggccacatagatagtccatgttgggtcatggttttgtttttgtaaactagtcattcagtgtgtgttgtctggttgagaggattcttttccctcttgttgaattgttattttcttcctaaatgaaatgacacgtggctctcttgcatcattcgaaagctctcttgcatcattcgaaaaagagcaaaatctgaaaaatgtcaggcaacaccaatgctttagacttttgcctttgctctcacaacacaaaaatcacttacctcattcccttttaccatcttctctacttggagagttgttaccattgtcacttcattcaatgtaagattatcaccctccaactaaaccttgtgaccttgatccacaaatgttagcaccttattcacctagtcacactccatagggttgtgatccctcaactagtcatagcccaagattgcatcataaacacccaagtccaacactcccatacatgtgataaaaatatgaccagcaaccctccactccacagctgatactatctggttagggaccatcatctccccattagctaccttcacctacattggagagcatgactatgtgggtaaacacaactggtcaccaatgccttgctgataaacattgctaaacttcctaaatccacaagagtcaacatcacattgctctaaagcatagcttgaatatgtagactgtctttctcatcagtatcactatcaacattgacaaataactggcaaaactctacagctaactgatcctcctggtgaagctgctccatgatgttttcctctaatatcattgccatatcttcaataataagcatgttcaattgactcactattttttaggtatctggcagcatggcacgggtcgaacctttccccacacgtataacataacctatgtagtcgttgatacacccttaactacctttctttaattaatcaaatctccacttccacatgtagtcttcggttcaccctgcaacaccccgacaacacttctatttgcatgaaatggcttggtggcattgaatcgtcccttcaccatcacctcttgcgaaatatgagctaacacaacaaccctattcactatgacatgtaactatgtctgcaccactccttggatttcactcttcagcctttgatgaactggtccacaatgtctcatctagctctagattatgcaccacaactatgtattgagtctcttcaaactctttgacattttcttcagttccccctttctcttgcagattaaacgaatgtagcatggcttgtggatattcttctatctcaaactcctcgtacactgcatggttgaactcagtccaactaccaattccatgtcttaccttgtgcacttgccaccatcgtgttgtgcttccgtctatatgcatcacgaccgttgtcacccacatcaattctagaacatggtagatggaaaaataattgaggtgtttattgaaaggaaaatggccttataccattttctctaaggggtcatttgtttccttggaaat

SEQ ID NO: 70520 - DNA, 1059 bp, Zea Mays
gggattgacaactttggtgacctttattgtaaaatgatatctgaactacaactacatatgaaacgaatatgtaaataatataggttaaattaaatttctgtcttcgtactgtactcccccctataaatcactgtgtttaacgacagatacaagaagaccgagccttgaagtaccaaagtaggacgtttttctagtacagtaccaaaagaggaaactataactctacatgaagagtcagagcccaaatttagtggtcatcctgtccagattccaacctgagaagtgatgttatcaaacatatacagagtcaatgtgcaactgagaagtttctagttagatgaagttaaacaactgtgtcatcagtttcgtactcccatcactttgtttggttgcaccatagatcatcagctatgaactgcatccatgtgttgtctttaccgtgctcatttgaaccagatgactgtccagcatccctgatacttgtaaactgttcttgtttttctttagattgtgatgagctgcactcgccttgcttttgcttctgaagctctccgagtgccacatttttcttgaagacacgacacagtgcatatgagtcctgtaaaataacagtagaattaacaagaaattgattgcatttctgtttcgttaacaattaaggtgagatgatgtttggttttgcacctactgaaagagtttttaaataacacctagcaatccccccccccccccccctgcccaaaaaaaacacaattggctgcaccaatcgttctcgcatggccaaacggcgctaccgcgccaacccacctgtcgtggctggcctaccaacgttgcaggtcagccacacgctgaccgatgacgtgagccccttgccacaccacttactcggacgcgacaccatctgcgccatctagttgctttcatatctttgtgatgtaggatggcacatctattgcttgagtcgttctatgatggcaagcactagggccacctactgtctcaccttgatccaccacccatcttggccccattgaacccatatgccccaccgctgggatg

SEQ ID NO: 70521 - DNA, 402 bp, Zea Mays
atctcggccgtcagatcggacatgggtgttccagattagatctggagtggatcgaaacggtacacgtcgaccaccgcacgatcaaatctctacgctctagattcaatactctagcgtcacttgtcatctatccgatctaaatcggacgactcacaacccccaaacccgaatcggtatacaagttctaatcgtagccgttcctgcccaatacaacgatgcacgcagatccgcccgaccctggcccttgccgacgatgagggcgccccgcacggcggcgcgccatggtcggaatttcccccgctagcctacagtgcatgattacccgccgcgctagatgctaaccgaagctgaggccacgatgaattctggaagggagtacttactcgcgattgagttgatgac

SEQ ID NO: 70522 - DNA, 1259 bp, Zea Mays
aggttgcaaccaaatgtctatggattctaggggtccatcgataaggttaagattatttgccccataagagtaacgagtcttctcctaacaccctatggtatcagaactccatcgatatgtcagtgcaatcttgtacttcatatcacatatcaaatcatctttaggtgcctccccctcctcgacacgtggggggggagggataacaatgctattgggagagccctagccgaacagaagccatctcctattctcgtctcgttttggtcctcgtgatgcggaatttgagtatgtttggtacaacttttttataaagagcttttatgagaatatggaatcatggataatctagttgttacgagaatttggatatcgcggggcttgcgtgcggaggaagataaagggggtcgtagggtttatggtttaggagcgacagattccacatgtcgcgacaacttggcgatatctgcattcatgttgatttgagcgattttctcaaaagcgatttcacagaagcggactaagtaacaaagcgctcggcgaccaaaaaccgattttgatggccagaaaccgattctgatggccaaaatcaagccaggagccaatccaaacatgcccaacaggatgatagccttttttggagggctcttgggtccctccagatacaactagcgtgggattttgtggcaaagtggcgatcaatgaaatgactcaacagtttagtgttcgatatggagctctcatcccttcacacatgaagcgatgagcgcagtggtacgatggttttatgcatgtctagttattgattgcatgtgtttgacatgcctcttcaagttggtcgtcgatcaaatatagatcaagcatcaaatggctcatcaatgacaaaaagaaagggcatgcaaaggtattgtgttgataaagttagagtcagcgatggaggtcctagatttagagtggcccgagggatcttgccaccaccaacaagttcaatcgcttacagaggggggagtcatcggaggactagattgccgctgcattatctaaataagatccagacctagggtaagcaccaattctgatctcatataagatatttttgtaatctatttctaatgttgatttttttctcaatttcagattgttagtcgacttggtatctccctaggcttgaagaatctggtctacagaaacattggcacccaccaaggttgttgtctaaactttccatagccttgaggaagaccatgaaagtgggagtcaag

SEQ ID NO: 70523 - DNA, 290 bp, Zea Mays
tgagcaagtcagctagttcatcataggaaggtgaagcaaattcttcatcactatcactatcatcaataatatcattatcattttgtaccttccgttcacctctagccatgaggcagaggtgagaagtcgatgagggtgatggtggtggtgaagagaagtccccagcgatgacggcaactttttcatcattttcttcttcacttgaagaagacccacttgatgactcaatgtcagtgagccagtcaccaacaatgtatgcctttccatttttctttttgtggaacctcttg

SEQ ID NO: 70524 - DNA, 444 bp, Zea Mays
gccatagcaccccacttgcatcgccgcttccgaatcagcaagtggtcagggcggctcacctggatacatggatcacgaccgtggaagattgagaccggaggagcagaaggggccagtgaattcctcgtcggagttccccctccacggcgggaccgcttctcgccgtgacctacgacactggcacgctgattggtggtaagacctcgtccatggtgttcactgtatcatccccttcgtatttggctagttggtcaaaggtgggttggctcgagtaaatggtttagcagcacgccggccggtcccctccactagtgcgggcggcgccacctcggtctagtgagctcgggcgctggggtgacgttggggtagtttagactaagtgggtaggctatatgtatcttggggtagtttagagtagagaaataacccccataaaaaggtggg

SEQ ID NO: 70525 - DNA, 347 bp, Zea Mays
cttaagtcgttgccgacttaagccgattgctccgttagtagggtatagtggtcacctcgagttaagtaagcatgcaggttgacagtgaacaattcgagtgcctttgaagtctttttattgatgatatatttcccagtttatagagtacattgttgccccaatagcttttgagatgtagctaggggtaaaacttcctgagatgttctatgttccatgagttcccaatttccgtgccgtccatttgagtgagacgatatgatccaggccgagtgacttctgctactatgaatggtccttcccatagaggcgacagtttgtgccgtccctcccccgttagaattcagcgg

SEQ ID NO: 70526 - DNA, 422 bp, Zea Mays
gtggaggtaagcctaaatgctatcaggatcgccaagcaaaatgatctagctatttgtgactattatgatctgatgatggacaatattgatgaggtgaccgacaagaggctaatggctctaaagaagatcgagaaagacaagatcatggttgccaaggcctacaacaagaaggtagaggctaaatcatttcaagttagagacatagtttggaagatagtcttgccactaaggagtagggatcggaagtttggcaaatagtcaccaagctaggaatggccttattgagtgacacatgtaatctttggtaatgcatacatgcttccgactttgcagggtgatgagttacctaagacattgaatggttgttttctgaaactatatcatcccagtgtttggcaagatgcttataaaactgatgttct

SEQ ID NO: 70527 - DNA, 630 bp, Zea Mays
gccaggtattcttgcactaagcctcgactactaatgtgctcggccacaactctgaattctactttagctaactagcatggggagttgagttgcatgttgtacaatgaccttgtcatgccgaagcttaacttcaagggactcatcaccatgcttataagtttctccctcctcttctcgtcagcctttacataaaaccactcgtttgtccagccattaggccacttggtgtggtacccaatcacaggagccttcgtatctttttgataggcaaagttgtggcatccaaagtttctgtgtagaccatctgctctcgctttggtctggtaatggagttcatggactctacagaatccttcggcattagcactattttcctggcttcggagagcccatatgaagaaactaagcctgactatggcatttggtgtcagctgatgaagatatatctcaaatctttttaatacttcaccaatcatctcgtacaatgggaatcgaagcctggcacggaataagctcttgaaaaccaccacctcatcatcctttggctatggaattatctcttcacctgcgaaccttatcgagtcatcatcgtccttccgaaataaccaagcttcttcattaaaactaagt

SEQ ID NO: 70528 - DNA, 559 bp, Zea Mays
gcgggccctattctgtcgatgataggataggggccaacgaatcgcggagctagcttcccttttgcttggaatcttttgactccacgcattggggagaccctgaggtagacaaaatctccttcctcgaaactgagttctctccttctgttgtctgcgtaactcttttgccgactctgagcttcgagtagtcttttgcggatcagggcaactttctcttctgcctccttaatgaaggcaggcccttctaggttctttttccctacgttagaccacatcagaggggtctagcacctctttccatacaaggcttcaaaaggtgacatcttgatgctggcatggtaactgttgatgtacgaaaattctgcatacggcaaactagactcccagtttttgtcgaaggtcaatacacaaactctcaacaaatcctcgaggactttgttgactctttctgtctgtccatcagactgggggtgttaggcggtgctgaagtctagcttggtgcccatagcttgcagaaggctcaaccaaaattttgaggtgaattgtgttcacctgtcta

SEQ ID NO: 70529 - DNA, 492 bp, Zea Mays
ttacacacaatatatgtgttgtcatttgtgcatgttccttggagagacgagagctgggatggttatggtcagtcacctgctccatggggcagagaacaacaatgtcatagcatttggttaggagtaatgggcggccatccaaggttgaatacacatcatctaccgctacccacaggtggcactgctcataccaggctgccttgtttctgttttcgtggaagcttggacctgattgtcagctagctcaaaaggcgcgtggaaaggtatccaggcttgggtcgtccaatgctgacagacagaagtagaatacgtggctggggcgatgatgaaaacgacatctttgacgatcgcgtactgtatcagtatgagatcaatgcgtgatttcatcgagttggaggcatgcgtcccggtgaataggacgttccgcaagtagtactagagtatgagagctgcttcaagagagttggtagatggatcatcaatagagcaaca

SEQ ID NO: 70530 - DNA, 518 bp, Zea Mays
ggggggggggaaggagaaagagctcacctgagcggagggaggggcggcggagctggagcagttgagctcgggaattggggagaagagttgcgaggctggtgcagggcatggaggagcttggggcggcccttttataggcgcccgaagggaggggagcagcggtgttaggtggaggtgaggtgcacaacaatcggtgtaaatggtgcacagcggcgacgacgggaccgctcggcggggcagtgccgtgcaaggacgcgaccacggcaagcgaggacgaagcggtgtcgaacttctctgtgcggcgagtgcaggcggggaggaggagaggacggtggccggcagtgatcgcgttgaagccgtgcgcggcgagggagatagggtggctgactggcggggccggcttgtcagcgatgcgcgggcgcgagagagcgagggtgagtgcggctagcaggtggggtcgggcagcagcgatagaggcgcgcacgcggagcgggctagcgcgcgcgaggttgcaggtc

SEQ ID NO: 70531 - DNA, 335 bp, Zea Mays
atcgcactgctcttgctgatcctcattggcgtcaggctatggaggaggaattctctgctctacagagtaacaacacctgggacctcgttccccgacctccttcctacaatgttgtttctggcaagtggatattcaaacataagttcaatgctgatggctctcttgagcgctacaaggcgcgatgggttctccgtgttttttcacagcgccctggaattgactttgatgaaactttcagtcctgttgtgaagcctgctactgttcgcacagtcctcactttggctctaactcgcaactgtccgattcatcagctcgacgtcaagaacgccttcctt

SEQ ID NO: 70532 - DNA, 444 bp, Zea Mays
ctctcgtatagcccgttctagatctcgtgtccttttcgcgggattgttaaaatgtctcacctcgcaaacgtcgtgctgctcgtgtctacccccgtctatccctcggcgcaggcacaaccacctttatttgcctcactttgtcgcataacgtcccactcttcgtgctcgcaaccgcctctcttgctcggtcatgacggaattgatgacgaatttggcaaccatctcccacacccgctctttttatataaatccaccccccgtcgtcgcataacccctcgtctcgccccagatccaaatcgcgcaggagcaggcatcccagcagttaccaggcatcagtgagtcccctccatctcattccgtcccaacactccacccctacggcatggcgatcgacagcagcaaccgctgtgcgcacccgctcgcctgcgtggcggccaacctcgc

SEQ ID NO: 70533 - DNA, 362 bp, Zea Mays
attttggtacataataaaagacataagacacgtgaaaggacagagactacatctcgatcgtatttcagaacttccatccataataattgtacaacaatgatctttgggcaagccaagtttacaaacacagtttccctaaactctttcttttgctgaaaataaagtacattatttccatgagcccatggaacacagtgagacaagctagttgcgatgctccatcgaagacaacgctagagaagattcgtcgtcgccgggggtgacatgagtttccaaggcccagattgccggcttctcatcatccatgaggacacgatggtactggagagtaagattgttggttgtttcagcttcctcatgcc

SEQ ID NO: 70534 - DNA, 524 bp, Zea Mays
caaacctcttataccactgcctaggagcttatttcaaaccataaagagatttctgcaaatgacaaactaagtgctcttgactaggagcagaaaaaccctgaggttatgtcatataaacatcctcatctaaatctccatgaaatatgcagttttaacatcaagtttctctaactccaaatcaaataaagcaacaatagcaagcataactcaaatagaagtgtgacgaacaataggagagaacacctcattgaaatcaataccatccctttgttcgaaacctttcacaactaaacgagctttaaatcttgtaggttcaactctagatataccttcctttttcttataaatccacttgcactttaaaggatttacctttaggaagctcaaccaatttccatgtagaattcttttgaagactctcaaattcatcattcatagcaactaaccacttggatgaattatcacatgagatagcttccgaataagaagaaggttcaaatgcaacattagtttcttgagcagca

SEQ ID NO: 70535 - DNA, 559 bp, Zea Mays
gtgacaccacgtgtccagtagatcccggcccacgcaccccgcacaaccagagtcctagtaccaccacgtggcttttggcgtgtgatgtaaaccagcgtgcggagtctgacgcaagtatctggcatgggacatctatacattaactacggataagacgtgctcctgtccactctagtggtaggcgacacggctagtacgcaacgcacaggctacactcttacctgcacgttaccaaggcaagaccattaactccctgtcccgcaaatgggaaaaccctcatcatgacacccgctacaatgagaggtagaggggataggacaacaacatccatactcctctatgcatggcagtgtatgaggctatgctgcaacctatgccaaagcctacacctaagctccgactagacaaggcaagagcgtagcaggccaggagatctgcacgaagaccaagaggagatatctgaccattgcggaggagatcttggtctggcaggatccatacgtccatcttctatacatttaagtattagattactggcccacatgttgggtgcttggca

SEQ ID NO: 70536 - DNA, 491 bp, Zea Mays
ccaagaaataaggttgcccccaagaaaatggcgtacccaccgatactatgtcgatcatccaaattaccagcccaatctgcatctgaaaaggcactaagtagcaatgatccagtcttgataaaacataagccataatcaattgtgtcctggagataacgaagaatgtgtttaactgcagtccaatgcactgaagtaggggcagccatataactgacaaacacgatttaccaagaacaaaatatttggtcgagtcaatgatagatactggagtgctcccacaacagacttatgccgagtggagttctctggtgataaaggttctccatttgttagagtaatcttttcagcggggaccatcggtgtaacaccagcactagcagcaagcatattagtctgggaaagaagatcatgaatgtacttgtgttgtgttaagatgagaccattaatatgatgatgtacttcaacacccaaaaatagctcaagggtccaag

SEQ ID NO: 70537 - DNA, 483 bp, Zea Mays
atcgttggaattaaggagtacatgagtagatagactcattcaaagtttcattgttgtggttgcttaggacactatcgtgtctgcaggaggacgaacatcatatggagaaggagcgccacatgggagagcgaatggaggagaaacatatggatgaggagcaccataagatccatatgaaggaataatatatggataccaatacgtgtatggatcagtgaaagattgaggaggaggaggagcgtcattggtaggaactcctaaagtaggagtaggaggatggtcagtgataggattttctttggtaagaggagaaacatccatggatggtgagtaagaatacgaggaaggaggatatgggtatgaaaacagagggtgtagacttatagaacaaggacgaatagaaacattctcctatggctatgtcgatgcattgaagaagatccaccccacatcagtaaaggtctatgttaggttatctccagc

SEQ ID NO: 70538 - DNA, 376 bp, Zea Mays
tttaaatgttcttatggccatcattccataagatcattgcactcaagcaaaaatccaaatcaaacattatgcaaacatcactattacatggttgttattataatcataatatcataaagaattttgtcatctaatcgcaaaatcgaacttattacaatatgacttataaatctagagtcgtctggtgatagatcctggttctccatagcgaatcctcttgcggggcggggacacatctatggcagggacttgggcttcgggtagattccttccttcgagctgagcttcgatggctgcaatgatgcaatcttggcatgggcttcttcaagttctctatgtaccctcgaaagatccagggtagcgctgtccaggtcag

SEQ ID NO: 70539 - DNA, 657 bp, Zea Mays
atattccggccgtcgtaccaagctcaccgcggtggaatccgataagcacgccggtgaccgccgccttccgtccttgcgccacgtgtataggcacttccactgcatcgccgtgacctgctctcgctccccgttgatcgccggagtgactgccacggcgtaggacacgaattcgttgcgccagtaccttttctcttctccggccgccagcacaccctggtgaaattggacgccaccgccgttagaggctataaattgccgccaccgttcgctccgttaggtaattacgcaaccagcgaagcaactcgcacctcgaatcatcccttagagctcacaaatttctcgtttcccccaattcggttttccgccaccataaaagcaacctcgccacggtccgcttaatccaggttcgatcttgccatttatgttcttgtctcagtacccatgcatgccctggacactcacctacccactcaattggactagaagcctactgatcatcgggaacgtgatcgtctgttcttgacatccacggttaccgtggcctggacaaattagatcgccattcttgaaattatattggggggaaatgcttgggagggattcaattcagggttagtcgcttgggggcaccggtcttggctccctccggccagttag

SEQ ID NO: 70540 - DNA, 678 bp, Zea Mays
cccgagtgtgcggtcgaacactagacaccgacacctcccatgagccgttcggacctctatacacttgatgacatcctctctataagtgtgtgacacccgcaccgctacttgagcccaccctcaccagttgctgccactatgctgactctctattctctatccacacaagtcgtcgttgtcatctcgttcccgagctggtggcttggctacaccatcgagctctaccaagtaagcatcgccttcggtcccacatctaaaacacaccttggttctcttctctcacctgcttgatgtcttggctattgtagtgtaggagaccacccaagtctgtcacaccgttccaccatcgtcaaagattctctggtgttaaggaaccctcactgagtttccttgctacactccatatctcgtgtgcacgctaatttgttttctttgccttcctaactcgccagcatgtggctctattagaccaaacccaaaaaccattgaactccaaccctgcgaccttcaccgactccggcaaccatgttccatgctttgcacagaggtaaggaacataaccaacccatcctttgtctagattactttttaattcgcacacaaatgctcgctagagtaacctgagttcctcttccgccataagccctactttggccattcccaaggccaaggaccacc

SEQ ID NO: 70541 - DNA, 301 bp, Zea Mays
gcgataatgatgtattctttgagtttcacccttggcactttttcattaagatcggtaaacaaagacaacgcttctggagggcaagtgtaacggggggcctctatccactcaaactagatgatgttgcttccttatcccatgctcttcttagtcaatctgttagctgtgaccattggcatgctagccttggtcacccgtcaagtccagtagttagatatatcttgcacttcaataatattccatgttcccgggattttgattcatcagtttgcaattgcaatgcttgtcagcttgctaagag

SEQ ID NO: 70542 - DNA, 791 bp, Zea Mays
aattcatactttagaaatcattcgaaacaacaaatccaatatcgtttgggttgagccctcgatgtcttgcccaaactctaatccttgaaatcgaattgggttccttaaaattcgtttgaaattcttttacgcttgggttgctcatgtctatctgtggcctggcagcatggtgcgtggcaggtgctaaccgatgtctggatagcgcacaacctcttgcccacgtgaaaacgatgcgtgacgtcacttctgaatggatcgcaagatcgatgccgcatcgatctcgcgtatttatttcgcgaaatgtcaagtctacgtcattcggatagcatgtgatcttccttcgaactcgacagaatcaaatacagattttgaacatagaagctgatgtcgtagttcgatccgagtgcccttccttctgattcgaacattcgagtgtagacagttggtaaaatttatttgtttgtaggagcatctaacaaatcgaacacggtcccaatattgtcgccagtctcaacttgatccgaaccatttttttatcttcaaaatcctagtttctgaaactgtatttatatgtgtatttgcattcatatttttgataatgaaatgaaattaagtgagaaaatcccattttttctttattcttcatcgcttttctttcttcttattcaatcagatattttctttttgcttctcgaagctgcaacttccaggtcgttctcatcccatcgtttccttctttactcgagtgcggcagccaacacttgggcgctcagctccctacccctcccatg

SEQ ID NO: 70543 - DNA, 342 bp, Zea Mays
gagccaacagctacaatgaattggtcaacctaaccatctctcaggaaggctgcatcttagctcatcgggcagagaagaaaaggaaggcaccaatggcaggatcctcgccccaacctaagaggttccggattgtttctagcaaccaaagcaggggatttcagcaggaggcaggaaggtgggtgatcaggccacctcaacagcagcaagcactcaaccgtctccccgcccctgctctaaggaacaatccacctctgcgatagcagcagcagcagttccgatagggaaccaggaaacgatgcttcacgtgtggtaacaccgaccactacgccaaggattgtccac

SEQ ID NO: 70544 - DNA, 578 bp, Zea Mays
tcgatgtttgtccagataattgtatgcttttctggaaggatcatgagaatgataagaagtgtcagtgtgggaagtcgagatatgtagaggtaaaaaacgatgatggtgaaatggtcacatcaacgatagctcaaaaaagcaacttcgttacatgcctcttgcgcctcgtcttaagcgtttgtttcttttgagaaacacagctaggcacatgagatggcacaaagaacatgaacgagaggacactcatgtgatgacacacccatctgacagcgatgcgtggaaggctctagatgactttgatccagaatttgctaatgaagcgagaaatattggaattgggttggcgacagatgggtttacacctttcaatacaaatgcggcatcatatacttgttggtctgtatttgttattccatacaaccttccacctcatttgtgcatgaaatatgattacatgtttctttccctaattattcctggaccagaccatcctaggaaagggctgaatgtgatgatgcaacccttgatcgatgatctcaaaaagttatgggaaggtgttgaagcatacgattgctaca

SEQ ID NO: 70545 - DNA, 364 bp, Zea Mays
ctttaaccagattatacctaatataccattattcttgtcttttgcatgcaccttctatatgaaatcagttaaaactaagctaagtacaccacacaaaacatcacaagcactcatgcccctgctaaatacacccagcctattaactccaaacaaatcccactgtcaaataccaacgttccaaatcgtttcttttgtctactcagtcttactgaaacgcaccggacgaccaccttttttggatcatcctcaacgcacacgctgtcacacacacacgtcccccacgtctcttttgctgaaacacatcggacgaccagtctttaatggatcatctcaacgcacgcactctcacgcagaaacacacccg

SEQ ID NO: 70546 - DNA, 423 bp, Zea Mays
gaaatggacactgaaggctgaggctttggcttctgatgctagacatgctaagggtgtgggagataggtatcccctaggcccccatagcgtggatagagctcataggccattaaagagaatgagtgggccagacaattgagcccataggttggtcgactaactcagaccaagggaaggcagaaagcttgcttagcaattatccccgatgaagctagcgcagagttctatgtcgcccataagtcggaacaaagcgtcatgcatgaagcatcattggccgaccgaaatagactcaagtatgtgtagtagtagtgataagcgctaacatgtaaagcattatatagaaagcgggataagcacccttacgaaatgattctgcacccctcgaagtctgacagagcaccctattctataacctcaaactga

SEQ ID NO: 70547 - DNA, 654 bp, Zea Mays
ctgggcctcaacttctgataacaacagggggctcggtgcaagttttctaagacacagggaacaagttccctagacggcgggttgatttctataaactacagggactctttaacaaaactcagggctgaagggggtatcctctaatttcagccgttcgatcagacgcggatggtccagattagatcctaaccattacaaaccagcaagcgctctagatcgtccgatcacaaatcgacgcccccgattttaaagtcatgctattgcctttcacccgtccgatctggatagatggcccggatccaatccaccgaaaagttatctccctatctaatctccaccgttggacaagaatccaatggcacaaccatcatcaccttcccccgctcatatgggcacggcggcccggccagtctaccacagcggcggcagaattacagggtcctgtcccctactcgatgccctaaatcgcgcacatacgatggaaatacatacgggacgatgcgatgaatcaattgggaagggtattacctgttgattgggtcgcgaagggggccggccacggcgtggggtggacggtcgccgtcgaacgaagtccggtgggaaattccgaggtgctggagcacgattcgcccacggaaagtagttgaccaccct

SEQ ID NO: 70548 - DNA, 589 bp, Zea Mays
gcgggtacttccctggatgatcgaagttgagccactgatctatccgagtgaaggtgatcgggtgtttagaccatcgatacggggcgggaggactggtggccgccaccagtatctgacggtcattgagcttctgctgcctcttgctctcttgggacccatgttcgccaaagatgacgttgacttcttcgttaacgcgcgggaatgctccacctccttctccttcctgctgctgaggttgtcgaggttctctgggtcctcctcgcggagggggaggtggcagaggttggaagggttgaccgttctcgacggaatgcttgaagtctctgcagttccggagggtgtggcacatgtccttgtgatacagacattgggcgtcgagaatatcgtccaatgtccgctcgcctccgtggggtgcccctcgggcacgagagacgggtggtccgacagcgtggacttcttcgtgaggcctcttctcccaacacttgtcaggttgttggttcgtgtcgcgtcgtggtgccggtggtgtaggcttcgttcctccaatgaggtcttgagcctgttcgtcggcggtgatgtagcggtccgcttc

SEQ ID NO: 70549 - DNA, 476 bp, Zea Mays
cagttgccctatccctggatcgaactaatcggaacattcaccgttgacatctccttccttgcgtcctccagatcccatcgttttcttccttctacccaaaccgcacctaccgcctccttgccttcttcctcgcgcccttctgtttacctgatccccttgttgtgctacccctaggagcagctgcttggtcgccccatggaggcatcgccgccaaccatctatccctaagtcggcgtccccatctcctattacatagcgtcatccttctcttcttagacaatcaccccctacattgacgcccttgtgggcacttccccctaccccactagcagcaatcgcacttgcgtgcacaaccgtcgccccccacgtgcacttccccctgccccacgatctcttgtccccattacccattaatggaccacgagcaacgtgtccaagaggttgcaatcaatgctcgacgcaagtcatcgctccag

SEQ ID NO: 70550 - DNA, 788 bp, Zea Mays
gaatttccggttcatttcttgtcatctctggccatataccatctcgcctgaatcttatatatatgtgtccagtttctggttccacactggatctccaatgattaattgaagtaaacatatcgaaacaactctcgctgcatccgaagaagaaagcaaagagacagggctcggtgacaaaaacaagcgcagcagcctgagatcgatcgagtatatggaatgcaacagcgaccgctctcacgtcttcttgctcatatatatataagtgtttcgttcgatcgatcgagtagtgattccgtccctgcttctattctctctgccgattctcctgctgttccacgctggagctagcataggtattctgttgtgtagcagaagagacaaagatcgatggcaaggcgagaagacgactcctataccaacgcatcggtgttcgagacgtccgtggaggatgggaggaaggacaagtcggaatcatacgccgtcgacgagccgcctcagcctgttgacgatgcgctctgcggcatgtcgacctccgtttctttcattcagcaggtgatcacagaggaccatcttgtctcgcatcgcatgcattcccttgacctagatttctctgcttgttgcgcttggttctgccatgcatccagctcattgccgagttcctggcaacgttcttcctgatctttgccggctgcggggtcatcgcggtgaacgacaagaacggcatggccacgttcccaggcatcgccgtggtgtgggggatggtcgtcatggccatgatctacgccgtc

SEQ ID NO: 70551 - DNA, 334 bp, Zea Mays
aaaaagcgtaagatacattgaatttgcagaggaatacctcaccctcgcatcccacacaccatcaccaccaacaaaccccaccctagcttagttgtaagtactacgacaaaacactttgtccgctccacccccataacaaaacttgggctcaatttactcatgacgctatttcaattgatccagtatatctcctaatgagatttgtccttttgtttctctgcatacaagttgagttttcacattcaaattccatggggtgatagaggacaaaaatgttcatagttgcttttcatgaaatttggtatcccaaatattaatttagtattagatggtc

SEQ ID NO: 70552 - DNA, 399 bp, Zea Mays
cttacttgtggttagcagatgctaacgattaagagcgatcaaggtctagtttggccctcgtcccaacacatagctcacccaaatgcatggatgttggcttggccttgccccaccctactcacacctgcggtagacccacataggagacacctgggtgccaccataatgactcatgcccatgcctagaccaccttgcctctctagtatcaactgtctttttgcccatgtctagttccctttacctcattgatcctttccaccttcgtgtctatgcccccaatctcattggtgttgaccgcggccatggccatgcatgcccttgtcttttctgttggtaggcaccatcatgcccatgttgcccctttcccctcatgtatgacagttgttgcatctgtggcg

SEQ ID NO: 70553 - DNA, 633 bp, Zea Mays
accactagccagcagataaagccaactcagagcacaacatcagcacaacagctgaaatcaaagctagttcctccagaaagaggcaaatggctcaacacaactagcaaaagatccagatagcttaaattccccttgagaatctctcttcctttgatgggaacagtagaagcctgagatgcacaaaatctctcctccttgttaggaggccagagactctcaaaatttctcccgattgttgacaaatggactcatcaagcacaaacaagtgtagaaacagacactccctcgtcgtcaagaccccccctgagaaaatgcagaaatgcaaagaaaggggaaaatggagaaaaaatgtaggagtttcaggagcataccaatcagagtgtaaaactgatctaagtggtgttgtgctatgtgtgcagcagtaaatgcacgtgcaagcaaatgcccaaactgatcaaatacataagatgtgtagtataagcattttgattcaattttaagcagttcaaaagagaagttcactactacagacatcactaggcatatagtaagcagggaatcaactaagtgctagtcaaggtaaactaggtgaactaccccaaatagcaatcacttatcatgctagaaacatat

SEQ ID NO: 70554 - DNA, 474 bp, Zea Mays
gttggatactccaacagttcctttaaatgtgacatgtggcacaatatgtacagtcgtcgggaggctatggatgatctgatacgttgaggaatggattggggagggatgaaacacaccaaaatataagagagatgaggctgtggatgcgggacgctaattttttgggggaagaattagggagctgttggagtaagaaaaaccattattattgactagtatctgttttggggttagtttacacgttcttttggagttgctctaaggggactcactgcactctgtgtgtggtggatatttgagagcacctagagggaagggggagggggtgtgaataggtgatcctgcaaaatataacttaaaacacacaaacatggtctaaaagttagagttagtgcaaattaaaccaagtttgtgaggagagaaagaaagagaagttcccttcacttgattactctatcaagatatgaattagac

SEQ ID NO: 70555 - DNA, 403 bp, Zea Mays
agacaatacgcccaggggctggcaaggaactgaagataacaaaagagacggttcgtcttattttgggattgccaagtgctggagggggcagggagtttactgattggtatggtgaagtggatgctgctgcaaaactgagacgtgatctcaaaatttgtaaagaagagtttgatgttgtcaaggttcaggacaagatagtgcttggcaatgatgatgagttatcaatcatatgctttttctgtttttattcaatcgacttctttttccatctgctttatggggcattacgaacaatgaggtactaatgacttcaaacatggcccggatggctgatattgactggtgtcaactagtttatactgatttgtgtgatgctgccagtcgttggcacaaaaggaacaaa

SEQ ID NO: 70556 - DNA, 288 bp, Zea Mays
tgaatgttcttgaaaacaaaatcggcaaccacagcctcggcagtcagacccttctccttcaacaatccaacctcagcaagcagagccccggcctcagctacctccaggtctgtgggggatttagtccaacttagagtgcagacatctggctgtctccctgaccgaggggggagggagttccagtgattctccacgataaaccattccaggcgccatcctttgatgctgtccttgagtgggatgtcgaggtactcggttttcctcccacgacgcatctccaaactcgca

SEQ ID NO: 70557 - DNA, 802 bp, Zea Mays
agaaagagtggttacatggaaaaccacttaactccctattgcaacgttgttgtaaataagagggggagaagtatggtcacaaattgggattaagattcttgcaagcagttgaaggctagaccttctgagatagtaaatgcagaccatctattcgttggtaaccaaccaagtgttggtggacacctaaaggatatagattatcctgtgaatgaaagacattcacaacctagctcagtgcgcaccgatgaggctaggttatcgaaagccctttattctcgttttgggatttcacgagaaaccataagggtacataagaaaatgacttcatgtcaactggagaattgtgttatttaaaagctacaagtgtcgacacatacatctcagcaattgtatatgcgctccaagtgatccaaaatactatggccatagcagagcacgagtatgctcaaactggatcttgttgagtgatacaatgttgcagagatagccttgctcaccggaaagaagtgttaacttattttcacttcatggtatcttactgtggatacaagtttgttttcatggacttggaaacaatgaggtggtgagaaagcatggctagtagcaactaggtttatacgcaaacccaagcattatttaatgctataaattctcctctactgtgagtagttaaatttcgatacaataatatgggcagtaaatcatctatctttgcagttggtagatgtagtgacaacatatgcttatgtggtcactggattatggtatttgtggagtcttgaaggattccaaatacataatc

SEQ ID NO: 70558 - DNA, 1044 bp, Zea Mays
gcccgcactcgccgccgccatctgcatctacctcctcgtcatgtttggtttcagagatccgccactttcctctgcgttttttttcgggatccttttgtctttccatggtagggtgcgatgacgaggtacacacaaccctgatcaatcgcctccgatggcgatctgatgttcaccttttacctttggttcgtattcgctgagcatccgatcttcttcatctatcgaggccagcattttttgtttctttttttttcttgctcggtttgctttggatcgagggacctggggatccgccgcccttcttcgtgcggcgtcatccagtttttacccctcgaatacggcttgcaggcgcgtcctagccatctcgctctctgcataatcctctgcgagacccgggctcgtatgccacattcgtcgttgtcaaactaaacaaaaaaaataggcttttgtcgcgaagatcccagcagagaggtgcgctgatgcctccctaacaatcataatcttcgcagagaaacgctcatgatccgtggtttcgtggatgtgtgatttggatttttgttccattacatctgtttccacggcgacattttcatgattactgcagcgaactgaacgagggacctatggatggactgctctttgtccgtgttgtgccgtccaagtttgccttcggatagtaaaaccagcaatctggtcacgagatctcgcaagccttttcatgtttgtgggaatggtgtgccaatttgccaaattttgggtttctatcgttatcttcataggtcgtaattttgccaggatatagcgccggaaccccatactgaggtcgtcgttattgcagtcataagcgacgatgaaactttgaacagaccagaatgttcttgcagtcacaagtggttgtctaaatttggatattgaacagaattacttccagttgaacctaccgcttcaacaattggcatacttgcctgagtggctaacgatccatgcaatactgcactattattaattggagcccgagacaccacctcaaatttcataacgtcg

SEQ ID NO: 70559 - DNA, 800 bp, Zea Mays
tttcactgcacgcgtaccggcagacatgcatggctcttcagttcgcgcccggcatgcagtgcatccttcctacgacctcacctagcctagttagctccatcctattcatcatctaatgctacgtactcctactgcactactccacacatgcactagccgacctacttcctctatgttcttagctatccatcggagtggccgtggcccgtggccgtggtgttgtgcagtagagaccagacagtaccaccgtagcagccatcttttctgttgggctggtgattcgatttgggccgaaggcgtcgttgggctggaataaacgggccaactcgctaaacgtgccaggctccgggcgcctgttaaaaagttccgttgttgtatggcagtggcagacaagaacagaagctccatagaatctaactactgataaccgacccacttagcaactaagctcgtgcatattttgtgttgtatgctacatcctcgattctaaattgttagcttcgtctttccttttagaaagttttttctattttaaactttgcaagaatcttgcacacagttgtcctttattagtacaaatttttcacatctatacgttgaagaatgttttaaaaaaatgcaaaaatggagagactacgtgagactaacggcacactaaaagcaaagcctattataaggcaaccaccaatttttgacaaaaatatccattgctatggtctcaattgactggcatgccctcttcaaaatgggtcgtatagaccacaacatgtagactatctgataggtcatcttgtaaatac

SEQ ID NO: 70560 - DNA, 449 bp, Zea Mays
gacagattggacgtttggtagatggctcttggctggtcttcactccgctctgcgcttcaatgcctctgctgactagacttgcagttcagtagctatatttggatttcctttgatctctatcgatctcttccttctgtctcagtacattcattgcgtatactgtatggatatgacttcttcagaaaatccaatgaaaattcctggccgtccccctccaatgggtgtgaccaaggggcatcttggtatgcagagcgtttagcacactgtcctagagtagtaacttggtgtgactgtggggtgtaatcataccgcccgagcagttgaccttggtccaaatggtgtcatgttacgcgaagcggcgtctgttgcctgactcattttccggtggcttgaattgcttattgaatacttgcgactgttcggcgagcgcggtaggaagtggacagtca

SEQ ID NO: 70561 - DNA, 497 bp, Zea Mays
gccagcgctccctctctgtgcctggcggtttcctcctctcactggtgatctcccaccaccggaggccaccgtctccaactgtgctctggcgacctcgtgcccctctccttccctccttggtgagcagcccatctctccctcagttctcctccctctttgttctggtgagcagaggctcccatttccaccccttttgcccaaattccaaatcctgtgaaatcttgtgcatccatgttgtggtatgtgtgtctctgtgtgtattgagcatccttgcaggtttctagctccttcgggagggttttcccacctcaaatagccgtttcaccgaaaccctagaactccgcacgtcgtgctcggtgaaatgcccaaaccagccaaaaatgctccaattgaacccaaatttttcaggcaccttcacaacacttccagtaacactcttgccaaatttcacgccaatccgagattccaggcttaaatttcaccaaattccccgtttc

SEQ ID NO: 70562 - DNA, 532 bp, Zea Mays
atctaacgcggtctaattcaattggtcgagtcgagaagcatcaagagcatataagagagctgaaacaagagcgaggagggcatgatcggacctgtggagagctggccacggcgagctcacacactacggtgttcttgacagatttgggggaaattcgaaattagagcactctggtggataatctgaggcaaggctggtgcgttgggtgtgtgattacctagcggagctgatggcacgattaatttatagggcccaagggcggtggctcctaatttgggcatggcgtgctggcggccgtagagaggggagagcactggcgcaaaggattcgtggctttcaccgtggcaaggtcaccggcgacgaccggacaggcttcagtggtttactacgacgtggtaaagccctaaagcacgtggcgcacggtcggtaggcggccaactctggcaaggaccattttgcctgaccgcagcccaagtgggtacgacgatctcaccattgaccgggtccaagcctatccggtgccaagattttt

SEQ ID NO: 70563 - DNA, 780 bp, Zea Mays
cttgttgaaggagagaggtctgaccgctgaagctttggttgcagactttgtttttaagaatattcagccactgaaggatagggcatacctagcttatttgtatagtggtgtcaccgattcaacccgggttactaacaagaggattcctgctgtggatttggtgagtcgactggaaatgatccttataggcaaggtatcgaacattggtgctcctgttgcatattctgcttggaatctgccgccttccaagtcctttctcgatttcgtgtcaaatcctcctgctagtgacagtggtttgggtcttagagtgtgaccctctcttgaaaaagttgaggttctggttgcttcacttggagatcttcccaacgatgagaggcaagttcattttgagatgcctatgagtctgggtgatgcagagataagcgctatgctggacatgttggttggggattcttctgactcggttcctgatgaaacaatggctattgcaattatcccagagcctgagaaaatcgtggatactcgaaggccgaagggtactcgcccgaaacgctttcgccaagtcaatcattcagttgctcctgccgaggggaagaaaaagaaaaagagacggcttcggtgagtgtcatgcttggatcgtgatgccggcccttctgcccctactgctgaagaagtactagtggaactctttactggggctgaacccgacgggtgtgttcctgctgatgctgatcccaatgggtgtgaccctgccagagctgatcccaatggctgtgaccc

SEQ ID NO: 70564 - DNA, 908 bp, Zea Mays
atcagataatgcgcgcggaggaggtgccaaggggatggataggaggggcgacgcgtgactgcgtgagcgtgactgcatgagtcgaagcgccgggcgccggccgacggtttcgtgcagaggcgtgggcgcgtggctgatgtttggcgggctgttgggtaattgctgggctgctgtggactctctctgttggctgatctgggccgtacaagttttggttgtttggcgacttccgctagctagtctagtacaactgtactagcagacaagcagtactctgctgcgtttttgtcttatcccgacatggcaacgcctgttccaacaaggcgtttccaagatcaattccgcacgaggacagaagcccgcccacagaaacaacacgatcaaagtgttacaaaattaccggggacaaaaattaatttaataatacaacataaaatgtagagatcaagataatatccatcaggggcggagcgcccgttatggctgtgtatggctcacgtcataccttgttttgaccattgccatcatcgcatacccgtagccatagcaccgtcgcacgcacagtcgtgaactcatgatctccgatcgaccacttcgcctgctccagtgcccgacttcagctctcgtgctgactgtggcgtgcgatgcgtggttgtgggacgtggtcgtgcccttgttggcttctcctgccaattacgatgtgtgggtagcggtcgtgcacccgtgcactatggccgatgcccacgtgcccttccggcctctccagcactagccactagcaaactgtagaccgctagatgcccaagccccaatctcgctcatgtggcgagcgtccaagtccaacctctccctcggtcgatcgatagcagccccctcgttacgctgtactaagtcataccttatttttg

SEQ ID NO: 70565 - DNA, 519 bp, Zea Mays
gttggcaaggcttgttcagtgatcaaacagactctttaccatattgttgagaaacagtataatctatctgatgtttttgctgagttaattgatgaggtcctccgtgctgagtcagaggagaatgaagatggttctgatgtgcagcaaccatccaagaaatcagatgatattcatcaccattcggcaggttagtcagttttatggtctttacgtgactgccaacagttatacaaaccttttcaatatggttatgatgccattattaaataatttatttctgttgcttaaatgttacgtaaagaaggacgtaggagtttggccacccaaactgtaccggagatgtctactccagcatcgcagcttgagacgcagttgacagacacacatgtacaagaattactgttaagacaacaacatattcgtgtactattacaaagttgccctgatgaagttgacattgatccactggtgcatacaaatataacgaaacatcccaaaacacctacaactccagtggta

SEQ ID NO: 70566 - DNA, 382 bp, Zea Mays
ccgatctgcgtctttctaggtacaaggtacaaggtacgcttcatcgcatcgccttcgtctacacctcggattcatccgggttcgtttcaaaccgtacctagggttacctttagggtttacttgtactttaccttgtttctgtgctacgatttatgtgttcatcgcctactttgagtagttagggttgcggttacgtctgatatccgatgcgacaaatgtttaagtagaagaaccaagtttgatattgtggtacacatagatcttaacatatcctcaatcacctattgctaactgatctgtgcttatgaagttaaaaatggatgcttcgttactatggttcaaaggaaacaacattgggacttcagtgtcatttccatattcc

SEQ ID NO: 70567 - DNA, 323 bp, Zea Mays
caagttcttaaatactagttagttgatgattaggaaaatgtggacatagtatgcctagccatcttattaggtcagataaggtacggttatagcaagtataggtcttggcatggaagagtataataaggaaatatttcatcctgaactgtggatcttgattcctcttaagttggatttgactcatctccttccttgtcgaggttgagctcttcttttcagaccttggtgtctttcttcttggggttgccatcagagtttggggcatatggttaagacagatttgtggctgacaagtaggtagagcagctagtttagtaggtggc

SEQ ID NO: 70568 - DNA, 311 bp, Zea Mays
gggaaaccctggaccggatgtataatgaatcagatgttggacgtgaactttatgttaatgagcagtaccatgaatactggatggtcgatgaccattctgtcgtggaataggctcatgaaatctagcttctagtgggggaacttgcacactttgattgtgtcttgcctaacaagttcgtggttggtggcatcattgccaaattacctcctacttggaggaattttgccacgactctcaaacacaagaaggaggcaatgactgttgaaagtctaattcctactcttgatgttgaggagaaggcgagatctaaa

SEQ ID NO: 70569 - DNA, 301 bp, Zea Mays
ttgaactataaaagggtgggacttctttcttctaggacacaagcatacttgttgtaacacactctttgcaatactacgataagcactacactggagtagcgtgtgaacccgaacaagtaaaacccctgtgtctcagatctcttgatcgaatcccagcggttcaccatttggagtgagtccacactagcatccacacatccacaccgaacacaaatattattgtccccggattcccaaaaacacgacaaaaggatatgaaggcctgattagcacacctacaaaggaaaagaaaataataccc

SEQ ID NO: 70570 - DNA, 570 bp, Zea Mays
gtcgctcttgcctacatggaaggcagcaacgatcaccctccggcggccgctggccggtctttgttgacgctgctgctcctgcttggcctacagctaatgcgcacgcatcacccgtggccatgatgggatgggatgggatggagttgctaggtcggctcggtgtaagtataaaataatataaaagctgtgagagagtgcgagacaattctcaggcgacgatgatgactcctgaaagacacgtccgaccaaacactagcgcagctagctagctgtagagacctagcactacgcaccaagcgactccagcgtcaacaagtattggaattgcatggagggtgtggccaaagcagggataaggttccgagagcgcatggccgcatggggtgtggataaatgtacacgtcgatgcagggtatcgccttaaatgggtgacgtgatgcacgcacagcgactgggacacacccggcagacgcgcagtcaaatcgaaggtatgttatggagcgcccacattccctcacgtcaactccagcgaccggcggcgcagtagaagggaaaggaattgcagccggc

SEQ ID NO: 70571 - DNA, 746 bp, Zea Mays
cacaaactagcaaaatcagtacgatctatgaaattaatacatcccaaaatgtaaatcatcgtggagtaccctttctcagtaggcggcggcgcaagaacacgatgtgcaaccatttgtgaattgaaataaaaaaggcatcgcataatcatcttgcgtcatggattccccaccgacaggatccatcgcaagagcagtttgcatcgacctctgcttggttgaagaccgctgtcgcctgaacctgcttgtccagtgcgcgcgaactgcagaccgagagagattggatgaaacgcgtaggcggcaaaagggcgcgggaacggaaaccaccatctagattgggagcctgctggtcggcggagatttgtgcacatgatgaggttgtattcgcgtgcgaggctttaggggcaagagttgagagtctgttggacacatggttttcctttttttccaaaaaaaaattaattggaacaatggtttaaggaattattggagtcgctctaatgaacaaaacgacgaactaaattaaaactaaacacccctatatgaccggcaactatcaattcggatagacgcacgtcctagttacagatgcagacacgtctaacttgtgaacttgtggtcaaatgcatacgatagagggtgggaaatagccgtgcgcgccagcaaacacggaccaaaacgttcccgctcggcgccggaaaaaacaaatcggattaattaaaacgcacactgatggaggttactatttt

SEQ ID NO: 70572 - DNA, 899 bp, Zea Mays
cgaccatcgtggaaaacaatgcacaaattatgcaagtggcatgaggaatcaatcattcttctttcttattgtctacgaaacaagaccgaaaactgcattatcaggcataggcgttcataaggaaagttttgatgatcaaacccttggttattgattcttgagtcttgacgaagggcacagcccaagaagcaacaaatcgaagtcgagaaagttgctgatgaaggtgaagactgaattcaggatactcttttctaaacaactttgaagagtatgtttcaacacattgcctttggccggaacaactttgaattcagaaaaaaggaatcctgtgccggagtgagaccattcgaggatataaactttgaatatcagtttgactggtgcatcgagagattggtaatatgctggattcggagtgagaccattcgaagacaagccggcctggccaggaggagaatgcccttgtcatctgggaatgcataatagtagtccctccgattaaaatttagtaagttggatataaacattacgtgtattggcatgaactatctggaacgtgcaagctagaagattgctgctgctggagactggtggtagaaacgagcatccccagccacctagacacgctcctcctactcctagtcaggagaatgagaagacgaagcccaacagacacggacgaccccagaaaaaaccaagacatgatccaactagaaattcaaaaggggcacctgctcctaaagcctggccatcaccatctgcttctggatctcatcatccatcggcagcgcctccccgaccgcatagacactcctccagagagtacagcttggtcgctgcagggagtgcagtttttcttgtcatggctgcagcttgccagcttctgttatgtactgtcg

SEQ ID NO: 70573 - DNA, 709 bp, Zea Mays
atcaccctgagtgtgtcgtgctgatttcgagttgtgcccgacctaggtcagttgttgatcaagaacttgtatgccttggaaaatggaagctttattgataatgaaaccttctgcttacaaagtacaacttgtcctcaagagttttgaggcattgctaggggaagaatttcctgaggtgttcaatattccatgaattccccacttcagtgttgtccatctgggtgagccggtaggatcccggtcatgtgacctctgcaacgatgaatggtccttcctatagtggtgacagtttgtgccgtccctcccctgtcagcactcggtgaaggaccaaatctcccactgtgaaggatcgatgttgcactgctttgtcgtggtagagcctcggggtctgctggtttctggccgactgaattaccacatttatccgttcttcctccagtacatcgatgtcttcctgcctagttgcttctgcttcggctatgctttcgaacgttaatctgggtgcttcaaagatcagatctgctggtagcactgcctccgacccatacaccatgaagaatggggtgtttccgtgtaaagcttggcttggctgggttcgcaggctccagactacatatggcagttccccaatccactttcctgcgagcttctcgcttttgtcgaacacctttttcctgagtgcatcgagtatcatcctgttggctctttg

SEQ ID NO: 70574 - DNA, 446 bp, Zea Mays
aattgatggtgcatggtgaaaccggccgtgtagcctcaatccccaaccccaatttcaaccagagccgccgcaacaccaattctcccctttctctgtcaccgacaagtctaagtcttccgcgctccgtggccagccctctctggtaaggcactgcccgattcaagcattgttttagtaactccgagtacccttagtgctcatcgtagcagccaattggtcaattaggacatgattgactgggaacgtgagctcgacgtccctgcttccgccatgagcgtggatagaacactttcttggtgtgcgagtcgaaattgaaggatgttctcggatcgccttaggtcaggaatgtccattccgtagccattttagacagccaccgccaatcatggctggaacaagtcgcatggtgctcggcggcaagcacgccgtggccaggggtactcgtg

SEQ ID NO: 70575 - DNA, 495 bp, Zea Mays
cgggcttggtgttggctatttttgtggacatatggtagattacaatgaggttggtatttctttttgtttgcatcagctgtaatgttgcacccgtacttaatgtcttttgtgtaggagacgaggaaatgcagttgggagagatacgatgagaaagaagaggtgacacatacaataaagtccaagagactaatgggacagaagatgcgttgtggatctcagctcgtcgattcatacattaaatattgcagagaagacatgcgtaggttcgcgtaatcaatgtggtttaacagcctgatgcgtgcagagcggaggggattgaaggcggcaaatgagaagagagcacatgatgcaagggaatgggaggcggctagagccgagtaacagatgttgggaaatcttgtaggtcgtctgagtggaagtgtcgcttgtacattttatttttcctgtctttgcaaacttacttgtcccattatatttgcagagattggatgtgtc

SEQ ID NO: 70576 - DNA, 618 bp, Zea Mays
ggaaaatttgcacgctgaccggtgggccgctccctctaccgttctcttgctctctgactgatggtcccgggatcgccaacctctccctgctcgtgcgtgtgttttctattcctgacaagccgacccactctccatgccctaccgttagctcctcaagcagcacgtcactggcaatcgggcccgggccgtcaacgcctcctccctactacccacgccgaaatcccgtccgcggaagtcgctgaaccactcaagcttggtggccgccatggccgtcgccggagatctcggggtcttcccttccccgccaacgaacatccctctgcgcggactcactctcctctataaaaggatggccgcgtaaacccaaaatatcatgccatagactccgggtgagagagagatcagggcattgccggtgcctttcggatgcctcgctggtcgggccaaattgggaggacagggagcttcaccgacacccacctcgtgtttgcgtgacctttcggggtggggaatggcgggactcgtcgggatttcgtcgccgaacctggtggcgccaccgcagagccacctgtaccgtgggcggggtacgtaggcgtcctatatccaggtaaaagtccc

SEQ ID NO: 70577 - DNA, 697 bp, Zea Mays
gcacgacaagccaggagatctacacgacgaggagaagatatccattatccacggaccgacgctccacttactccatatctaggcccacttgttggggctcgggcactatgtacatgcctcccttgggctataaaagggaaggcacacataaggtaatagacaacctcacaagaacacacagagactcctatgcaataaaacacacggagactcctagacaatacaacttacaacggatgtacggtccaaaccccgcacacaaacaaatctaacactctgtgtgtccttgagttcatcctactagcgccaaatcctacaccgtcggtcctcgtcttagtccgacatttaacgcgccaggtagaggcggggcgcttagcctggccccttgctgatgacatcccactcatccatcgacaagctcggtagaggtggattcaccaacatttggcgaaaggcgaaaaagcaacgcctcaagatgcttgccatcgttcttaggtggcacctcaacagtcgtgccaacaccatcaggcagaaagcgggggaaacctcaagcatgatgcttggggttaccgctgttggcgctcctctaggccttgtgatgcccagggtcacaagcgtcaaaccccaacagagcacagtggtattcgaggtggccactgccatccggaagccaagcacgaacgaggtcgtcgccgac

SEQ ID NO: 70578 - DNA, 1020 bp, Zea Mays
gtcatactctataagcaatatgctcttggatcaaatccctcgtgccgatgtaggtgcatatagtattgaaagccgtctagcacacttgcatatcatttcctagtgcgactgaaagtcttctgatgccgaagcatgaccatataggacgttgaatgatgccccttatatcctccctctggtctaggttgttttcacataaaaccactcctgcatccaagagcccggccacttcttccaaaatgtaagaataggataactagcctcagagaggggcacaaagctgtagcagccgaagttgttatggtattgttctttcccagtcgctatcgtctaatatgataattcatgaatattacagaagcacccggcgtctggctctaacccttggctcctcatggcccatataaaaacccctaatttgataagagcctcggggataagttgatgaaggtatatttcaaaagtttttagaacttcgaccaacatcttatccagggggaaccgaagtccggctttcatgaagcttctaaaaaccaccacttcattagcttcagggagaggaacggtactctcccctccggccctcacaattgaaatgtcacgaaagtatctacctttcatcgcttcaacctgcccttgcttaacagtcaactttccaaaacaacatggctcggcctccatggctagtcttcgacttcttcatttccactttctatgtcaaaactttcactatcgctggaattttcagataacccgaccaacatctcattggtgattttctctatattggtcttctccatagcttcgtaaaacctagccagtgcagggtcagtgatcttcttttcctcagtcatttagacgattgttgagcaaatgtcgaagctcaaaagttaatcgagctcaagaaagcaaataaggttaaaatagcatgcacagtacaagcagttagacaacacgaaaaatactcacaacacaggtctctatatatacactcagagccccacaacgtggtgggaccca

SEQ ID NO: 70579 - DNA, 601 bp, Zea Mays
ctaaaccatgttttctgatcgtccgattaatcaagattaattgacaattaatcaggtggtcagaactgcacactcaattaggcttaacaacgtgattagaacgattagaaaactgatcgtctgactaatcgtggattagtcacgattaattgtacaattatatcatggacggtcactttttttacccagtcattcaggcccaatcaagcaagctcacgcttcccttccccattggcagcaagccaacaactccctcagtccctcgtggttctctctcctctgcacggacctcccttcctcgccaacacaactccagcacgcttcccttccatgccagcacaacaccagcacgcctccattcccggccgacacaactctccactggtgcctcccttccatatggttgaagaaaccgattaatcagatcgttcaattaatcaattagatcggctgatcagccctctggcgaccagcaacgatcaactgataagaaaacgttgatcctaaatgacagaattgtaaacagtttttgtaagaaacaacaggattgtaaacactgttacacaaggatacccacataattggcactcacaagctactt

SEQ ID NO: 70580 - DNA, 707 bp, Zea Mays
gcaacacatatatcttctcacgtcacatctagatcaactactttatggaggacatcatgagcaattctaattatggtaacatgtccctttgcctccggtttaggttgcacttaaggatacaaagtaaaattgtctctaccatatttggttatgtatattgtggattcatgaataggatttgctattaccgtgtttggtagtagatctatggtttttttcaaatatataccattatgaaaatcgattattcaaaagatgacattatgatttgtgatatcttgtggtcgccattattcgatcaaaaaaatttggtccacgctattatctacgttcgtgcgtataggactcacctgagaaaacgaaaatgcccttattgacttccttctacctcccatctccatcgcacggtggcactgatttactcaaatcttaccctctcttcatgatgatgcgaaagcggtggtagctacggcgaacccatcgatggtcatcgaactagggactgccatggggatcgcctcctcctaggcgaccatcgtcccgagacacacgttatccggtcaccacgacaccgctgggactgccgttgtcgctcgccacacactgctctgtgccatcgtggctgaccacctccaaccccatcctcgcttgctccctccttgtcttctacgtcgattgcaaggaatggaacgatgccaccagggtgt

SEQ ID NO: 70581 - DNA, 282 bp, Zea Mays
tacatcatacaaagacaagattatcagctcattaaaagatgataccaatgaagaaaaaggaggtacaatctattccactttcactaacccgtcagatttccttcttctacataaacttctaatactcatattgtaacaatctcactttcatacaatgttaccacgtaatcgagttttgaaatcgcgtgcaggacgtgtggcatacactggtttgttcatcaatctctgccacaataagcagcattgaattaatctggcaacccagtacagtagtatccatgc

SEQ ID NO: 70582 - DNA, 283 bp, Zea Mays
ccaaaaccaagagacgatgaggtcattatgtttaagagcttcttcagagcaggactttggttccctctatatgaaatgattgatgaagttttaaagaagtttgaaatttaccttcatcagctgactccaaatgctataatcagacttaatgtatatatatgggctctccaagccaaggaaggagtgccaacgctgaaggattttggcgggtacatgaactccattaccagactaaggctagagctgatggttgcattagaactttgggtgttacaattttgca

SEQ ID NO: 70583 - DNA, 554 bp, Zea Mays
catcagtacaacttgtttgaaattcttacctagtgaatgcactctaggtgtaacaaacacatgatatgcccatgcacatgacgtatgctcaagttttagtgatagtaacaccataggtgttacatccttccccccataaaagaatctcgtcccgagatttaaggtcctagggcaagtagtggaaaaggaaacacgtcacatttttatttccttgtttgtcgtacagagcaggtggtggtatgggtctattctatctttacaaacaattgtacatatctcacaaattacatgaagctaaaaatccagggaaattcttttcgaagaagtcttgggtttcccatgttgcgacctttcctgggtttcccatgtagcttcatcttccgtatgttggttccattgtatcttatagaatttaagagttcttcttcgggtgatcatgtccttctgatccagaattcgaatgggatattctgaatatgttaattctggttccaaggtaacatccatcacatcaatggttcgatctggaacccgaagacagttcttcaattagg

SEQ ID NO: 70584 - DNA, 465 bp, Zea Mays
gccaaccaaactttggccccacctgtaggctcgttccctcccctgaggcgggcccgggggccactgtcggtaccctgaatcaggggtaccccttactacagtatgaagacacggtgcctgtgcagctatctttggccgcgtggtgaacaacacccgactccaccatgtgggcggctccaaggacgccacgtgaccagaagaggtgatatactccaggatgccgtcagtgggtccggacctccacaagagagcgtcggacccctgtacactcaacccgggcctccaagtacagttcaggactcccaagtaagcaagccagaccccttgggtgggatccgaacccctctgagtgaggtccggaccacctacagcaaggtcccgggacagggaataccctggcctatatcaaggacaggcaagggtccagtactgacacgtgtccaggcttcgacctgtgcgcttccg

SEQ ID NO: 70585 - DNA, 415 bp, Zea Mays
gttttgaattctttatattccaactttttagcaactgtatggtggaaaaggtgccttacaaccataacctatgtttggacagttctctcatgaaattttgctaaatattccatggtctttattttattttgagaaacgatgtggcataatgatgtatggtgttttacttgagtggacataaacactgtctaggtatgctttgaatagagggaattatggaaaacttggcatccaaaagtcattagctagcctaataaagttttcatctagtagttatactctaataccctctcgtgcgaatacaatgccctcaatatcatagaaacacaattttaggtctaaaaggtgatctattgttttgaattctttatattccaactttttagcaactgtatggtggaaaaatgtgccttac

SEQ ID NO: 70586 - DNA, 335 bp, Zea Mays
ccactttcctcgtggtcaaccatctcttccatagtcaacgcatgtttacggtatttcaatctcctgtttatgcataaaagagatttagcgtaaatacttcatccgacccacgttccagaaatacaggattaggcccactaccccactttccacgcggtcaaacaattctataccctaactccgcgcacggtcaaccttcctagccgactcgccacgattcttcaggcgtctccagggcgattcgacttcctcctctcccgctagtgcgattcgctgtcctccgctgccgcacgccctcaactctaatctccgccgccgttgacagtatcgtcgag

SEQ ID NO: 70587 - DNA, 320 bp, Zea Mays
gcgacgcgcctccaccgccccttccgtacctcctcctcctcctcctcgggacacacggccaagcaccaagcgaccaaacgcgcgccaccttgattgaactcgaagcaagcaaggaaaggccctaatggcggggacgcgctgggggcggtggctggggctggtgacggcggtgtgggtgcagtgcatctccggcaacaactacaccttctccaactactcgcacgcgctcaagacgctcatgggcctcacgcagctgcagctcaacggcctctccgtcgccaaggacgtcggcaaggcgttcggcctcctcgcggggctgg

SEQ ID NO: 70588 - DNA, 984 bp, Zea Mays
tggcattccaagaaagatagtgtcagacagaggaacccagttcacctccaaattctggacaagccttcagaaagctatgggcaccaagctagactttagcaccgcctatcacccttagacagatgggcagacagaaagggtcaacaaggtcctcgaaggtctattaagagcctgtgtgttaaccttcgatagaagttgggaatccagtttgccttatgcagagttctcgtataataacagccatcaggccagcatcaagatgtcactgttcgaagcattgtatggacgaaaatgccagacccctctcatgtggtccaacgtaggggaaaaggcactggaaggacctgcctttgtcaaagatgctgaggagaaagttgccctgatccgcagaagattacttgaagctcagagtcggtagaagagttatgcggacaacaggcggagagaactcagatttgaggaaggagacttcgtctacctcaaggtctccccgatgcatggtgtcagaagattccaggtgaaagggaagctagcaccgcgattcgttggcccctatcccatcattggcagagtaggacccgcagcataccgtcttgatttaccagaatccatgtctgacatccacaatgtgtttcacgtgtcccagctccgcaaatgcctgcaagcaccagaaagtcacatcgaagaagaggcaatatagattcagaaagatcttcagtaccgtgagaagccaataaagattcttgattcagcaatccggaagacccgcaactcagaagtgaaactctgtaaagtttagtggagcagagaaggagaagaggaagctacctgggagagtgaggactctttgaggagggaatacccttatattttctcaaatccggtctaaatctcgagggcaagattcctttaagtggggtaggtttgtaactcccaaaatttcaacccaaggtttggaaccctaatctcccccccttatcttac

SEQ ID NO: 70589 - DNA, 494 bp, Zea Mays
gaccgacactagaagatcatcaagcacggggagatcgagatgtcatttctccttccttcgtcggaccccaatgtaagtaaatccaacgacctctagtccctcaaacagtacgttgatctacaagtgaatcaattgcaacaacgtattgggggcatagaagacacacttaagaaactcacgcgtacaatagaaaaatcagttgtgtctaattttccatcacgcgaggtcgcaataaacctagcctcaccaaaagaatcagctataaatgggtcctcacaaacccagctgttatacggtatgccgatgaatacattcacgagcaaccgtagcctccaccattttggggtaaacccacaaacctgtgcatggccggaccgtccgggtctgagcctggaccgtccgtccagcggcggctggttccatccctcgcaatgaaccaccgagatccacgccaggaccaacacactcggcgcaagggctaacagacatgctcg

SEQ ID NO: 70590 - DNA, 358 bp, Zea Mays
cccatatagcttacaggcccattaaacaattccaagtcacagattcgcaggccttatgccctcacgacaagctcatggcacgaagccaaccttatcccttccctgtttgtccctatactgagaacccgggcaagatgcagaaacaacaacaacaacgaagacaacaagcagcagaggtacgaagacccaaaactttggtacaaaccgaacaccgaaccgatcaaactgaagccgaaatcctcggttgttcatatttgtttccaccgatcagttcctatttcttccaaaccgaagttctactgcaccgaagaaccgaaccgaactgtcggttaaaactgattgcccacccctacccatg

SEQ ID NO: 70591 - DNA, 505 bp, Zea Mays
cacagaaggaaacacatcccctcgccgctatccacgcctcgcagcaatccagcacgcaggaatcccatcgccgatgacctgcgcgcgcaggaccaccccgcccaatcgttcttttcatgcaccgcggatgcgccccgcccatatcctccgcacccaaactcaatccacatctcgctaccatggaaggaatcgcaacccaatcctctcgtcaccatccagtgcacaggaccaacatcggcccacatcccatcgcaagtgcaggaccaccccgccatctcattcttcccattctacacgccaaccccgcctggatcttgcgatgctcgagtataagatggaagacacctctctgagcgctcaaatatgaacaccacacctctctgaaacacaaacagacttggtttacaaaatagagaactactcgtgtggctattcatctgacaatttcatatttgtgtttctaagttttttatgtatttccttttctctaattgactgtagtttt

SEQ ID NO: 70592 - DNA, 384 bp, Zea Mays
ggtccaggggctttgtcagacggtagctctttaatggcttcaaaggcttctttttctgtaataggtaagtccagatcctccaaattatgagagggcagccccaggtagttaagattaatagtgacagttctatccagtcttgttcctaacaagcttctgtagaagttatccaccagcatggctttgtcagcatgatcagtaaatacattatctccagagaccagttttgccacaaagttcttcttctttctatatctggcatgcatatggaatagtttggtgttagcatcaccctctctgagccagttgattcttgatctagtacgtgcaatggtgcgcttaaatgaggcaagggctaaggaatgctttttcagtccacatctc

SEQ ID NO: 70593 - DNA, 1134 bp, Zea Mays
cacgaggcgccgcgcgagctccgcgaaggggatgaggtgccccatgcacgggctgcacagcagcagcacgcgcggccgcgctgcggttttgcacgcaggtcccatggcgcgcgcgcaggtgagatgtgcgggctgacggaaggaacgatgaagagacaagggagatgacgagcacgggaggaacggtttgtgtgccccaccgccagtccgccaccgatggtgccccggtgaaggtgggagcttgaagtggagtgcttgcgcagttgtgtacttcttggacacttcgagggctcggcggtcatcaacttttatcctgcctgctagatccaaatgatgtatacatcattgcttgcgttatgtttgcaacttccactttcacaaccaaaataagtgaggactgaggacgggttccaaattgcctaagtcaaacttattagctttcaccgatgcaaatttgtgtaatgagtctagtatgattctgcgtagtcatggcaatttgattgctggattcacatattcgtcggatatccgttccaacggagctggatatagatacaatttttgacctgtgggtaaaactcgtatccgccctgaagtcgaatgggacgaattaagatattacctctcactcacgagttatccgaaatcgaccaatagcttattttttggcatagccatattacacaacaaaataaaccctaacttcataaaccttatgtctaacgctcacaattcccaccgttggttgtccttcttgctggcttactgcgatgtgtcacatgccccccttccaagtcacatagggcacaacatagttggtggctgccccttctaatctccaatgcccttggccatagctcgcatgcttataataattcttttgctaagtttttaattgtgtatgatggtgaattggaaagaaatttgattaattatactattgaatttttgaaaatgattatgtctgtcatatctgatggatatccgaaatccgttcgaaatctgatggatacgaacatagatatataattctacccagggtatgatcatgggtgcatattggttgcaaccacacatgtggttgcggacggacttttgcaatattcgatctgaatccgatccgttgtcatccct

SEQ ID NO: 70594 - DNA, 727 bp, Zea Mays
tttggtctagaatactgtagtgttagcagattctatggtatttctcaaaaaccatgaaaaaactccacttctaaacagacccttaattccccatagagtagccacacctatatatctaggttgagccatctcaaacaaattctaaccgaattcactaccattttaacgtatataaaaagagccccaagccgttaggggtttaatttttgacgctcccaccaccatgcacgagcgacagtcgcctacctagacgcgtgcggcggcggcgattccatgagagcgcacaacgtctagttgatattttatgtcaacgtcaatagttgatattttatgatactttgtttaagagataaggtgtggttgcctttttagcaccttgtattttttctcatttggtccttcttgagtacgtagcaccgagtctccatctacgcacaaaaagaaatgctaaagaagctatacaagggccaggagagaatttctgaacttaaatatgtgagcaatttaatatattaccggatcgctccaccgcagatacaaacgaatacataaaaagaactcataaattggctttaaaaagttgatgaaacgactatggaagaggaagataagggtgaagagtagtattgtgtcagttatatttatgggctatgtaatttttatctatatatttaagttacgtgatatttaattgttttatgagtcatgtaatttcattggaatttgg

SEQ ID NO: 70595 - DNA, 324 bp, Zea Mays
atcgtctagaggcgtcttgcgtggcataccgatttaaaggcaaaccctaggatctctcctctctgacgaaatctctctcgagggttagatccaggtgttgttggtaaatgccaccacctctgcgcacatgcggactgctggccactagatatggaccattcggctcggtgcatagaagactcagcttctgccgcaggtcgctgggtccgtgctgtcgcagagagcaccgctgccggtacacctcacagtgattgatgcccagatcggcaccaacacatgggaagtcgtcttcttgggtggcagagatgcttgccactgctcgtc

SEQ ID NO: 70596 - DNA, 439 bp, Zea Mays
atcttaatttatctttagcttccaacatcctatctacatgtgtctagctagagttactcaccacactcgatcgggaacatggctagagttgtcactgtatttctctaatgataatgtcatgtaatttttttctgtgactgtcagtggtcaccgaggtttaagggagcaacttaatttaggacgggatttttaaatacggtataacatttttggcacgcacaagcacaaaaccagtaccgccgcagtttgttttggtacaactgctgatactagcagctacagtgaatcctatctgtagtgtgctggggctatatgtagctgtagtgtgcaacggtaatactagggcatggaaacctggaggccgccagctaggctagtactgtactactaggacaacagctcagctcaggcaacgcgccggaaggcacacgaagcccat

SEQ ID NO: 70597 - DNA, 482 bp, Zea Mays
gcggttggatctattttgggggtaacaaaagctgttgatatgaagtttaccaaccaatatggtatttgtcgtcttcaagtgatggtgttggaccctttgctgatcccgcagttcattgaggtggtgattggtgaatgtttatttgagctgcaatttcgggttgaagaaaacatggatagtgacagtccagttccagtggatatggatgactttagcggtggggaggacgaaaataagtcggatcaattagaggatgtggttcgtgggggtaattctctgccccctaataatagtgctccagatagtggcaaatctgtttcaaagggtgctggtaatgatggtaatactggtaaaaagggagcggcacatgatgtaattagctcggtagtccagtatgctgatctgggtttgggtatgcaaggtgttgaacatgctggtaatcccactcaagctgttgtgccagcaacctcgtcgtgtatggt

SEQ ID NO: 70598 - DNA, 550 bp, Zea Mays
tgcgggtttaatattaaacccacggatgttggtttgaaaaccttctacacgcgggtttcaaacctgttgccaactctaggtgatgtggttaaaattttccttgcatgaatgacggagcgaagacctgtaacttaatggggtgagaatgaggatgaaagttcacccataggatccagtgaggacctaaattaggagtcagtcccttcacttgcatggtctattaaggtcgaacctaacaaatcgcctcaccatgactccatataatgatgcaaaatcctcactcgctaactctaacccccatttccttcactcgaatgtcgttgtcccatatgtcaagcctgatttacgtgtgtatatcgtaatatttatactcaataatttatccccactgctcctcgggatcgggtcctcgacagagatggaaaagaaatacttctcgttatgcattttgggtttggggagaggaagagattcggggatcaggacaaggacgaaggagcactcccgggcctcgatccacttattgtcatccctattgtcaactccatac

SEQ ID NO: 70599 - DNA, 680 bp, Zea Mays
atgggatactcatctttaggagttgctttattttaattgcgaaaatcaatgcatactctaagctcacctgactccttcttctccaccggcacaatattagagacccactctgcgtatctgcaaggtctaataaaattagcttctagcagccggtggatttcgtccttgaatcgtgggagaagatctggacgaaatgttctagctctctgcttgaaaggtctgaaaccggacttaatggacaaccgatgctctacgatctctcggcttaatcccggcatctcagtgtaattccaagcaaagcaatccgaatattctttcaatagaccgatcatctcatttctaggatcggtctctaaggtcttgtttacaaaagtcggccttggagttttaccatctcctatgtcaatctactctaaaggatcggctgatgtaaacccctgtcctagtttatcaagatatctgaattcctctatcatgtcccccacagaggaattagatgatctttgtgtgatggcggactctccggtctcgggggctggattatccataatattgtctttacgttgtggtagatgttcggtcttaaggtccgaactgttttgtgaaagaccagaccatccggccttagaagccgaactgtccgtgaccaaggactcatgaattttatgtgtactcatcat

SEQ ID NO: 70600 - DNA, 535 bp, Zea Mays
caggaaacggcgggggaggttcttccgatggtgtggattgcgaacgtgatgaacggggagcgcaggggattggttctgaacggcgatttctcgccatatctatgccactgcgcggatccgttcatgccgtagtccggcttcgccacaaccccgctgcaggtaagaaccttctcagcatctcctatgaccaatctgcatcgtgaaacaatgttgagatgatgggattgtgccttacaactccggtgccatggctccggtgggcgcaccaccgtggtggcactgtgcgccgctgcgcagatggcctagggtggaagaagggtgagggtcattggatcctcgatgaagggtggtgttgtggcgatagttatgaccgttggatcaggatcgcgcgatcgtgattagctgtaggacgacgttttggccgtagttcatcctggccgtggatcagtcagtggacgtatccggtggcatctcagtgtgggcggtccctaggtcgttggatgaagatctgacgaaccacaaaacatactggttt

SEQ ID NO: 70601 - DNA, 329 bp, Zea Mays
ctgtctgtcgctgctggtggaccctgctggtcaggcctatcttcttcgcggtcgcacccacatcctccgagaactacgcaacaaatccatgggattccgcgcagtctggcggaggggtgaacgtctgtgctcggtggaattatcgggtcgtataaccgccgctcccctgcgcctataagtgaacgtctgccgagcgcggtcgatagaatccgtgagagtgcgagatccgggaagggaagcaccaccgtcgtagctgctcctggtctgggcgtgcgtcggatgctggtaaagtacttgtggcggttcgtggtgacacgctgcacgtgatt

SEQ ID NO: 70602 - DNA, 533 bp, Zea Mays
gtacattaaagattgcagacaggacatgcgtagattcgcgaaatcaatgtggtttgacagcccgatgcgtgcagaggagattgaaggcagcaaatgagtagagagcacattatgcaagggaatgggaggcggctagagtcgagaaacagatgttggggaatcttgctggtcgtctgagtggaagtgagtgagaaaaaagacttgttagtttctcttgtacaatttatttatcctgactttgcaaacttatttgtcccattacatttgcagagattggatgtgctgtgaactatctcgcagatgaggctcgtgcaagatacgttcaggaaaaaatggtgacggtggagccgatggaggaggaggacacatcaaggttgagtgagcttatcgctctcgctgatgtaggattacacggggaagaggaggatgacacatcaaggttgagtgagctcatcgcactagctgaggcaggattacatgctcaagaggaggaggacgagtttatgtctcaggccaccaaagaagtagaggcc

SEQ ID NO: 70603 - DNA, 904 bp, Zea Mays
cctcctctctccgcgcgcactaagttggtggctggctggtggatccgcctcgtctgacgccgtctcttcctccccgggatcttctcatgcaacgaacccacgatttgggcgcgaccgagtcacaacaggaagatccgagttcgccgtagaactcgcgtcgcccaacctccttgtcgcgggactcgctcctctgacgcatatatatataggacgctgcccttgggtcatccggtatgtacgcctacgcgcacgtcgaggtagcctagcatacaacaagaatttggagaagaggaacagtggactgcggccgccacggggatattcacctatggcggcgtcgggtccccggtggacgacggttggcatcttcggtgtgcgcgggatctcctcggggggggggggtctccactggtagattctaactggagctcgcgtgattcgtcatcggagcttcaagcatgtcgtgattccgccgtgttgcgtggctgggggtctctgctgcgccatagccggtatgtcctcctcccacgtgttagccattgattctgtgtaggttagcacccgattgcgttgagattggggcgttcgggcctaacatggggggatctgaccatggcgccgccgcgcccgtgcttacgttgtcgcgtcggatggctgggtggagaagaagcctcttcgtcgtccatcctgggatagacggttgtgataagaagtaggaatattgcttcgcaggaaagatcagggccgcgtattgagaatcgaacggtgtagattcgatcctgtggatcactatgcactttaaatcctggctgtcggacctaatctgaatggctctggatgcgtcccccttcgtcgtctaatccgggccgtcagatgtggatcggacgattgatgccgcctgata

SEQ ID NO: 70604 - DNA, 520 bp, Zea Mays
caccacacgccaacactggcgccgcccttgcgctgctcgcgtccacgagcagcgagcaccgcgcgcacctgctcgcgtacgcacccgtcggtgggcatgggttgtgccgctgcctcgctaccactgcacgagaagtaccccatcgctgcagagcctgcgtgagtgccctggtcgcacaacctcgatcactcacctgctttgccatcacgcacagcctcggatgctcgctagctaggaatatgaatgtgtcaagaataacagaataggatatgacaatgttgaggagttaactacaccaaatgaaaggaagggatatagatatacataaattgtcgttggaaataaatacttatttgttatgttttacaacctgaatttttttactatctagtagaagttatgaaacctagtatatgtccaatttaatcagatcaaattagtattgttaatatataaggataactttaccatttgtagcacataccttcatagcagcacttgcagagcagggcactgatca

SEQ ID NO: 70605 - DNA, 982 bp, Zea Mays
attgaagtttggaggacgttccatctcggcgggatgtggcgctgccgatttccgcattttgggcgtgtaccctcgcaagtgcgaaatttctaggactgtcataggtttcatgtgagatatttatgattatagacttcgcaatgttggactttgttagaatagaaccaaagatggtggcttcaccatttggaaaacaaaagcacccacgatgtcgctcatttggcactcatcgataggagattgtctaccctgttcaaaaaagataggagaccgtcattaatccagtcaccagagaactaagccatcttttgcaaacgacgtcaacactatcgttctagagctcatatgtcctcactctcctcccacctcgtctccaagaagagatcttcatcgtcgttgccgacggcgtgctctacgacccttcctcccttgtcgtttcaagggtctaccccgccatctccaccgttcttgcagaggtggatcccactgtattacaagttgcccctcgggcctcgccatctccacctccattgatatgcttactcctatctcctcccccacaacagagctcgcccccctccatttacttgtcgtttcatggccgaccacctccctgttgcgcatagttgtttgcttgtgagctacggacacttatggtacactagtgtgccatgcttcagcttctccggttgcccgccacacaatgaagatttttggagaatttaaggttataatcatttttaataatacaaaagcattagaaattatatgttggttattttgtgtgtcggtaccttgaatcaggggtaccccttactacagtatgaaggcacggtgcatgtgcagctatctctggccgcgtgatgaacaacacccgactccaccgcatgagcggtcccaaggacgtcacgtgaccagaagaggtgatatactctaggatgccatcagtgcgtccggacctcccgagagagcaccagacccc

SEQ ID NO: 70606 - DNA, 1035 bp, Zea Mays
cgtaagtagtcatcacttcctctataattataagtcgagtctatacgcgttaggcattccttaaattgtgcttcgcaaataagtgtatggttgtgtttatgacttgaatagatgtcttcgagtgaactaataggttcctaaggcaattatgtgtaaggtgtttatagtgacgctttatcccgaaaggtgttaagtctgcgcataaataagagataagtgtattttgtgtagtgtggattgattttgagtgcatgtgttgcaagaaaagaatgagtgtgcatataggcgatgaatgggtgtgatgaaatggtgacatgccttcttagtcatcatgtcgtcggttggtgacctaactgaaggtcgtagagaaaggtcgattacccatgtgttattattgtcaccttgcggttctgtatgaattgcaatgtgaagtagtaggctctctatgtgatgctagatgtctaggtagactttcgtgaattgtggtgctcggaccgtcgagatgaaggttaagtcggtcgatgccgattaagtagttaaaatgattaatagaataatcatggggttaaaactagaaactagtgttctcgcacccgtttgggatgttgtagcccaattgtgcatggttatgatcgcgggtaaaaattagtagtgctcatgtggtgtctaagctaaaatgcgaactagtgggtgaaaagcaccttgatatacatatatgtcggatttgatgattgtggtgaatgcattgatttattgtggatggtagtcctaacgcacgtaataatttgtataaaaatttgtaagtcgacttgtagatcctaatttgattgttttaactcgaacaaatagtaaagcgttagagtaattcaagtctctcgaacgcagcgattcatgaattatatatgagctgaaatttattgattgctgttttggactgcatgcactatttttgttgtgctatttgtttgatgaagtaaattatgttttctgtagaaaagtcatataaaagagttgtagataaccttgttatcttgc

SEQ ID NO: 70607 - DNA, 344 bp, Zea Mays
tggcaggtatcacagacatatgagagtacttaaacaagggagcagacggccagaactaacttgaaactggctgacctcgatgagatgttctttgtggtggttcagaacagatttgggggaaacttgaaattggagctcacggttgcaagattgtgggcgatactaggtggtgtggtacgtgatggtgatgcggagctgacagcggcttcaatttatagggagcgagagcagtggccgggaattgaaacgatgacgcgcgatggttggaagaagggagaggtcactggtgcaatggcttggtgtccaacgtcgtggcaatcgctccggtgatcaacggagagcga

SEQ ID NO: 70608 - DNA, 1110 bp, Zea Mays
ctccgacaaacaagaaagtgcgctcgtccgataaataagaagagaccatcaagtgcatgggccccatctagaatctgaaataagtacaatgactggtcgggtgtgtggccgcacttagccgttttgtttctagactcggagagaaggggatgcctctctacaagctgttgcgggagagtgaccatttcacttggacaacggaagcccaggaagcccttgatcggatcaaggcattcctaaccccgccaccggtcttggtcgcacccgagctgggcgagaccctcctcctttatgtggcggccaccactcaagtggtcaacgaggcgctggtagtggaaagggaaaatatgggccacatactcaaggtacagaggcctgtctacttcatcagtgaggtactgaccgagtctaagacgtggtacccatagatccaaaagctgttgtacgcgatactcatagccaagaggaagtcgatccactacttcgatcgacactccgtgtcgttagtatccatggcaccgctcggcaaaatcgtccgaaatcgtcatgcgtccgaacacatcacgaaatggtcccttgaactcaacgaactcgacataagttatgtcactaggatggcgataaatatcaagccatcgctgactttgtcacggagtggactgaggctcaggacctacccatagtcgaggacccggagtacttgaccatgtactttgacggatcctacctcaagaccgaaagtggcgcgtgcgtcgtcctcacatcacctcaaggacacaaactctagtacatgatctgcctgcacttcgacaccatcaatagcgtcgtcgagtacgaggccctcgtcaacggactccgaatcgcaatcgaagtaggagcccggtagctcctggtcaggagggactccaagttggtcattgaccaattcatgaaggcaatggagccgcgtgacccacagacgtgcatgcactacgacatggtacggaagctagaagaaaaattcaaaggattcgagctacatcatagctacaatgcttcaacgtcgaggcggatgagctttcaaccatcacgtcagggcggaagcctgtcatggatgggatcttcgcctct

SEQ ID NO: 70609 - DNA, 536 bp, Zea Mays
cagaggccctcggcttaacggctaaaccgaagtaggttcattcactattgcactaagtcgctgacactttgcaaaaatgtccttgaacttctatttcttccccacgaatacccctggccacggcgtgctcgcagatcatccatgacgtggtccgtaccggccatggccggcgatgactgctcgggttaactagcggggagacttcactgacctaaggcgacctaggaacaaccattaaactaacatgaaccctactgggagtcgcttgcccacgatcacggcggacaccgaggtcgggatcacgtgttcccgccaaaccaaggccaagttgtgagaacggatgccacagtgagcttcacaagcgcgcagggctatggaaacaacacatgaattgggcagagccttaccagagcggttcggccacggtggggtgtgtttcacggcggtggagaccggtttggggagaactcaaaattcgtggattcaggcgaatgatcgaggctgattcgtggtggctggatagtttactgccctac

SEQ ID NO: 70610 - DNA, 489 bp, Zea Mays
ctgtgctcaacaccgagctggaccacacccttgacgagttaggcaaggttcgggtggaggttgtgaaattgtgtgttgagtgcgcagcacgccactatttggatggtggttctcccacccatgtcaggatttagcacctttaccgttcaccgccctgtggtcgcttcgagtatgtacccctgactgcaggacccagatagatttggatccatagatcgacagagtcggagtctgtaataatgcttaattcagagtcttagtctcagttagtcttagttagagttagtttgcttgtcatatgtctttgcctgtcgtgatgaacttgtaatgaagttggatctttgtaatgattgtcaccaaggtgtgggtatcccctgcaacttggtgtagttactaataaagtcaattatttagttgggtaatctctttatttccactttcctctttatctgagaagctgtcagtgaagatgatcaattgttcagtgct

SEQ ID NO: 70611 - DNA, 1326 bp, Zea Mays
gtcactgacgatttgcacagaggtccttgaagttctattccattacaccgactgatccccgacggcgttgagtgtggtcgagctccgacgagcacgtagaccgaccggaggaggccaagaccagtgctcccgagcagcgggcatagaattgaaccattcccgatcacttcccctaagtcaattttaccaatggctgcccaaaggcctctggccacagagaccgtgcggacaacccaatgatcaacacgttcccggggattggggatggtctagttcgattgggcgggtgggtgagcatcaccagcatacaaagatgctaaaacgagaacaaagagggcatgatcagacctgtggagggctggccacggcgagctcggttctgcggtggcggaaacttgatttgggggaagactaaaattcaagctctctgacgaacgattgctagcgattttcggtggctgggtgggtgatgaacttgcggggctggcgggggcttcaatttatagggcttagcggcggtggccaggaatttcagtggggacgcgcggtggtcggaggaggaagaagagtactggcgcagtggcttggtgtccagcgccatggcaattgcttcggcgatcaacggggagccactaaggcttacggcgatgcggtggaaagttagagccacgcggcggacaatggcgacggcttaacggcggtgagaatccttatccgagggcggtgagtaaggggtgaggtaccacggctagccggtgtggcgtccagctcaccggcggcgaagattctcttaccccgcgatgttatccatctgccacaagcgcgaatccttacgccggtgacacgaatcgcggcgggactcatcggcggtgagcggagctgtcgcgcttgcgttctgatcttcatcaagcactgtaccatgggatgctccattcagttaacctgacagccatagtttacggccagatttcttccaaatttctatgacaacacatccagatctctgcagcaaagttgttcctctataatagctctacaactttgttatagcaaccctagctaaactctcactggatcatagtcggaatggctctcaaactgggatctaggtcactgtcaatctgaagttcagactgtatcagcctgacagcctgacttcaggcttaattatctccaatatcttctccacaactatgcttacactttcaagcaaagttgttctcctttgtttggtctacaagtttgatgtggtgacctagggcaaattcttattaatttgaaagatacaagggctcaaagttgaagcaatcacactgaaattcagac

SEQ ID NO: 70612 - DNA, 1083 bp, Zea Mays
ataaatattatagacctatgaaaggagaacaactttgcttaagaaggtaagcatagtggtgatgaagaatttggagataatccagcccaaagatgggctgtcagactaaaacaatctgaagattatatgatcagtggcattagatcacctttggagacaaattgtggctaatccagtaagaatttgtcttgggatactataacaaagatgaagatggtatattggactacaactttgctgcagggcattggttatgttgccatatgaatttgggagaaaatcgagctcatagatgagctgtcaggccaactgaatgaagggcgccagggtacagtaactgaagtggatcagaccgccagcgcggcaatctcaccgccggcgacctctctgctcgtagattcgtgccgccgtcgtcctgattcgtgcgtggtatagagtggataacgtaggggagggataacccgtacgtggcgccatctcccaagcccagccggagtcttcactggcggccaccgtgaccagtaaattttgccgcggtgtcgcccatgcctcaatctccctcactgtatctctttccgacgtggtaggcatgcgcttgcgatgctacccgtggccgaaggtcgtctgtcaggtcgccgtggctataaatagcacagtggtccacgacgaggtgtttacctcttcaccagtgagctgatcgcaatccaaaattcgcgctgtctctgcccccttctcccaaattgagtctgcacggtgaagctatagtttcttacggccgtgtagcctcaatctccacccccaatttcacccagagtcgccgcaacaccagttttcccctttcctctatcaccggcaagcctaagtcctccacgctacgtggccagccccctctggtaagactttgtccaattcaagcgttgttttagcagctctgtatgctcgtaaagctcatcgtagtagtcgtttgaccaattcgggcgtaagtgactgggaacatgggatcgacatcacggtttccgccatacacgcgggcagtacattctctaagtgttcaagccacagtaaagctcgttcctaggtctc

SEQ ID NO: 70613 - DNA, 357 bp, Zea Mays
attcgagtctccatcagcgacatttcgtcgagcagtcgctgcataatcacgtccatgcccgcgacgacagtggaacgcgggcgccggtcaggtactgagatgaagcgtctagggtggaacctcctctgataccaaatgttagctctgatccataagcggctagagaagaggtagaggaaggagggagagagacttagggaaggggaagttgtattcctctgataccaaatgataccaaatgttagctcctctgccgacacatcttccttgtagttgctaacagaggtcaagtccgacatcagcttcacctttgttgccactattgatgagaatcgacattcaagtaattcacttgag

SEQ ID NO: 70614 - DNA, 358 bp, Zea Mays
acaagttacaacccatgtgccaaggagaacttggtgggtgattcataagcctagcacttacaacaaagaggaggaatggattcacggctgagcagcacctgtcaacgctcgggtaaggctataccaccggcaatcaataagacacattaaaggatcatgatataggaaattactattcggacccaacatgctaggaccaccacttctaggaccctaaggcccggagacttccctttgtcatgacaagagtaggagcttgatcctaagaggcttgataataatgtaccccaaacaaataactatgcaccaagacctggggaagtttgggccccaaaccgtatgataacaattaggtgct

SEQ ID NO: 70615 - DNA, 399 bp, Zea Mays
aaatgactactaatttgataacacgacataaccttaggggagtaaggtgccaaacttctccaaattttcaggcgaaagtgttaagagcacccaccagcacataggccaatacctagcatagttaggagaattagttgtgttaacttgttttcattatctcttatcggtgccacattcacttggtatgttgtgttgccccctaactcgattagttcctgggatgatctagagaataagtttcataaacactttttctccgaggattacgggttagatttagttgatctagcatcgctctggcaagggggcaatgaatcaataatgattatctctgaaggtttcaagatactagaaaccgatgtttttaggtccatgtcacagataagcatctagcagggt

SEQ ID NO: 70616 - DNA, 405 bp, Zea Mays
acatgaatatatgacatttgttcccaatcaggtagtgtctccatatcttaagagcatgcactatggctgctaattccaaatcatgggttggataattctgttcatgaggcttgagtaggcgagatgcataggcgatgactttctcattctgcataagtacacatcccaaaccttgtcttgaagcatcacagaagatgacaaagctttggtggatgtctagcagtgtcaatcctggcgcggttgtgagtttcctctttatgacttggaaactttctacacaaatttgttgtctttcttgaggagttcggtcatgggtcgtgcaatgctggagaatcctttgataaaacgatggtaatatcccaccattcccaagaagcttcgaacttcactaacattggatggctg

SEQ ID NO: 70617 - DNA, 412 bp, Zea Mays
ctagcattgtgtggattagctctggttgtggttctgcggttgtacaaagatcgagtcgaagtctacacggtttcggtgtttctctccccgtcgcttggtcacctccgaccttgatcaagtataaaattagttacccgccatcctatttatcaactgccgtgaagatcaggccaccctagtaccgaatataactcggtacatatcacaggtcctgcacaacgcaaaagctaggcttcttttgatgtgttggacaacgatgatgctatgtttctctctcctttagagtgtcaaagtctgttggtggactccaacgtgttttatgaattttttggttccaaagagtcgttgaacatcgaaagctatcttgcccattttgcagtgttaggtgaggcatctttggcccctctaggtg

SEQ ID NO: 70618 - DNA, 560 bp, Zea Mays
ttatgccagactattactaattatacatactcactggtacaactcaaatttccgtatttaatttacataaggaaaccacctactcctataccactctagttatcttcatccttggctgctcccgctccactcccaacttcgggagaacgatcatctacgaggttcctggaaggaggggctccaaagagatccaactccccataaggtccttcgccagctgctcctgacgttccatctctcattgctgcaaccttcggtggtacgttcagatgcagttggtcgtatagcacatgcacttcctcatgcagagtgttattgtacgcctgcaaattttctagggctatgcttagctccaccatccgggctcaagaattctcctcgtaatcccaggctatagatcgtgaatttacggcccaatctatagtcatgtctcgttccacgatctcccatggcaagcggtcaacctccgctgacagatcagcaatacatcgactatcacacacatgctccctgcttccatggcacagttccgtcgtgagtcgttcaactctgacctctag

SEQ ID NO: 70619 - DNA, 422 bp, Zea Mays
ctccacggtgaattcatctgtggaagggtatcaaaggtaaagattatggtggaaggaagaaaaataaaagagtctggatggttttaaaaggaagcgggttagctcaagttttaattccttttagcttttataatgcatgcatgctgaaagtaacgtctcctctccgaatataaggtgttttaaggcatcctttaaaaatctaagtactagcccacagggcctacttaattagccacctatttctcccactatccctaaggcctttcgtcctaggtctagcaatctagtcctgacaattcttagcagtttctaagcaagttttagattttgaaaattggtattcatggtttattgtccttctctgtggtggagtttgctccgataccagctggggcagaactgcccgaattattccagcttaa

SEQ ID NO: 70620 - DNA, 812 bp, Zea Mays
gccacatttccatctctagcatcaaggttgttgtagccatccgggacatccacttctgtttttggggttacgtatgggataaagccctagagatcctatgaactcggtcaggacaagagtaatgcaatgtcaagtgccaagatgccaagaaaaagaaaaaaaacttcttatttatttacatagtcgaactacccaatgacatcgcgaaaatcgattcactatgggtatcttgccctcaagatcataggcctcaagggcgtcatcacgattatagggattgagtagagtcaatgacagtagtggagaaaatgtttgcatgaccatggaagaggcgacaacaaggcttccatgcgaggaccccctaacctcgtggctcggagatctgcacctcgggcccctcaatcagttccaaagccctataaccttttcaaagcccccctaggaggcttttaggtggaccttgcacctcaaggtagacaaggcttgatgtagttcccaccaaagttgtgaagatcgaagatagtgtcttccagacggcacacattgacgagaatctaggggttgaataataactcgcactcatcgccatcctctgagagcatgttagtgtatttgcttgggaaccatcaggcatgcttggggtcctagagagacaattgagaatcgcttggccattcgccctgacacctgattgatacgacaaaagcatcgaaagcacataaagacaaaaaaacttgtatagagattgagaaacttctccacaccagcttcatccacagggtctaaaaccttgtgtggttggcctggccaac

SEQ ID NO: 70621 - DNA, 358 bp, Zea Mays
ggctagtacgtgcttttgataaatctatcgtcgcaaatttttcctcgcacgaggttaaattggggggaaacatgcgtgattcatcggctacaggttgtcatgatcaaatacaacccctttatgggatgccgataaacacgtgccctggtcaaccacattcatgactgtgtttgatcgcttgactagcaaatgtgcatggttggaaagggaatcaagcggatgagttgaagaaccagtccaagcaacttcttggtattgtcgcgtaggatccaactgacctcaaaatccatcagttactaacttcaaaatcaaatgttccctttgggaatgcttcttgacttagagttttggttcctgc

SEQ ID NO: 70622 - DNA, 425 bp, Zea Mays
accactacttcatctgcttcgagaagaggaacaatgctttcttttccagctctcacaatggatatatcgtgaaaatactttcccttcatcccttcaatatgtccttgtttaacactggactttccaaaaacaacatgacttggcctccacggtcgatcttcggcatcttcatttccaccctccacatcaaagctatcactgtcactggaatccccagatagcccagccagcatctcattggtgatttttttcaacgttggtctttgccattgcttcataaaaaccagcaggtgtggggtctacaatatgcttttctccagccatttcgatgatgatcacagaaaatgttgaagatcaaaaaacaattgcgctcgcaaaagaagaaggctaaaatggcaatcacagcacaaagagctagatggcac

SEQ ID NO: 70623 - DNA, 738 bp, Zea Mays
ccgaggagggagatctgttagtgagtatgtccacaagttcacagaattggctcgctatgcgcttgatgatgtcagcacagaagccaagaagatggcccgtttcttgaagggactaagaccataactcaagactatcctcgccagccaagattttcttagcttctcgcacctctcaaacaaggccatacaagtggaaagggctagagaagaagaaaagggtcacctcaagaggaagtttcaagtcctccgagctcagcagcaggacaggcaccaaagagttcaatcttttgggtttcctcccaaatgaccaagcttcaacaaaccagcaggatctgattcgtcatgtttcagtcagcagggtcaaagttccctccaggccccctccgttgcaagcaaccatcctccagccaatgcttgttggcactacggagaccccagtcactacaagaataattgtcctcagttgaagacatcagtgcctacctaatccaactcggtgaatggccccaagagtgccccagcacccgcctccaaggcaccctcctccaacaaccatctaagcaagacccagtatcatggcagggcacgagtgaaccacgtcaacgctcaagaggctcagcaagccccgagagaagtactcggtgagttcctagttgaatttacccccgatgctgtactttttgattcatgagcatcccattcattcatagccactggttttgtggaaaagcatggcat

SEQ ID NO: 70624 - DNA, 418 bp, Zea Mays
ctaggtcgtggttgttttatgtcaggcattatgtaaatgtgggttggtgtgaggggattttcttcccatcttgttgtattgctactttctttctcaataaaatgacgcgtaaatctcttgcgtcgttcgaaaaacgacatgagatagttttcatggagtatgagatagttttcatgggatatgagagagtttcgtgaggctgaaactcatggtacactgtttcttagacaaatgttgacatgagagtcttgaaaacagggtgatgaaactatacattgagaatgacctaaacaagtgacttagaaccatcgaacttttttgtcgtctccctcggggccaaccgcacgccctctcgtattccatacaattatgctccacctccttttctctgatttccacatgaagatatggtcgtcga

SEQ ID NO: 70625 - DNA, 390 bp, Zea Mays
acgacgttctcgtagcccccacatcactcataatctcctttctgttcgtcagttcactactgacaactcctgttccattgagtttgacccctcaggtttctctgtgaaggatctggccaccaggactcccctcacccgttgtgacagctcggggcccctctacacgcttcggccttccaccttcggagcgtctccgcctcctgtcctagtctccaccacctcctccaccacttggcatcgtcgtctcggacatcccggacctgacgtcatgaccaagattaccagtagcctagatcttttacgtagtaggggacattttgagggcctctgtcatgcttgtcagttagaccagcatactcatctcccatttactacttctcgggctaagca

SEQ ID NO: 70626 - DNA, 1499 bp, Zea Mays
accaagtcctcatcgagcaaatccacgaggcggagcggacgaccaagaccccgccgagcaagtccgcgaggcggggtgaacaatcgagttcccaccgagttgacccacgaggaaggaacgcgttcccggcgatctatggggtcctagctcaattgaacgggtcggtgagtatcaagagcaagcaagggtgttgaaacaagaaagcagagggcgtgatcggacctgaattgggctggccacgacgaggtcaagcagctcggtgttcttgagggatttgggggaaatcccaaattggggagttctaggggaggatttgaggcacaggttgcttcactggttgcgcaattatctagcggagcggacgagggcggcaatttatagcttccaacgatggtggtgtccaatttcatgaggatgtgttggcggccggaggggaaaagaggtactggcgctcaggatgagtggctttcaccgtggcagccctccggcaatcaccggacatgcataccgtgattcgccgtgacgtgggctagcgtttaaaacacgtggcgtacaacagcgagcgatcgacgacggcgaaatctatccggccgcacgacgagcaagtgggtacggtgaacctcatccgcgcccgagcccgagctgatccagtgccaagatctttactccgtcgtggttatcccctctccagcgaacacgaatcgcggcaacaacgtgaatcacggcgtaaagaccatcggtggcgagggggatacatccgggatctgattcagctactgtaccatgggaacccctattcagttaacctgacagtcgatgtttagggcaggttttctccaaatttgtcatggcaacataaccaatgctttgcagcaaagttgtagccctacaaaccatcttcacctttgctatagcatccctagccaaattccccttggatcatgattgaattcgagccctaagttcatgcaattcctctgtcagtctgaattcagactccaagcagtctgacagcccatctttaggtctagttatatccaaattttacacaacatcagtgcttggtcacttaataagaattgttctcctttcatagctctataggtttgatgtgttgatctagggcaaactcctcctaatttggaagttacaaagcttcaaagttgagccaattctctgaatttcagacttagccaatagagttcaaataggactttttgcaaataagtccaaatctcaaggttcatcttacaaatccacatacttgtgaaccatatgacttaaggtgccttactttcatggtttttgcactttagtccaaaagtgcactaattttgcacttagccccctagggtttaattagtaacatgtcaccttaatacaacttgtttgaaatttttgcctagtggatgcactctaggtgtgacaaacacattaaatgccaatgcttatgatgttatgctcaagttttagtaatagtaacaccaggggtgttacac

SEQ ID NO: 70627 - DNA, 734 bp, Zea Mays
tgttgagggctcaactttggagccttgtaactttcaaagtatagggtgtttgccctaggtcaccacataaaaattgtagagcaaacaaaggagaacaattttgcttaagagtgcaagccatgttcttgtgaaaaatctggagataatcatgctcaaaatcaggctgtcaggctgttaaggtctgaatttcagactgacagtgcaactgcagtgactttgggcatgaatttgggcatgatcgagtaataatttgcttaggattgctataacaatattgtagctggatcttaggactataactttgctaaagagtgtcgatcatgttactacacaaaattggaagctattggctctgcaaatccccctgttagaagcactaatgaagcattccatggtacagtaaccacatcggatcagaccgccagcgcggcagtccatcaccgccggcgacctctctgcgccacgattcgtgccgccgccatctcaattcgtactcgggatgactagataaacgctcggagcacgccgccgtggataagcccggccattaaagtattccggccaccgtacaaagctcgccgcggtggaacccgataagcacgccggtgaccgccgccttccggccttgtgccgcgtgtctaagcatttccaccgcatcgccgtaacctgctctcgctctccgttgatcatcggagtgactgccacgacgtaggacacgatttcattgcgctagt

SEQ ID NO: 70628 - DNA, 403 bp, Zea Mays
ccttcttctcccacaaattcctccacccacgtcctcctccaccatggcgaattcatcttctgctgctcacattccaattcatcaagtcgtcaccattcgtctcactaaaacaaactttcttctctggcgtgctcagcttctccctcatctccgtggtgcccaactgatgggttttctggatggctctaatctggcaccagcacagcagattgcctcatctaccgatgcaaatgccagggtcatccccaacccagcatatgagtggtggttcaatcaggatcaacagatcctgagcggactcctttcttcaatgactgaagatgttctcggtgacataataactgtgtcctcctctaaagaagcctgggatatcctcaatagcatgtattcttctgcctcacgg

SEQ ID NO: 70629 - DNA, 432 bp, Zea Mays
ccctctctaaatcaccatcttaactcaaatgggtgcttgggtctatctagaatgacttggcgatgttgcataagtgcttaggaatgattcttagctctaagagtgattgatgtctcaagtaggctggttagggggtatttataaccccaaacccatacagagtcgttgatagaactacaaaaaaatgctctccatgggtgcaccggactaagtactatagaacaatctctgggatcctgattggtgtcttccttttgagttggcaccagacctgtatggtcacccaccggactctgtgtcacgttaactagctgttggagccgaccgttgaaccctgagttgactgctatactcgactggtctggtgcacatcagactaggtcggtgtgctaggctactgaagtctcttctacaaagctctttggaactttg

SEQ ID NO: 70630 - DNA, 1698 bp, Zea Mays
gaggtgctggagcagtagtagtgggcgggcgactggagtacacccgtccgtagaaacgatcagcaggggctgtcgttccatggacgtcaggaactgcaggtgacccaggtggcagtgttgctggtgacgatgcgcctgggagaccaaccatccagtcaggagactggatcattggggcagatggcggtaccagccctgatgatggggcgatagggccagccaacacggcaggtggctgaagcgccgcctctgatggagcgggtggcacaaccggtgaggaagccaccggtggggggggggggtggtagcgccatacgagtacctaaaaagaagacacaggcgacagtccaaaaggagctgtaacctggttagagtgatcatcgaggaagtcaaaggccgctggtgtgggtggattggaatcctcagaaaagggaaatgaggtttcatcaaaaaacacatgacaggaaatgatggtacgattggattggcgatcaaagcataggtagcctttgtggtggggagaatagccaaggaagacataaggggttgagcgaggagataatttatgtggagtggtggcagaaagattggggtagcatttgcagccaaaaacacgaaggtgctcataggatgggttgtggccgaagagagcaaagtgtggtgtagagagtgcaagtgttttggtgggtaatatgttgaggagataggttgcagtgccaagagccgcatcccaaaaattgggggaacactagattgaatgaggagggtgcgaatgatattgttgatggagtggataacatgtccagccttaccattttgaggtgaagtataggggcaagacatacgcagatggactccatgggaggagaagaaggtgcgggcttgaaggttgtcaaattcgcgaccattgtcgcactggatgctctggatagtgacaccgaactgcgtacgaacgtaggcaaagaaattggttagggtggagagggtgtcagatttgaggcgtaaaggaaatatccataaatattgggagcagtcatccaaaataacaaggtagtatttgtggccagatacactggtgatgggtgatgtccagagatcgcagtgaattaattgaaagttacatgtggcgcgggaggaagaggtaggaaatggtatacgaacatggcgtccgagttgacaagcatgacatggatgagtactagtatttttattacaagaaattgcagatgactgcgctaaatgagataaaacgacatgaccgggatgtccaagtcattggtgccataaggtagatgcaaggagagcagaagccgggaatcgcagggggtacaacggaccagagctgttacatctgaagatctcgcgccgagtgggtagatcattcacagaataaccaaaaggatcaaattcaacagagcaattattatcagtggtaaattgacggacataaatcagatccttaatgagggagggggaactaaaacattgtgaagagaaagattatagggaaggtgggtggtgccagtggaggtgacagggatgagatgaccattgccaacgataatatgggtaggaagatgctgggaagaagagggatgagatattataccagcgccggatgtcatgtgactggaggcaccagtatcaaaatgccactcttgttgaggcgactgctgagagtgacaatttggaagttgg

SEQ ID NO: 70631 - DNA, 620 bp, Zea Mays
attttccagaagcctggggtttaatttacaaatagcagggatgattcacgataatctttacacatatggggaccacgggttgagtagtgcaaatggcaggggttctttagtaaagttgaggccgcaaaggggatatcgggtcacaagagccgaccgttcttgaatcaggggctcagattataagttcacccatctgaaccggtacaagactgtggtcgccggatctaaatcctagggtctagattctatgaatccccaatcccataacatccgcccgatcagattcggacgacacggattgaaccccgaaaaggtatagctagacctaatcacaaccgttcatcaaaaaaccaacggcagaggcatccccatccatggatctaatcttagccgctctatgaacaatctacggcgctggtgcttcttttcttccccgaggtcggacgcggcggcaaagcacgcatccatggcagcgagcacaccggttcggcccgccggtgatcccgaaccccgaatctgacaatgacagcatgaaaacaaaagcggaagcgagccgattaggggaggatttaccaagcaggggtgaaagcgaagccgaccgacgatgcggtacaacaagg

SEQ ID NO: 70632 - DNA, 303 bp, Zea Mays
gtttaactatacaacgcggcaagaaacacataatgataacgaatgcatgtagctccacagccacatcagtgggagcagagtgggaaggggtggaaccgtaccatgagaggtgcaggtgctgcatcaattgaagaatctagcttgcttatatgctatactatgtttgctattttttcatcattcgtgaatagtgttcacttgagctgaaaagtatagctaatctaaccaatgggttacatctttcttttggatttggactttatccgactattaattgatctggtccttaaattttaggatgtc

SEQ ID NO: 70633 - DNA, 519 bp, Zea Mays
ccacgcgctcgacctcttttggagcccgcacccactcgctcagttgcaccccagcagaccccctcgtacctctctctcgcaccacgcacgcacccgtggagcttcgccatggtccgtcgtccgtttcgtggctgccgtcaagctcctgtcacgtccgttgccccggtgagctccgcctcctcgccaacaatgcaagacaccctctagtttgttcccttcccttctgtttctctcggtccacgctcactggccctttctccacactgcagcagctccgcatcgtcgacccgagatcccgtcgtgcctcggccgccattcaagggtccctgagtcttctctcgaggtaaccaacctaaccccacccctattgtcccattgtctgcccttggttgtgcgcgattgctcgctggagtagggttgcaccgccgtcaagctgcctcaatgtgaaccaccaccctctagcacccatgtgtcggtgttgtgcccatggccgtgttcgctacagttccccgaacctcc

SEQ ID NO: 70634 - DNA, 724 bp, Zea Mays
atatgaggttcacctttgttgttgtgggatggcccggatcggtgcatgatatgagagtattcaatgatgctttgcgcaagtatggcactattttccctcatcctccacctggtatgtttattttaatgcaatttaattttgtgttgttcataattaaaaattgagtgtctcatatttgtttgaaaatttttaggaaaattttaccttgtggatttggggtatccaaaccaaaagggctatcttgctccatacaaaggagtgaagtaccatttaccagagtttagagcgggaccacgtgcaactaggaaaaaggaggtattcaaccaattgcactcttcttttcgtaatcacattgagcgttctttcggtgtattgaagatgaagtggagaattttgttggacttgccaagttatccgatattgaagcaatcaaaaacaatacatgcatgcatggctctacataatttcattcgagatagtaaaatggtcgatgatgagtttgatcgttgtgatcaagacgagaactatatgtaacaccccaggtattacttggggttttcacttaagactacactagtaagcccctcatcacatgtgatttaaattgagtaaaagacataaaattgggaatcaagatcctaagtaggtgtaacccaacttagaagtcatgccttggccttatcatgcactaaagagaagagaatgactcaaaccctaatccaaa

SEQ ID NO: 70635 - DNA, 1823 bp, Zea Mays
tgatatgctcccacttccaatctggaatttccaacggcttcaataaacctgcaggcctcttatgttcggccttcacacactgacacacctcataggctaccacgtacttagaaacgtcaaccttcattctcttccaccagaagttttgcttcaaatcccggtacattttggtttcgctagagtggatggtgtaaggcgttttatgagcttctctcgagatatccttcttcacctctgatttctgtggcacacaaaggcggcccctgaaactaaccaaatcattctcatcaatggtaaactcacggggtttaccatcgccgatcctctttcgagcttcctgcaacaaacgatcctgctgctgtgccacacgcactctctccagaagggaggattggatgagcatctgagtctcctctctagcgatgccgacatagcacaaagcaacacccatgcggtccagatctgcaatcaaaggcatggccacttttggaacaccggtcctgctaagggcatcaaccaccacatttgccttccctgggtgatattgaattgatagatcataatcctttatcaactcaagccaccgacgctgcctcaatttcagctctttctgagtgaaaatatacttgagactcttatgatgggtgtaaatgtctcaagattcaccatagagataatgcctccacgaatttagggcaaagacaacagcggccaactcgaggtcatgagtaggataattcccctcatgcttcttcaactgcctcgagccataagcaatcactctgccttcctgcatcaacacacaaccaaggccaatacgagaaacatccatataaactgtgaaacgcttaccactctcaggcaaggctaagataggagcattcaccaacttgttcttcaatgcctgataactgacctcgcaatcgttggaccagacgaaaagaacacccttctccaagagtctagtcaatggcttagtaatgctggaaaaatttggcacgaaacgccgataatatccggcaagccccaagaaacttcggatttctgagacactagagggtctcttccactccacacaacattggcattcttggggtcaaccataatgccatgctgattaatcacatgacccaagaaagcaacttcagacaaccaaaaggcacacttcttcaatttgccatagaattgattcttcctaagagcacccagaacgagacagagatgtcgctcatgctcttcctccattttcgagtaaatcagaatatcatccagaaacaccaccacaaagtcatccaagaactcatgtaacatcctattcattgcttccataaaagcagcagaggcattagttaagccaaaagacatgacgataaactcgaaatgcccatacctggtgctaaaaggtgtcttctcaatatccccctcgcgaatcctcaactgatgatacccagagttcaaatcaattttagagaacacctgggcacccctcaattgctcaaagataacatcaatacgaggtagcggatatttattcttgattgacacttgatttaaagcacgataatccacacatagcctcttgcttttatccttcttctcaacaaacaatactgggaaagcccatggtgacctgataggcctaatgaaacccttagccagtagatcatccaatttccgcttcaattcaacctgctcctttggagccatccgatatggggccttatgaatcggatgcgtacccgaaatcagcttgatttcaaaagccgcatcgcgctccgatggaatgcccggtagttccactggaaacacgtcggcataatcac

SEQ ID NO: 70636 - DNA, 891 bp, Zea Mays
cccgtggatccatcaatcaacggccaaaggaatgcctcatgtactgatctaacctcccccgcccacatcagatgtgacggttagagcgcttcttccccgaccgaggccgagtagcgaaatgaccaggccgttggcggaggtgcgctcgccgatgacaggcttctccctccctggtgggtctacgcgtggtaaaaaagatgcagagggattgaagggaccttaccagtgtttattccatcctgagttccttccgtggagggtgcaatcaagcggcaccaacttcatcaattgcagcttagattcaagcactgctgcaccagggccaccactgcttcatccaccccgccgtcacgtatgagcccatctgttcatggtgaaaacgcgaccacaacgacctccccagcctcagtggcatctatcccgacggcatgctcgacgatgaagatccgcaccgggtgtcctttatctccttaccgcacggcacaaccggtgacaagagaatctccccatggtggcgagcactagttccctcgcatggtcctggaggcaaggtaccccgcagcagacttatatagatgtaggatggagtccgtttggggcggccggacgtggccaattctccctgcgcggagtacggcgcgttccgtggagatcgttccgcacgcacatcggaggtagtcccgcgggcggatagcgatgggtttcgaccggatttccgaggttcacggccagctcccagaatcaatcgcgccagcccaggattctccaagcacgcgaggtgatttccgttgttgcggaggagcgcagttcgtgctcacgtttctgtttgaagcagggataggagatgggcatgacagggaggtcccacctgccagagacggtacgcgcggt

SEQ ID NO: 70637 - DNA, 502 bp, Zea Mays
atctaatatgagaatgagcaagtagtcctaaccaatctcatgtaagatgatactggtttctttcattatcaactcaaaatcctcagaaatggagggtacagaactcgtgtggaaaacacggcacaaatttttaaccacaaaccataagacaataggcgtaaccatttaatctagcggtctggtcttctaggttcttcaagggcgaatgctctttgatctacagataaactgtgagactttcaggttctggtctgaaacattactcccaattgccgactccagtaagtcctcgcagaaatcattgaacatagcagtcagccagtcacattgtttagtcaggactaaggactacataacaatcatgggtgtaaagcctaaatgaaaaaaaaaagaagtgtatccgcatagatcattgagcaaataagcttacgtaatgtaaacatcctcaagaatatcaggtgctgagttaaatcttctgctattcctcagattttggttctac

SEQ ID NO: 70638 - DNA, 561 bp, Zea Mays
tagaggaaaacaatgcattttaatgggagaagccgttgcgagtaagtgcatcgactctaagagtgaggtagggagaatgctcacccaacctctaagatttgaagagagtagaacgaaaagtagacgcgtggatcgttaatgtagtcttacatcaatcgatcatggatgactttgcgatcctgatgaatatagctccaatgctgcctatttaactttctctttgttgaaaacctgaaagcaaactttatcatcacatccatcatagtttgatgcaagatatcgagcatcttgccttcaacaacagtttagtggagtgaaacaaataagttcaatatgaattggtaagagcaatttaaaaagcgagagatgtgaacaaacctaaacacgtactactatttatagatcaggttccaggattttttttatttttttcttctaaaatttaaaataacgagaaccaatcaaaaaaatgttgcatttaaaatacgagaaccaatcaaaaaatgttgcaaggcaacatacagtcgactcaaaccgataaagatcagtaccgaccggttc

SEQ ID NO: 70639 - DNA, 793 bp, Zea Mays
gtaaaattatgccagttgtcctcccacattgaccttgtaatacatctgtcatatgacgttctccacaactagcaagtcaatcgttgatcaaactagaatcagcagtcatcaaccattttgctgaaccctcccttggtttgatcactgccacacatgaaaaactcaaaatcccacaagtgacacaggataataaaccctggtctaaaagcccagaaacactgttcatatcctccttgtcactttctgcattttgtgcgtatgatgaggcagacatgtttgcacagtcatgtatgcacgttgcaggtgggactgtctttcctgagcagattgagaatgaaattttgttggatgacaacaattccccgttcttgtgagccacatccattggtaagtgtcttgagcctttcagagcttctgtcttactgcattggtcatgcgctatcctggaatcagttgttgactgaaactttgagagcaaagttgatagtggagagccatcattgtaattgactcgaaggataatgcaaggagacccatcacttagaaaataacaaagcactttattgtcttcaataacattttgcacaaatatctttttgacaaattggtccccttcacttttcttcttctccttcaatctacagcttcgtggttccatagctccatttgatggatccctagaaatgtacaagtttaaaccaaatcaaataaaaagggtccagatacacatgtaatgagagacttcttgcagcatagaaggacctagaagtgaatgcagctcagaaaaacttat

SEQ ID NO: 70640 - DNA, 779 bp, Zea Mays
aagatatgcgcccaaaagatatagcgctgccagctcttacccgacgcctcacgctttgtgtaaaagtaactcctcggcccatctgttggggcctagctcccttgtaatgtgccccccttggactattaaagggagggcactagcgatgaaaagggagaggtcgactcacgtccaaattcactatactcggtctctcaagcaatacaactcatagtggatgtagggtattacgctccgacggtctgaaccactctaaactcttatgttcttcagttcatctactcggtcaggcaaaactctaggccccttatcataggacaagggcaggtgcttccgccacccgggcggaggatttcccctttgatatttagtgtgccaggtagggggtcagggttccaagcttggtcccttaattggtatgacatcccactcatccacagatgacctgaaccgtggcgtatccgccgacatttgccgcatgacggagaagcaacgtctcaagaggttcacaatcaacctcagacggtgtctcaataggcacacaaccgccatcaagcggaaggcgatgggagcctcacccacaacaaagaagtctaccgctgccaccttcccaccaatctccataatgcctgaggtcacctctgtctacccccagcctgagttaacaaggcttgaggctcacactatcggccaatagccaagcaaaggcgtgaatggctccatcggtcagccactgtattccatggttagaggagttgtctcccccgaccacaggggat

SEQ ID NO: 70641 - DNA, 534 bp, Zea Mays
taaattcatatttcatgcaaagagctggtggaaggttgtatggaacagcaaagacgggccaacatgagtaggacgttgcagttagattgaaaggcgagaaaccatttgttgccaagccgaagcggacattccacacttcatcagcaaagctggaatcaaaagcatctagtgccttccatgcatctgtatcagctaggtgtgccatgacatttggattctcacgtaccccttctttgtgccacctcatgtgtctggttgtattcttggagatgaacaaacgtttcaaccgaggtataagaggcatgtaacgaagctgcttatgtgcaatcttcatcgtcacggtcaaaccatcgtcgttttcaacctcaacgaatctacgctcaccacatacagtacacttcttctcactcgcggtctccttccaaaaaagcatacagttattgtcacagacatcgatttttttgtagtccataccgagcccagagagcaactttttggactgatacatgtcctttggcatcttgtgattctccg

SEQ ID NO: 70642 - DNA, 502 bp, Zea Mays
ctcatacgtgagttctccgcgcgtaacaattgtggccgcgaatcctggggaatcataacgaacccattgcgggcagtgcctcgtgactgtaaaaccccagcccgtgaatccccttgaccatagcttcgaagaagaggttaaccgagggcatatcgtcgagcaccattgcaatcaccgagagagaaagactgtgaggagtcgtcgccgttctttgtctccaccattgtttggaggttgcggtttggtcgagagagttcggctgggcatgtggatcgagcgtgaatcaatatggtggcgcacgggacctcgacatgtctgtaattccttgacatcgtggaagcatcgccgtagttccgcttaatgtcatgggcagggcccgacacgacacaatctccggtaagaaatacttcatagagttcacctatctcccctctttgtttcacacatgtccaatcttgaattagggttacgaggcgatgggggtggtgtacgccggcgagcc

SEQ ID NO: 70643 - DNA, 383 bp, Zea Mays
tcagatcacgtggcccagatttaaatagcccaaaatagatcttagccactcacatagataccatggcccaaatcacccaataccccatttgctgagtttcgttaaatccgagccatagatcgagatccaatggcccacgatgcttgataccccttcagcccatcttttaatctcggcctcctgttagatctaacatatgatataacctgataccccttcgcttgggaaaattgtaaaacataccctcggctaataaggaattaacccaccgtccacccattttcaccgaagcccccccgagttcttatagaaaggtccctgaagtttgcggataggcctaataatctagatttagttgtgtaaaggtccctaaaacttaataa

SEQ ID NO: 70644 - DNA, 668 bp, Zea Mays
acccgttacaagtcggtccccgagttaatcctacaggtttagctaacaaatcccgcaagaaatctagaaccctaactgattctatgctcgcgtggatggtccgtgccgctatggtggacagtccggaccgtggaccgtctggcctcagggccaaaccgtctgcctggacatttctgtgctcaacatatgccccccgccttttggtggaggttgacgaaccaaaagcatatgcactaattataggtaccgagttatattcggtactagggtggcccgatcttcacggcagtaggttgataatatgatggttggctataaaggtgacagaataacaaggtaaatttgctgaagaacaacgggtaatagactctatacctgatcaaggtcggaggtgaccaagcgacgggggagagagacactgaaaccgcgtagactttgactcgatctccaaacgaccgcagaaccacaaccggagctaatccacacaatgcgaggagccatactagaacttgcaaggcatgaactagtggatcctagaggaatctattcacaagtccaggaagaacaagggtagagtaagcactcagcagctcgactacactaatcacttggattatcaaatcgtcaagggttatcaaaagttgtcttacatcatagacatatgtggc

SEQ ID NO: 70645 - DNA, 626 bp, Zea Mays
attgtaactctttcgcttttactctgatggtatgtaatgtctgcgctatgggatgaatgctcttgggcgatgtgaagcagatacaggaaaccggacctgtcgagccattgggtgcacctgcatgattatctaaggtcttcaggacaaggacatccgtaggtgggcctaatatcttgggaggttccgtgacagctcgtattagagcgatgcccatttcttcggacattacttagtgcttcaaaaggtttgaaactacttacctttgaatattctttcatccttatattgttcccttcttatagcaacttaccttttaagaagtcgagtaaagagtgcaaaatactaggttatatgtaggaagtatgggatcaattagtagttgataccatgatcgtagaatcatgcatgcatcatgttcaaacaatactaagtattcttcccctcttatagagacatggctcatacgaagaccacccttcgaaaaagcgactgaacctcagggtgtgcctcatcaccagttggctcctcgtcatgaggggagaagcagtgggagcaatgatcccataggagacctagaggctagagtcgagcacctgactatggagttgtgtcatggaggcagggag

SEQ ID NO: 70646 - DNA, 310 bp, Zea Mays
acttgtcgggatgtgagatgcgtatctcttaccatgacgcagaatcgtagcttttctttggtcagccttacacacatcatcctgcccaccttacgcttcgtgccgtttccgtcagcaggacttcggcggcagtttaaaccgtgcctgtgtttgtcgcggtgtgctgctgtggtcctgtttattattgcccggttcagaatgcaaactttagtggaggatttggggattacacaactactactagcattttctgattaggctagctagttatttgctcttgcgtggctttcagaattagcatggatgaaaa

SEQ ID NO: 70647 - DNA, 715 bp, Zea Mays
cttgtgtgggggctttgcggcattatattacatggctccgcctcgttaaaaacctcaccccctaggaggaaaagagtgcgggcctgattgacattgtttgaagaattacaaaggcacttgggtcttggatcttagataaataatttgcgcaggttatctatattccacgaatgctctaggtcttcgccagatgatgtggcgagcctgtaagcatttggcgaggtatggcccttcccactttggctcatgcttgccccgagactctgttctgatggttcttgtgagtactaggtctccttctttgaattctcttgggacgatattattgtcatgtcatgccttagtctgtgcttgatacttgtttagggcctgcacggcgagcacacagtctccatcgataagatctttggaagttgattcgtcgatgtcagggatggctaattggtttgttcgtggggatccgtgctttaactcttgtggtgtcattgcctcagatccgtacatcagacggaagggtgtgaacccagttgctctggactctgttgtgttcaacgcccatatgacttcgggtagttggtcttcccatttgccctttttgtcgtcgaggagccttttcttgatagcgctgaagatcttgtcgttagctcgttcgacgacaccgttgtactgtgggtggtagacagagacgaacactaccttggtgccgatggagctg

SEQ ID NO: 70648 - DNA, 470 bp, Zea Mays
tcggcttcgacctgtgatttaacttcagtttgagcaacttttttgcaggagcagggctcagcgccttcgtagtttccagcacagcatccagcacgttggccattctcctcctcttgggagttgcagcagaattcttttgcgccttcggcagtgtttcctctgttggagggctcagaatttttggcacttgcatcattttttcagcctttgacccttcagccgtatcaatcttatcttcgactgccttgactgtatgcgtctttggcatcatggtcggctctttggcgctctgtgtaatcgaagcagactgtgttgcttctgctgctggagtggaccctgcgctaaattcaggcaccacggccggttcaatgtaacgcggctggtgggtcagaaccttcacctttttgctcttcagcacaggctcagttggggtgaccgaagcagcaatcttcctctttttctcctgtcct

SEQ ID NO: 70649 - DNA, 621 bp, Zea Mays
cgggatcataccggcttactcagatggacggcacagaagtggggaactcatggaacatagaacacctcagaaaattctatccttagcgagacctcaaaattcttgaaggaacattgtactctgttatctgaggacttcatcatcaataaagttttcattttccaaaggcattcagactcctgacttacagctggcttcgattgggttgggcttgaaatcagcacgcttacttgactaagggtgaccactataccatgctaacagagcaatcggcttaagtcggcgacgacttaagtcggtgcgacatgctcacgcttacttgactaagggtgaccactataccctgctaacgaagcaatcgacttaagtcggcgatgacttaagtcggtgcgacatgctcacgcttacttgactaagggtgaccactataccctgctaacagagcaatcgacttacgtcggcgatgacttaagttggtgcgacatgctcacgcttacttgactaagggtgaccactataccctgctaacgaagcaatcggcttgagtcgccgactacttaagtcggtgcgacatgctcacgcttacttgacttagggtgaccactataccctgctaacaat

SEQ ID NO: 70650 - DNA, 1244 bp, Zea Mays
gtttcctatggtccaatcttgcatccttatttctccaataactattagtccacaagcagttttcattaattaccaaaacaccactaaggggcctagattattcacaactatgcgtgtgtgcaccagactagttttcaacggtcgacaatgatgttgcgactagctgacatatggacagttgggcccaatcactcaggaatgggggaactcaggtgcacaacgaaacaataggtagagtactgcagtgtcttattatgtgtgttccatctgtgtacaatgcatgggtatttataggtaacctggcgggttggtgggtccccaactaccattatacccccggttacctgctacattcctagaatattcccctcaacggggttgttacaatggggtgaagtatagtagcctagacataccaaaaaatttaccccgtaaagggcttacagatgggcctagatggtgttgcgatggaggctaggccccacgataatcgggtacaaccttctcttgcgcgttgcacccttgacccttatgaagtcgtgccccctaactccatggagacctagacttcgctgtctgaagttcgagcattcaggacacgtgcgtggggctatagcgagccccctaccttgactaccatggcctttcacttcatcccctccgaaggccgtggtcatagacctcgacgttgttacaagtcgaagttcccttcacaacttgtgcctccaccaaaacctgtttgatcatagccagattagactgatcaagggtgagcttggcctttgctccaaaactagcccctgaggtaccggttcaacttggtgagctggttccgaagtccttttcgggagatggtcgaatgctgccctcgatcaaaggtttgaagtggtccccaggggggtttgtaatctgattgttgggtcgtgtgatgttttactgtgggacttgttttttcttgaggcgttttcatgggatataaaaactggcaccgcccttggggagggtttttctcgtgcatgttgaaccatcttcgcatatcgccgccgacaccgccacaaattttctaacgttgcctacgtcgcgaaatcgcttgccactagtgaagtggtgcgggtgaaacagactgctcaaattccgcagacggtacataatgtcgtcttcttcttcgtcatcgttcgtcgtgactgtgtcatcgagcgcaccatcatcgaagaagatggttagcgatccgacatcgatcgcgg

SEQ ID NO: 70651 - DNA, 597 bp, Zea Mays
attccttcttccaatcttctaaaaagttggttccctttatcccgaaaggttttcggctgagggcgtctgctaccacgttggcctatctggggtgataatgaatctcaaggtaataatctttgatcagttccagccatcttctctgacggaggttgagatctggctgagtgaagatatacttcagactcttgtgatcggtgaagatgtgacatttgttcccaattaggtagtgcctccatattttcagggcatgcactatggctgccaattccaaatcatgggtgggagaattctactcatgtggcttgagtaggcgcgatgcataagcaatgactttctcgttttgcattagaacacaccctaagccttgccttgaggcatcacagaagacgatgaaatcctggtgtatatccggtagtgtcaaaacgggtgcggtcgtgagcttctcctttatgatctagaaactttcttcacactttggggtccacacaaacttattgtcttttcttgaggagcccggtcataggtcttgctatgctggagaatcccttgataaagcggtggtaatatcctaccattcccagaaagcttcgaact

SEQ ID NO: 70652 - DNA, 415 bp, Zea Mays
aaggccttcggctgctttgtcgcctcctttagttttggctcttcagccggtcctgtcttggcttcgagaggcatagagcgacttggctcaaatacaaaagtagacccttcaactagcttcggcgcttcggccgtttcaatgcgcttgggccgatgggtcaaaactttaaccttctttgacttcgacgcgctagaagtcgttgaagtagcagtctttcttttctttccttgctttcgcgaaggataacaataatctggatatacgaatccaatgacatcaaacaccctgtttggccttttcttgcctcgagccccgaagggcgttgtcatggcatcatcttcagccttcgagtaggctccaagcaattcatcgatggttgcttctatggcgtctagccaatcatcatttggctcat

SEQ ID NO: 70653 - DNA, 432 bp, Zea Mays
gtgaggaagaattctgtgttgggtggtaatgcatcttgaagatcgagtttgacttctctccttctttgacgaggttgatcttttcttctccagtcctggtctcattgattcgtggttagtgtatatcatcggttagggaatatggttaagatagatatgaatgagatagactacatgatgtaggtcaaaagtttgtttgatgttaggtggggataggcagattatgcaatccatcatgactctattggttgggttgtttgcccatagattggttggataggttatgtaacatattatatgggtcatgttgttgtgtatggccgagtttatctaagatctcaaacttgtttataggggcagggtctaatctattttttcccactattaattggttaagtgactgaccttaggttagctcaacttaagattaga

SEQ ID NO: 70654 - DNA, 606 bp, Zea Mays
gtgggtttattttatacttcactgagggttcttttgcattattccctagccaaagaggtaagtgcttccttgggccactggatcagcccccaacagtccaaattagattgtatcataacccgaaccggtatgttacccgagccgcacatcccgtgattgacgtctcaaaaccacacacacacccagggcatcagatctacggtcgacggttgaaaccaaagccttaaagcagtatggccccgttctaatctgagtcgcgcatcccgcgatcgacgtctcacaaccacacacacaccctaggcatcggttctacgatcgacggttcaaaccaaagcctcgaaccagtatggccccattctaatccgagccgtccatccccagatcgacagtcagggcttatctttctcctctcgacaaccaaatgtggagacgcccagggccagtgcgacggcgccatggccgagctcacccaccccttgtgtagtggctctaaacttcgatcctaacggtgctacacgatgcgaggatgatggtgatcgaatggatgggtgactcaccaatggtgatgaccggaaggaagtcatccatgtcgaggtttggagccat

SEQ ID NO: 70655 - DNA, 559 bp, Zea Mays
aaacgctagaggctagatcaatgatctgatgttattgtgagcatttgtgatcctagtccacttgagtgagtgcgacatgctgtggtggaggccggagacttttgcatagtacatcatcaataatgcacaaaggcattctttagaagtgaagatatttgatatgggttgcctagcactggtaaacagaagggagatgcgtgatgtgtcatcaggtctgatctggagatggacggctggagacgcttgcccatttggtgtggttgggatctgctcaatcgcttgataaggactcagccccatagcttttgcctcctagctcctaactctagacctctcgttgtttatattataagccatctctgataataacatcctccatagctcgatcatccctcaaaaacagcaacgatataacctttttgacggtgtggccacgtgtacgtagtatacgtacctatccatgcaatgtcttgctgctgactaataataggcgtccctttcttacctggcgaatataggagaatatacaaaaagaacattatgctaaggtatatggcac

SEQ ID NO: 70656 - DNA, 430 bp, Zea Mays
taatgatcgggtaatatgttttaactggtagaaaatgagttgtcttttaagccggtcaattatgacccagatagaatcaaatcctttagctgtcctggataatccaacaatgaaatccatactaatatcttcccatttccaggttgggattagcaaagattgcaatggcccagcagccttcatatgtatggccttgatgcgtctgcaagtgtcacactttgccacatagcgtgcgatttcaatctttgttttagtccaccaataatgttgctttaagtcttgatacatcttagtgcttccaggatgaatggaatatcgactaagatgagcttcgtctaggatttgttggcggacctcaacatcttttgacactactatgcgatctttaaaccatattactccttgatcatcttttctgaaacaatttttc

SEQ ID NO: 70657 - DNA, 530 bp, Zea Mays
gtgaattatgtcatttaggcttagctgtccgagataatttcatttgtgatgaaggtaaccagagcatctgtccttttgttttaaacataaatattttgatagcttaacttgtgcgtcattttatcatgtactaacatggtatatagatggcacttagcagtagcattcctgacttatgtgattgtcctgttagaatgcttttgcagtataatgggcttatgataatctatttggaatcccattatgaataacaattatggatgttgggcattttgtatttttatgatgcaggcttaacgaattttcttctctgctcagccctgccagtggagacctctatttatagctataatccagccatatctagtgaactaacagatctattcctatctctagtgcttatccccttaacagatttatattcctatctctatttctttgatgttacttgctgcaggtgctatctcccactgatgcattatatgacaatcactcgaagaatcagatgctaattaactgttttatacttg

SEQ ID NO: 70658 - DNA, 1091 bp, Zea Mays
gcagccaaaccaaaaaattgagttcgggaattcgacgatttactcgggccgcatgcacaacgtttggggtattttgggaatggagttgaaagaatggaagtgttgcggaagtttgaaattcaaatccattagttgacaccgagtgctatggaatcgtcgattgaggtgttcgccaagaattattgtctccattggtagaagaagaagatttggtggattgattgctcaatttgggtcttacatgttcacgccgaggactgggaagacgtcgaccgaagttattgaaattgttccatatgccaagaacaagtggggtaactagtgggatttctggttttatgtggcaccgaaggatgtcgaaggggtgcccaggctgcccccgtctattctgtgttcgcactattatgtggcgtttccacaatttaaagtgaagaaaggagacaagagcgaagaggcccttcgatacgtagcctgtttgagcagcggccgggatttggttgaagaatccgttgcctacgatgtatgaccgctggctcacatgtgggatctgggcaaagtcaagcttcgcccgatgccctttttggatgatcggatggtgcaaagccctaccttcgccattgatctgcgagggcgggatgcggccgccttcattagggaagttgagtcggaggctgttaaaattattggtaaatatgtgtcgaagatagagttgataaggagttgggatatacgaggttccaacgttaggttgaactgagttttcgaactgaatagcttgcggtatagtccttactcggaggggaattcagctgatgctggggacaaccgagggaaaaaggtgaagacccagtctgaagagggcacctcgaagggaaaggtcatgattgcagcgactcgaaagaggaagatagaggcaaaaggtacggacaaggaaacagcaagaccaaaggcctctaggtttttctttgaggaattggcgggacatgtgctgggcatagggaggttatgacttcgcccgaactctaggaaacatcttcgcgaatgttgaatgtgacaggaggtcggtggcataggaaggaccctattccctg

SEQ ID NO: 70659 - DNA, 763 bp, Zea Mays
cgacacaataccacttgaggtgtgggataccatatgtttcaaaaaaaatgggtggctagaaaataaggaatcagaaggtgtgggtatagattactgtaaataaacatataaatctcaatccatttacttccaccctgtagtagcgtctaaattattgggaaactgcatgtactatctacttatgtaccaacggaacatgaataggaaatgaatgtataagtttttcacagagtacatatggaaatgtaccgaggaaataaacggttgtacatatgaatcaatgagatgcaaatgaaataggaatagggcggacgtgttaattaaacctgatggttgcttgcagaatatcagagttgaacctgaagtggtgcatataaagagaaatttactggggttagttgcttttagtggcattcccctaacacattggaaatttggaatcgaactgtgctagggtggtgtgatgaccctaggtcacctatggagttgtacccgtggccgccgacgagagtccggacgtgagcgcctgaaacgagcgtgaagaaatctccactcgacacagataagttgcggtgtctactttcttcttcttttctcctggctgttcaatctctggatacattttataggcccactaggtcggttacttcgacctctacgaatactcaaacagaatgtacgaatactctactgaatacgtactgctattacaaacttgatcacacatatacgtactgcttaagcttattcttcagctgtaaca

SEQ ID NO: 70660 - DNA, 287 bp, Zea Mays
caacaccaacgatttagattgttggataacccccttactcactcaaatccaatggacattattatttagatcatctcttatcctttcccctcctctcgcgacttcttcgcacccaccattcctcctccctcgtgacgccaccaccgtcgacccttcctctaccgggatcgtagtgttagcacatgctatatgctagtctaattaacagaagagtgagcacaacaaatgtaaagagaattgtgagggagacaaagaatttagagagttttggaccatctaggggcgga

SEQ ID NO: 70661 - DNA, 371 bp, Zea Mays
acagcttgctgaaaaccagggtcaggtcttccactatagtcgacccttctctagtcttgaccacgatgtcatcgacgtagatctccaccttgtcccgaatcaggtccccgaaggtcttactcatcgcccgaacaaatgttggcaaggcgtttttcagaccgtagggcattacaacataacaatacggtccgtccaccgtcacaaaaagcggtatgcttcctatcctccctagacatccggatttgatggaaaccagagtaggcatccaagaaggacaaaaggtcgcaccccgaggtagagtccatgatctgatctatacgtggcagtgaatacgggtccttgggacatgccttattcaggctggtgtagtc

SEQ ID NO: 70662 - DNA, 276 bp, Zea Mays
aaatataaccagtataaatcttgctgtgagatgctttatatactataccgaaggtactctaaataataaattcggctatctttaggtttgtttctgtaacgatggaatggaacaacctttatcttaaatgcacatacgtgtaaacaccaccgtaccctgcagtagtgtctgtgtgcatgcacatgtcgtgaagatgcagtgtctatgtgcatgcacatgtcgtgaagatttggcacacatgtcgtgtagtccacacttttagttatctttggacac

SEQ ID NO: 70663 - DNA, 324 bp, Zea Mays
gtgcggcaccgcggcaacaccccccctccgatgaacgattcccatcaagagcgctacctaggtcaagtatgcaggacggctacacaacctagcgatgagggcggagattcggaggtgattttaccggaggatggcagcgcaggggctccgctccacgtgatggcgcctctctaccatggttcttggacttcgacgagcacacacttgacccccggacgccaaacctccataacgagctcccagacactatcctcagggcgcggcggggcttctaagatcgattcaatggcggcctcgcgagcaccttccactcttcctcacgac

SEQ ID NO: 70664 - DNA, 383 bp, Zea Mays
agaagatatgttgacaacttgtgctcttaaacatggtggcagttgggacaagagtttaccatacatagagttttcctacaataacaattatcaagccagtttgaagatgtccccatttgaggcattgtatggaagaaagtgtagaaccccgttgtattgggatcagattggtgaaagacagttctttggactagaaattatccaagaagcagatgaacatgtttggataatcagggagaacctgaggacatcatagtctaggcagaaaagttatgctggcacccgaagaagatagttggagtttgaggaaggtgatcacgtatacctaaaagtatcaccaattcgaggtatgcgaagatttaaagtcaaagggaagttgccgc

SEQ ID NO: 70665 - DNA, 459 bp, Zea Mays
gtgggtacaacggaagtagtggatggctctagagcgacaggagtaggtgaagtgtgaggtggagtagagacagtggcggaaggtgtggagcgaggccaagatgcgaggcaacgaactcgataggctatctaatctaaggaaatctagagctagcctccccgctcagcctgctctgctgctgctgtcgctacaagtgctgcacgagcggctctatccatacgtcgcttcctcatgccctcctgctgctcaaggtaatctgtcttccctttgacccgcctgaaggggcgaggagggtcctcctcgtctcctcctttaatgatgagacgttcttcgtctgcaccatcctggcctgaatgttgcacgatagagtgaaactataagcaggagtagagagcagccgataggatctcaaatagagtgatagctacctggaatcctcacgagagagagaagatccag

SEQ ID NO: 70666 - DNA, 730 bp, Zea Mays
taactttacactaaaattcatcaattctattattagagacaaatttgatgtttcaataatgcgacaaatttttacttgaatagagaaatttattttgaccaaagaaaattctatgctttatattgtatgtatataagcaatgctagagggttgggggaggggggggggggcaaggcctgaccttgccctacatatctccatgcagagcttctttgtcatgcccctcttctcagcaagagagatagtacttctcgtcggctccttacccttgcattacgctcttgctttatcgtggccaatatggcatggtggtttgacactatcgggtgatgcagagttataattgaagagcaccttgtcatgtccattagagttgtcttttcgtgtcgtgagcactgtgtcatgacgtttttcggcaacattgttttctcgtatcgtcagactcaaggtcactgtgtcgtgtgcactgcttggattgatgatgaagagtatgctacatgtgctctaggttaaatttcatttttcatcgggtttgttacgtaagctttcctttgccgattaatgtttgtgcgacgtcagcgatcgcgtcgttggatcccgccttactcatgaggccctgcctcccctcctcgttagccagtacaaaaagacagacgcgggagtagctgcaggtaggagtggtaatggatcacgatccaaatgcttattcacaatagattagggttcttaa

SEQ ID NO: 70667 - DNA, 800 bp, Zea Mays
atgaagttgatccacatcggcccagtcaccatcttgttgttgtgcctgggcctggtcgaccgccgcggcccattgggtgcatcatctggtccagaatgctcccgctccttgctttgttcctccagtgcctcgcctgtgtcactgacattccccctggtaagctggttgtttgcccccaaacagacgcatatggaaattgttgtcgtagatcttgaatatcctcccacgtcgtgagttctggcgacatgtgagaccattggaccgggacctatgcacaagcttgcagccctttcatcactgtgcggtgttgcagaatcttgatcggcacactaaaatgaaattggttagtaggcaaagtcacagatgcagtgaaaccagtgcccaacgcatgcttaagctgtgacatatgaaaaactgggtgaatgcgtgaagaggaaggtaattgtagcttatacgctactgtgccaacacgctgcaacacttgaaatggtccgaaaaacttgaacgccagcttctgatgtgctcgaacagccacggatgactgaacgtacggttgaagcttgagaaatacccaatcacctactgcgaactcacgctccgaacgacctttgtccacctgacgcttcatccgtagtttggcacgctccaaatgctgcttcaccagctcagacatgagctgacgctccttcaaccaggaactcaattcagaagacataataacagtctgatctgcaatgccaaactgcttgggtgtgcaaccatacaatgcctgaaatggagacatgcctatagctgaatgt

SEQ ID NO: 70668 - DNA, 456 bp, Zea Mays
atgagggcagacaaagcaggagagggaactccactactttcaccgctggcgatgaactgccgactgtttttcctcgtcaagggagcttcattctcttcctcatcatccacattgacaacacaagcagcacccccattgggatcagcaacaggtggagcacccccattgggatcagcagcagattggttacacccattggggtcagcgtcagtaagtccagtcgcaggcacttcttcagtagcaggaaccgaggtaccagcgtcctgatcaaaactggatactcgccggaggcgtcttcttttcttcttttgctcatcaacagaaggatcaggtttctgagcgtccaaagtcgtatcagcttctaggaggggcaccactgccaacgccccagcaggagcagcatcggaagaatcctcagcaagcaaatcaagcatagcgtttatatctgcatcacta

SEQ ID NO: 70669 - DNA, 366 bp, Zea Mays
aacttatgtcatcgccgacttaagctgattgctctgtttgcatggtatagtggtcaccctaagtcgaataagcgtgagcatgttgcactgtcttaagtcgtcgccgacttaagccgattgctccgtcagtagggtatagtggtcaccctaagttgagtaagcgtgagcatgttgcgccatcttaagtcgtcatcgacttaagccgattgctccgtcattagggtatagtggtcaccctaagtcgagtaagcgtgagcatgttgcgccatcttaagtcgtcgccgacttaagccgattgctccgtcagtagggtatagtggtcaccctaagtcgagtaagcatgagcatgtttcaccgtcttaagtg

SEQ ID NO: 70670 - DNA, 299 bp, Zea Mays
ccgggagggacccgttggaaggatagatcttagggtttgtcttcggatcggcaggtcatccaaaacgtctctaaacgacgtagagctggagagaggtgaagattagagagaggaaactatgttactgtctactcctaggataaaatgtaaagaactaaatgtatattgattgtttgatcgatggttggtttttcaatcggccgtaccacttcaaatatataagggggaggtttatttagactcgttcctatgcgttctctaacagccccgcgggattagaaggctaaacacgcgaggag

SEQ ID NO: 70671 - DNA, 355 bp, Zea Mays
ccggtgcctcctcaacatgtattagtcaggcccaccgaagatcagcaaacactcggtttcataaggcaaagtggccctcgctttctcttgctcgccatcccagtggggctcgacccctttatcgagtggtgctcctttgctcaggaacttcctaagtaacatgcagtctttgtaggcatgtcggaccgtgtagtggtggttcggacatagggcctcgtgtagtttctcgaaatggtcgatggcgtccttggtcgatgatctctttcccttttggcccggcgcagctaccaacatttcgtcatgcctccgtttatccttctttctcttatcgggccatcctccggagcctccgacg

SEQ ID NO: 70672 - DNA, 302 bp, Zea Mays
tggcgagttagtggggaacagagttacagatctacgagagcccttgtgccatggaagatgaagaacaatgagcgtgggttaagttctaggattttagctgacgaatgcctatagctactcagatgctatagtgattgcatttcccctttgatagtgtggctatagtgcttgtattgaagcggtgcagaaacagagtcagggtcaggtcattgcacctttatatacctgcttgaattcactgattccactgtaacaagtgtgttgtcaaacagtgttctcttccgtgtttcagtgcggttcac

SEQ ID NO: 70673 - DNA, 991 bp, Zea Mays
gttgcctccgaggagtttatcgatgggtttcacgatccgccaacgtggcttcaagaagcgggcgcgcgggcgcatccggtcttgccgtggctccctgttgattgccggagcttgatgggtagcgggtgcgggacccgtgctggtcgtggcggtgagtatggttcggacgggattgggttggagaacttggtgttggtgcaaaacgaggacgtggagatgcaggaggctggacgtgttcttcctcctcaagctcctccgcttgaggactcaatcatgcagagagtcgtggctctgcagaaggagattgtgacagtggaatctgtcttggcggcccggcgggtggcgaaggatttgcaggacctttgcgttgagtccaggaatgctgcaggagtgcttagcttagtacagccgtgggaagctgacgatgacactctgagggtcttgctttccaatttagtgcttgaggaagatggggtggatggaaaaggaccagcacttgttctgtgttctgttttcttaccacagttactggagcttcaaagaccagcttcatccgttctcctttccactgcattgggtctctgcaagcgccacccagctgcagcactggaagctgtactctttccactggttcttagaaagggcggcctaaatgttccccagtgtgatgtgttaacacgtattatcaaggaatgcatgcatccactgcaagttactgctttctgccataggctgctttcaggaaaggagcaagagaggaaaccaatctgtatgcctcagcatatggagaatatcggtactcatttggtgtggacggaatctctgtttgcactattttacaacattcttagtcaagatatttacttgacaccaagcaccgttaatgagctaatttctgtgattgatgaccgggcatcagagttcccgaggtcattgaaatttggcaactttctgctgtgcttcttatcaaagtgttggcatgaatgtaagc

SEQ ID NO: 70674 - DNA, 458 bp, Zea Mays
tagagtttcttattgggatcgagtggcgccgtgtagctacatatggcgtggatagcgccaccgacgcctcaaccaccggtaagtcagtccctatagaggtattccatttccccgcattcgtttacactgtgtataggtcggagtgggtcactagagcattggggagcatacaccgacaaggggcgtcaccgtggtggatgggtgtcgttgcctgatgcatcgggctagtggatggtgataattaattgaagaataccattcaggtagatgcgatctagactcttgatcgtcgagcggacgattaggattataaggggcataccattttgtcgattacgcgtgagtcatggatctttgatcggatggcttgggtcgagtgggagtaataacagttttgtaacatttgcttaagagacctgaaaatgacacgcaatccaccacgcttgttccaacaacct

SEQ ID NO: 70675 - DNA, 486 bp, Zea Mays
ccattgccaactaaccgccgcgtttaccggggaatcgggtagagatttgcccccctcgacctgggtataaggcccttgggcgcatccgctacccctacctatccccacgtgagcagtgtcgagatcggtacaaccggagagaataggttcggagatcgccgccatggccgacattgtctacactctcagccaaccagtgcctgggcctcggttggtcgttgtggggtacccacggcggaatccgcgcgtcttcatggccttgttggatttgatcggtgaccaggtcgccctgatttccttcccggagttgaggtcatccgccagtgttgctccgctccatggtcggcctcgttgttgccttgcctccggtaatctactgctccttaggttagcccatcgtcttctctttcctctgcacgagctcctgcactgtgtgcgctgtggtgctagggcgggtttgtcactggaatttggcgccaccgtggc

SEQ ID NO: 70676 - DNA, 566 bp, Zea Mays
attttgcagtcctgctcccgccgacgaatggaatcggtcgtcctactccatttccgtcaataagatgggaccggtagccggtgtcgtccatgtccatgcctgcgcgtcggaaacagagcgcgtcccgtgcccattccagtactctcgactctcgtgcgcacctcgtatgcagtatgagcgttaccaaggcacaccggtggacagcacaaaaggggttgggcttttttttttgtagcccacggtcttgatgcaggtccaggaagacagcacacaggtcagccagccattggttgggcgtgtgggccggccgggccccctgttacgtttctgaatctctctgaaaacggccacatgatttcgcgccctgaaacccgcgattacggcaacgactaaatagaaactgaaagtgtactgtataccctacacaagcgtaagcgtaacccgcgttcgtcttcgtcgaccccagtcccaacagaggttctccccactgcccaaacggagaagatcagaagaagaaggggaaaaggtcagtcagtacgtctacccctcctccgccccgttgtttg

SEQ ID NO: 70677 - DNA, 607 bp, Zea Mays
gttgtgatccttttgacttccgtaagggttgggcccatatgttggttccttatgactcctagcgccccctcatcggtatgaccattggtgcgcccttcatgccttctaactttgcgcgagaggtctgggcccttacatgccatgtgtcctaaggcgtcaagggcgatggaggcttcattttctaggtgttctatggcgcgaggggtccgagggccctatctgtcatgtgccctagggtacgaggggtcccgaaggcttcatttgctagatgtctcgaagaaaaaggtcttattgggggccttcttctaccttatgtcctcaaaacactaattcaataagtgttttctaccttgttctatatgttgcagggttaatgccgaaggtaagtttcgcccaaaattaccgatgcacatgattctaaggaagaagctttaggcaaacactgtacgcatacttgataaagttgaataaaatcacaagaagctttcgaagctcaagagttcaagatgtgagaaggataaggacaacattgtcctcgataatgtatgacaatttaaatgtatatgttctaggacatgattgtaaattcgctaaacctatactgcac

SEQ ID NO: 70678 - DNA, 469 bp, Zea Mays
agaggctcctagatatcttattggggtggaagtggtgcttagaagctgcaaggtggagtcctagctaagtcttgacttggcagggctccagcctcctggtcctcgatgacactcctcctattcgtccttgtggatttgtctctatctgaaggtgtccgattgtgtccaagagctctccccctgcccggcggttggtctctcccttttataggctaggacaagagtcgaccagcggtggcttccctaggaaggagtcgtaaggtaggggtaaaaccaatgttttaacccgggtgagaccatgcgtacttgtggggtccggggctgcctggctggctcgtatttattgtggcaaatgacgtgggggcgccgatggtcctaggcatcatcattctagctatgtcgatccctggcttttgtagactagggctcggcacagcatgttgtatattgccatgcggaaggtctgcgc

SEQ ID NO: 70679 - DNA, 776 bp, Zea Mays
aagcaagcaccttgtatgtggtaccaacagttcaccacctacattcaacacctcgactttgtttccgccacgtccgacacccctctttatctgcaaggagggagccgccgcagtttacctcctactatacgtcgacgacatcgtcctcaccgcctcctcgatggctcttcttcagcacatcatgggtcatctgcattcggagtttgacatgactgttcttggtgccttccaccatttactcgtcatttctatcacgtgcttatctgttgacctgttcctttctcagcaatagtatgcgcatgatcttcagtgtgcaggcatgttcacgtgtcactccaccacaacacttgtggaatcttgggccaagctctttacttcggatggtgctctcgttgtctataggagtctcactgatgcccttcagtacctgacacggatccacctcgacttggcgtatacagttcaggttgtctcttcatgcatgatcacaacgagcctcacctcgtgccaatcaagcagattctctactacgtgaaggcactctctcggtatccacatcggcaccaactccatcgactcgttgacaccttacttggatgctgactaggcaggatgcctagactctaggttgtctatcttcgaatactatgtctacttcggcgagaacatggtctcctggtcaacgaagcgatagaccactgtctcctgctccagcgacgaggcaaagtatcatgccatcacctattctatggtcgagtgttcttggcgctggtagc

SEQ ID NO: 70680 - DNA, 893 bp, Zea Mays
ttgggcctgcgcacgcaaccgctactgatactgctaattttgtggcgacttcgaccgtggttgctgaaaatgaattggatgatttcgtgtctaagttttttgagtctgatgattctgggggttcggttgtgtggactgaagagtcttcggatgaggacttggattattttgcggccttggatgtagctgtggtggaggcttctccgcgtgtgatggatgctgaagtttttcctggtccgagtgctgggcgcaggcggcgaagggcggtggcgaagcgtagagtgagtgaggtggagggtgggtgtcttcgtgtggatagggctggcaagcgggaattgttgtccttgccagttggggcgagtgtaggtgagggggagttgcgaagtctctttgagggtgaggagctgaggataatgatgtttaactatagggagatgggtatcatcctgaaggttgaaccaatgtaaggtgtgatgccctcgctgtatgtgtgtaactttaattggtatgatgatttgtatgatgaggctgtgtgcgtttgctgatctggcggtgcccgtgggggacttgtgcacttgatctagcgtgtttattatgtcggtccggctgcacctgcttttgagggggacttcgattttgagcacccttgttgtgctaatccttgttgcgcactttttgtgctaatccggctgcacccttaggcgacttttgcacggatagtcttttggggtagacttcgattttgcgcacttgtgctaatctggctacacccttaggcgacttttgcacggatagtcttttggggtagacttcgattttgcgcacttgtgctaatccggctgcacccttaggcgacttttgctcggatttatgaggaagaccttggttttgcg

SEQ ID NO: 70681 - DNA, 462 bp, Zea Mays
gcaatcgcactatttgatcaacataaatttctgcatacttttctgtcttgtgggtggtgtgcactggcaagaaatgagcggtcttggtcaacctgtccacgataacccaaatagaatcatggtgcctggaggtattgggtaatcccactatgaagtccatgcaaatgtcctcccattcccaagatggtatgggaaggggttgcaaagggcctgctgccttcaagtgactagccttgattctctggcaggtgtcacattcggatatgtatttggcaatttccctcttcattctggtccaccaatataaagatctgagatcatggtacatcttgttgctactagggtgcatggagaatttggaaaggtgagcttcatccagtatcttctttctgagctcagggtccttgggaacaaccaatcggtctccgaaccatagaattcccttgttgtcctgtcggaaac

SEQ ID NO: 70682 - DNA, 503 bp, Zea Mays
cttcaaccatgaaaatctgattatatccggcattaccatcaagaaagctaataattatattccctgatgcattattgattaacatgttgggtatgggcatgggatattcatctttgggagttgctctatttaaattacgaaagtcaatgcatactctaagcttacctgactccttctccaccgacacaatattggagacccactctgcgtatctgcaaggtctaataaaattagcttctagcagcaggtgaatttcgtccttgattcttgggagaaggtccggacgaaatgttctagctttctgtttgaaaggtatgaaaccagacttaatgggcagccgatgctctacgatctcacggcttaatcccggcatcccagtgtaattccaagcaaagcaatctaaatattctttcaatagaccgatcatttcatttctaggatcggtctccagggtcttgtttacaaaagtcggccttggagttttaccatctcctatgtcgatc

SEQ ID NO: 70683 - DNA, 638 bp, Zea Mays
tgaaatgaaaagttattgtcgcaagagaatttgtttttggagcatgtgcattagtgtaatggaaattagacatggtgttaatatctctatcttttataaataaaacaccactagagggtctatcggatcctataatggtccatgtgatcacttaactcaatacatttgatcaaatttgtcaactagaactatcaatttccccatctgtttcacatgcatacccaaatagattgcatactcattcctcccacccaccagtccatcactttgccttgccattgtgtagatgaatagatgacatagccttattagctacacattggacagttgggtcgatgcattaacaacccctcacctctagagctgctgccttggccttgcctactgcattaacccaggagttgtagaaccttgtactggaagtgcaaattgtccaccagtcgtagctagtgcagattttccaacttcattcaacccttatgactattagctttccaatgattgatgttgagattgacggtgctgagttgagagcggtatcatggtgggttggactcctaagaagatccatcaaactcttgtcccgatgagagatgctctaacaagaggtgtccattgtggcaatacattggtccaat

SEQ ID NO: 70684 - DNA, 609 bp, Zea Mays
gacagccccctattttcttgtgccatgtacagtcttagaataacttctagggccatatacataaagagtctagcatcaggtattaacttgaagctccattccttaagcgccttggccgtgaactgcagtttgtagtacaacctatgaaaaggctcgcgatgttgggtcggcgccaaccaggcttgctcaactgtatgctggaaacctggtaatttggtccagaaattctcaaatttaaaggaacgtggacgcctcggcatagtagtattggataggagcagcgggcagtggtcagagatcgaggatgatagcgcatgtagtccacatataccgaacatctcctcccactcagagttgcagaagaatctgtctagtcttacgagagtggggtgtcgtctctcattgctccaagtgaacttcctgttttgcaaaggaatttctttcaagtcgcaaatgtcgagagcttgcctaaacagtagcattaggcgaaggttgattcaagaattgtttttatcacttgctttgaatgtgcagttgaaatccccaaggaccaaccagggggaaggtggaggaggcctctgtgcactcatctctcttagaaaatcaggc

SEQ ID NO: 70685 - DNA, 1518 bp, Zea Mays
cctttcagtgcttcctggatggtgtctcgtgctttacccattgctgccatgatctatggagctgctggtgtctcatcaccatcagcaatccgtaaagcaatgagaaggggttgtgaagcccttaggacattctccaaatttttccaaaaccctacagagaggacaatgttctcagcttgtgtaccttcttgactggtagataatttagaatgctgccactcatcacaaataaacaaactgcgcagaccattcttatgtttttgcatgcttgccaaagtgaggaatgatgttgcaaaccgagtaatacctggcctaacaaggtccccacctagcttctccctcattaggctatgaagtcatccatgcttgtagaggaacctcgacaccctttttgccatagtaatgcagtcattgaatttcttgttttttccgatgtcctctaacaattaatccaaacagtgagcagcacaaggcgtccaaaataggtgtggaattcttttcacaagagccctccctactactctaaagttagatccattatcagttactatctagacgacatgttctctacaaacactgtcaatttgcttctctaatagatctgccaacaattcagcactagctacctcacttgatgcatcaacagaagctaaaacgaatgtccttgcaggactattagcaagaaagttgatcaaatgttgttgtcttgtatcggtccatgcatctgacataattgagcagccatattccttccaagcttgttcatgcttcgacctcaatgttgttgtcctctcgacaaccctatcaagccaaggcaccctaacatcatggtacgatggaccacgatatccaggaccaaattgcccaattgactccaacataacctcccagctccttgaattgacgacgtgcaatggtattttgttctcatatagaaaatctgcgacatggtcgttaacaatttgcttggcttcctttcctttctttgtgcaagcttcaagagttgactgagtgtttttatttttatgcctatcagcaacaaattcttctggcgtcttgcaaaacatggcagccactgacttgccgcacttttggttttgggtgggatgaactgaaacaacaaaagagctgatggcagcttgagttgctttcttcttcgcttgcttgtgctttgtccctgaacttggttcatgtaccttttgttcaggttcagtagcatcaccatctttttgtcctccttcctcactttcaacagaaagcacaagccttgtgttccttttcaaataagcatacatatccttcgaaactacttctggaaccattgaacattttgtcgtatcagaaaatccactggcaaggtgctgtttgaaccttttaatcctagaaggaacaactttcaaacagaaaatacatcggatgaattctttcttggtaggatctggccaccatccaaacttccaaccaggatcttgtgatttggcctttctctttgaatcagttgcgtgtgcacgaacatca

SEQ ID NO: 70686 - DNA, 455 bp, Zea Mays
ctccgaccgccagcacggctcggctaaattgatcaccaccgctcgcaggctctataaattgaccgtgcccccagctccgccatgtatccaagcacctactgcacccacctgcatctcaaatccctcacccgcaagcacgaatttcggattctccccaatccggttctaaaacaccgtgaactcaaccccgtcgtggtcagcccaactccggttagctcctcccctctgctcccttgtttaagcattcttatgcgtctgcgatgcttgccgagccactgaattgaactaagagtcctctggtcgccgggaacacaaccgtatagccgccatgatcacggccaccgtggccagagctacgtagttggtcttagttgcaattaggttgggggaaatggttagggtagccccgatttcatgtctctcgctcggagaacccagtcgttgcctcgttcggc

SEQ ID NO: 70687 - DNA, 476 bp, Zea Mays
ttgatcatttgatgattttactgtctaagtaggtgttgttgttcttgatgtcttctttttcatttgagtgtcctccctttgtagttgtccccttattttcaagcttattaaaaaaatactcaaaaagggatattagcagcacaagggagataaatgatgatttctttagataagagatataaacaattcatcatccacaagtcacacagacatgaagtaaaatccttaatattagtgcacatcattagaaaaggggaatatgcaccttttaacatttctaatcaatcataggaattttacttcttcatattgaatttattaacataacttagaagcatatcaatgtgagaacaggtatagcaaaggcatgaattatattctaatggactaatgcatttatgaaaacagaattgaatgcacttctagctgattttagtccaataagaaatctattcttttcctaggtggaatatgat

SEQ ID NO: 70688 - DNA, 512 bp, Zea Mays
attttatctgtatgcttttataacatctcgacattagggggaggaatgcccatatagtgtaatgcctcaatattctattaaacgcacataagctaaattgaaccggtcgttcggtgtgtactcctgtgtatatggagtttgccagaaatcgttgaggattaaccatattggtttgaatgcttctatctgatgtagatgtggatatacccgggattaatatcatatccacatttgacttattggcatttgatctattctgcggggacgcctgcggatatggtccattggccttagtcaaagcatatgttctgattgcagattcacgtggtctgtgataactctcctccgattaattccccctgatggtgatttacctcacgaagaggttcatcttgatgatgaaattcctagcaatgcgcgcaatatcattgtgttgggaatacagaacaatgaatctttcgttttgggaaataatggagatcattattaaatgtgggagacaaatatgtcga

SEQ ID NO: 70689 - DNA, 601 bp, Zea Mays
aaaaatttcaaacaagttgtattgtttaagtgtttttgcaaatagaaccctggataggaacttaaccctaaatagggattaaaggggtaaaacttaacccaagttaagaaaacctaaaggctttagggaattagctataaaatatccccaaaaataaagttgaatcacatttatacccctgggacatcaagaatctcaattagaaccctggaaaaccctaaaaccaaaccctaggctaattctgaaatcagggttataggcccaactttggggctgtgtagctttcaaaatagtgagaattcatattaggtcaccacatcaaaattgtaacctgattatagaagaacaactttgcttaaggtggtaagctcacttgttaagaaaaatccagagataggtaagcccaaagttggactgtcaggctggtggaattctgaaattcagaacttcagtgaaacagagctaactttggacttggatttaagcatgatccagtgcaagtttgggtatgattcccataacaaatttgtagatggtatattactctacaaatttgctgcagagtgtggatcacgttgccatagaaaatctggagaaaaag

SEQ ID NO: 70690 - DNA, 638 bp, Zea Mays
gttggacgttcgccggcgagtacgccgccgggcgagctctgtttctcgcgcggggtgttctgtcgatggcgtggggcgtatcctccgtcgatcagtgaacgaacgagcgcgattagttcatcttactggtgcgagggggacgaagtttggtcgttggatcatagatgaaggagtgggatcggatctcgcgcgtattaaatctagggccttggatctagatccaacgatccctggcacatacagattcctcgacggcaggatctaatccttgccacaggactcagatcgtgtggctcgggttatctcgtaccccttcgggcgacgactttgcaaaagaatccctgaaccttggagaattaaactcgcagtccaccgcgggtaggttctgagtctgtggaacctttgcgttttaaccccaaactctctgcaaattatgcacgccatccaggactcgaaagaaagaaataaatgaatatagaaaatgaattcctagtgtaaaaataatcctaaaacttgtttaattcatacaaaactcattttaactcctttttagtccattcaggttctcataattttgtattaatattgcctactacttggtaacactgttttgacatgaaacctatactagaattgat

SEQ ID NO: 70691 - DNA, 392 bp, Zea Mays
gccgtttctcattgaggttttgaggaagatggggtttgggcagatttggtgtgatgttgttagtgggttgttggctacttcctccacaagaatcttgctaaatggcgttcctggggagatcatttcgcaccaaaggggtctaaggcaagcgacccactctcccctaggttgttcattttggttatggatgttctgaacttgctcattcaaaaggcttccgatgaagggttacttcagcagctatcatctgggactttgcatcacaggctttctctctacgcggatgacgctgtggtttttcttaggccggtggcttcagacatcaatttggtcctggagatccttcggttttttggggaagcctcggggctcaagaccaatgtccagaaaag

SEQ ID NO: 70692 - DNA, 417 bp, Zea Mays
cacgaagggaccgcccaagcaacgtagtgggatagaaattacagaagagcataggaaacttgtcctagacgagagtgggaaaaggcacgcatggacttagcagtgatatgtgatcgtccaacctaagtgcttagagaaaacggaggcaaaaaagctgactattgtctgaaacctaagcaacaaaaagaagtgatgaagtggatgaaggatattaaattccccgatggttattgttggtaccctaaaagaggggtaccccttactactgtataaagacgcagtgtccacgtgcctatctcttagtcgcgtggtaaaggtgctgtgtgtgggaccaggccatggctcgcccaagtctcgggcgactactctgggtccacagcagcgcccgactcaactacatgggtaggtccggagccg

SEQ ID NO: 70693 - DNA, 460 bp, Zea Mays
gtaggttccaggccgagtaggccactggagcaccaacatttgaaactttacccctaaggatcatttcaagtcggcttaccaagtctacagaaggaattctcctattggtaacccgagttgagtcggccagccctcgatacagatatgccggataggccctatctttcagtggctgaatgttcttaaaaacaaagtcagtaaccaccgcttcagcagttagacctttctctttcagcagtccaacttcagccagcaacacacctgcctcagccacttcctgatctgtgggagactcagtccaactcggagtgcgaacgtctggctgtcttcccgaccgggaagggagagaatttccataattatcaactataaaccactctagacgccaccccttaatactatccttgaggggaatttcaagatactcagttttccgcccacggcgcatctccaaactggc

SEQ ID NO: 70694 - DNA, 509 bp, Zea Mays
tggaggatcttgattgccttacaatcgatggcacacctatattgccttgtaccaaagctcaatgatcacaacacaagctcctcaactctaatcactcaagtgcactagctctatttctcacaaagaaatgtctaggactagctctctacttgacttggcacttgggatgatttgatcacttgggagtgatgttctttgtttgtggaagttattgcatagctcttggatattcaataggctacttagatgtgtatttatagcccccaaccaaccaaaatctgcactacacttgggtgcactagaccttttgcacaacactagtctggtgcacactggacctcttccacgcctattgttccagtgaccgttctaacggaattttcagttgtctggtggcatcgatccggtgcacctctagactggaccacatcagtgtcatgttagcttggtcgttgaagcctaaatctgagcgttgagtcctgataggtctggtgcacactagactgttc

SEQ ID NO: 70695 - DNA, 562 bp, Zea Mays
cagtgacgaattgcttggggcctacacaagggccgaagatgatgcaatggcattggtcttcgaaggccgaggcaagaaaagattgaatagagtttttgacgtcattggttttgtataccctgattattgctatccctcgtgaaagcggggaaagaaaaggaaaattgccgcttcgaccatctctgttgtgccgaagggcaaaaagattaaggtcttaacacaccggccgagatacattgagacggccacagtgtcgaagcttggtgaagggacatctttcgctgcggaagcagagcaacctgctcccaccatccctatggaagacctaactaaattgccaaaggttcctatagccgctctagccgaaacgccagaacacgatgctaaaactaaagagaaggcaaccaaagaaccagagccaaagctgccaaaaatcttaagcccgtcagcagagacagaattgccgaaggttgcaaaggctcccgcaacaactcccaagaggagaagaatggctagcgtgctagacgttgtcatggagacaacaagggcattgactcctgct

SEQ ID NO: 70696 - DNA, 295 bp, Zea Mays
cgtggctcgatcgctccttcgatcatgactggatcggtagtgggtgaccagacccgtccgctactagtgtcaccttgtcttctcgtcactcgttagttcattgcgttgtcgggatcccacacgcagctccactactttgcctcctattccgcatcgactggtgggcaagctattggtgggatcctgccttggcaccatggttccaccatcatctgccctcactatgtcaccagggtcccaccacgtcgtcgcaatgcaacaattgttgtcgcttgccactgcctatagccgcttg

SEQ ID NO: 70697 - DNA, 763 bp, Zea Mays
gccattaatgtgccgcagtacgaggggctcgtaggtcatgggtgctatgctgccctaggtgctcgtagatcatgagtgggaagcggaccggcaccacactgtggctcggctccaggcatggttaaatgttgtcggctacttatggtgagttagtctagggccgtgagcggtatccactcgagtggtttcctttcgacacacccgacttcccttgtcaagttccgccttgcccgacattaggcttagtgtcgcgggattcgacgaggttgggtccttttagggttgacacgtccgcctctcctaactgaccggcgggccctagcgaccatgggtccttcccccagtttgttcactgaccggtgggtcccgaggacaagggatcatttcctcggcagtagcccctgagaggagagtgtctcccttcgggatatgataacgggtcgaacattgtcctattcccttttgtcgcttgtccatgtcgagtgaaatccgcaaagtccgttgctggctttttggaaccagtcgggcgctataaggacggtccacttcgtgcttgccccaattgatttttatcgtcgccccatgttttccaaaagcagtatttagttgggagggttttgttacctccaacctctcaaggtcccgtcggtaggccatggatcacggtaagcatccgactcaggaatgctctaaccaaggtcggtccaagcgtcgcccgtcgctggaaaggtgggtagtgactagacactcacttgactcccgc

SEQ ID NO: 70698 - DNA, 1011 bp, Zea Mays
atggcattgacttcttcccttagcctcttgtcccatcgtcggtcttgccgcagggcatcttatttattcatggacatgtctttttcgctagtcgatgaggtcgtgggctcgtttgttggcggtgatgtatctgtcagcgtcatggaagtgttgctcggatgttgccaaagccctttggaggatggcctgtacgaaagcctcatcacgagactccggtagaagtcctcactcactgcctcggtgatgttggggatgcggtacctcatcgactgaaaacacttcaggaatgagcagaaagaattttcctccttgcgcttgatggatttgaggtcccatgggtgtatcagcttgtcggagagtgactaaaagttggcaatgaacctgtcacaaaagtcagcttgtcgttgatgcagtgatgatgaaggtgaggaagccactagggcacatcttgccctagcatgattgggcagtaggctgtcatcacatccttcattgcctcagcagctcgggcagccgtgaaataaatggccaaccagtccctcgggccctgttttgcatcatacatattgatattggagatcttgaagtttggtagccagtgcactgcatgtagtcggctggtgaagccttcatgcccacgtctttgagttccaaatcatcctctagtcggagctggctgattagtccacgaagcccatttgtccgagccattgaggtcctttaatcggcccatagtctaaatttgtgtcaaggggacctagcgtatatctatcccccacacgaaagaacttgagcagaacatgataacgaatttatattattagtttgctcaattgaatagctttataactttggatcaaatcatcatgagatcactttaactcctcatgttctttggtcaccttctctaagctttcatctcttttgatgagggtctcttctagcttgagaagagtttcactttgttcacccactcttatcaacatattcattagtattgccttatcttcc

SEQ ID NO: 70699 - DNA, 584 bp, Zea Mays
gaaagacactatcaaatttggaatatggaaagaggagcagggctaaggaaggaaaggacgtagacaactaggaaagggaggggtgcactatttcttggaaggctatgagtattcttccatggcaaggttgattgcatttgtccaaggttatgccaaagaaggggaggggatttgggaaggtgtagttgggtgtgggggtagggaactcacaagtggtgtgctcatgttaaaaataattgaggggagagaggtgtgctaggggtaggatgtcctgcatatgtagcactgtttatgagtggggtcgtagtgttagtgagtgggaggggatggcgagctgtgactgcacgtggctgacaaactggtaggttggcttgtccaaagctagtgaatcgagtgaatggctaggttaggcacacaaaagaatgacgagtgagtcaaggctgagctatcgatgggctggcggctagtagaccaatagacaaaaagacaaaagatgaggctaagaaaagtaaaaagaaaataagaaaggttgtgagttgcacttttcaaaagattggggtttctaagaatatttaaagtttcgc

SEQ ID NO: 70700 - DNA, 490 bp, Zea Mays
cttaaagtttgatttttctttttcacaaagatggcagggcagccctatggtgcgaaactgggtcgaataaaacctttttctaacagatcgtgcagttgcatcttcaattctgccagctcatttgggggcattctatacgacctccgagaaacaggagttgtaccaggttttaattcaatagagaattccacatcacgttctggtggcaaacctagcaactcttctataaacacatccgggaaatctcgcaccaccagaatattggttaattcttcaactaccacactataagcccttcccggcacttcttctagagaggacaactgaattgtcaactgactttctcccgtcactgtttttatctgaatagtctgtttcctcatgtcaataatggcttcatgttgagctagtcaattcatacctaggatcacctctatgtcctggcccttcagtactatcatattggtggggtagatatgcccacccaatt

SEQ ID NO: 70701 - DNA, 368 bp, Zea Mays
gtctcgtgagggggacgaaactgaggccactgaaatggcaccaattttagaagtaatgaaacgatcaagtctgattgtggttgacgaaggtacttctaatgttgaagctgagcagactgtgattgaaggtgaagatgttgagagcgaagaagactacagtattctgatcccaacgaagcctagtcatctagattttgaaaaatctactgtgtctgaagatgacatgcctatgatgatgaagctgggctattttggagaggctgaaagcaagctcatccgatttgctggagaagagactaccccagagccgaagaatgatgaagtagtggttttaaagagctacttcagagtggggctgcggtttcccc

SEQ ID NO: 70702 - DNA, 558 bp, Zea Mays
caagatcaactataaagctctggccacggtggccgagaacatggcgactagatcgtcgcgttcccgacgattggcggtcccctaattcaaattgagggctcggcaagcatcacggagtcatcagagggctgaaacgagggagagagagcgatgagctaacctgaaaagggctggccgcggtgagcttgattctacggtggcggaaagtggatttggggagaattggaaattctcgagctctggtgaacgattgtggctgattagtggtggctggttagctgacgaccttgcggagctagtcacaggctcaatttatagggaggacgggcggtggtgatcaattcggccgagccgtgctggcggccggagctgaagaagaaggcggcgcggtgaatacgtgtctagaggcgtggcggttactccggtgagccacggagagcgagggtaaggcgcggtggtgcggtggaaagcgagagccacgcggcgcatggccggaagacggcggtcgccggcgtgttaatccgctcagccgcaaagagggagagagagccacggtga

SEQ ID NO: 70703 - DNA, 429 bp, Zea Mays
acttggcgagtgtgtggtaacccaacataagcttgtcgtagccgacttccgttttaagattcgtttacaacaaaataagcataacaaggtcactagaacaaagtggaggaagcttaaaggggatgtggcccaaactttcaaggagagagttattgaggagggcccttgggcagaagagggagacgcaaacatcatgtggaggaagatggcgacatgcatcctaaagatagcttcagaagagtttgggttgagtcaaggaaacaaaagggaagttaaagacacttggtggtggaacgaagatgtccaaaaggctatcaaggagaagaaagactgctacaaacgcttacatcatgacaagtgtgcaaacaacatagagaagtacaggatagcgaagaagtctgcaaagcgagcgattagtagagcccgggg

SEQ ID NO: 70704 - DNA, 475 bp, Zea Mays
ctttcacggtggcggaaacttagtttgggggaagtgagcaatttgtggtctctggtggacaattagaggcaagcgtgggtgcgttggcttcgtgataacatggcacaacagacccgaccatcaatttataggatcgctaagcggtggctggtgaatttggattgagcgcggtggcggttagagaagaaatgagtcactggcatggtgattcgtggccttcaccgtggcggcctccccggtgatcatgggacatgcataatactggtgattgcgatgtggtaattgctgaggcacgtggcattcggtcgatgagcagccaactctggtgacttatccgaaccggccgcaaagtaggaaggagtacggcggctagccgaaatagtgcccatagcccaacaacgttgaagatctttttaccccgcggcgttatctgggcataagtgaccacaaatcaccttatcggcgtgaatctacg

SEQ ID NO: 70705 - DNA, 973 bp, Zea Mays
tggcagtggtactccggtcgaggcggcagattggctaacttacgtggaggataagatgaacgtctttgagattgtgtatggtgatcgtgttcgctttggcacacaactgctgaagagagaggctcaaatttggtggagaggcatgcaggcagcgcactcctcctcaccaggagtcctgtcttgggatgtcttcatcaggcagtttgaaaggaggttctacccagtcaccttcctggagaaaatgaagattgatttgcagtcctacaagcaagagaagaagtctgtcacagagtatgaagtgggcttcaacaagatggtttgtccctcatgtggcttataatgagatggagaaggcgagctagttccgtcagggcctgaaaccttctatcaggcatgccctgggagcctttctgttggtggacttccgtactacagtggagcaggcactgggtgtggagatgcaacaccagtataccatggagtcgcagaagtcttcgggtgttgatcagcctcgtggccaggacgcgaggaggggcaacactggaggtccagcccacaagaggggcaagtctcagcatcagcgccaccatccctaccatggcaaatcttctgacttaggtacttcgggaggaagtactcagaggtttcgggctgttcctaagcccgggctagggctggtgtgtttccattgtggtgatgcgcatcgccgtgcagagtgccagtggaatggcaggtgttcaatctacagtcaagaccacaaggatgtggtgtgtaggaggaatcctaatgggaagctcagatgggagccagtgacttcctcctcttctcagggcactgtcaacatgatgtcaagcgctgagcaacaattttcagttccactccctccgcaacagttttatgtgcctgggacttctcagttcgtgccgatgcagggttttcctcagtatctggctgcgcctactcctgcaccgac

SEQ ID NO: 70706 - DNA, 460 bp, Zea Mays
gctctctggtaggtcgctcccacgttcttgaggccgacggcatggaggtatagcagaatgctccaaatggggtgatgaatgcaattttttcctcatcttcttttgccaagttgatctgatggtatccagaataacagtctgggaaggacaacatagaacagccagcggttgaatcaaccacctgatgtattctggggagcctgaagggatccttcggacagtgtttgttgagatcagtatagtcgacgcacatgcgccaatccactttattctttttgagtacaagaataggatttgctagccactcaggatgcaacacttctctaatgaaccctgcagccactaagcgagctaactcggcgcgaatagcttctctcttgtaaggcgtgaaacgatgcagcttctgtcaaatcggccttgcttgaggatagacctttaatttgtgcttgaccagttctct

SEQ ID NO: 70707 - DNA, 612 bp, Zea Mays
gaaaatctgagatctaggcaccacaaatctgtctgttaggcgctctgaacatgttcacaatggtacagtgtccggatcagaacaccaggttcagatgactcatcgccggcgaccgtgcgcccggattcgtgcccgccgcggtgattcgtgctcagcgcagttggataatgcagaagggtaagaaatatcgcaccgtggatgaactccaaccactattctactccggccaccgtacccacctgagtcacggccgcttcggatagattcaccggaattagccacctcgcgaccttgcgtcacgtgccctggtgtcttaacacgtcgcagtagcttgcgttatgcatatccggtgatcgccggtgagctcgccacggtgaaagccaccaattgcttgcgccagtgcacccccttctctccgaccgccaccacgacatctcaaattcacgagccaccgctcggggggcctataaattgagcaggctgtcggttccgcaaggtagtcaagcatccaatccacccgctcgtgcctccaattactcgccagagagccccaatttgagattccccccaaatcggtccgaaacaccgcgcgaagtgagctcgccgtggcca

SEQ ID NO: 70708 - DNA, 675 bp, Zea Mays
ccaaattgagcaagaggcaccaatcaacttaaagataaaagatccactaagttatatctaaagaatcatgtctaaaacaaatgaggttttcaaaaaaaaggaaaaaatgttgaaaccctagaccaaccctaattaagccactaagtagaaaggaagaaaatggataaaagaaccatgaaaaacatggaatcatggcttaggacaattataaaaattggaatacactaactaagctacaataaagattataaaagtttggccaaaatagtttgttaaaaactctaagcaagccattcaagtggaggtttaatggggaaatctaaaattcagatttctgaattttcagcctctaaaccaaaaccgagcgtgttcaccttgatctctatctcaaaactctaagctcccattgacaaaaatgtgcctaactaacccctctacctcatacctgaagatggcattagaatgcgtgccctggacacgtcaaacccgggatcttctctcagtgttcagcagtgagacaaacccaacttcaccactccatatctctttatccagtaagcgaaacccacaagcctccacacacaaacaacaaaggaatgtcaggggaagagatctctcaacgagatcatgcccataatctcaaagatttggagccaatccacgcttgaacacgac

SEQ ID NO: 70709 - DNA, 571 bp, Zea Mays
atttttcttactcgtggaaacaatattataaagctaaaattacttcattagttggatgtaaaaaaatatacaaaggaggcgtgtgatagttgtccttttaactatgatgcgagtgcgagaaaaatgatagtcaaaatgttaccttactttttaactgtcttactttgctggctctcatttcatgtcttcctccctcattttcctctctagtatgtgactagttttgctctcgcacacattgtctctaaatgctagagaaatgctaaccttctcgtccccttgcccccacctccacaagtactcatgaccacaaaccattgataaccatactgcatgttacatttttttcttagccatggaacttgagatccaatgccccaccactccttctggtctagatgcaacattgtgtctagatacaccattctctaccaccactaacaaaattacatagttaatatgttgttgccaaaccctccctaatagacctccgccactatcttgactgaaaacactatcttcgccactactcttcaacccacacatcaccaccaccatgttccgaaaacca

SEQ ID NO: 70710 - DNA, 785 bp, Zea Mays
gttacatgcctgggatgtctccaatggtaacctcaactctgacctatgtgcaggaaataccctttattgggatacactacatctcgggggagtcgtggatctcgtccctaccacctgctaaagaataagctattgcaggaagcatttagagtcatatatgctactaggagcacccctaaagtcaaaacaagaaagttgttttgtcagacatgaattctgcaatactaattaaattatccacatttgttggccatgatttttaatttgtgttacactgtccacattatttatcaagggttttgtctacatatataaattgtatatcgtctttgactttttcatgtgcatagttttttaccgtgcacgtaaatatagtgtatgcctccctctctttggtgcgcgtgtgccggaggagagccagagcagaggtcgtagcatgcagtgttgatagataggccgaccataggtggcataggcagcggccgccgcaatgtcaatggccggagcggtgcaggccagctcgcccatccgacgatccagtgctcgaccgagatgcagcagcaagacatggttgggtatagctagagcgtagttggccggccagaacaatgctaggcgagagagggaagtggtggtgacaggaatgtgagaggagagggattgttatctgtttggtcttatgaatatggaggaccggccgtcagcaaacaaaaaagtgaacactcatcatagctgctgttgggcagggattcttttccatctcgcgtcctctggttgagagatat

SEQ ID NO: 70711 - DNA, 358 bp, Zea Mays
gtgacgctagtaactccttgaccatcctggagaggagccaccgcttcaccatgtctgacctagaccatcaccgccacgagctgcaggcatcataggatgaagatttacgacttggacagctgttgtctaccaaagactacaccatcaaggaactgcgcgcctccaagaaactagtcgcgcaggagctggaagccgcgcaacttgctgtcaagactctagagaacaactgtgtcattttgaaggctcagcgcgacaaggctatggacaaagccgttcgtactggtcagatcctgatgaggagacccggcgtcgtggtgcccgattatattgttgctgatgtcagagtcgcgcctgatgc

SEQ ID NO: 70712 - DNA, 464 bp, Zea Mays
gagctgtaaacgcgctggcgagctcacccgcgcgggcagagccacgatgatggcccggcgactgccgattaaccaggcagtgccacctcgggacattagcgccacgtcgcagaagatttttaccgcggccacagacccatccccaaccatggtggcgatcttatcccggtgagatttttctgaactccggtgaacagtacgccaattggcttgatttcaaacggctattgctcctaatttcgtgtggtggctcgtagacaagtctgtatcaaaattataccctgatcaatgctctttcatttcgttgtaatgactatgccaaaaaatccttatggattgatcaggccaaggcacgcaaaatggcgtgataacactgaaccctgatcaaattcagattcagtgaacaaacgtatgtcaggccaactgacggcctccccttcaacctcgtatatctcccatttttg

SEQ ID NO: 70713 - DNA, 559 bp, Zea Mays
aaaatggataagggaattgccctacgtcgtttggagcctaagaactcaacctagccgagctctgcatggaaacactcctttcttcatggtctatgggtcagaggcagtctacccgctgatctcaagtttggggcggcaaggttggtctttgaaagcatagcagaagccgaagctactaggcttgaggatattgatatactcgaagaagaacggctgaacacagtaattcaatcagcacgataccagcagactctgagacgctatcacgacaaggccgtgcgacgacgacccttttcagtgggagatctcgtcctccgccgaattctaacggaggagggacgacacaagttatcacccttatgggaaggaccattcatagtagcagaagtcactcggccgggatcatatcgtctcactcaaatggacgacacagaaattgggaactcctggaatatagaacacctcaggaagttttatccctagctgtatttcaaaagctatcgggacgacaatgtactctgtaaaatgggaaatatgtcatcaataaaaaaggcttcaa

SEQ ID NO: 70714 - DNA, 853 bp, Zea Mays
aacgggagctctgggcttcggatattaaaggaagcccagatcggttcccgaggtctggtcgctgggacaggcgcgcctgtgtttaacgtggggctgagaggcggcatgcaggacagacggcgccgtgacgcggttgtttgaatggtaagggaatggcgcggaattaaagggaatagattccacatgcaaacgtgattactgtgatacgtgggcgcgtaaattatggatcttgcatgggaagtaatgcgcggaaggtaaaaaaaatgaagcataagatgttgaaagatatggcataaaaccgaaacggcataatagttgcataaacagtatataccgtttggtgtaaaacgttgagtcattgtgcgtaaattttttattatgaattttagtttggcaaagacgtcgccataatatcgggacggtttcggaaataatggggagaccctgtaaacgtggatgcggttacttttatagtatccgagatttactttcattcggaaaaaaagaccactaagcctgcattactaatcggagttggagatggccggctctagagagtcgccggcgatggaaggagatggcgttcgtcttgatccagagacagagggaggagttggtggtaactcactggtgacaccacctcctgctctaatgggtcctgagatcgccgagatgagcataggggaagaaggagaacaaagggttcgacctcctatgtccaatattagctccagggagatggatacgccacaaatactgcattcacatgtaagtccaatcgctgtatttgattattgattgattatattgttgtgaacatattccatggtacaaacaacaatgacaatgaaat

SEQ ID NO: 70715 - DNA, 300 bp, Zea Mays
ggctcaacgtccatttctctctcaatatgctcttttgctctcattctaagcttatacatctgtatttgatcttctctaatcttgctcttgatcatgtgatcatacacttagcacattagttagcccaatgggttgtgatggtcatcaaacaccaaaacaaaaatagaaatggctttcaggttcatttccctttcaccgacactaccccataactttggaacgtttggcactgaattgtaattgagttcttcaatctttacggatggcgtgatcacaacatcatgcatcagatgattcaca

SEQ ID NO: 70716 - DNA, 1430 bp, Zea Mays
aaagacgacgtgctaaagggctctgcgggggtgctttacgataggatgtggggtcctcacggccgcggcgtcgtccgagagagagccgaccaagcgccggtgcaggtatgtttgtctttgacgatggtggtgtgtgtgtgctcgttgtctgaaacattgttatgctgtctttgcaggcgatgagggatgaaaaggtagaacacctcaccggccttgagagctcggtggcctgaaaggacgctacggtggagacgggagcggaagagcaatcctcactcaaggaaggtgatgcggagggtcctacgacgacgggtacttctgcgtaggttgaaagaatatagtaggaatggtttgacagtcttcgctatgtacatgatacttaagatcggctgctgcgcaggttccgacgtctaggcctacgcaaccaaacttttatgataacgataacgcgaatcattagcgtgtcgaagtgtgataattcttagtagtgacgcatctgatgactctgatgttgagtcatggtctcggagggtggggggttggtgagctcgtttgccgggatggacaacgactcttcggaagatgatttagattattttatggcactagatttatctatagcggagtccccgtcgagccccccctcacggcgacggatacttcggtcggggttgccccttgcgaaccgtggggtcaaaaaagattgaggtgttaaaacaaagtgtgagaatgataggagagccttctcaaggtattggagtctcccgaaggcatcgccgaatggggatggacaggtctcgtctccgaagtggaccgcggttggagcaagggacccgtcgtatcatactagcgtcgacggtcgggtcatgtttcagggagggggatctgcgggctctttttgacggcgaagagttgagactgatgttgttcaatttctgtgaagccggtcttatcctgaagcaagagtcgatataaaaatgtgtgttgccattgccgctctttggtgaatttaagcgaaaacactgccctcgcccccctttaccaaaggacggctatggggacatgcatgtgaatgattttcttgtgcgtattgtgcatattgtatttgaaatatgatgtgccttttattgtgatatcttttgaaatgtatttgtgttatttaagctgcatccttggatgtcttcgcgcgcttgggtgccgttagtacatttataatgacccgacgacacttttacgtgatttttggtaggctatagcagtatgtcttggcaacgactttgtgatgcacttgctatgttaatctagttgcacccataggcgacttttgcgtggatagaaatatgcgtctatgtgacgactttgcaaccttggatgctgttacgcacttgttgtgctagtctagctgcacccttaggcaacttttgctcgga

SEQ ID NO: 70717 - DNA, 904 bp, Zea Mays
gcgattgtggggttctagtcgtgttgattggaagccggatcgtctgtgtgacatctccaccaaatcgaaagttacccctcccgatggaagatccataacccacgtccccattaagttctctccgaactagtctaaaaactctctttggctcattttgagcaaggtcatcgggacagcagcccacaaactccttcctaatctataaatttacttgttgtgttaacaaaaccacgacactcagcctcatgggggagcacataccgacgatggatcccgtgggtggtattgacactctagaggaggtgcacagggacagaaggagagagagctacaaggggaatcaattagggtcccctcttgaccaaaaaagatacctttttatatctgccatgaatgaatgctggccgttggatcagatcaggcggtgcagaagcagtggacatctttcgacagaggcgggaacaaaaacaattaatgaattgtactaataattagtgtaatacaatggtaagcactctttttttcaaaagagtaatcactctttctttcaaataatgatcgcggcacagttcaacaaaaccacaaaacttaactcaatatacacctgcctgcaaagacaaccaaaatcttaaaaaaacatggtctgccaagctcaaccaactaacaatttaacttaagccaaccgcatagccaggtaaaccaaatagtagaagcaccaacttaggctaggtacaaccgaataaacattagtggctaaccattcaggcctagccaggtcagattttggccaagctaccaacaggccttaaggcgcgatagcaataggaagagagagagaaaaataccaaagttaacatggaaagagatagtaaaaggagattcgaagggatggaatataatcaat

SEQ ID NO: 70718 - DNA, 943 bp, Zea Mays
acatgaacttcccaggttttgatgggtcaaatcccaagttatggaaacatagatgtgaaacctactttgattactattctgtacctgttgaacgttgggttaggatggctgtcatgcattttgaggggtctgctcagtattgggttcaagctatggaatctcgggttagggaaatgaactgggagtcattatgtgctgctttaaacactaggtttggtagggatcaacacaataccctgattagacaattttatcatacacgccaaaccaattcagttgttgattatgtagagcagtttgatcagttgatgcatcagttgttagcacatgaaaaccagctgacctcagctatgattaccactagatttatagatgggctaagggatgatgtcaaaagtgctgtaattatccaacgtccacccgatctggatactgcttgtgctctcgccattttgcaggaggagatgttgatgcacatggggcgtcgagacatgagaagaactgatttcagtaactttactcggtcgtcagtcaagccagcaccaatgccgttgccattaccacctgctatcaaccacaaagtcgctggcaacattgaagaccgtcgagggcatgcacatggtatcagtaaaagtgatgagggcaaactgacggccctcagggcatatcgcagagcaaaagggttgtgcttcaaatgcggagagagatggggtcatacccacagatgttccacaagtgttccgctacatctggtcgaggagatgtgggaactagcaatcgaaggtgaggaagtgatggaagaaaccgaaggtaacaccgtagaaccaacaagtgagaatgttttggccatatctttggatgcagtaagcggtggtgaaggtaacaaaacaatccgtttatgggcatcgatccattgtcagcaagtgctcgtgcttgtggattc

SEQ ID NO: 70719 - DNA, 557 bp, Zea Mays
ctacagtgccggatctacctagacggtgagggaggctccatgccacgaccggactcacacatgtcagtgggtacctttttctctcatttgatgcttggatagttcggcagcccgtagtagctattcatgctttactgttgcttgcctgcttcagaatgctaccatttcttttgttttcagaaacacaacctacatacatgtcatgtttgtagctagctctctatcgcgtctcgtagatgatgaaaaggagagtatatgtttgcattgttaattccactcataaatgttaaactgaatatgtgtattgttttgagtttgttatctgcaattttgcatctttgtgaggtttgcaggtttgttttgtaggttcatacatagtccaagagcaagcatatacgttgtttcatacaaaagagctatgtaaagaggctgcggatgaaaggtacataacaacaactcactatctagactgctatgaagtttagtatgttgtttgtaacatctcatttgtttttcacttcaggtttctttggatagctccaaaaccgagagctatg

SEQ ID NO: 70720 - DNA, 468 bp, Zea Mays
attagcaccatgatcctgattagaggtcgaagattctcccaattctcttcccatctattccagccttaattgggacacctcccgaccagtctcttccaatttgcggtacaaatcattcctctcggttgcagcttgttcagcaaccacagccgccaactcagactgcatcaacaattgttgttgcacccgctcaacttccttcagtcttccagtcatcgcctacattgactcgaacatgcggtcccaattttcctgcaccaaccgatctctctcatccatcgcctcaagcaggaaacgagtttgtaccgacggtttcgctggtggagccgtcgcgcctcctcttcccaacgccaactccgaaggctttgataccagttgtgatgacccgtggccgagggtagcagatctactccgacgtgagctctccttgctacggacgaggccaccacagtgacaaccgaggaagaa

SEQ ID NO: 70721 - DNA, 584 bp, Zea Mays
gttgttgatcaggaacttgtatgccttggaacatggaaaatttattgataatgaaaccctttgcttacaaagtatagctcctccataggagttttgaggtattgttatggatagaattttctgaggtgctcaatattccacgaattccccacttcggtgccattcatttgagtgaggcggtaggatccaggccgatgacctctccaacgatgaatggtccttcccatggtggtgacagtttgtgccatccttatcccgtcagtactcggtggaggaccaaatctcccactgcgaatgatcgatgccacattgctttgtcgtggtagcgcctcaaggtctgctggtatctggccgactagatgaccacattcagtcgttcttcctccagtatgtcgatgtcctctagcctggttgcttctgcctcaattatactttcgaatgttaatctgggtgctccaaagactaggtccgctagtaataccgcctccgacccgtataccatgaagaatggggtgtttttgtgtaaagctcggctaggttcgcaggctccagaccacatacggtagttccctgatccattttcc

SEQ ID NO: 70722 - DNA, 329 bp, Zea Mays
gatgaatgggtgtgatgaaatggtgacatgccttcgtagtcatcatgtcatctgttggtgacccaactgaaggtcgtagagaaaggtcgattacctgtgtgttattattgtcgccttgaggttctgtataaattgtaatgtgaagtagtaggctctctatgtgatgctagatgtctaggtagactttcgtgaattgtggtgctcgagccgtcgagatgaaggttaagtcggtcgatgccgattaagtagttaaaatgattaatggaatagtcatggggttaaaactagaaactagtgttctcgcacccatttgggacgttgtagccaaa

SEQ ID NO: 70723 - DNA, 735 bp, Zea Mays
tcaccttcgtcaccgttgaatatttcacaaagtggattgaggccagggcagtctccaccataacatcgaagaccacccaaaaattcttctggcaaaacatcgtctgtcgcttcggagtcccatccgaactcactgtcgacaacggcaaatagttcgacagcgaagacttcagggaattctgtagttccatcggcaccaagcctgtcttcgcctctatataccacccacaatccaacggtgtcatcaaacgcgccaatggcaagatctttagcgccatcaagaaaaggctccttgacgacaaaaagggcaaatgggccgaccaattacttgaagtcgtatgggccctgaatacgacagagtgccgagcaaccaggttcacacccttccgcttgatgtatggatctaaagcaatgacgccgcaagaattaaatcacgggtccccccgaactaacaagttagctgtccccaaagtcgacgaaccaacctccaaagatctgatcgacgaagaccgtgttctcgccctgcaggccctcaacaagtagcaggtccaaaccaaagcatggcgcgacaacacagtcgtcccaagagaattcagtgaaggggacctcgtacttgtaaggactaaggaccacgcggacagagtcccggggcaagctcgagccaaagtgggaagggccatacatagccaagacaaagtcatccccaagtgcttacaggctagcaacatcatccggc

SEQ ID NO: 70724 - DNA, 462 bp, Zea Mays
tggacgtcgacgacatgtcctttatagacatccttggggcagtagaggaattgttggatgtgtcatttggagctgcagaggacaacgacggtgtgcgtcaactctcgctatgggcatggctttgatgctagacagacacccattgatggttggggtccaaccgaaggtgatcatggcacgggctctgttcatggggtagctttggctatggtgttggcaattgcagtgccagtgctacctgtggagcttggactcgatctacagaattactaacaaagttcttttctgggggatcgagatcctttgctcccccttttttgttgtctttgtttaaaagatcctttcaagttgtctcattctgattatatcatttgggactcagcaaggcttagggatggcaacagggaattcctcgtcgggttttagctccccatctctattcacacgacaaaaaaaatccgc

SEQ ID NO: 70725 - DNA, 474 bp, Zea Mays
aaggagacgatgactgacgacaaagctgaagatcacacgatttcatgccgatagaccgatagcggcgaaacacgaccgctgagtcttgaccaagagactcgagaagacggataattagtcacggtggctaactagggacactgataggagcaatgacatgggagagcggatcatgtcccctacgcggttgcgaatcgagggacacaagtctaagatgtgagaaacaagtatggtgtactctacctgagcctcaaaaccacccagtgtgacagttcgggtctcgctgggtttgagcctcaaaacccggtggcacggttctagagggaatcaaaggcggcatatgatgtcattatggagggtgcttcaagacgaagcaacttagcgaagagtacgtggctgtcagatcaaaattctaagagttggttcattttgtctatggctgtgtggatagactctaagtatctagaagttgct

SEQ ID NO: 70726 - DNA, 465 bp, Zea Mays
ggattctctacggtttcccattgacctaattggggaccatcctcttccccacctcgccactttcctctcttcccttttggtggttgccctccaagaagatgagctactatgggggtggagatctgtccctatttgtcctctccccttttcagattcatgaccgagagtggggaatggagtcaaaatccctagaaactcgaaaatgatgtactcaaaagggaagagcttgaagtgggatcgtcagaatcctaagatgcagcggcaaaacctgccaccttgggggagacactgaaatcttagttggcgcttgagaccccctcaagcgaagatggagattaaatccgattcgcagacttcaccattagggagggcgctgatctaggtaacatgaatcatccgactcgtcctattcccatggatctagaagtttgatgtcgtcttttctgccagaaatgtggggaagaa

SEQ ID NO: 70727 - DNA, 553 bp, Zea Mays
ctccattgcactttgcacatctttatcactttactccttgtgacacgagtcaaagtatcaagaatcttgatagggtactagtcagatcatcttgaacactaagatattacataggtagctgctctttgggtaccctgagacacttcttcaattgtgatacatgcaagacatcatgtacatccgcaagatgatcgggtaattctagctgataggcaacctctcccactcgctttaagatcaagaagggtccaataaagcgaggggacaacttccctttgactttaaatcttctcatgccccggattggtgataccttcaaatatacgtgatcacccaccttaaactctaataatcttctctgggtattagcatagcttttctgccttgactgtgcagttctcaaattctcccttatttgacggacttgttcttctgcctcttgtataatctccggtccaaagaactgcctttcaccagtttgatcccaatacaatggagtcctgcattttctgccatatagagcctcaaacggggacatcctcaaactggcctg

SEQ ID NO: 70728 - DNA, 492 bp, Zea Mays
caaagtccagggtgctctgcacaagatttccgggccaaactgtaatagttttcaacaagcgagggatggcgggttattttcaagcttcctcgaggactctttagcaaaaagacccggccgaaggggtatccaacgaccctggccgttggatcagagatccatgacccagatcaaaaggtatcgtggctgattcttaacggtctagatctagatcgagggtctggattcaatctcgaaggggtatgcccacgatccgatcccagccgtacactctacatcctacgactcgcacgaatttcccccaaccctctcttcttccccaatcagcagggcggcgacgaagcagagctccaccctgggagctcgctggatttcctccgcccagcgcactggcgtcaaaatccaaacgcgaacgatgctaaacattggggaaagaaaggcgaagtgatggatagtatccttaccggcgatcggagcgatagtagcatctct

SEQ ID NO: 70729 - DNA, 1067 bp, Zea Mays
caactttggagctttataactttcaaaatagtgagaattcaccttagggcaccacatcaactttgtagctctatgaaaggggaacaactttgtttaagagtgtaagcatagttgttatgaagaaatggaagaaaaacacactcaaagtcgagctgtcaggctattgaagtctgaatttcagactgacagtgtaattacacactttgggcacgaattcgagcttgatttagtaggaatttacccatagctgctataacaaacttgtagctgaatccttggtctacaactttgatacagagccttgggtatgttgtcacaaagaattaggagaaatctgctctaaacttcgtctgtcaggcgctctgaagatccttcgccattgtacagtaccaggattggatcagaccgccagcgcagcaatctcgccgccgacgatctctacgccgtgattcacgttgtcgccgcgattcgtgttcactggcgggtggataactatggtaaagtaaagatctgggcgtgggatcagcccgagctcggccgcggctaagcccgtcgtacccccttgctcatcggtggatcgggataagacctcgccgccgttgatcgatcactgccgtgcgccgcgtgtccaggcactttaccacgtcgcagtagctcggcttgcgatagttactcatcgccgatgaagtcgccacgatggaagacacgaatccactgcgccagtaatctcccctctctctggccgccagcacggctcggccaaattgagcaccaccgcttaagccctctataaattgaaggccgggtcagctgtgctatgtcatcacgaaaccaaagcacccgctcccaccctcaatcgttcgccagagctcacgaatttcgagttttccccaaatcggttcatcccaccgcaagaacaccctcgccgtggccagtgcaattgaggtcagttcaaaccttctgctccctcttttgagtgtccttatgtaactgtgatgctcatcgacccgcccaattgaaccgagctgccttagatcatcgggaacacgcttagtggtccattgttg

SEQ ID NO: 70730 - DNA, 1027 bp, Zea Mays
ggagaggaaatattgggacctaaagttctttatcttagtgtcattggagtgatcatgtatcttgcgaattgcaccatgcctgatatttctattggtatttcgaacctacgctccgacaaataaatttgtgtgtgtgtgttccgtggtctagatggtgtgctcgatgggcgcaagatttatactggtttgggcagaacgtccctgcatccagtctttggtggctcatgctactgacacctttgttgctcaatgctcgtagtagggactacaaacgagcgagagagggaggagctaccaagcctcttatgcgtggatggacctacagactatgggactagggttctaagttaagccttggacgtcgcgccttagctctagcctctaggtcttctgatcttgtcgagtatgtgtgttcgtcttccgtcgagtgtcctgattgacctccttttataggccaaggtgggggtcggccactagtagcttccttgagaaggagaaactatgatgtggtaaaatggagtgttctacctgtggtaaggttgcatttgtccatatatgtctcggtcatctaggtttccttgatcctgctctttatggcgggtggtgtgggcagcgaagagtccctgcaccatcattgtcgtctttgtgccgtgtcgacccctggccgctatagcctaggcctcggtgctgctcatcgtgttgaggggtctgtaggcggccagcgcacttaggtctagcctcaatatgtcataagtgggccacaagcctagaagcccgtaggttgagtgcaaagtggatcgactcaccctctatggctcgatgtcaagcacagttaatgcgacatagaggatcagtcctggttaggcatggaatccactcgagtgacttccccttgatccacctgaccccccttgctgctccgcctcgcccgacccttggctcggtgcctcggtttatcggggggcgagtccttccggggtggacctttcccatgtccttctactgatttgtgggccttggggggttg

SEQ ID NO: 70731 - DNA, 728 bp, Zea Mays
aagcgtcgatcccacttcgcctcatgatcggtgaagcgtcgcgcgatctcgtcgaggatgacttgcgtgtcggggttcatcaacacttgctgacgccgcaaacgagtaaaatgaaggtgatgagccggtggctccagatctacggccccaaacaaaatccgccgaggatcgtaggctctggataccaattgttaactctgataggttcaccagtcgtagatcattacaaccaaagtgattcagagagggatagcaggtaggaggaggaagagagacgagacttgggaaggaagaaggttctgtgtatttcttacatgcctcacgcggcagccaatccctcctacataaacctctcggcgcccactagttaacccattccggcccgtagacgatggcattttccttcctgggccttgacgagcgacgcagcccagccgcactgctgacacacaagcgccacttgtgcttcaggcatggtcacctgttcttgctcacagcttgtaaccacttccctacttgaaagttcaggtacatcagcctgtaggtcttgatcaatttctagcgcaactttgcggcttatctcgtcaagaaaagattatagtgccatatcaatggcacttttcaccagtgctacttgatctaatggtgagaacttggaactgccatggttgccattgcttgaattgctttctctgtttttgttttatgttttatgggatgactctttc

SEQ ID NO: 70732 - DNA, 497 bp, Zea Mays
gatgtactcagatcatctctgcatcgctcacgtaactgacgtcatgaaccatatatgaccaatgttagaacgaggtaatcggtttggcctgccagagctacatgccccacttgtctcatgggcgacttctaagcccttacttatgtgaggcaatcacctcaagtcacccttcgacttatgggtgatgttacatgccttcgttagctcttatatggtcaactcaggccctacctcgtgaggcaatcggcttgagtcgtgtctccgactcaagttcagtgctacatgctcacgcaaaatctcgacagggtaactctagacccttcatacgggcagacgtcctggcccaccggtgttgcatgccttttgcttaattagtgaagggtgcatctttcccgttccccacgggcgttacctgccctcgcgtcctcacaaagtcatgttctcaaggtgcaaactcagcctcgctggctctccatcactcggggccacgtcaccac

SEQ ID NO: 70733 - DNA, 319 bp, Zea Mays
gtggcggagtgttggaatgaactagtgcttttggtatgcttggggtactaaaggatgtagcctaaggggtccttttatagcccaaagagcccccatatccgttgctccttccatgcaaaacttgctgaaaatctattgttctcggtggcaccggaccagtcctatgcgccacatgatcgagaatagtagtgcctccctcaggatctgattgggtgccttccttagctggctggcacgagaccattttgatgcacctccagaccaagtgccatgtcagctagccattggccagtgcacgtccgcaggagttagccattat

SEQ ID NO: 70734 - DNA, 303 bp, Zea Mays
gtgattgtcaatatgggtagtactttggtgtagtagtaagcatccatgcttagacggattgttttaccttgggatacacacaaccccacacatatttgagtgccttggtgtgcagttggggcacaccctagctttaggtaggtcctcttggtgatagcgtgagtgtaccctatgtattccacccctatcatccaggttgttgtgtagctgctataaccaattccctataaagcccccttcctcatctggcttactagcactctagcgcctaaaagcgactcttatagcttggtgatcgaagta

SEQ ID NO: 70735 - DNA, 1081 bp, Zea Mays
cttggctgcgtcatgtgattgctatgtcgtgctctcgcttagtcggatcgctcccgttgagtcggaccgccatcgccgagtcacacatttttcgagggccctgaaggcattgcatgtgtgtcgcaactattgagtcacaattgcgtttgttgtgtctgttgcgcgtacttatcatgtaccccaactaacaagcacagttgtgtctgtttgcttattacgaagactggatgtgttgtcgtagccctgatggctgcacacacgttgacatcagacgctagagcttgtactcgtgtggattgtggtgggttgttcaagcctctgaagccacatcatagcgcaaccttcataagcaattttgtttagctctatattttatttgattgtgttgtgtggcatcatatatttatatattgccaagtggccataacagctatatcaagctctatagtgcttgaataatctgggaaattaaattaaattgaaatatgaaacacaaataagttaattctctgctctcatctcatgcataaagttttacccggagtaacccgaagaaatacaatataatgcatgaaagcctttttgacatataaggcatcacaaattgggattctattattaagcaaaaagaccttaccaaataatttaagaccagaaatctcagtcatacattgctcaaccagatgttagcacattgctctctttgtcgctgaatgacatgaagcaaacatgagataaaaggacatgtaatcgccagcaacacgaagttgcgagtataccgagaggttattctgagaaaattttcactatgttggtgtgaaaaccatagtgtgttcccgtcgaaccactttactcgttctatctaggacctctatgcttgtgtcacatacatctcttggaattgtaaatacttatattcactgaattgactcgggatagtcctttgacaagtttggtatacactgtaaactaaatggtaaaggtcggtcctgaatggacacatacctggggtttatgtagctgaactacactgaattccaccctttggcatgcttactattatctacctctgatctaccag

SEQ ID NO: 70736 - DNA, 1043 bp, Zea Mays
tattcttaagacaggaacttcaattccactgcaacctactcgaagggttcttcactccactgcgatcctgtcttcgagtagagtaagatttaagttttaaagtgataatttttattcgcctattcaccccccctctaggcgacatccaaatcctgttcccgggccaaagggaactttcaccagtcctctgtctactgaacaaaatggatggggatttgtggaacactcaagtacgttttgcagggtttagttctcaagaacatggaatattcagatcatgagttaatgtggactatgggtttactttgacaggacgttaggctacaggttgttaggctgtgtgcaaaatctagagaagctatttcgtctcctgttcagcatctcacacttcattatcaggtacatcctattgttgcttttgtggaaattaatcttgctatgaatgtcactgatgcttatgttaactcttgcaggttaggcaccttgatacctctgaaaagagtgaatttcacaagttatagcaactgaaagatgaacaaggtaatccatgtttaactattgtgataccattatgccacaatcaagcattgtcgagggatgtgatgtgcaaagattattgagtgagtattccgacaagcatattctactattacaggtgaattgtccagtagtgatgagaagaagtacaaggcactaaagcgtgccactgaaagagagatactgcagagtgctgatgtcatttgttgcacctatgtcggtgctggagatcctcgtctttcaaacttccgtttccgacaagtaattattgtcgcctcatgttgtctccggttagctatgattcctgttgtgtaatattttgatgcaacagtaaactttattgtcaggttcttattgatgagtccacacaggcaatagagcctgaatgtcttattcctttggtgcttggtgtcaagcaggtaaaatataaacttgtattttcttttcttttatttttatttatcctttattaatactcttgcaattataggttgtccttgccggag

SEQ ID NO: 70737 - DNA, 630 bp, Zea Mays
caaaagcgtgcatgtttcttgaaatgattaagtgtcttgatataaattgaaacttgataactaagtcataatgatttagacttgaaaaattggtggtagtacctctctatgattttgcttggtaatttagttgagtgctctcgtgcttgctaactgaaattcctgcgtgaacagtgttggttgtgctctcgattttgaatagacacatcatatgatttagtggtaattggattgtgatctaagtgcattttatatgtgtgatgagtgttgggcttgaggattgtcagtcgggcgaagaaggtgtaatatacttatatgcgtagtatgattgagctagtaatacaaaatgacatggataaaaactagtaagtctacttgttagtcctcatttgattaatttaactctaataaatggtaaagtgttagagcaattccagtctctagaacatgacaattcttgaagtaaataggagctgaaatttatagttgttgttttggactgcacacgctgttttcgtcgtgttgtatgtttaatgaaccaaatcatgttttctgtagaaaagccatatagaaaagttgtagataactttattatctcactggtgttaaaatttgacagccataagtctg

SEQ ID NO: 70738 - DNA, 310 bp, Zea Mays
gtttggggcgctagaactgagggttccagatgtcggcaatggcgccgccgcgcccctgtgcgacgccgccgtcggaacaacctggatttatgaattgatcgcggaccgtcgattgattgatcggtggctcagatgagaggtagaaaatgttttggggtgagccattctgagccgtagatctaagatccaaggggtgcgcgtcgcgctcgattatgtggagcacggtccgttgatcgcggatcgtgaggctagcatcgcgtaccggttcaaagatttcagagatctaatctgggccgtgtagctgtggtcg

SEQ ID NO: 70739 - DNA, 955 bp, Zea Mays
gccgagtgacttctgctattatgaatggtccttcccatagaggtgacaatttatgtcgtccctctcccgttagaattcggcggaggacgagatctcccactgtgaaggatcgatgccgtatggccttatcatgacagcgcctcagagcttgttggtatcacgctgattgaatcaccgtatttagtcgctcttcttcgagtacgtcaacgtcttccagcctagtagcttcagcttctgctatgttatcaaagattaaccttggtgccccgaacttgagatcggcaggtagcactgcctccgaaccataaaccataaagaagggggtatttccatgtagagctcggctgggttgagttctcaggctccaaactacatatggcaactctctgatccattttcctgcgaacttttcattcttatcaaagactttctttctgagtgcttctaatatcatcccgttggctctttctacttgcccgttgggtcttgggtgcgctaccgaggcatatttgatctgaatgcccttttgctcgcagaaatcgaagaattctgaactggtgaagttggatcctaggttatgatgctattcggtatcccgaacctgaatattatatcttgcatgaattccactgtcttagctgaagttagagaagcaatgggtttgaactctatccatttagtgaatttgttgatagcaaccagtacatgagtgtatcctccttgagctttcttgaaaggtccaatcatatccaatccccagcacgtgaacggctaggttatgggtatagtctgcagctgctgtgctggtagatgccgaagaaaggagtgtctaactcgtggagttctttgaggtgaactcccaagccttggagtgttcgggggaaggtgacgttgatgctgctccccccatccaccaataccttcttcaccctactctctcggatcaccagatcga

SEQ ID NO: 70740 - DNA, 806 bp, Zea Mays
gccttatcgatcattcgctggagagggtccattgctaaaatgaaaagaaatggagaaaggggtccccttgtcgtacaccacgcttgtggttaattctgtttgtctgctctccatttattattattttggaagaagatgagcccagaattaaagcgatccaatcatgccacctttgggagaaaccgagggcctttaacacatcaaggagataagcccaatttatggagttgaaagctttggagatgtcaagtttgatgaagagcgcaggctgacccctcttgtgcatcttcataatcaccctttgaacgtataagaaattatcatgaattgaccgcttttggatgatggcattttgggcaacagatacaatttcgttcatgcgcggtgccagtctgtttgccaaagttttggtgacaatcttcataaagttgtttattagactaataggtctaaacttatcgatgctatccgggacctctttttttgggagtagaacaacgtttgcttcattaactaggtggaggtttttacatctaaaattgtagaaatcgttaattgcagcagtgaggtcctctttaaccaaggtccagcaacatttatagaacaggccaatgaaaccatccgggccaggagctttttctgaatgtaaactcatgaccacattcttgatctccgactcttgcatcacgatgtcgagctcacctaacgaaaagggggaataatctagagcggcccactgaactaccttatgtctcattcctgtctctccaagaatctccttgaaatgttggtgagcctcttgcagt

SEQ ID NO: 70741 - DNA, 528 bp, Zea Mays
gtccccaccgagcaagtctgcgagatagagcgaacgaccaaacggacccgcaagaagggagcctaggccgacgttgttggtccacgactgccataacaggacacgtcgccaccaaaccatgtccacaccatgcttacagtgccaaagggggtcacgacaacaaagtctccacccacgtaccaggaaggatggagggtgacgcaagggtactgacagaagatgaagatgtactgaatacgaacctcaaccttaacgagaccacattatgtgggacccatcaagtacagcagcacgggcgtagagcgagctatagggacttgcacgtcgggcagatgagacatgatgtcgtgccaagagtacggcagcacacgacccgttagaaggagtcatgccgcatgtaggcacgtcccaagattggtccaagagggggctgccacgcactacgacatagggcttagtcaaagaactctctctctctttctcatgtaaggaccatcccttgaagtataaaatggagtccctctcccc

SEQ ID NO: 70742 - DNA, 471 bp, Zea Mays
cgcgcattaatatcctaaagatcaggggctgttgtataaatgtccggggcatgaatgcaactaaattgcactgacaatagacggagggttgatttctctgtttttgagggactctttagcaaaattgactggacgaaggggtatcgttgcgtaggagcagctagatcaactctcgacggccctgattaggtcgtggcttttacgaaaggggtatgttgaacccaccgtgggatccagatcggatggcccaacatttatgaaggctgatctaatttcgccccctccgatcaggatcggacgacaaccaagctcaggacgaatcgatatcctcctctaatcctagctccccgtttaaaatccgacggccatcgcatccccaccatcgcccgacgaccgccgatgactacagcacctgcccacggtggaggctccccgacgagcgcacagacagtcacgccagagccatcttcg

SEQ ID NO: 70743 - DNA, 841 bp, Zea Mays
gagaaggggaagagaaccaatggcactggtgacatcaagcttcacccccacctagagcccatgtggtggtcagaagggttcaccgaatcacgcctctcgtgcgctgggtctgcacatacacggacaccaattggagtgcgcataattcctcgccaacgacatggtgatgccacggatccgccttgctcgtgggcgagcctcttcactgctcagagcatcctaagtacctttctatagtattcgccatggccttctcatcgtaaaagcatcaaggatattgacgttaggacaaggtagaagccaatcgggtctctccggcgacggctccaccgtggaggcgctgctctaccgtaataggtcgctggaagggagaagaaggcacgtctgtcgttgatcggtggcgtaatggttacaattagatcaggggtgtaccccttcgtggatccgatctgagccatagatcggttatccgagggctgacacatgtgggaggcgtcgtcacgtgaggactttggatcctagatccaatggctagtgtagtatactgattcgctttaatgattgatctaatctggaccaccgaaacaagatcagacatctcagctttatctttaccccttcacgcgcgatagtttgcaaaagaaaccctgaagattattgaaatcaactcgcagtccatggtctgtgtaaaataaatacatcaaggtccctcgtatttgcaatttagccctggaatctatgttaagtgcaaaaataaatattaaaatgacctaaaacttatttaacacataactttcgtatattaactctgttttaatccattcaagttgtgttaggttcg

SEQ ID NO: 70744 - DNA, 752 bp, Zea Mays
taggggaagtcttgctccaatcccggaggcggtaggcgtggttctatccgaagccatctgccatgggaaaagagtcactattatgcacatgccattttttttaactagttattttattcattacatcaagccattacattacatagcatactactaccacaagctcgtcacacacgagtgctacctaagggtacccctgaaatctttctctaaagtgtccccaaattccttgagaaggtcatcaaggctggccagggacatgtcctcggcgtcggactggtttctgggagggttttcttcctgctgctcagtctgacacccctggcttttggtcttcttgcggcttttccttgcgggggcgagcttcttcagtaccttgtcgtagtccattttgagggtgcggtaggcttcacgggtgttggtttcttcgccttcagctaacgagaggctctcttgaagggacgccttttcttccgaaagttccctgactttctgctccaggctttccacctgggaggttagggaggtgcagtggagggcgaggtcatcatattggttatcaagggtatgaagatatccagccatgtagacaatggtgggatcattctcaataggatctcctcctgatagggcctgaagtcttttcctccaggtgggggtattcttgttgctgggtggaaagtagcgaaggggggtttcaatgattactttgttgtagttctggcacatctgtcggagggcttttcgggcga

SEQ ID NO: 70745 - DNA, 533 bp, Zea Mays
agtttggctagttggtgggatgaatataagtagagttcttaaatggataggtagttgaacgataaggaacatttgctgaacctgcagtcccgattaccaccttctggcactttgttgttgactgagaaaaccctggcctagaacctttctatgcctgcttcacatttggatgtacttgtgccttttcttccacggctatggccacacttattgcccgattgaaagtaagatcatagcaagtggccatcttcttttgcaactttgagttgaggcctctcataaagcaatctcttttcttaatattcgtgttcacatgctcaatagcgtactgagaaaggtgattgaatttcgcaatatactgcatcacagtatctgccccttgtctaagtcttagaaattactcattcttcatttgcaaaatcccgtcagaaacatgatgagtgcggaaagcttctttaaattcagcccaagtaacctggtgatctggaagttgtatggcaacaaaattggaccaccaagtactggcagctcca

SEQ ID NO: 70746 - DNA, 362 bp, Zea Mays
aacttatctactatgcgagtcttagggatgaagagtcatgacttccacatatggattgaacggattctttctgcgatggttcgaggctatgtccctgagcatgtctggctagcgctttaagatttgagctatttctttcgtcagctttgtgcaaaagagttatctcggaccatggttgcagacttggaaagattggcacccgtgttactgtgtaagcttgagaagatatttccaccttggttcttcaatccaatgcagcatatgattcttcatctcccctatgaggcacgaatggggggcgtgcagggacgttggtgctatccaatcgagagatgtctaaagactattcgaaagaaatgtag

SEQ ID NO: 70747 - DNA, 318 bp, Zea Mays
gatttgcttaataaaatgcagcgttttcagcaagattctcaatctgttgagaactatttccaggaattacaaaaaggtatgaatcgttgtgggatattggaggacaacgatgctgctatggcacgttttcgtggtggtttaaaccgcgaaatccaggatatacttgattataaggaatattatgatatgactactttatttgaatatgcttgcaaagctgaacgtgaagtgcagggacgccgctcgaagacatattctaacccttttgcaggacgaagctcgacatccacctcagcaccagttccccctgcgccatcc

SEQ ID NO: 70748 - DNA, 1704 bp, Zea Mays
tgttgcacttctgtagaagtagcagggacaagttctataaaaaatgttcgctgcacttaattgagtcccatcagcagccagttgggagaatgagataattaaaatatatgaatactcaaaagctaatgtaacaaaacataccaataaacaaagttcaatttaagatgtgggcaaaacaagaaagaaacctgcagaaacaatgaaagtaactatgtcattagcagagcttccaaagcattgacatcgttatttcagtccacctcagcatacactggatcaatgaaaaaacaatatcaactacatgacatgcaaatgcaaaagtattaaaaatgacaaaaaaaaactgtatcccagcgacatgaagttacaacctgtaaggatgagcaggctacacaaatttaaataacaaaacagacaccagttgtcacgaatacgtccacgttcaaaagtttaaaggaatgtgttgacagcattgtgagtttgtgacttgcaccgagccaccaaggcaccaaagacctattacctgcgagagtcatcagacaacaggtcattcagggatccatggaagagccagtaatccttatgcaactctgttgttttacacgtctttccatttccttggcttactatctagtttatcatcaaatttgcagctggtgcaagtctcgtgaggaatagcaagcaagtgtagattgtgctgacctgttcctactcaagggaacattcaataaaagaccaaggctttggtgatcagttgtaaaccttagaaagctccactccttgaagtattcacattcacaacagctttgtggaaccctgaggttcagagtgtttgtagctctcaaaatgaaggcactgtccattcttctgctgatattcatgattttggccagtcttcgtgcactattctgtgatacagatccccaagatggtaactatattaaccttggtctctgaaactttctattcttacttaaattagccttgcaaagttatagcttaagcatcttgaagcctagcagaacacataaatttgctagatgaaaaaccttttatatgccactcagttttcaagaaacagtattcttctctccaaagaacaaaatgtttaatgttttagcatgcctttatcttcaagtatgtaagatccaatgaaatattgctatgataagcaccatgtcaattgaaaaaagtaccattcttctttatttctctaagttggtgacctttccaaatttatattgtgagttagcaaataaaaaacagctaacaataaaagagatggcagtatcaaaccatacaaatgagaatgtaactcaattcagtgctatgtaaattgttcaattgataataacacagaacgaattgacagtggctgcacttcagtctctaattaaagggtggcagaacttcccatcaagttgggaagcatcaaatgatccatgtggtgcacaatgggatggcattatgtgcaacaatgggcgagtcatatcaatgtgggtactaactaataatgttttactagtttttactttaactttccatctataaaattcaaaatccatgtttccaggaggctatcaagcatcaatcttcaaggcacattaagcaacagtataggccagttcagcgagcttgcttacttgtgagtcattttgcatagataattaaagtttataaactatctttagtactgcattttct

SEQ ID NO: 70749 - DNA, 654 bp, Zea Mays
gacggagtaccttccggagaactcgaggctcatacgattaaaaaatggcaggcaaatagttggggcaacatatcagatgcaacagtgagtaacacctagacagtaggctttacggcacctaccaacgatcctatggctacggaaatttaggggacgtgtccaccctcattcacgagcaacgactcttggtttaatatatagcccgggttgagtaacagagttttggaattcactgaaaacaattaaaacagttagtggaaatttaatattcgtagtaagctaatcagaaggtctgtatcaggagcaaagatccatggtaggaaggtttaaaggagggtgtaataaaaaggaaccttgatcaagcagcaaatctctgaggggatatgtagacgataatgaagtccatgttgtggaacaaaagtttatacttcactgaaaacacaaaacagttagaaaagtatattgaaaatgaatatcagtagtaagctaatgagacgatatgtatcacgggaaaaagaacagagttagggctgatttgggaatcatatttctcaaggaatttcaattttttcgagagaaattagttcatttttccttgaaaaattaaaaatctcatgtgaaaatagtgttttcaaactagcccgtagaggaaaa

SEQ ID NO: 70750 - DNA, 426 bp, Zea Mays
gtcggagttacgtcacaggaatagggcacgggagcaggacagtcatcgtatagctgaattgtcagctgaagtcagccgcttgtagtatgacatctcagaacgggatacgaccattgattgggccgtcaactcgcattcgttcgcttgggactgcgaagcaaaagctctagctcatgtggcagagattagtgcatccctcgaaagcctgcaagtatattgtaatactttacatgaagaagtacatgtactgtatgctcgactgcacccagatgtgccttctgacgttgcagcaatgggagccggaccatcgggtacagcaaatgaaggacctgatggggagctagacctttttaggccccctccttccatgaaccttgctgatgaacggtctcctacagcaggaaatggagcaacaaaggatgaaga

SEQ ID NO: 70751 - DNA, 771 bp, Zea Mays
ttgatacccccgggagtaacttattcaaatcttgacatatggttctttctaaggaagcctgcatggctcgtcttgccgcatcttgaattctacgacaactttcttggtgttgagttaaaatcatatccataatgaatgaacgatgtgcatctgtcaacacagcactgtcgaccacaatgaggttagctcgcgtacgacggttatttcgacggtggcggcggcgccttttcggtgacatggaatcttggacataaggttttgaaaccataatttctgatgatatgggatcagaaagggttgcagttgggtcgacatgacctttcctgatgtcatcattggtgggaccaattccttgccacctaagcacacgtccatgttcaatcaaaccgggattatagaccggagatgggatgaactcaggagcctcaactcgtagctgaggtctagtatgtgactcatttttaaaggatgatgtattatactccatcaccacttctttccctttgtccatggacggttgaagaacctccttttccaccatggcggcctttcccttattacagggtggatgttgatgttgatctaccaataccacctcttcatttggactaattggatttgttgttgtcactgttttgtttggtggtgtcccaagtatgcttggaacaagttttgatgaccgcacccccagcatattgggaggtgtcaaagtaggagttgtctcttttggagttgatgtagaggaagcccttgactgtacaaacttggttg

SEQ ID NO: 70752 - DNA, 481 bp, Zea Mays
cccacttccaagacggtatggggaggggcttcaaggtgcctgctaccttaaaatgactggccttgactctctggcaagtgtcgcattcagatatatacttagaaatttccctcttcattctggtccaccagtacaaagatctgagatcatggtacatcttattactgccggggtgcatggagaatttggaaaggtgagcttcatccaatatcttctttctgagttcggggttcttgggaacaaccagtcggtctacaaaccatagaattcctttgttgtcctgacgaaagcacttgtatttttccgccttctgttcgatcatttccttaacgacttgaacacccttgtcaccaatctgtgccctgactatttgctcatgcaaggcgggctctactgaaatataacttaaagcaccggaggaaacgacttctatgttcagcttgcacaactcatcacatagggtggtgattcttgcatccat

SEQ ID NO: 70753 - DNA, 756 bp, Zea Mays
tcccattcccatacctgtgtattgagtttgacaggtggtcccacacacatggcatttctgcctcttctccgtttcccctacccacatatgcgtcgttctggcaggtgggtctcatttcccattcccaaacctgtgctccgcgtatatgaccaaattttaccaaagaagttatctgtgtggggtcacaaccatgaccaaccaagactacacaagttgtatacgcactgcaacttataaacaggtgtgtacacagtttagtggctgatgtggtactaagtttagcactttagcttgcaaatacgaagcacacgcgtcctgggaggcccatctgcttgttatggcccagaccaaggcccagtatcatagcaaccgctctctcccgggtcagcgcctcagcggactcccccctccggccctcccccaatccccacccccgcttgtcatctcccccgtccgtctccacgacctcctcctccagctctccctgctaccgcgtgacgaaaccgcccatacaacaaccgcgctgccgctacaacctcactctacatagcgcgaactatgactccatcaagccgaccatggacaaggaggaagagcgcgagatcgggcctgggcggcacggacatcacgtgttccaggtgcgcgacggcgagggacctgctttgctccaaccttgtcatcacgtcgtcctagacatgtcccttaggccgcggtgtgcggatccagtcctaccttcctcgaatttggtgtcctctc

SEQ ID NO: 70754 - DNA, 852 bp, Zea Mays
tcagactgatggtcaatcagagcggactatccaaactttggaagacatgttgcgtgcttgtgttctttcatggaagggtagctaggaggatcatctcaccttggctgagttcgcttataacaacagctatcaggctagcatccagatggcaccgtatgaggccttatatggcaggcattgtatttcccctttgtgctaggagactttgggagagagatctttggttggtcctgattgggtccagcagacatctgagaaagttcgtgagattcgttagaatattctagccgctcagagccatcagaagagttatgctgatgtgaggaggcgggacttggaatttgtagtgggtgaccaagtccttcttagggtatcacctactagaggagtcgttcggttcggtgtctccaggaagcttagcctgaggtacattggaccgttctctatcttggcccgggttggcatcttggcttatcccttgcaattgctagaatccatggcaagggtacacccgatattccatgtctctatgttgaggaagtatttgcgggatctgaaccatcaaatcaagttggaaccgattgctgtgtagcaagatctgattctggagtgtcgcctggtgcgtatcttggagtcctcggagcatgtcatgagaaggagaacaattaagtatgttaaggtcttgtggactaatcagtctgagcgcaaggctacctaggagctgatgcggcagaagtacaccgaacttttcgttatgggtgagtttttgtcttcgctgatctctcttttgtcgttctgatagaagcgttggaattcgaggtcgaattctttttaagggcggtagagtgtgat

SEQ ID NO: 70755 - DNA, 600 bp, Zea Mays
accaccatccaacttggagcgaccttttctccaatttttgtgcatttttaaacccttcactattaaagaatttttctcaccaacttatggtctttaatttctatatatattccatagcccaacaccctatgtattaggcacaaatgagttacaaattcagccaaaacactgcaatttcagacttagtgtactgttctggatctgaaaatgcagagatctgttaacccctctttggactaccttatctactagttgaatataggtttaggggcaagtttctcaataaagtttatactcctatagttcatctacaaatttgatatggtgatccatagctaaattcgcctgaattccaaactacggaggctcaaatttggcatcgaacacaaatttagactctggattttatactaagtctgaaactcagaaataaacattacatttttgagccactgtttctcccagttccatgtagctttaggggtatgacctttaaccaaacttttacaccaatatatggtattccactttggtacataaactttaacccatagctgtatgtatcagccaccaacatgcttccaaagtctgaaactccac

SEQ ID NO: 70756 - DNA, 866 bp, Zea Mays
cacctgatccatggcgatgcttggttgttgtatttcttggacgaagatcccaggtggagcttgggcccgactagaccccagcttcgacaatgcatcagttgctgcattgtgatccctttccacgtgatggaactccaatccctcgaacttgtcttccaacttgcgcacggctgcgcagtatttgcccatggagtcagttgagcagtcccaatctttgtttatttgacttatgactactagcgagtcaccatacaccatgagcttcttgatgccgagtgataacacgatgttcagcccgtggactagtgcttcgtactctgctgcattattggatgccgtaaacaaagctggagtgcatacttaagttgttcacctctgagagcaataaagagaatccctgcacccattccttgcagcttcagcaagccatcaaagtacattctccatacttcaacaacttctggactttccgggacctggtgctcagtccattctgatatgaagtcaaccagtgtctgagtctttatcgccatgcgcggccggaactctatgtcatgagcccttagcttgcatgcccacttggatatccttccaatagcttctttgttgtgaagaatatcacctatcagaaatcctgtgactactatgactttgtggtcgtcaaagtagtgtcggagcttgcgagcagttagaagtaccgcatacaacaacatttggacttgaggataccttatcttagaaggtctaaggacttcgctgatgaagtaaactagatgctgcaccgagtatgcgtgtccttcctccgaccgctcgactactaacgtggtgcttaccacgtgagtcatgcaggagatatacatgagcag

SEQ ID NO: 70757 - DNA, 460 bp, Zea Mays
attgtccgaggcagataaagaggagctaaaagaatatggaatatcttgcggctatcagccgggatctatgctcttcgatggggttgacgaagaaattttgggatgtattcgtgactgcgccggggcaaaaataatcggcactctgtctaattgtgttggtttcccgaagctagaatctgacattaatggttacctatggcaacacatcgtcgacaacctattttactccaatttcaaggtgaaatctttgtctagattcttgttatcttgatggattaaaatattctaaacttaacttgttttcgcagagcatgctgctatgcaaggcgctaagagtgcagcaagatttcgaagataagaagaatgaaataataattgaaggctcggagaacaaaattaaagattttgaagcttctcttttaaagaaagatttcttgcttcaagcaaccgaaagttccct

SEQ ID NO: 70758 - DNA, 519 bp, Zea Mays
gagccgttagcggctggatcaacgacacagacatgttctcccctaactacggtgaaccaggcagcagcgccgctcacctgacgatgacaaacactccggagcggtgtgcccctacccccatctatttcatatacgaaagatgctacacgaacgggtaacaacggtgaatccggagaggagaatcacactagtgatcgtgcagcaccacagtctggccacgatcgcactgagttccacggcggcgccacaagtccggcgataaattctcgatccacgggcgctctaatgaatacaatgttcagttctaagctacgaggggacagaggtgaaggcgcagagggaatctcacccgaggaaggctgcgcaagactccggtccacgcgatggcgcattctccgccacggttccaggaatccggtgagtaacacacccgaactccggtgacccacaccgcttatcgccgtgacgcatgcgctccccaacatatggcgctttgtgacagaacctcccaagttatta

SEQ ID NO: 70759 - DNA, 848 bp, Zea Mays
gcgagtctctcggatcttctttcgatcttggaaaaaaaaagaaactgttattagtgataagagcaaggttaataaataatacaagctgtatatttaatattggatttatctctcctctcacaacatgtcttgaagtgtgtgagaagtctgcttcttttttcttctctatttctcttccttccacgccaccttaaatctgttgtggcatccttgcacgtcacttattatactcgctctaagttgacctgccgacagtaacaccgcgagtttggaaatggagggtgatcggtcgagggatttttacatatcaagcgcgatcgatgcgtgagcgagagtgatggctcgtgtgcctgccaaccacgagcgaggaaaacaaaatagagcagcagaaaacttacgtggaaagaaggttgagctgatgagtgagagcacccgttcgcactccatgctgttgcttccgttcgtactttcttttttttccctttccaagacggagaggaaataaaatgaatgatgcgggggcgagtcgggttcagagttgtgttcaactgtcgtgcttctttttccataccttggtcacctcgatctacgcgaattcgatcacacggtgaccctgatgaatgaaatgaagaggaaagctccgaatccgaatgcgatcacagacgacgagatcttcaagctaagtatagtaacaagatatggctaaatgctgagatagagaagagaagaagagagaaaggagaaacagatgataaacttatagccgtattagatacgacaaccaataataaaactttttataaaagataagtgcatcaaacatattatacaggtagactaaaaggttg

SEQ ID NO: 70760 - DNA, 477 bp, Zea Mays
tcgctatagatagcccctctgtcgccgaggacatagccaagtgaatgccacgttcagcggcctccgatgactcctcccttttcacaccgtaggctcttctccatccaaattcgtcgtactcgcggtcgctctctataaattgagcattcagcgtgcttcgttagcttgttacgcgcccagtgcatcgctcctcacctccgattactcaccatagcccgagtaatcgcgattgtccccaattcggttctccgcgctaccgtgagtcaccacatcgtggaccgccgtctccaggtccgctctcgccctcctcgctctcgtttcagcacccttgtgcgctatggatgcttatcgacccagccaattgaactagaccatgctagatcatcgagaacacctcgggacatcctcggttcttgccatcatcgtggacagagtgattccgacctggattcatgcaattatttgagggattaaggc

SEQ ID NO: 70761 - DNA, 619 bp, Zea Mays
gcccaatggtcagcatcgtcatcatcctcatgtctgaatggggatcccgcgtgctggttacgcaacaactcaccaaggatctaggaaatttttggtaagcctacaaacccgtgcatagaacccggaaccacccctcggccatctgcaagcataaatacagggcccgactgccccctcctcaaccatcatagcgcatgtaccaccattgtgtggggtcaaagacggagagaaagtgacgagaccgccggggaaaagctctagccaccatcatccaccaacgaggtaagagtcccttccaaggtttcgacgtgttgcccgccctcataacagcgttttgtttggtgttggctcccctgggtgtggttatggatcccatccatggcgcccctaaggtgggtcggccaccaccgtcttggcctggggtctaatgatggaggggaaacaatggtgaccgtagatctgttgatgaacgcgcgggattagggtttcatcttaccccttcgactggatggaaccccgtctgtcgatctcagatccaaagactatcaccgcgtaccagtcactttaagggaggcctaatctacacccttgacgggggatcgaacgactcagactgagc

SEQ ID NO: 70762 - DNA, 814 bp, Zea Mays
gagccatacaagctcatgtttcttccccccttctttcttcttcggcattccccaaccgctggaagttggaaatgtcttgtttgccaaatattcttgtactagatccctagtactaattttggcagcaaccaccctaaactcaactttggctacctggcatggagagccaagttgcatatggcacaagggcctggtcatcccgaagcttagtttcataggcttcatgaccatagtcatcagcttctcccttctcttctcgtctactttcacaaaaaaccattcatttgtccacccggttggccatttggtgcgatagcaaatcactggagcctttgtatcttttctataagcaaagttgtagcagccaaagttcttatgaagaccatctgccctggccttcgtctgataatgcagttcatgtacccggcaaaaagcttcggcattagcatccataccctggcttcgcagagcccatataaaaacactgagcctaacgatagcattgggtgtcaattgatgaaggtatatctcaaagttcttcaaaacctcccctatcatgtcattcaatgagaaccgaagtcatgctctgaagaagctcttgaaaacgacaacttcgtcttcttttggttccggaataatttcctccctagcaaaccggacaagcttgctttcagcctccccgaaataaccaagtttcctcatcataaccatgtcatcctccgttacagtagacttcccaaactcaatgtgactaggctttgttgggttcaggatgctgttatcttcttcactttcattgtcattttcgcctcca

SEQ ID NO: 70763 - DNA, 992 bp, Zea Mays
tctagatggtgtgtgaggagacacaagcggttattctggttcgggcaacacaaggccctacttccagcagagggggtgagacttatattactcgcaccgtggtgcatgtagtaggggtttacaagcacggcgggagaggggaggtccccaagtccctggagatgattgaggcaagtgccaatatctaagagaaagtggaggagtgagtgttcgtctgcgtgtgttgtggacatcgtccctggagtgaccactgccctatttatacacgaaggggagtgtccgtagtgtaaccgagtgttgtattcgaaggagggatgccttagcgtttgcaagtcgacgtgacggtgaactgtgctgttgacccacgcctgctgatttcccgtagagaacagatgcagagaccaaggggttgtccgtacgcttgagcccgaggaagaggtcgcccatgccatagttgttgtaacagcgccggggtatgggccaaaggctgcttacgaggtgtgtcagcgtcctggcacgtgatgatgtcgagattccctgctgcgcttatcgagatcagagcccctgcctggttgaggcggaagtcttcccgaggcgttagccgagccgtcccttaacgtgcgctaaacccgggcggagtggctgactgtgggattcgcaacatagttggtggccgaggccgagctcgggcgaggtggtgaattcgctcgagggccgaacttgacgtcgggcgaggtggagaaatcgccgaaggctggacccggggtcggggtgaggcagagaggttgtgaatgcaggctggatcctgcttcgggtgaggcggagagattgcgcccaaaggccagtccactctgcttgtcgtatttggcattccatcggagggtgtcaggtgacgtgcgcacactgttgtgtagacgtaatcatgctgttgcgctagacgtgatcattgttttgtctgtcactgtgctctgctcctgcagcgtgggttggca

SEQ ID NO: 70764 - DNA, 534 bp, Zea Mays
tggtgccggaggttgaggggttcctccctccatcgtctgggcgagcagtttctgccaccagggcgtgcagcctctctatggctacaagtgcggcggcacggtcaccttggacggtgagtactccagccggggatggcattttgaggaccaaatacccgtaatgggcaatggccatgaaccggtacagggccggtctgccaatgatggcgttgaaggggaggttgacttccgcaacatcaaagacgacgttctccgtgcagaagttttcctcagttccgaatgtaaccgggagtgcaatgctcccaaagggatacaccggctgtgggaccactccggagaatgggcgcgagggtcccagtcgggactctgggatttgcagctgcttgaacgcagcatggctgatgacgttgaggcctgccccaccgtcaatcaacacatggtgcagtcgcatgatggcgatgacaggggcggtgatgagtggcagtatgctggcccctgccatgttattggggcagtcgggcgccccgaaggaga

SEQ ID NO: 70765 - DNA, 554 bp, Zea Mays
atttccttccttcctctccctgtcccttgctctctagcggttccctctgctcccccctcgccatcggcgatcgtcggttgattgctccggcaagggtctgccccaccaaatgctcgtccctctcctcttcctggtgagctcctccactacctcttctccctctcagttcttcaactatctgcagtgaagttcaaccctaacaccccttgagcaaaatccaaatctggccaatttctgtgaaatcttgtgtttgcaagtgtctctgtgtgtatcttgagctcccttgcaggttcatctctccctttgggaggtttcaaactctcgaatagccatttcaccgcttccctcatatcccgcacgttaggtgctcggtgaaatgcccaaaccactcaaacttgctcaaatcgaccccggatttttccagcaccttcatgacacctcaagtaacaccttcgccaaatttcacgccaatccgatatcccagacaccgatttaccactgtttcccatttatagcgattgattctgagccgagtgccacaaattcattttctt

SEQ ID NO: 70766 - DNA, 529 bp, Zea Mays
gtactgcgtagcagcttggctgcttggatctccggagtgccgcagggagtcagcttggatctctggactgcggcggggcgggactgcaggagtctaggaatgggagaggacagaggagagatggagcatggagttgggcggcggctggagtcgctggactctggagagtggccgggtggtagagttgagcgagggtttcgcggtagagtggccgagtggtagagtttgggctgtggcctcgtgggctgtggctcgtgggcctgtgggtttaacggatattcggataattgggtatggatattaatttttcatacccatttaaaaaatatccacggatatcaagtgctatccgtatccgtatccatgggtacagactcgtacccaaaaccgtgcccaacgggttttttatccgcgggtacgcggataaatcacatccattgccatccctagaaggaaccatggatcatctcttcatgtactgctcctttgctcaatccttcttatgttagcatatttgggtccattcgag

SEQ ID NO: 70767 - DNA, 568 bp, Zea Mays
ctctgtcagatacaatggtctttggaataccatgcaaacgcactatttgatcaacatagatttctgcatatttctctgtcttgtgggtggtatgcactggtaagaaatgagcggtcttggtcaatctgtccacaataacccaaatggaatcatggtgccgggaggtattgggcaatcccacgataaaattcatgcagatgtcctcccatttccaagatggtatgggaaggggttgcaaagggcctgctgccttcaaatgactggctttgattctctggcaggtatcgcactcggatatgtacttggcaatttccctcttcattctgttccaccagtataaggatctgagatcatgatacatcttgttactgctagggtgcatggagaattttgaaaggtgggcttcatccaatatcttctttctgagctcagggtccttgggaacaaccaatcgatctccaaaccatagaattcccttgctgtcctgacggaagcatttgtatttttctgctttctgcttgatcatttccttgataacctgaacacccttgtcttcaatctgtgcccg

SEQ ID NO: 70768 - DNA, 656 bp, Zea Mays
ataaaacacaactttgaacacaaacttggtccaaattaagagttagttcaaaactaaaccaaataagagtgagaagaagagagaaagtcctctttgctcgattgctctttcaagatatgaaataaactaagagaaatattgtaagtaaatttggagaacttagatagaagaataaaaatcacaaaggaataaacacacgaggcactgtgatttttctcgtggtttggccaagccacaaatgcttgcctagtccaagttgtcgtgtcatcagtggacaagggttgctctcaacctctctcaaacgatcctatggtcaacttgagtgccacggtcttgcttatatcaatatgtttctcctcgcatggaatctccacaagttggagtctcttgcagtcgtacatagattaatggagcttacaacttagtaacatcacaagagagaggagagggtacacacacaagaccaaacacagcaacacaacacgagagagaatatcacaagagcgcaaacagacaaagtcacaagaacagctcaaaaacggcgctcaaatctcactagaatcactagaatgcgttgtggcaatgtcagagtgatgtgttgctcttggagtgcttgggtgctgaaggagtgcgccatgggggtccttttatagccc

SEQ ID NO: 70769 - DNA, 1093 bp, Zea Mays
gaagactgaagattgaagttcagaaaattggaatggtaccagtgtgatgcaactggtttttgggtactataactcgtaatctataaggtttaggtccaagaaacctatagtaactttgcagatccttgattagtgcacaagttttgttaatggagactgacctgttcttagtcagaataaggagaaaaggatgactgaagaggggaagatcagtcaagtcatgtagattcaaaagtgcagaaatatctatccctgatctttttcccttgctgtgtcttacattggaatagagtgaagatagagatgaggagatggcagggatgttcagaactttggtcatcactgaaatatcaccaagtctgaaatatctactatagtgccatcttatctccctacacccccttgccatggataaactcacccttgccttgctatgctcaaggaactggcgtgggtcttaaggattgagccacgcctccacatccatgcactctctgacgtgcccaaagttcttgctgtaatcccaagaagtcagccatcccttgatcttttcactgcctatttaagagtaaccgaggggatgaaccaggagtaaaggagagatccttacctctgtcgtcaaccacggtgtgtagcttcaacgtagttttgttgccttcctttccacaaactataccttggacgctcccaaattccttggtcaagtgactcaacgtgtatggtgaccacgtcgccgatgcctcaacctcacatggccaggcgactacggtacggtacgacgcatattaatcaatgttctagtgtccttataggctagtgaagctcaccgaggtattcgtttagtatttacggtcatagtttggttggaacacgggctcgacgccacataaactgctccggtgtcaacccaccaaaactcagttggtccgatgccgattcatgtaagcgtcgcgttgtccgtgtcctagtagtgctccatgtgcccttaatttgaatcctctggtacttgtatcgtatggacggacgccgcggaaccgggaccccgtcgtgggcgcggttaggtcgctctgggggtttacgagctaaatccatg

SEQ ID NO: 70770 - DNA, 424 bp, Zea Mays
gtaggtttatttttttttgggttccactgaattccttttaagtcttagggataaatgataagttctcaagttagacttattggggtgaggtttattccatcttttcttttattctctttaatgttttggagtaggtttgaactacaagttgcttttataaaattctaaaaattccacaaaaattacagtggcttgttactggtgtatgtttctctgtctcaaaatttggggggtcagcaagtgaatatttttctctggacaaaattattaaactctggggcagaaggggtgatttgagctacaactactatttaacagtgggtaattctctaaaacttatttttgctggtttttaggtgttataacatgacttgatacaaatttctaatcattaatacctcttaataaattttctatggttttc

SEQ ID NO: 70771 - DNA, 1137 bp, Zea Mays
gctaggcgtttcatatccttcactgctggattgttcttgagcaacactcttgtccatgtggtcgggccctaatccttggtccttgattggagaacttattgagctatatatatacaaatacatattaacacatattaacacatattaaattcatattaacaaataccctaacccttaaccactaacactaaccctaagccctaaccctagcccctaatattgtgatacggatattatcgagttacgtatagagagggagagtcgtataggacgtagagagagagatggagagtcgtatagaacgtatagagagggagagagggagagtcgtatagaacgtagagagagatggagagtcgtatagaacgtatagagatggagagagggagagtcgtatagaacgtagggagagagggagagtcgtatagaacgtatagagagggagagaggaggagtcgtataggacgtagagagggagagatggagagtcgtatagaatgtataggaggaatcgtataggacgtagagagagagagatggagagtcgtaggcagccgcttgatgtgcggcccacatgctgtgtgaagggaaggggtgccaactaggctcgcccgctactctccatgtgtcctccttctcacccgtccgcatctctttacttagtcttttttccgcgtctcactaaaaaaccatatcagagatcatgtgctaattctaatcacaattgtcattcatgtctctcttgcgattatgaccacagtaacacggtaactatggcagaggaaatggcgttgtatgcatgcttctcatttgtgcgagtggcaactaagtaaacaaattgaggaaatgtcgttcggtgtaaagtaatactttccctctctccctcttctctcttctctctctccctccctccactctctttcctctctcttccctttccctctctcctctcctctctcttccctctccctcctctctcttccctctccctctctcttccctctccctccctccactctctttcctctctcttccctttccctctctcctctccactctcttccctctccctcctctctcttccctctccctctctcctctcctctccctctctctcactctctgcagagacgcgcg

SEQ ID NO: 70772 - DNA, 403 bp, Zea Mays
cgggcgggcgtaacaactttcctccccttcggaatccgctttcctcggcttcggggtataaatccgggacacctcgctcgcccatcagccaccaaacaccgtgaagccctcaccatggtagcacccgagggacagagagatgagagaggtaccgccgtggtggatttgaagcctacggcgatgtcgagtagtcagaaccgggccgggagcttctccggggcgcttgagtacttgggcgaccaccaatttggcgtgggtggccacaagctttcggtgaattgctcgccaacgcctgctagcactgcaatgccgccctccgccgtggatagaacttctgctcacgtaacgcgtggtaagtgccatctcatcccgtgcgccatcatttcctctgcgcgtagatcgc

SEQ ID NO: 70773 - DNA, 585 bp, Zea Mays
taaatccatgtcatatttgtttttcagttttcttcgtttatacctgattgcaagtatgaattgaagcaagttgttggaatggcatttaattctctagaggtagtagaagaattctacaaaacaaatgctcatgaagtcaggtttgttgtctgtataggacctcaaataaaggtgcttgatcagattgagaataagaggctctattgtacaaggcaaggtttcatgaggacacgagtttgagatacggtggaatgatatcatgactacttatggtctataggggaatgagtggttaactaaggtatcaaattcgggagtcatggatttcagcaaactcactagatcaattccttagaatgacctcaagatctgaaagctcaaattcgttctccaatcgctttatccaccaaaaattgagttttgttgagttttggctatgatttggtacaaccttagagtgccagcgacatgaagagctacaagaagatatcattagtatccatagcacaccattattgagtacaccatggcctatggagaagcaaattagcatattatacacgcatcgagtgtttaggatattcc

SEQ ID NO: 70774 - DNA, 422 bp, Zea Mays
ggcgtgcatgcggatcatccctggcacaacccgtactggtcatggctggtattggctgctacggctagcgatcagaaaggcattaccaactaacagagacctcggaacacgcataaatttgacacggacgcaccgagaacggcttgtccacgagcacggcggaaaccgcggtgtcgatcccgtgttcctaatcacctatgcccgaatcggtcaaacggatgctacggtgagctttacgtgcctacatagctgctagaacaacacttgagaggggcagagctttaccagagtggtctggccatggatgagctgttcttggcggcgcggcggaccgaattgggggaaaacggcatcgcggtggctctgtttgaaattggggttggagattgaggctactcggccataagaagctgtgctttcac

SEQ ID NO: 70775 - DNA, 392 bp, Zea Mays
gagtgcacccgccctgatcctaagatgaggagggttcttagggatttgcttgaccgattggatgtacacaagaacacaaggattagtgtggttcaggccgccgaagtgtaataccctacatccattataagttgtattgctttgagagtcaagagtctgagtgtgtctcagtctatgtccccaccctatggtccaagtgccctcccttttatagtcaaggggtctgttataagggagttgggtgctacaagggagttggaccctgataggtgggcccatgagctattacaatattgaggtgtttagatagagctgacgatgctagatcttctcggacatgtatctcccttttgctgtcgtgcgatctcctagcgtccttatcctaatgtcgt

SEQ ID NO: 70776 - DNA, 967 bp, Zea Mays
caacagagaggaagtttccttgtgaaaccgaactctagtaaataaattgccgcttttgtgttatgttgtgattgtggtttatttctccattccctcttgtaggtctcttgcttgcacttgatcccaaatcaattgtattgctcctaattatttccacaatcatattgagaaacatttgcaagaagaactctctatcactctgttcgacttgtttttcgttctaatgtctaacgggggtttgagtttgtgtttaaagtgataaattttagttttcgcctattcatcctctttaagcgactttcaggttgtcaccgtgggtgagtgcaacaatgaggaccgagagctagtacatcacctacaaagcatcaatacggcaccacatcaacacatattatccgagagatggagagaggatagggaacgtgggatgtgacacactcactgatagtttgaacgttggggacgaagacaggtagacagagaaggccatgacgcaactgagggtggcgctctggtgatggaagtggaggttgaagcgtcgaacaaccctcgcccgtcgtcgtggccgtccattcctcgctgtcatcactccctggccccgacgcctccctccctctccccaacatcccacctaagacagatgaggacaaaggagaggtgtaatgtccataaaattgcattaaatccatgatgcgaatccccctattttcaatggtaggctacaaacaactttataatgacatttgggcgaattgtactcgatcgactgaggctatctctagtagtttacccatctatactcatattcaaactttattaaacaaacattgcagttagtctacattgtaaacaatattttggatgattatgtgagggaactttttaataatgacacaattcaaattcctaacgcatatagtccacgaaccaaggttctcttagccctccgcctaaaccaggaatatat

SEQ ID NO: 70777 - DNA, 755 bp, Zea Mays
agaaatctttataccccaaaattcagggtgttacaagtttcttcttcctctcctagatccccatcatcatatggatccatttccatcctttgagcacttgaggagccttcatccactcttcaccacatattctcatgtgtcgatctacgaccggctccacgggacacaacacctccgcgccttccggatccccttggttgcatcttcaccagggtgacagggcataagtattatttataacactcgcaaaggatctcatcagtttcccccagagatgtccgataaatctattgagatgcgagatggtgaaagatttagggtttttcacaatcgtagagggaggggaatgagggatctgccgatttgatcgggtaatgtgaagtaataaaccttgattcaggtattatatcctttagccccccatcttccaggtttttcctttttgatatcacttttgtacctttttcaggaaggccatctgaattcggatctcacccatttttttcctggtttctagatggtgtcgcccatgcgggcacaaaaattccccttcctggatcaagaatccgtattttggatccaatcactccatttcaactcaatcgaaacatgtttgattttgaattgtttgtatcataatcaccatgattcaggatttcagtatgatccataatctcacaccaggttggttttccatacatagattagatgtcatgggcaacttgtttgtgacacacatatagcaattcccaaaa

SEQ ID NO: 70778 - DNA, 601 bp, Zea Mays
gcgctcttggtaccatttgtaaaataggaatttctttccactattatactcaaaacccacgttttacagagtaacttaatcattgtaaggtaaatggcaacgtaaattttgattttgagcttgagacttaatattgcaccaggcaatcttgaaccaatttgaaacataacctctaactttttcattaagcataatggtttttcaggttacaacatatcaggagactcaactctctagcctagtacatcatgtcatgccaaaagcttggctacacagagtacatcttcctatcatgtttcttcctaacccatcttaccctgagtagcagaggcagcgctggcctctagattgagcggtgtctaggctagaagctatctcgatctcctcggggtcctcctcgctatcctcatatgcctccatctcttgttgcatctcctagtggtgcatttccaaatgagcattggcttcatccagttccacatgcacgtcgtggagctggttttccaggacctcaatggtgttgtcctggatttccacttattgctccagctcacaggtgtggttacccatctactcaatttggagatccttatccaccaac

SEQ ID NO: 70779 - DNA, 500 bp, Zea Mays
gccttggtcattggtgcccgtcgaacgggatttcccgcggcgattcaggggcgcgcggaagggtttccctgaacaagaatttaggtttccttgaaaaaggattcaccccgcgtgcaacatttaccttttcacattctctctcaatcggctgcacccctttgccttcgtgcttctctgctccacgcccgcgccgccgcactcgtgatggctttgcttggtcatcatgaccgcttttagtctgaggaagcgcttaacctggtgcgtggcctgcttgggtggagcgcgctagggctcgccggaagaatctgtgccggcgctgcccccttggcgatcttgccgtcagggagttcgtgctgttcacctcctacatctcttgtgggttggcgctgccgatttcgcccttcttcctgctgctgctggaggagttcgggcttcagcttcaacacctcacgccccactccgtcctccaggcagccatctttgtccacctctgcgagatg

SEQ ID NO: 70780 - DNA, 531 bp, Zea Mays
ctcctattaaaaattttcgttctgattctggtggcgaatatttatttgataattttcccctgttattgacctaagagtgtactcttgctcggctttcttctcctggtgctcatgcacaaaatggtgtggctgaacgaaaacactgtcatgtcatagaaactgcatgcacccttttgatatcttcttttgttccttcacatttttggggtgaagttgtttctactgcggtttatctcatcaatagaaaatcgtcatccaaactctctggcaaaacacctggtgaactcatttttgggactcctccacgatatgaccatcttcgagttttggatgtacgtgttatgtcttgttagcacctcgtgagtggactaaattgactgctcaatctgttgagtgtgtttttcttggatacaaccttgaacataaaggctatcggtgttatgatccgtcttatcgtcgcagtcgcatttcacgagatgtgagctttaatgaaaatcaacccttcttttacaactcagccactcattcttc

SEQ ID NO: 70781 - DNA, 515 bp, Zea Mays
catgaacacactgttcattaagtacatgaagtaagctggcgcattcgtcaaaccgaacgacatgaccatgaactcatataatccatacttggtgatgaatgatgtcttcaatatatccgaaggccagattctgagctgatggtaacctaacctcatatctatctttgagaacacactagctcctctcaactgatcgaataagtcttcaattttgggcagggggtacttattcttgacagagacttcattcaaagctcgataatcgatgcacatcctcttcgtgccatcctttgtctccacaaataacactggggctacccaaggcaaggtacttggtctgatgtagcccttctctaacaactcgtcaatatgcttcttgagttccaccaattctggtccggacactcgataggctctcttggaaataggggcggtgcctggtataagctctatggaaaattcaacctttctttcaaatggcatacctggtacctcctcgggaaacacatctggaa

SEQ ID NO: 70782 - DNA, 834 bp, Zea Mays
gccagcccacaacgcaactcacgcacacaaccaaaacagcccatcaaggcgcacgaccacccctgcttcagacttcatctcctgctgactccactccctggctcactgcattctccgctatggcatccaccggtgtgacatctgcccccctgcaacgcttgcttggccccaagcaagagcatctggataacgctgacgcagaacatagtaatcctcccaagttgtggcatccgctggaatgtggctccacctgatcagcacctgcggcacagcccgactccctttcttgaccaatctgcgatccaatatctccagaggctgaacgttgtgaccactcagatccgaggaagtaggaagagtggtaaagacaggagtgtagtctgggatatatggtttcagttgtgagacgtggaacaccgggtgcacctgagcagtagccggcagctccaaacggtaagccactgcacccactcgctccaatatcctgtaagggccaaagaacttgaaggcaagcttaggacatggcctactgaccacagtgtgttgggcatacggttggagtttgagcaaaaccatatcgccaacttgaaatgtgtgttcagtcctcagacgatctgccttcatcttcatacggttctgggctgctgcaagctgctccctcaacatcacggtaaactgagccctctctgctaacagctgtgccacatcaatggcagcatcagaaggaaaatgaggtgctgctgcaaacggagggtcataaccatacaacactttgaaaggagaacaagctagggaagtgtggtatgtggtattgtaccaaaattccgccaacgg

SEQ ID NO: 70783 - DNA, 516 bp, Zea Mays
gtttggccagctaaagggcatgcaaagttctgaacacacaaagtggatgtggatccttgtaagaaaatgagcccagatacaggttgccagcaaatcagccctactcatcagagatcactgttggcccatgaatttattcagtaatagcagcgtaccagcagggggttccgagtcagtagcatattcagcattcaggaggaggcaatgaaaactacacattgaactaggcctaagtgggtctttctgatccattacttctgagagtgtctaccagccgtttcacccaattactacacattacagtctgtgttttgcatacccggttgttgatttactgtccataagcattgttttactgttactagtattgttgatttactgtccattaggatggcagaacaaagcccctagctcagcaggttttactgctaccataccactctccacttcaagttaactgtggtccactccactctcctcgcttctgttactcggcgtgtcatattttctatccac

SEQ ID NO: 70784 - DNA, 505 bp, Zea Mays
gcgagaacatcccacagaagagcacgagctaacctgtagacgtctagccacggcgaggtgttcacgggtgcggaaaaccaatttggggagaaagagaaattagagagctatggtggctaatcggaggcacgagcgggtgctctggcttcgtgattatctaacggagctagcagtgtgcttaatttatagtgttcaagagttgtggcctccaattttggattggtgcgctggcggtcggagaggaagaagatcactggtgactcaatcgtggcgttcaccggtgcagcggttcagagagggtaagcctagatgtgccacggttactaccgcatagtgaagagtcacggcgtggcataattgaggtcaccggagtgtccacgacgacaccggcggtctggccacgtcgcaacggctacaggcacgctgataagcttccctgcgaccacatctgcttccccgcgagatcttttacctccccgtggatatccactgcgtgctcggcaca

SEQ ID NO: 70785 - DNA, 513 bp, Zea Mays
taagacaccaaggcacgtgacgcatggtcgataggtggctaactctggtgagttcattcgaatcggtcgtgactcaagcgggcacggcggtcggagtgaaacagcggctcaagttcatccacaaggtgatatttactaccctgagcaactagtagttctcagttgagcacgaatcgtagcgtctggcgtgaatccgagcacgtggtcgccggcggcgagatgaactgattctgatcctatccagttactgtaccattagaaccgttcatcagagcgcctgatagagtagattaaaggctttggttctccaatttttgcatgacaacttgataagccttctgcaataaagttgttaacctatgtacagactttaatttgatcatagagactttggtaattcccacacttgatcaagcacaaatcagccttaaaacttttcagagttcactgtcagccatgttttggtcttcagactcgactgacagccagacttttggcccttttaactcaaat

SEQ ID NO: 70786 - DNA, 603 bp, Zea Mays
attaagcctaaagataggctgtcaggctgattcagtctgaaattcagatattcagtttaacagagccaactttgggtatgaattccaccttggtttagtgctcaaatgggttcaagtcctatagcctaattgttgctggtttatagctctacaattttgctacagagcttgggtggagttgccattagaaattgtgagcaaattttgctccaacttgctcggtcaggcatcaaaaactgaatttctgatggtacagtgccccaacggatcagaacgaccgcagcagagggatcccaccgccggtgatctcccccgccgtgattcgtgtcgccgacgtcaagattcgcgtgcggggtggagtgataacatcgcggggtaaggatcttcgccgacggtgagctggaggtcactccggtgactcaccgtggctccccttctgctttgcggctaaagccgataagctcaccgacgaccgccgcctcccggccgtgcgccgcgtggctcaacctttccaccgcgtcgccataactcgctactgctgtcaaatcaacgccggtgaggtcgccacggcgtaggacactaattcacgtgcgccagggttct

SEQ ID NO: 70787 - DNA, 648 bp, Zea Mays
atgcctttgccatcacctcagccacggtgagcttcgcctgagcatagtgcactaggaaccagcttcggtttcccctttaaccgaaccctctaccctgtccgcgcctaactcctcatctgcgcagaccggtggtcgccaccgccgtgttcccacgtcgtccaaccaactgaagcctccaagcatcgtgccaagcttccttgagcaccgcccttgggtaaggaaccccacccccacccttctattgcacaaattttgtctcatcatgatagattttggctcgccagagccgctcctcgtcgggccgccgcgacttcacggtgcccggccagtacagccttccccatgaccaaacccaaacataggatacccctaccccctcaccaaatctcatgccagtcttggtgcaccgaattatcccccactgcggtgggtattgctcgccggagcactatctggtccgcccgagaccctcctccgtcatctaccggccctcggtcccgttctcgcgacccaagctccaacatagtgctcattagattctacccaacagccctagcctgcctagaccgtgttagaacccctcgatccctgacccgcctcgccttcagcgactacgccaccacgggcatgagcggcactgccccaggg

SEQ ID NO: 70788 - DNA, 772 bp, Zea Mays
cttcgacatcgcagataagccaagctctagcttcgggaatcccacattctttgccatttctcgacaaacagataactccttgttgtccggtaggcaatatagaaagtcatcttcgtcaatgccgttgaataccaaggatcctggggcatacttcaaatccttggcatattgcctagcttcggcaatttgttcctctgttagtttttccctgcagcatgacgcactataaattttaaatcctcagaaggtgcatcaggaacaggaaattcagatccttcggtagccttttctttttctagcggcaatggtactttactggcatccgaagatctcgattcagttttcttttcagcaatctccgcaggccccgcttcggcgatagctgacggcccagcttcagtttcaacctgcgtcatagcagctttggcatattcctttgtatttttgtctcccatgctaggtgcctctacacgggtaggagttaatatctttgtggattccgtaacaacatccaatacacttgccattctccttcttttcggagttattgaagcagtcttttgaacctttggcagttccgcttcttgcaataaactcatggaagattctggctgctccactactgctttcgggattggttcttcagctgattccaccctagcttcgacagtagcggggtgacttggcccaatgatagaagaagtcccttcagcaaacttcggcactttggccgtttcaatatatctaggctgatgtgtcaaaactttatcct

SEQ ID NO: 70789 - DNA, 436 bp, Zea Mays
atttccactttacagagtacattgtcgtcccagcagttgttgaaatacagctagggataaaactttctgaggtgttctatgttccaggagttcccgacttctgttccatccatctgagtgagacgatacgatccgggccgagtgacttctgctaccatgaagggtccttcccataagggtgataacttgtgccgtccctcccccgttagaattcgacggaggacgagatctcctattgaaaaggatcgttgtcgtacagccttgtcgtgatagcgccttagagtctgctggtaccatgctgattggattactgcatttagccgttcttcttcaagtacatcaatgtcctccagcctggtggcctcggcttctgctatgttttcgaagatcaaccttggcgccccgaacttgagatcggcgggtagcactgcctccg

SEQ ID NO: 70790 - DNA, 880 bp, Zea Mays
aaagcaaagatgaagcttcaccttatagagacaggtgatgactctttcagttcttatgagctaggatggtgcctttctttctcgactaaaggctactggtttaagtgtagcatgtctctactgaacatgtgattatgtagtgcagagaaatgttggaaagagactgcaaataactcaatgcactcgctatgttagcttcataagtggaaattgattatacttaaatcttggcactgtagtgctcatgtgttgtttagcaacttttgtttactgtttacatgctattcaaatggcaattttatcctaactgatagatctactaaggcacagtcccctttaatgttctaagctctgtgagtccatctaattacatgtgtgtacatgcacctgccaccttcgatccctttcaaagattattatgtgtacatgagcacacccatgttttttactggatatgtgcctgcagtcaggtgtactttgcattgaatctttgtagctcttctattcttcatcctccccacaatggtgacatttggataggcagtgcaagtgggatcaggatatgtgatgctgagacagttaaagttatgatgaagaatcaacagaattgcagtatgattgggaaactggtttcagaagttggactatgggttagcctctcaataacttagttttaaatggtctacgttgacatgtctttgtctaaaattttattggtacttgcattatcaacctaccaagaaataaagtttgttctgttttttctgctcctttgatctctttgctaaaattcatgcggtgatttgtgttccaggccaatcaagaggctgaacagagctatgcaggcgagcatgcattcattatattcccacagttgata

SEQ ID NO: 70791 - DNA, 320 bp, Zea Mays
gggagaggaggcgagcccgagcccctgtagaagtatggccactagaatggcttctgtccttgtggttgtcttcgatcaggggaagaatgtcggaccctatatcctatatcttgaccaagcagagagccatggatagggtcgggggctcggacgcgtacccgagcccatcttgtggatgtgttgtccgagtcctactagttgaaatagtgataagtatggtgaaaagcacatggtaattcgtcccgtatggcgtaaagtggacttgacaccagccttgcagtttttgtatccatcttattgttagctgtctttgtggaagg

SEQ ID NO: 70792 - DNA, 406 bp, Zea Mays
ttgaagagagatgtggttgcacatgtggctatgtgcgatgtgtgtcaaagagttaaggcttaacaccagaggccagctggactactgcacccactaaaaatacttgagtggaagtgggaagagattggtatggacttcattactggattgccccgcatctcgaaagaatatgatgctatatgggtgattgtggatagattgactaaagtggctcacttcattcctgtcaagactacttataagtgatctcaattggctgagttgtatatggcttggattgtgtctctacacggtgtaccgaagaagatcattttggatagaggatcacagttacctctagaatttggaaaagttttcatgagaatatggatatgaagttgaattttagttcgccctaccatcctca

SEQ ID NO: 70793 - DNA, 1179 bp, Zea Mays
tgtcaatatccactggtatcagatacataaactcgtacacatgtgtgtgttttcatcacaaagacagttttagccagtatttgccaccaagctttgtacagcgtcgaattacgctgttttgataacacaattacgcataattcgtatacagtttacaaaaccttccatttcatgcagtacatcattattacttatactttgtgaatatcgactggtaccagcttttttaaattcatccatatttgtaataacaagtatggcactacattacatttgtcataaaatatgaaatcatctactccccactagatgaatcattgtctgtgataccaccgtgatgtttttttgaagtgcaagtctcattccaatttggagcattagatgaacccttgttcctagaacctaggggctgccctctctttcgaccagtaaggctggccaaccgaagcctattctcctccacagatagacaagtgcgactattatgaccatcagcaatgccacacctttgacactttatgttctttttcttgtctccttttgaccccaacttaataactctttttttgttatcacttattgttctgccctttggcttcgcgttatctggtcttctcaagcttactccactcacattaaaatctagcttctacaattaagaaaaaaattctcattttttgaaatattagtacataaatccacttctttgtacgtaatcttaaaaaatacccatgcacatgtgtttgtaataataacattacctttttaatcgtcatatctgttgcacactcatctctcagtggtatgccagtggtcaactgtccagcatcgtgctgcacacatatacgattgatgttaaattcataatcagcatcaaggtccaaccgttactattttgtattgtaacaacttttcctcttttataatcatgtattacctgttccaaaatttgtagtggcatagcacatccggtatcgctcacaccaccttcttgtaaagtaggcaccaattgaatttcctgacaaatcatacaattgacaataaatagttgtgtttctaacaaacaatacacactattatacatagtaaacatcatataaaatatgtatacatacaccagcctgcgcccttcttgtcgttagattttctcctggcatgtctcttacatcatccctgtcg

SEQ ID NO: 70794 - DNA, 430 bp, Zea Mays
ttgaaactctgcccctcaagatcatatacagtcggctcatcagatcttcagtggggattctcttgttcgtaacccgggtagaatcgttgatgccactgtacaaataagcagggtaagctctatcctttaaaggatggatgttcttgaaaacgaaatcagcgaccacagccttagcagtcagacctctgtccttcagcaagcaaacctcggcaagcagtactttagcctctgttatctccaaagggatcgaagattctatccagctcggtgtgcggacatctggttgcctccctgaccgaggggggagggacttgcagtggttctccacaatgaaccactcgagacgccaccccttgatgctatccttgagggggatgtcgaggtactctattttcctcccgcgacgaagctacagattcgcgtcgccatc

SEQ ID NO: 70795 - DNA, 574 bp, Zea Mays
gaagtagattacatcggatatgactgaagagattagttcttccttctctgttatgtgcgcaacttgcccctaccggctggaatcaccatcagggctaattgcgtacacaaccagcagattgacataacagatcgacgtcatgagtgtaatcttcttcgggtcgaaagtcttggatttgggttgatttgatcaaccgcatgagattttcagtggaatttccatacatacgatgcatggaatttccatacatacgatgcatgggaccgccgtggctatctgctgtagtggcgaacatatagaaacgtgtttgtctaacctgtttttgcaggacatcttgtgattggtatggctattgtgtgtatatgatgcatattaatgaattattcatgacctgcgtgtcgtgaccagggcaatacgactggagccacatgtattgtccaaatttaatgtaatgacctgcgtgtcaacatgtgatgatccaaagcgtatatgtaatttgtttaccagcatacgttagataggtcttgaaggactcatcacctaaaggatggcatacctatatcatggagatgga

SEQ ID NO: 70796 - DNA, 1217 bp, Zea Mays
aattactatctccattggcagaaaaaggtgattggtggcatggttgtgtagtttgtaacttgctccttcacgccgaggactggaaagacttcgggtgaagtggtggatattgtgttgtgtgccaagaataagtggggtaattggtgggatttttggttctacgtggtgttggaggacatcgaagggattcctgggctgcctctatctattttgtgcttgcattgttatatcatgttcccgctgtttaggctgaagaagggagataagggtgaagaggctgttcggcgcgcagctaggacgagcagcagccatgatttggtggaagaaattatcgcatgcggggtgtggctgctcgctcatggctaggatctatgtgcatttaagctgcgcccgatgcccttcttgaacaatcgaatggtgctgagccccacctttgccattgagttgtggggacaggatgtggccgccttcatcagggaggtggaagcggaggccatgaaaaatattggcaagttctccgcaaagatagagctgacaaggagttgggatatatgaggttcgaatgtcaggctgaactgtgttttgaattgaatggccttcgatatggtccataccttgaggagggttctaccgatgccagggatgagcgaggaaagaagaaagtggtggttcggacagacgaaggacgcttgaaatggaaggttgtagttgcggctactagaaaaagaaaaattgaggtgaaaggtatggtgaaggcattgggggtctgaaggcctcgaggagttttgttgagaagtttgcgaagacgtgcgtttgaccaggggggtcatgacttcgctcgacctccggaaatcatctttgcgaatgctaaaggcgaccagggtgagtggcatgaaaaagaccccatcccccatcattcgacgaagattactttacgtcctgtttggctcgcaactttaaaatcgttccttgcggaagaaacattggtgctgttacaacagtagtgatggaaaaggatcatgaagagtcctcgtggaagaagcgaaatgacatgcttcggttggttgatccccatcgcgacgcgatggcaccgcgtcccagcgtaaaggtccctactgcgactgctgtcatgccccctccagcggtgcccacagtgacagccagaagggtgacctcaccgctgtgggtcaacgaggtggcgggggtgaaggagactg

SEQ ID NO: 70797 - DNA, 347 bp, Zea Mays
cgagtgaccactatgccctgctaacggagcaatcagcttaagtcggcaacgacttaagacggtgcaacatgctcgcgcttacttaacttggggtgaccactatgccctgctaacggagcaaaatcggcttaagtcggcaacgacttaagacggtgcaacatgctcgcgcttacttaactcggggtgaccactatgccctgctaacggagcaatcgacttaagtcggcaacgactcaagacagtgcaacatgctcgtgcttacttaactcggggtgaccactatgccctgctaacggagcaatcggcttaagtcggcaacgacttaagacggtgcaacatgatcgcgc

SEQ ID NO: 70798 - DNA, 423 bp, Zea Mays
tatactagtatgtaaagcgccgacgcgtatttgaatgggggagtacatgtacacggtatacactacactgcaaaaaggagacgcgcatagcaaaagtgcagcaccacgtgtatgggggtaggctcgtttgctgacaagaaaacatgatagactactggccggccgggacacccagcaaggctgtgcgtgcccgtacgtgaagtatatagctacacgtacgtacgggtacggtggtacgatgatccagaggcgtccgcgtatataccatgcgtgacagcataaactgcataaacgcgggtttatacgtagtactgacgacgacgacgacaacagccactctatatacgttcgcccggacacgggtgtcagccgagaacggaggagctgctgctggctggctctttattttaaacctcgggcgcc

SEQ ID NO: 70799 - DNA, 428 bp, Zea Mays
gaattactgcgctcagccgctcttcttcgagtacatcgacatcttctagcctagttgcttcggcctctgctatgctttcaaagataaacctcggcgccccaaacttgagatcagcaggtagcactgcctctgaaccatagaccatgaagaaaggagtgtttccatgcagggctcgactaggttgagttcttaggctccaaacgatgtaaggcaattcccttatccactttcctgcgaacttctcatttttatcgaagacctttttctgagtgcttccaatatcatcctgttagctcgttcaacctgcccgttggctcttgggtgtgctacagaagcatacttgatctgaatgcttttttgctcgcaaaaatcgaagaattctgaacttgtgaagttggattctaggtcagttatgatgttgtttggta

SEQ ID NO: 70800 - DNA, 506 bp, Zea Mays
ctcgaacaatgcccttaacatatttaaaatagtagaacatgaataacttcaacaacaattcttataatggaattcgatgataaacacattcgatacttatatggatcaagaacaagacacataattcaaccgaatggtataaaccatcactatttttacttgccttcgccggggatttggaaaggtactaagtatgatccggaggtccaccatctgttttgacacacaacttagtgcacatattcacataacaatcgctaataaacaacgccgcatctacgcacaattccaacccgtcgggtgcaacaactctccccatcacccaccaaactgcagcggcgctgcttgataatttcataactttaaaagtataatagcagtgatatcaaacaaaaacttcagaaacatctacataaaattccctacaagattcgtattcaaaagataattaaattccaacatctcgatggccccaaacagccgacaaagtacaccctgcgttcagt

SEQ ID NO: 70801 - DNA, 560 bp, Zea Mays
cgggctgtcaggcaagaggatgaggcattcaatgtgaacagtgaactgcagaagatcgcccgattcagagaaccgccaccaacgatctcacgctacgatccgtgctcgcctaggagatttgtgctcagtacgaagtggataactttgggtagatgaaaagatccaaggaggggtgaacataggcccttagctagttcaccgtcatgcccactttcccacacggtcggtcgagatatcatcaccggagttcgccatgttcttggtgaaggacacgtagccgcttgattcatcgtggtgtcatggtcatggcaccctctgggtcattcatcgtggcatgctcatccaaaattggatcacaccgcgggtgatctctttatattgtgtgccacgctagctccgcccatccattacgaacctagtccaccactcgcttatccctttccttggctatagcctgagaattttggatttcctcgcaatcgaccgcggacgccgtcgtgatacaccttgtcgtggccagagttatccaggttaggtcatacctctttagtctatgctct

SEQ ID NO: 70802 - DNA, 779 bp, Zea Mays
gattatagatctataactttgatgcagatgaattatgaggttgtcacataaaatttggagaaaagctgccttgaatctgctctgtcaggcgtctgaagggagtctgatggtacagtaactaaaacagattacaagttcagccccctcgccaccagtgatctttgcgccatgatttgcaccgtcgctgcgattcgtgctctccggtaagtggataaccacggtggagtaaagatcttggcaccagatcagctcggggtcggtcgcggatgagtttcaccgtacccacttgctcgtcgtgcaaccgggatagacctcgctgccgttggccgctcaccgttgtgcgccacgtgctaaagcgcttgaccacgtcgcagtgaaacacgtcgtgcatgcccggtcatcgccggagagctgccacggtgaaagccactaaccccgagtgccagtgaccttcttcctctccggccgccagcctgctataaattgccgaccccgcctgctccgctaggtagttgtgcaaccagtgaagcaactcgtgcctcgaatcatcccctagaactccccaatttgagatttcccccaaatcactcaagaacaccgagcggtttgacctcgccgtggccagcgcatctcaggtccgttcatgccctctgagtcctcatttaagtatccttggatgctcctgatactctctgacccatccaattgagctagagtccctaggatcgccgggaacatgttaggttactcgtggtgtccactgtcaccgtgggcagggc

SEQ ID NO: 70803 - DNA, 600 bp, Zea Mays
gattgattaagccgaaagtaggccaccagatctaatcctagccgctattcacggatccatcggttctaaacacccttcccccatcaacgcaccagggccgtccattaagagatctacggtcctggcacgtcatcaaccttgagctcccttgctacggcagtgcgcccagccatccgcgccaatctagcttcgcccgccattaccggccaccacaaattttacgtgacagcggaaccaatacctaatcgagagatgctacacgtagctagggatctagtgagttcggccaggacttcttaccccggatcgcgcggcgcagaggtccaatgccgacgtcttgcggcacagcggtgatttctccggcccggcgagcaatcccgcaggcgcagacctcacgtagccaccaggtctctcccccgcgatgtccgccgtgtcaactcggtcgcccagggcacttcgcacgaacagataagggaaggggacaatgttctactggcgggtggactcccagatcgcctcgcggccaaggggtctgacaaccgagggagcgagagatgggattaccaaggggaaggcgagaaggactcaatggctccagct

SEQ ID NO: 70804 - DNA, 813 bp, Zea Mays
aaactaaattatttgaactctaaataattgcttactaaaccaaaaattatctcggagctagaacacgattaaccagagtcgataaggggtagcaaggaaacttcaccttctaccactgttaaggccacgatgtgcaggcgcaggagctgaacgaagagttcggcgtcacagggcacagacaagggagtcgcggcgcggtggcgaggctttggacaaggatctctggtggcgaggactcagcaaagtgctggtggtgtggagacaaccatgcagtgcgagcaaggcgcaaggacaccagcgatgagggtgaccagactacgacgttggtgttgcgtcgtaggagaattggtgcagcttcggagtcgcggacatagcagttggcttcctgcaaacgtcacagtggcgaggctctggcatgtggcgtggcacaacggcgtgcaaagtggaagaaggaagcgagcgcagccctatttataagctagggatgggatttgcaggtggcttgatagccattgaattagcacaacgaaccccgctgaaacgctcgcagtgaagggcaccattaatggcggcagcagttactgtgaggagaaacgggcgttcgtgagtggaggaagggaagtgggaacggacatccggctgctgatgctccattgaacgagaggaggcgagaggctaggagacagcagagccgacggcgcttggcgaccgtgcggttgcagcgaggccaagcgacgactgcactgtgaagaacgtagaagaagaacaacagtgggacctgtctgcagttaaagaaatgagcgagagggagag

SEQ ID NO: 70805 - DNA, 687 bp, Zea Mays
gaaacgtcagtggcgcgggcagtgggggcatgggcggggccatggtgtcacaggtgttgacgctgttcttacgttcttgtattatgttgcaaccaccaacccttttctcctaccgccatccaacgctcatagtggttaccccccgcccgcgccttgcgttttctatcctgttattgtagcgctgccacaaatcctcctagttagagctcatggccgataggaggattcaatcggtagaagccttgggagaggagcagaagattgtgcaaaacaaatgagtagaaaccttggagatggaaacgaggcggaggcgtgcagctggatcgagagcacacgttggagggaagggggcgagggcatccaggagcagaggttggagcgaacgtggcgtgggcgtctggccggaccggacgtagaggttggagttggtggcaaggaagaagtcgccgaatgaaatttcctatagagagcgaataatatggggccgcaactttctaggtcccaaatatagtactcttcaagttgtttagatgaatttcattaaaatgaggcacctgcctgttggatctgtcttttattgtttagaccctatatttcaatttgtttatgtgtttagggttcttattgtagttgctcttaatagttgtaccgaatcgtatccctttgatgctcaagtgtaacataccc

SEQ ID NO: 70806 - DNA, 406 bp, Zea Mays
ctgcggtggaaacggactcgagaacttggagcgagagagactctgcggactgggccagcatcgacgtattggtagcccagaaagcccacgcaaccagacagaggtctgaacgtttatggtgcttcagtctagtcccacctcggcggctttcagcgggagggagcagagaaggcttataaaagcagaccccaggcaaaataaaaatttgagtttcacactcctaatgagtcattggctacaattttgtcctcccttatggtattattttgcctggaccctgaccttaacctatgaacattaaggagcaactgacaagtaaataagcaatactgtatgttcccttcttttctgaacttgtcagagtgcctaggttttgcctaatcggatgagcaaatatatgtttttc

SEQ ID NO: 70807 - DNA, 378 bp, Zea Mays
caggagcccgtgctacgcatctcggacggtccgacgcacaggtgcagacgatccgggaccacaccagacggtccgatcatactcaagacccgcaatgaccgcgtaccttcaaaccacaacgactagagataggtatgtggaaaacaaatacatttaaagcagctggtcggctggtcaaatccggcctgactttcgatcaattattgtccaaatatgtgaaaaagaaggctggccccagtgaccggccaacaaagcgacctcgctcgcccatttgtgagcaatgtcaggtaagaccgattggaccaccccaccaatcggaagaaatggaaggtcatactgtccaattgagacctaacatacctacatggacacctccac

SEQ ID NO: 70808 - DNA, 1029 bp, Zea Mays
acgacatcgacccttcatagtgggagacttggtccttcgccgaattctaacgagagaaggacgacacaaattatcgccgctatgggaagggccattcatggtgtcggaggtcactcgaccaggatcatatcggcttactcaaatggatggcacaaaagtatggaattcttggaatatagagcacctcaggaagttttacccttagcaagaactatcgaagcaacattgtattctgtaattggaaaatacgtcatcaataaaagattttactctcaaaagcattcaaactattggttatccatcgacttcaacttgattaaacttggaatcagaacgcttactcgacttagggtgaccactataccctactagcggagcaatcaacttaagtcggcaatgacttaagactgtgcaacatgctcgcgcttactcgacatagggtgaccactataccctactaacagagcaatcagcttaagtcagcaatgacttaaaacggtgcaacatgctcgcgcttactcgacttagggcggagcaatcggcttaagtcggaaatgacttaagacggtgcaacatgctcgcgcttacttaacttagggtgatcactataccctacttacggagcaatcagcttaagtcggcaaagacttaagacggtgcaacatgctcacgcttacttgtcatagggcgacctctatgccttaccagctgatcaattggcataaattaggaaaagattccgaaatcagcacgccgcactcacttctgcaatcgttcatgactactattgaattctaacaatagaaacaaaatgttatagctttcagcgccaagaacacattctaatatcctaccgagttttcgagcgcattgatcacacacacatatagttcacaaatgcattcaatatcttctaaacacagcaaaacatctctatttggcaatgtctttcgcaggagcaaccaaagaagaagggcgactcaaagcatcgggcgtagccttgacatccgcaacaatgtcatcaggaac

SEQ ID NO: 70809 - DNA, 591 bp, Zea Mays
tagctccagtactcctcacaaggtcaaattgacatcacaaggaacacccagaagaaaagggagatgcagaaactgtggcatctatggtcattgggcagaagactgtaaaagaccaaaaagagataagaaggatcacaaatagcaggaggcaaatgttgcagttggagatgtggagaatgcagcactactcttcgctgaggtgcaagactcattaggtggaacttctcaggaaatacacctgtctaaagaaaaagtagtgcctgcagtctgttcagatgaagtctggctattagacactggagctagtaaccacatgacaggcacgaagtctacacttactcaacttgatgacactgtcagtgggttagtgaagtttggtgatgggtctactgtcaaaatctgtggactaggttcggtggtgatgaaaaccagagaaggtgaccacaaggtactcactagtgtgtactacattacacaattgaaaaagcaacataattagtcttggacaactagaggaagcaggctgtgacatcagactatttgctggtagactgaaagtatttgatccagagtataacctgttggtcagtg

SEQ ID NO: 70810 - DNA, 300 bp, Zea Mays
tagacatctggtgttcagtggatgtcgttcctgtgacctgatctgcttttttctgtgcaagtcttccccttgagttgtattgatccgtgaggaacccgtccttttggaaccggtgctccggatctactactaacggcggcgagttcttcgtgtctggcgcagaggtaatctaatatgctgtgatctgtgtagtagtaacttgtttacctgatttatgcatgagtggacaatggtgattgacagcttgagtttaactgaatagagtaactgatttgtgtagtagtaacaactttggaactg

SEQ ID NO: 70811 - DNA, 462 bp, Zea Mays
gtttttcttgagttcacgcgcgggattgggccgtctggccgaagtcgagcgaagtgtctggcgatggacaccgcgccatggggtggtgacgccgtgtctgtggtcgggataaggaagaaagcctcgggaccgttgatctgtggatggatgaccctgattagcgcacgcatacccctttgctaggattctcctgggtcgtcggatcgggatcccgtggcccaggattgatctagggcgtttttaatcagcatcgtagattcctaagcttatggacataaattcataccggtttgcttcactctagatctaatctgggttgttaaattttgatccgactgcgggggaacaaccataccccttcggcctgttcatttcgcaaaagagaccctaggcttgttaataatcgacccgcagtccgcgcagtggcgctctgagtcttaggaagatttacactgagactcc

SEQ ID NO: 70812 - DNA, 824 bp, Zea Mays
gaaaatcctaagcactatttgtctgggtcactaacgtatgcaaataaacccccgtgcttctattccttcacaccctgaggtccacgatggggagcagcggagaaccgagctccggcgaactcgtaccggctaaaataagcattggctggtgccctaagttggctaagacctaattcaacacctaatgagtgtttcccctcaatcaatttcacaatccaagctctaaatcatcctacccacggagacagtgcgaactatggatgaacaaacgtgttcccggtgatctagggcagtctagctcaatcaaatgggtcgaggagcataaggagaacctaaggatgctgaaacgggagagcagagagcacgaacagacctagaacaagctagccacggtgagtgctctttcacggtggtggaaaacagatttggggagaaagagaaattagagagctatggtggctaatcggaggcaggagcgggtgctctggcttcgtgattatctaacggagctagcggtgtgcttaatttatagtgttcaagaacggtggcctccaattttggaatggcacgctggcgatcggagaggaagaagatcactggtggcgcgatcgtgccgttcaccggtgcagtggttcagagagggtaagcctaagtgtgccacggttactaccgcgtagtgaagagtcacggtgtggcataattgagattgccggagtgtccacgatgacaccgacggtccggccaggtagcaacggctacaggcatggtgataagcttcccctgcaaccacatctgcttccccgcaagatcttttacctccccgt

SEQ ID NO: 70813 - DNA, 936 bp, Zea Mays
aagacgcccaagggtgcagccggaataccacaacaagtgcgttaatcgaagtcttttattgaaaagacactccgcgcaaaagacacccaagggtgcagccggacagacacaataaaatacaccatcaaagtctttctctgaaaaaacactacgtgccaaaatcacctaagggtgccgccggacaagtgcagcaagtacgtcaatctacactccgcgcaaaagtcgcccacgggtgcagcggaatcagcacaggcgtgcgaaaacggccaacaggccacattacaatacaagttacaattacatacacacgacgagggcaccatatactacattggctcaaccttcgggatgatacccatctccctataattgaacaacattatcctcaattcctcaccctcaaaaagatttcgcaggccccctcacctatgctcgccccaatcggcgaggacaacaattctcatttaccaatccggtctactcgaagacggccacgctccatccccatacgacggtgcctaccacttcacgaaacctcacccacactgtgtttcgacaccacccttcgccgcctatacttagtactcccactaggaagatcagccgcctcgccaacctccacacgcggcaaagactccagtgtggccacatctaacgcagcaaaataatccaagccttcatctgaggtctcctccgtccaggaaaacgaactcccagactcaccatcagactcaaaacactcagatctagaaccagataaattatcattggtaggcacaacggttgaggccgccacaaaattagtattgccagcagcgattgattgcgcaggcccaaacgttggaacctgcgcagcaaccgaggttcagtatcacaaaaacaaaagtttacactgaaagccctagcccctattccgccacctgcgaaggctcggcc

SEQ ID NO: 70814 - DNA, 720 bp, Zea Mays
gtacctttgtcgttgttgtgttgacgcgtactagcgaggtggtggtggagcgtggtcgtcgccatcacgtcacctctattgcccttgcagaggaacaacagacaccgagatctaagccaacgtaggttgtcacgctcactccgacgtctaggctatgggtcctatatatggattagggtttagggcgaagtactagcgttgtctttcttacgactccttaatcttttatataacgtcgtgaccgggggctcaacctaaggttagcgtgggccctcccaatcaagggtctgattaggagatggttagttaagtttagcctaatctgatcattgatgaccgactgtagatgacacatctaacggccacctcaaatctaaatggcccaagacaatctgccaggtgatccaactaacactcacaggtgatccaagacaatctgccatgccaagcacttgcaaacatatataacatgaagtacgacttcggcctggcttggtacggtggcccaactaagacgcagcctgttgttgccagtgtgctattatttgtcacctggatttggcacgaagagaacggagaagagcaagatctggctctatcatctcgtgcagtgcgttcctgagtgacgaagaaggtatattgcataagttaaattttgttccgctcatataaacacaattctgttgcacccatatgagttcagtataattttactataat

SEQ ID NO: 70815 - DNA, 515 bp, Zea Mays
cttcggcagttccgttgcgcacggtggacataatgccttcaactgttctaccatcttctctagttttggctcttcagttggatttatactagcctcgactggcatatagcgaccttgttctgtgacaggaacaaccccttcacttagcttcggcacatcggccgtctcaatgcgcctgggtcagcgtgtcaaaactttaacctttttcgacctcgacacactagaagttgctgaggtagcagctttcctcttcttcccttgcttttgtgtgggatagtagtagtttgggtacacaaacccgataacatcaaacaccctattcaatctctttttgccccgagcaccgaaggcagttgtcatagcttcatcttcgaccttcgagtatgctccaagcagctcatcgctagttgcctctatagcatctagccagtcatcattcggttcatcaaactggctcctgtatcgaaaggtatacttcagatagactaaaccattttggctggagccagcggcag

SEQ ID NO: 70816 - DNA, 687 bp, Zea Mays
aaacagacatattcctttcaaaccaacgaatcttctgctctgtggaaagctatgttgcaatgtcgacccactcccttcgcctttcccattgccagatcgcttgaggtgctaaatcccactgcatagatgtctagacaaagatcgaatgcttcttgagaagggaagtaaggggcttggccaaaagatcgaacttgcgcacaaatttgcgatagtaccccgcgagaccgagaaaccctctcaattccttgcatgaggtcggcacatgccatgaagaaatagcagcaaccttggtggggtccgtggctactccagcactgcttattacatgtcccagataagctatctacttgcgaccaatagtgcatttagacaatctgacctgccaactatctcgagcaagcaactacaacaccaactccaagtgtgacaaatgtgcttcccaagttggactataaactagtatatcatcgaagaacactaaagcacatttatgaaacaaggaggccaaggtacggttcatagcactctgaaatgtagttggtgctctggtcaatccaaagacataacccggaactcgaactgaccatggtgggtagagaaggtcgtcttgtgttgatcctagggtgccattctaatctgatggaagccagcgcttaagtcaagtgtagaaaaccatgcaaccccatg

SEQ ID NO: 70817 - DNA, 871 bp, Zea Mays
tttatcaacaaaccagggttctaactcaaagaaaaatgccctaattcatatgttttctgaactgagatggacggtgggttaattattacttttccgggggactctttagaaaatcggccaccgtaggggttccttgattctgaaccgcccgatctatctctacggtcgggcttagattaccatcacccgaaatggtacgaaatatctgccgcaggatcgaagatcgacgggcacaatttattgaagcgaaggggtatggctactttaaatctagatcacccatctcctatctgacggctggcgcctccttcctcctcttccctctgccccaccaatacccacgcacggtgactgtaatatcccaaaaaaaattgttgaccaaaagatgatcttcggtgtgtggatgtggaaaaatggttgtgggccgttggaagttcggagtccgcagatgtgaagatctcatttaaacgatatcatttgagtattcatttgtctaaatcggggcatggatggtggatttggttgtgagccatcggtttcgcatcaagggcatcaggggcatcgctccctcctcttctcaaaaaacctagctgcccctccccttccctcatagcagcagccgccaccctccttccctcatttttgcagcagccgcccccccctttttccccattgcagccgctcctctcctccccaaggtgctgcacgcacttccctctaaaccctagccgcccccatggttcctcctttggtgtgctgcattatccattggtggattggtgggaggaagaagaaagaaagaaaaggagtccaaggtgatattattttccttttggtaattgtgctgcaatttcgttggattggatgtggg

SEQ ID NO: 70818 - DNA, 293 bp, Zea Mays
ggccagttctagagaatgagtactcatctcctagggtggtccggagctgtgtagccgcttatcttggttccgcaccctaagcctacatgatccaccactctgcgatgagtatcctagtatttggaactatagccctatgggtctaggaacctcaggtccggttctagagaatggacgcacgtcccctggggtggtccagagccgtgaagccgcttagcctggtctcgtaccgtaagcctacacgctccaccactctgtgatgggtgtcctagtatctggaactgtgattcaag

SEQ ID NO: 70819 - DNA, 508 bp, Zea Mays
tgcggacactattttttcagagagcacaggggccacggtgtaattcttcctaagacacagaaggctacggcgcagactgtgggttgatttggatatttcacagggtgtcttatgcatttttactcggccgaaagggtatagacgaaccagatccgtccgatcgtccttctaccgtcgggattagatcaagacgttttatgatgcggtatgtgattgctatcgttggattaacattcaaaggttcagattttatgaagcttgcgttactctgagccatccgatacgatcctacggcccagattctatccaacgaaaacggtacgcgagatgtgatcacggtcgtcgatgactgatcgaacagcccacggttatccaacccaacccaagggagtccaggcggcggcgccgccgccacccacggcggaggttccaccggagacatccgacacggtgccctggtgccccattcgcaaccccgcatggtccaacacgaagctactggcatggg

SEQ ID NO: 70820 - DNA, 370 bp, Zea Mays
aattatgatgtacatgataaatgttttttaccaaaaaggggattataatgctttataggtagaagtaaaacttgactaactaaaagcaatcacttgagccaagttaattatatagccaaactactcaccaaataatgggatacttgttgagtaagaaagtactcacccttgcgtttccaccctatgatatgtatcttttgctcaaatggaggagaataggcgtcctagactcaagagttccatgactacgatgaattctaggtatgtgatcaaccagtacggatggtctactcatggttttgtatcgaactttgtgattatgtaataatattccttcgctattaataaagtactgtgcttcgatataatc

SEQ ID NO: 70821 - DNA, 350 bp, Zea Mays
tatgctcttagtgaaaatggcatgacaattagacttctagaaacactaattaaaaataccttattaaatcctgcttgatcaattactgcccgaacattttctgacatgaagtcaacacctaaaactgtaatatagtcacatcctgcttcaaagctcagatcacaaacacaaaggttctcccacacagttgccaaataaatatataagacaaggggactgtgatacttgattatagggtagtagggcacctagtttgctcaatcggctaggaagaatactgttgagtgctactgcttctgatgagaccgaagcctgagtgatctgctactttttttgtgacaatgcacttc

SEQ ID NO: 70822 - DNA, 352 bp, Zea Mays
tgtagacgaccgagcgaggggcgttgcgcctttgccccaacacctagtgagtgtcgatggaattggaggatggagcatccaacagaccaccaaactcggcatcaacccaagcagagtcactcatgttgtgagctcgatgaagcagtttcactgcagctggactggagctcgaggtcatgtacacctaaaccgccaccttttttgggtagccaggctttccccctaattgaccaaacattgaccaccagtgatagtaatatatatccccggcccagaggaagacatcccggactaggagtacagatcatcatcctaagaggacaaggaccaggagtgaatgatctggagctgg

SEQ ID NO: 70823 - DNA, 463 bp, Zea Mays
cttgcttatggcatcgtgtagggcttctcggatcagagctttgtgcacgtggttgagctttggggtgtcccagccatggcgtcgccgcgtcaggtgaccgcgccgctggtgggttggtcagccgtgggcagtgaagggagttcctccgtccgatcttgcctaggcggtctagattagatggggatcgttgagtgattcggacgttgatctggccatggtaggctaagattagaccaaccgtaccccttctttaaattgaatctgtgtcgtcgaccttagatctaacgggtctgggtaaatcaggagagttttaaagccgtgttgttgatcattgatcgaacggctatggtgtcgtaccgtttcgtcgcgtgggcagtctaatctggcgcgtccggagtaaatcggacggccagggttacttgcggggttgatggacgtcggatctaatctgtgtcgtccggtg

SEQ ID NO: 70824 - DNA, 541 bp, Zea Mays
ggattctctctctctcacgtgaggtttccaggtagttgtccattcttttgtaatcctatatgagctgctctcttctcgtgcttagcttttctgtcttctatgcagtcttcattaggatggtgtggacgaagaatgtgtcagcgccaaggggaggagatgacgaggaccctcctcgccccttcaggtaggtcaaggggaagaccgtgtacctagagcagcatgaaggccgcaagaagcgacgtttggatagagcagcccgagcatctattgtagcggtagcagcaacagagcaggcagagagaggtggtcagcttcagatatcatcagatcagattgcctaccgggtccatcgtctcgcgtctcgacctcgctcctccgctccctctacacccgccacaactaccactccacctcccactacgccagctccagtcgctcccgagccctccaccacctcaaccatacctaccaccactcccgcttccacagttcctcctcccgctcccatctctacaccacctattccacctgcccgcttccg

SEQ ID NO: 70825 - DNA, 415 bp, Zea Mays
gccatgctcacatggagtggctgctattcatgagttcaaacacaagccagaaaactatgtcattattcttcactagggagaaatatgtagccacatatgaggtatgattatgcttgtgccagacaagagacaatggtcaagcacagacttgtctgatgtggatcctccattttatcatgcccagtctggaagaccaaagaagaagcgagtgagagtgcaaggagaacctcatgttgagtccagagcctcaaaaagggctgcagtgaaatgctccaattgccacacttatggtcccaatgttaagggatgtggagtgccacttagggttgattgggagcctaggaagggagctaagtacacgagggtatgtgactcactatttattttgcactttccatggaaaatgtatctgaaa

SEQ ID NO: 70826 - DNA, 441 bp, Zea Mays
gtaagagacagtttatggtgagaagaactccgtattggatggtaatgcatctaaagattaagtttgacttctctcctttcttgacgaggttgagcttttccctcttgagctttggtgtcaccaagaggttaagatagatcagtaggtaatagttaggtagagggtttagtaggtagctatatgctagttgggattagctatgtaacccattatgtaggtcaagtggttcgtgtatggctgagttgatctaagtcaccaatttaggcgtaagtggattagtagcatggccttatccttgtaccggcattaagtaacttacactagattagaacatattagattagatatgatctagattagactagtttaggttagatagatctaccagggtaggatatatattattaggatatactagaatcttttgagatagtatggacc

SEQ ID NO: 70827 - DNA, 350 bp, Zea Mays
cgtctcggggcagtctttggtttggtgggcgcaatcttcgccatggaagaggcagtagaaacggcgcggctgctgcgcacgccctcggcccctaccacgagttccatttccgcggccctgggggggatattcctggcggcgaggggggtcagcagcgggatgctggttggcgatgttgtgtacttgctgttgactgcgaccgtcgcgaccggaatccggctgcggagtccttgtccacgtgcggctggactgtggagcgtctttttggcttcctttgggactcaatcttgcgctggtggagctcttcggatttggcgtacttttcaaacagctgatataactcctggagg

SEQ ID NO: 70828 - DNA, 511 bp, Zea Mays
gtggtggtagtgctaggatttcttggtgttgctggtacatgtggttttgctggtggggatggtaattctcattgtggaattggtgctggttatattgttgaggatggtaggtgtgggcgacaactctttagttgtcagctggtttggtttctgaccattttgtcctttatggccgtggtttcagggcagtccctagtgggatgtgccgagtctttgccatggagaaggcaatagaaccttcgttgttgtgggactcgacctctacctcctctggtgtttctgtcatggccctcttgcgcgggggatttgtggcgacgagcagtgtctctagtcggttgttgattagcgatggtgtgcacttgggactggttaaggttttgccgacttgagtccaattacgcaggcctgacccatatcctactggactgtggagtgtcctttggtttttgttgtgactcgatttttctctggtggagctctttggaccgggcgtacttttcgaataactgat

SEQ ID NO: 70829 - DNA, 408 bp, Zea Mays
tgtttccaaaggacttaccaggtatgccacctgagcgaaaagttgagtttgccatatagcttcttcctggaaccgcccctatctttaagagagcttatagagtatctggaccagagttggttgaactcaagaagcagatcgatgagctgtcagagaaaggttacatctagccaagaacctcaccttgggccgcccctgtcctatttgtggagaagaaagatgacactaggaggatgtgtatcgattattgagccctgaatgaggtcacgatcaagaacaagtaccccttgtccagaatagaagatctgttcgaccagttgagaggagccagcgtgttttcaaagatagatctgaggtcaagttatcaccagctcaggatacgaccctcagacattctgaagacggcat

SEQ ID NO: 70830 - DNA, 857 bp, Zea Mays
ttattggaaaccgtctaaataacccatgaagtggtttcgactttcgaagatgtttttgttgatgtgtcatttctagaaatatatataaccccctaacatatcaagagtctatataaccccctacctataatattgcaaacagcagcagaaaacaaaataccggatcatccacccttttctcaattattttctttgctttgtttgcctttagtcaattgaatttaacaggatatcaacaaactaaatagaaaacatgaaacaaatgaaaaataatcagagatagagcatagtcaaatatataagatagaaagagattaagactgttaattataatagaaaaactatgtaatgacaaaaaacaaggaacatgtgcaacatattctatcatgtgcatggaacaacgcaggaatatgatcatgtatcgctattatagccagatctatagaacaacatgcaacattagacctttaatagtaggagactacttattttgtttatcataaagcaacatcattcagaacaaataatcaattgtcacaatatgcacaagtgcattctactacaagagtccttcactaaaaatttaaatatactaggttttacacacatgtgcctcagtccagcttctaactttctaggtttatatggatttgtaccgagcatagaacagacctagtgttgaaggctctgacatgagtgaatagaggaaaggatgaactcagacaagctcccccctccccctccccgcaaataaagaaggatgttgcaatccctcgacctgatgacttagtaaggtagctctcaccactgcactagacatgtgtcctatttgtaccaatcataagagtacaaaattc

SEQ ID NO: 70831 - DNA, 706 bp, Zea Mays
acaagtttcacgatttttggatcgaccaaatttgagatatgtatttttgaacataacatgaaaatctgcaagtttcaacacgaagaccacatgccacatggggcccaatcgtcatggatataaagagcttcttctaccttggtcactcccacggatgaacacccgtagctacaggcggcgaaacttagtgtctttgtaggcgctgccatcacccacaccaggtagagagtagggaagggcgcgctggaggttcggcacttggggaggacgccgtggacagagcaagagaccaagctagggttctgtggccatgggaacatggtggagccatggaggtacggatgtcgtgccgaggcgatgaccggcgactgcagatgtgcctagggcatggcgcagtgtgcagtaggagaataaatgggcgctggtgtacagagggacagggtggcagccatggctaggagagagggcgccatgggtggctgcatcgggttccagcaatggggaaaacctcccagcaccatggacccgagggggatgaaggcgctactgctcaaaagcttggggagggagtttggggaggccaagggtgtccatttgtaggcgagggagcataagagcttggacatgtggcggtaatggaggtagcaagctctgtgcattggtgggcatgggtggctgctaggcaatgttgttttccttttggacg

SEQ ID NO: 70832 - DNA, 304 bp, Zea Mays
gcggcatggccggtttgttagtttcttggtcgtaggagggggcataggatgctctgttgcctcctactaccttctcccctaccattttctttctctccgaatggtttggttcacgggaagcccaagggcgaggtggagtgggggacgcaggacagctcaagaacacaaaccttggggcaagcgtacaaaacatgccaccccgacagctatataaaagaccaagtctactgccccgatcaaagtttaatcatgcattactttattcgtaatccgttgtgccatcagcgcataaacaatcagcccc

SEQ ID NO: 70833 - DNA, 663 bp, Zea Mays
tgtaaagtggtctgtcaggttgactgaatgagaatccaatggtacagtgtactggaaatatcctaggttcagagaacctcgccgccggtgagtcgtgcgcccggattcgtgccaaccgctgtgattcgtgcccagcgcaagtggataacggagaggagtaaaaaacttggagcttggattagctcgagctcgctcaccgttgtgcccgccgtacccacttggaccgcggctggttgggatcatcctcgctggcgttagccgctcaacgatcatgcgccacgtgccttggtgtcttaccacgtcgcagtagcttgtattacacacgtccggtgatcgccggtaggctcgccacggtgaaagccaccaatctctagcgacagtgctctcctcactctccgaccgccactgcgccatctcaaattcacgagccaccgctcgaggatcctataaattgagcatgccgtcggttccgcgaggtattctagcacctaatccatcaactcgtgcctcaaatcatccaccagagctcgccaattcaagatttcccccaaatcggtccaaaacatcgcgcgaagtgacctcgccgtggccagcgtgtttcaggtctgatcctgtcctctgctctcttgttttagtaccctcatgtgcccctgatacttctcg

SEQ ID NO: 70834 - DNA, 565 bp, Zea Mays
gccagcaccaacacctcgctgcgaccgttcccctgctctagccggtaccggagctttctcgcgacagcttctccttgctgcagttacgtccaccattaatggagattagagctaccgttttttctgtagatgaattcatctcttaattaaccgctaaatccgagttactttggtcctaatcccctcggccttcatctcaaccctataatggagcctgtttctcttcaccctctcctataactctcacgcacggacgcttgatgcgtagccactaggaaacgccaatctctcctctgcgctccctcgccgatgtcgtttcccatccctcttctaggcatataaatccatccacccgtgccgagctcctctccgctcgaggctctctgcccttgccgcacttcactgcccagggtcacggcatcctgctgctattttagttccatctctccacagccgtcccctctcatgccggagttgtggccctcgacgctgttcgcccctcaccatcgcaccagctacccattcgatccacctcgctggagtcgtgtccgtggacagctgcgac

SEQ ID NO: 70835 - DNA, 588 bp, Zea Mays
ctttgcctcactggagtctcgaccaagtggtctcttcgaggttgcgcttgcagggatatagtcttcaggatccaaatcaactgtggctgagtccttttccacaaggtatgtgttgcacaattcctgtctagtgtggtggtccatccatttgggttcatctttgagtacacccaacaatacaagaagtgaaatggcttcttctcaactgatccaaatctgacaaccgctagagaagtctgaagaattcaagacaatatcagagttgtaatactgttgtaagaaaatgtaaaaacacattcgcatgtacacgaccttaacttgtctgcatttgttagtccacttggacatagaaccccactcatgtaacaagaaaatacaaagcattgtgatttgatgttgttccatctactcattagtgactttgtcgacctttctggattgtctccacgccttgagttatacaattgtataatcgtggtccaaaatccaagttttttatgtcctatgttgacaatagggtcacaactgacacttagccaagcacgacatagttttatatcttcatcacatgagaagtggcaagtttac

SEQ ID NO: 70836 - DNA, 464 bp, Zea Mays
cttcagtcttagcctggtgctttgtagcttcggcttcagaggctgtcgtctcaatttgcgcttttggaacttcggcaattttcttcggagtagagcttgaagactttatcgtctctaacacatctagtacattgaccatcctttttctctttggagtcgccgtgaggtctttttgcgccttcagcactgtcattcctgccggagggcttgtaacttctactatctttgttttcgcggtctctatttctttaatattatcagcctttggcaacatagccagctcttcattcttctgagtaagagaaggttctttggcttcagtagcagtagaggtctcaacaccaaattcgggcactgaggccggttcgatgaagcgtggtcggtgagtaaggaccttcacccttttcctttttggcgcggcctcacttagagcaactgaagcatcaccttttccagaagttgtg

SEQ ID NO: 70837 - DNA, 301 bp, Zea Mays
caaactgtcgacaaaagagttccttgtgactcttcaagacacaatggactcagagatttccttttgacttttcaaccgagtactctctcaaaccacgagatctcagtaacacattgcaattctttggatgttgttccttgaacgatgacccagtcagaatcaatggccgcgaattctggagggagatcacctacatcgacgggagaggtaagcacaacattactaagattcacaacccttctctttggtttcttgctcattgggttacacttgtcatttatccccatgatgatagtagacg

SEQ ID NO: 70838 - DNA, 331 bp, Zea Mays
ctcgagtgttggaaaccttagtcagagcgaaatgtagctacgagctaatagcataaggtttcttgtactgcaggggctttcttggtcttatctccataataaaagcattttgggccatattcttgttttgtgttgatctggagcacggaaggaggagcctttgctgattaggtttcttataatgtggccactggttgggcatgatacttcctgtgctaccgagggctactcactcatgcttagcacattcttgggggttggggcatctggaagtggcataccagttatgcaccttatggtttgttggtatttctgatcgaatgacttttgg

SEQ ID NO: 70839 - DNA, 321 bp, Zea Mays
tctatgtaccttggcgagcagacgacgattcttgtcccaaatgcgaagcacgtcatggtcaatcacaaccttagaccctccttcatcaagctgtcccagacttaggatagaattcttcagcgccggaatgtagtagacgccatgaataaccctctgctcaccgtcttggcttggaaaatgatagacccaatgcccttgatctctaccttcgacgcgtccccgaaccggaccattcctcgaacgccagtgttcagatcagcaaagaactcttggcacccggtcatgtgatgcgtcgcgccggaatccaggtaccaaccgttg

SEQ ID NO: 70840 - DNA, 301 bp, Zea Mays
tcctcccacgatgtaaggttctctactattatcacagaactcatcaagctctttcaaaaaaatattcttatatttctcctgaggaggaccataaatcaccataagattccatttacacaacagagctttatcccagtaattcacctggagaatgtgattacctttcttaaaagatcccacatcaagatcatcaattctagaacccacaagaatgcctccagatttccctttagcaggggaccaaagccataagtaatcaccagagggatccaattttcttgtgatgaattcatcacagtcc

SEQ ID NO: 70841 - DNA, 409 bp, Zea Mays
ctggcctctacaaatctacaatctccaaggctattctcaacagcaaagtaaccggtcatatacgtgatcagttggccatagcctaagtaacactactagaaatcaaggcttccgtctcagaacatcagtaccggttcctttttaatcggttttaactcccacgtcatcatagaaaactttaatacggctagtttttctaaccggtaataatgttaagtgtttaatgccgttgaagacaaatgcttaatattagtaacagttagacatcaatagatactaatgttcttattttatagaccctccacttctttcgttcgtgaaatcctaacgggggaattttgaacagacgtcgataagttgcaattttttgacaacccccgtgctttgcaccacaatccgctcattcgtc

SEQ ID NO: 70842 - DNA, 799 bp, Zea Mays
caagatcgagcctcttttgcagagtccagccatccatgccgccatccacgagcagtcgccagagcagatcgtgagcgcactgcgcactagcaacagccgccggactccgcataccagccaacgcaaagaaaaagaagagagcagccgccatccacacactgacgtctcacgccagcaacgagcaacagatggcgtttgtagtacttatggatgagactaatatataattttattatctaccctgcagtctcaccgtatcgaagtgtcatatgacttacacaacgcgtccagaaagatttgataatttattctaaatgttaaaatccctaagacttgtgttgtacaccacacgtacatgaagatctgatgatttattccgtatgttaaaacctctatgaattgcgttgtacaccacgcgtccaggaaaatctgatgatttatttcggatgtcaaagcctctaagacttgtgttgtaaatagcgtatcttgtaaaatatgatgatttattccggaggttaaagccccctaggacttgcgttgtacaccacgcgtcgaggaagatctgttgatttattccggatgtcaaagcccctacgacttgcgttgtaaatagcgcgtccaacatgatctgatgatttattctggatgttaaagcccctaggacttgtgttgtacaccacacgtccagaaagatccgatgatttattccggatgttaaagcccctaggacttgcgttgtacaccacgcgtctagaaagatctgatggacatgccggattagtctaatccaaaaatccga

SEQ ID NO: 70843 - DNA, 357 bp, Zea Mays
gtggaccagtggcatatcgactccaactacccgaaacattgtctgcagtgcacaatgtgttccatgtatcccaattgaaaaagtgtcttcgggttccagatcgaaccattgatgtaatggatgttaccttgaaaccagatttgacgtattccaaacatcctatttgagtcctagatcaaaaagacagggtcatccaaagaaaagttctcaaattctataagatacaatggaaccaacatacagaagatgaagctacatgggaaacccaagacttcttagaaaagaatttccctgactttttagcttcatgtaatttgtaagatatgtacagttgtttgtaagaatggaatagaccca

SEQ ID NO: 70844 - DNA, 356 bp, Zea Mays
cccaactactaccatgctgaagggcacaagctctcaacatatcttccaatacttggttagtcctttcggtcagtccctcagtctgaggtaggccgaactaaaattcaacttcgcatccgtattctcataaaaacttttccaaaatctggaggtaaattgtgatcctctatccgaaacgatcttctttgatactccatgtaaacacacaatccgagccatatataactctgccaattgagatcccttataagtagtcttgaccggaatgaaatgagccactttggtcagtctatccacaataacccatatagaatcatatcctttcgaggtgtgaggcaatccagtaatgaagtcca

SEQ ID NO: 70845 - DNA, 480 bp, Zea Mays
gcgcattgttagatacagaatagaggttgtggacccagaaatcatagacagacattagcatccttgatggataagagaaagaccatctaaaatgacatgcccccacaccggaagggagattactcattaagcaagtcggtaaacatattaaagtttatactctatcttgcatccatatcgaaacaaagtgtggaaggctgcacatggggaaggcaagtggattagagagtgaggaatgtgaatatatctaaacatctcctttctatttatagggtggatttggatttttttaagattttttcctattttttaaatacaaatgtttaaaatgatgttagctccagataagtacccatatgacctctccagcccaggagtcttcgccgccttttaccaactaatcgttgtgatgtgcaaaggtacagtgaactttgagatttgtccgcacatgtgacgaattttatcgttccatgtataggc

SEQ ID NO: 70846 - DNA, 346 bp, Zea Mays
ctatttgtagaagtgtgacttgattattaccttggatgttaccttttatggaggcatggttgaggcttttggaggaggtattgattttcttcttttgcatcctcctcttggcaatcctcaagtccttgacatgttcttcaagggatttagtgcatgccacggttgttcccgtctcaagcttcttcaccatgagatcacggttatcttgagaaggttgagcaatgcatttcccttttagttgtgtcaagctcatttttagcctctcattttcttccttgagcttttgatatgtatcatcttttgttcctgcaaattctagctcaaaggagggtttgcttgtcgacaa

SEQ ID NO: 70847 - DNA, 1092 bp, Zea Mays
actacagtcggctcttcagcgctctgcacagtcggagcagcttgtcgtgcttcgacagttgaagaggccccttcgccaaatttaggtactacaacctgttcaatatacagcgtctggtgggtcagaaccttcacttttttgccctttggcacatcagtggtggccgaagcagcagcttttctctttttcccttgccttcacagcgagtagtgataatcagggtatatgaagccgattgcatcgaataccctgttcaatctttttttccccggcccccgaaggctgcggacaaggcatcatcttcggccttggaatatgttccaaccaactcatcactagttgcttcaatacatttcaaccagtcatcgtctggctcatcaaacttctccctaaatctgaaggtatacttcaatcggactagaccaccctcactggaatcggcagtggtctccttcggcatatcccaactctccacaagtggccataccctgaaggctatatgctcttgaattaaatccctcgtgccaatgaaggcacacacaatactaaaggccttctgacatgcttcaacatcgccatcaatttccaccttcggccttcggaggctgaagcgagaccagatggggcgctggataattttcttgatgtcttcccttgcctttaaatcatttttaacgtaaaaccactcctccatccaggcctcggaccatcttttccggaatgttggcaccgggtggcttgcattagaacgggcaatgaacccgtaacaactgaagttgttgtggtattgttatttgtcaatagcctttgtctcatataaaaagctcgtgcatgctgcagaagcactttgcgctcggctccatcccctggctccttatagcccagacaaatatccccatcctgattatagcttcaggggtaatctgatgtagaaagatttggaatatctttaatacttcgaccacaaatttactcagcggaaaccgaaggcctgccttcaagaagcttcgataataacaacttcgttttcctccggagcaggggcagtattatctcctccaactctgacaatagacatgtcgcaaaaatacc

SEQ ID NO: 70848 - DNA, 497 bp, Zea Mays
gcattctttgttgttgtaagctttgttggcgacacatccaaatctttgttgctgccaaggttgaagtcagcctgctcacttgtgctctccccaagcaacatagcaagccccctgcaaaaatgattgaattagaatgcagttaccattagctgcaacactagaatgcagttcacaaatagtgcagaccttctagtcaatctaataggctatcttgtaatattgtttctctatttggtctgataggacttgatatgatagcatttgcctcttgcacattttggtctgcattagctgtctctactaggtgaacgcttcattacctctgctctccaattgaacaacaattgaaaactctgttcccagctgccatgcagttctcgtaatgccttctgtcttcctttccatacagtgtcatagtgaatctcacaacaaaagtcctcctgtaacttgtccctcagctcaacagtcttcatggctggtttcttttgtaggatatg

SEQ ID NO: 70849 - DNA, 635 bp, Zea Mays
atctactgctgtctactatgacatggtaatgcttccaaatatgtggcatccttgtggcaagcggcgaactccggcgatggtcatcttgaccggtcgcagggcaagtgggtacggtggccagctcacgatctcatccgcgttcgagatcttttcacctgccacggttatccacttcacctaggcacgaatcgtagaggccgacgtgattctatgcgtagggatcatcggaggcgatgttcactgaacctggaatctgattcaggttactgtaccatgggagctccattttaagcgcttgaccgagcaagttgagcagccccgttctctaattttcatgtaacaactccctaatccatctgtagcaaaattgttcttctacaaaccagctttaattttgttatagcaaccttgatcaaacatctaatggatcctattcaaaatcaatcccaaagtctatccgagcacattgtcagtcaagtttcagtttcagtggtgactgacagcacaactttaggtccatttttctccactttccatacagctccaaggcttggtcacttaatcaaacttaaactactaacatagctctatcattttgttataatgaccaagggcaaaaccttcatggattaaga

SEQ ID NO: 70850 - DNA, 463 bp, Zea Mays
tattttttgaaacgaatcaggcaggtgagctgccgattatattgataaagaagaatgtgaaattggcacagttttaaggaaaatcgggtccaaaacctacacagtttcaaacacggccttactcgctttactcgcagcagaaacatcgtattcaacatatatatcatactgaatatattttttgaaacgaatcaggcaggtgagctgccgattatattgataaagaagaatgtggaattgacacagttttaagcaaaatcgggtccaaaacctacacagttttaaggaaaatcgggtccaaaacctacaccgggtgcacaagcaacccaaacgacgaccccccccccgcagagcccatctagctcaacacaaaggacgagtagctccaaattccccagatgggcatcacatgaccaaaggaaaaccgaagacgtctacacccacaacaccagcacatgaggag

SEQ ID NO: 70851 - DNA, 369 bp, Zea Mays
cgggatcatatcgcctcactcagatggacggaacggaaattgggaactcatggaacatagaacatctcaggaagttctacccgtagctacatcacagaggctctcggaacgacgatgtattctgtaaattgagaaaaatatcatcaataaaaggtttcaaaggcactcagattgttcactgtcaattcgcacgcttacttaactcggggtgaccactatgccctactaacggagcaatcggcttaagtcggcaatgacttaaggcggtgcgacatgctcacgcttacttaactcggggtgaccactatgccctactaatggagcaatcggcttaagtcggcaatgacttaaggcggtgcgacatgctca

SEQ ID NO: 70852 - DNA, 794 bp, Zea Mays
tccttcctgaggttgatcccaatggtggtgtacatgttgaagctgaccccaatgggtgtgtccttgttgaggctggacccaatgggtgtgaccgtgtagaaactgaacccaatgggtgtgaccatgtagaaactggacccaatgggtgtgaccgtgtagaagctgaccccaatgggtgcgaccgtgcaccggctattgtccgtatttttgatgaggacgaagaagaggaagaagaagtttagctaattcgtaagaatagccagcgttacagaggtagtagggggatattgatattccttctccagctctgtctgctcttgtcagctttcaagaattgtccataacagattttgatcaggcccttgaggatgtcgttcctgaagatatgctgtcggagccgactgctggcgacatgatggatgtttgctctgaaattctagacgtgggattagaggtatcccgagcagtatctcacgcatcgtcgactttggaaggcagtcttcggtgtcaagaagttggtcaggattgcccgactcccatggaggtgactgatgatccttcagccttagaggcggctgttgcagaaaacccagcccccaagggtggtgttggcggttacctagcccccgagggtgtcgtcggtagtgatccagctctggtgggtagcgcgagctgcaacccagcccccgagggtgttgccggtaatgatctggctctggtgggtggcgcgagctacaacccagcccccgagggtgtccaagtaagctctcctttccacacctccatggatgttc

SEQ ID NO: 70853 - DNA, 404 bp, Zea Mays
gtcggactccactaacttggtctgaacctggagaaagatacttctttagacctaatatggtgaaagaggttgaagaaaaggttcatagaattatccataatatgaagaaagctcaagcacgacaaaagagttatgcggacaaacgacgaatgcccttatattttcttgaaggagactatgtctacctgaaggtatcaccaatgaaaggcgtatcgcgtttcggagttaaaggaaaacttgcaccacgatatattggtccttttcttattctggaaagatatgggccagtggcgtatcgacttcagctccccgaaacattgtctgctgtgcacaatgtgttccacgtgtcacaattgaagaagtgtcttcgggttcctgatcgaaccattgaaataactgatgtt

SEQ ID NO: 70854 - DNA, 427 bp, Zea Mays
ctatgtacgagctgctccaacacagtaaaccactcacaaccatatacaagtcctaagccaagtcatgcataaactctatgggtgatcaccacactcacgatcgctatctaggtgatgtcaatcaccaaaaataacaagcgctagactcttagtggaccgtgtcaaatctcatgagggtgatggttacacacaagtcactctctatggactaatgaagttggtaactatgctattatcaattctctaatcgtcccactatgcaaagggcttttgtcactctcacgtgggtgcttcatctatcggaataggcaacacatctcaggaaggtgagttgaggggtataaatagtcgcaatgtgtgaaactagtcgttactaccccactcagcatttttggaggcacaaaacgtgtctggtgctcactttttt

SEQ ID NO: 70855 - DNA, 1349 bp, Zea Mays
aatgatggatgacccaaacggttgtgccatagagatggagaggacttgattgcgccaaatgccccccactaagaactatctgatggaaggggataaagaccatctctgcatctaccttgaagaagaaccttcctcgtgtccagatccttaatcaaaaaatgatttggaaagtattcaagtgaggcatgattattagacgagaaatgatgaacagaaaaaaaacttttttgtgatgttgggacgtgcaagatattattgagatgcaagggtttagtaggggtatcaataacagcatgaccaacattgcagatgttcatacctgcaccacttgcagtgtgaatctgatttgtccccttgtacttctcatgagtggtcagtttgtgcagctcagacgtgagatgatccgttgcagctgtgtcggtataccaatttgtatcgacaccatagttgtgcattgctgctgctgctgcactcttggaatttgagttggaatagttgtcttcatcatatcggcaccagcacttgcgggcagaatgcctagttctgtcacaaacctgataggttattgtgttcccatcaggtctgcgccctcctggaccaccacgccctcctagcgcattattcttgctcctgcgaaaaggattaaaccggccattgcgaccctgaccacgcgaaccagaaccaccatgacctcgacgggcagcaacattagctgatggctgggatcctccatacagcaaaaccatcctgctctcaaaattgaggagttgcgagtatgcctccccaactgagacagaatccttctgtgcaacaagggcagagaccacacagttgtattcttcatctagtcccgcaaggatgtaggagactagttcttattcatcaatgggcttccgagcagatgccatctcatctgcaagtgccttcatttttgcaacatactcagaaattgacaagttacctttccgagtcatggccaatgcaatcttggtgttgactgttcttgcccgagactgcactacataggtctgttccagcatgttccacacctcctggggcgtggtgtaggatgatacctgacccatgacttttttggacatggaggtgatgtgaaggatgggaagaacctacaccttccagagcgcatagttcgacttggttagcttctcagctatagttttccctagcaaaggtgtaggtatggccatggaggatgagcttgccatgagatctcctggagtctgctatgggctgggggtggctagggtttgaaggaggtggctctgataccatgaaagaacaccaggttgggaagcatttgttacctaccgtagttggctgcctgtgtg

SEQ ID NO: 70856 - DNA, 782 bp, Zea Mays
aaaaaatgtccctaaagatcctctatcagaccaactgaatgacctcgcgatggtacaatgcactgaaatatcccagggatcatcccccctcaccgccggtagtctttgcgcccggattcgcgccggttgtcgcgattcgtgcctcgggcgagcgaatttcgctcggccatgaaaagatctcgtcgcggatgggttcgggatattatggcctcgctgtccctcgaccacttgcaccggtgacgtggccttgcggccatcaccggagtttgcgtccttcaccgcggttatgccacgcctcaggccattaaccacgtcacagtacattgccttagtacgtctgctcgttgccggtggtcttgccacggtagcttccacgaattgcttgcgccagtgacctcttccttctccggccgccaccgcgccatcccaaattcacaggccaccacccccggagcctataaattgagtgtgccgtcgggtccgtaaggtagtcaagcacccaatccaccaagtcgtgcttccaattgctcaccagtgctcgccaatttgagatttcccccaaatcgatcccgagcaccgcgcaaagtaatctcaccgtggccagcgcacttcaggtccgttcatgtccgttgtcctcttgttttagcacccttacttgcccctgatgcctctcgaccaaaccgattaggctagaaccccttagatcaccgggaacacttcatgatgtccattgtgtccgctgtcgccgtggacaggatgatgtagagctcaaatctagcaat

SEQ ID NO: 70857 - DNA, 641 bp, Zea Mays
attagagtatgatctattggtcgattgagggtagttgctatagtcaatttgtagctagatcatagggctacaagtttgctacagatgaattagcaagctcttatacgaaaatccactatctgggcactacaaatctgactgtcagacgctctgaatcaggttttcaatggtacagtgtccggatcagaatgccagttttagatgactcaccgccggcgaccgtgtgcccggattcgtgcccaccacggtgattcgtgcccaacgcagttggataacgcagaagggtaagaaatatcgcaccgtctatgaactccgatcactaatctactccagtcgtcgtacccgcctgtgtcacggccgcttcggatagactcaccagagttagccacctcgcgaccttgcgccacgtgccttggtgctttaaccacgccgcagtgagtcaccttagcccactcgatcatcgccggtgagctcgccacggtgaaagccatcaattgcttgcgtcagtgcacccttttatctccggccgccgcgtgtctttccctgaattagttgccaccactcatgggcactataaattgagcacaccctcggctccgctatgtaattgtgaacccaacacaaccactcgtgcctccaat

SEQ ID NO: 70858 - DNA, 947 bp, Zea Mays
gtgcctctgatctaatttgtggtccttgcatttcctttcctgtctagagactttcaagtagctactcatgatggattcggcttgtgaggaccaccgatgaatacattcttcccttgcctttattgaccatctttggtcaagttatgaccttcttgccgttcatatcaattgtatagatggggatcaactgtctgtcaatttgcattccctagaaaaccaactaaccttcatttatagatgattgtatgtgccaacggaaaactttgcaaccattggtggcatgagaaagggagttatgcaatttacaataagcacaccttttcaattcatctgttaggggaattgtgtgagtccgtttaatgttgtcgctcctaagtaattcatcaaatatcttgtcacacttagcaatattaaaggtgcacttaccttctccttgccgattcttttgaactcgctacagaaaggagcaagcagagagtttggacttagcagaccaaataagtttagtgacatataactcttttggttcatcatctgagctactactgtcatgatgttcatcatgatgagacagttctttgcttcaactttcacaagctaaagcccactgatgcaactgagttagcgaaaagacctaggtgacatctattttttctttcaagtatggacgcaacccattaacaaccaatcttgttaactactttttgtgatatgaatttgaaaacaccattttctaatatcctagaaccttcagagataatcattaaccaattcatcgtcccattattggagtgatgcgagatccactaaatctaactcgtaattcctagagaaaaagtgttcataaaactatgctctaggtcatcctaggaactaatcgagtttggaggcaaggcagcataccaagtgaatgcagtactagtcagggacaatgagatcaagcgaat

SEQ ID NO: 70859 - DNA, 424 bp, Zea Mays
ggataacatgttttctttgaatataaaactaaagagtggtttctgatcggatagtgtgtttctaattagtctgttggattgtgacccatgcagaacaccgttccaccaaacaggaaggcagaatgtctagtaactgtgaggtcccatagtctttactacctacgaaggacgaaattccggagcaggatcatcattctccaccagagatcaacttccaactgtgcattcctgatactactcagaaatggcttgcgagttgtgcagattccataactggccttctttgactaattttacatcgataccggacatcacatcactatagctgttcatagttgtaaagttcttattaagtttctgaccacatcgctaaaaaggtgtttctgatcactgtcaccccaggacctatccaagtcgctttcca

SEQ ID NO: 70860 - DNA, 824 bp, Zea Mays
ggaattcaaactgcccatgatgtgtttggaaggttgtcttgtgttgatcctggggcgccatacatatcggatggaacccagctcgaagatcaagtgtggagaactaggtagccccatgcaactcatcgagtagctcatctatgataggaacaggaaactgggtcttcactgtgagggcattgagatgcctataatccacacaaaatcgatatgaattatcttttttcttgatcaatattacaggtgaggaaaattcactatgacttttctgaatgatgcataaagaaagcatttcggccacctgttgctcaatctcttatttcagggctggggtataccgatagggtctcaagtggtggaaaggttgggctccgggcaacaatggaatgtggtggtcacaatctcgctgaggaggcaaaccagtgggcaagacaaccactgaatgaaacctattaagtagagttatagctcatccggcagctgatcttggatagactgttccttgtcaggtagttgttgcaactgatagagctcgatcacagcacactgtcctcgggaagaacgtaggccaaacaactgaagccaagatccttgataaggaatgatcaaccacttttctgcccaatgtgcccacgtaggactgaatttctcgagccaatcctgtgacggaaccttccacgatattaggtccacttacagttatccttgtcccaaggaccttagacagtcatgcagatgcacccaatagctcgacaggacctgcttcctgcatcttctccaacatctcccaagagcgtacatcccatatcacacacattacacca

SEQ ID NO: 70861 - DNA, 609 bp, Zea Mays
tcgagtcctcagactcctggccttccgtcaacatcgtggtggtcggaccaccaccttctcctatgggaactttctgacttcccaggggatgttgtgtcatcctttcggtgaccagaaccatgctcatcgtctctgaagtcgctgcaatgtataagtacaacggctcccctggctctagagctactagtatcggcaaggacacaaggtgctgcttcaactcttgaaaagcttgttcggcctcttcggtccaagagaatggaccggacttccgcaacagcttgaagaagggtagcgctctctcagccagtcttgagatgaagcggctaagggcggccagtgaccccgtaagcttctggacgtccttgatgcgggccggaagcctcattgcctcaattgccttgatcttctctaggtttgcttcaatgccccggtgtgaaaccaggaatcccagcaacttccccacagagacaccaaagacgcacttgtccgggttcagcttcgtgcgtgttgcccgtagtttgtcgaagaccagggttaagtcttccactagggtcgaccctctcttagtcttgaccatgatgtcatcaacgtacacctctactctgtccc

SEQ ID NO: 70862 - DNA, 309 bp, Zea Mays
gtccagaagacaagtgaaacttgttcacaccaaactgccaattcaaggcttaatttattgggcagttgtggatgagcttagctagtcattctaggtgggtgttcaaccttagctggtctctaccgaaaatttggtatattaacagtactttggtatagggatgatttaatgtgcctctgggatcttgtgggggttgttagagaatttaggcttggctgaaataattattcctgtaaatcccaaaggcccactcacacatgcatggtatggtgggaactttagtaccaccttgctactctaggtggagtg

SEQ ID NO: 70863 - DNA, 330 bp, Zea Mays
cgattttcaaaccactgaaataaataaaaattcaaatatcctagatccaaaagaccatactgacgaactagagttccaataattatcgaaaaatcaacatgcggatgctgaatagcaaaataattaaattgtagacctagggctaggggctgcccctccggtattgagctactagcatactacccatgtcgtttgtaagtcacacgtcacacatttttcactcttatagtggaaacgtatctatcacggtaacctttgttgtcatcccacccaacttcattgttaatggcaaattagcaataagttttactccctccgtcccaaaatata

SEQ ID NO: 70864 - DNA, 392 bp, Zea Mays
gcatatgagacatgatatgatgccatgtggctaggtggaaaagatctagagacaaggcttggctatgatggacttgttgcacgtgtgaagggcaagtcaaagaacttggcaccgtggaccaaagtcatgatgaagagcaaacaaagttatgattaaagaaccaataaggctacattatgacatgaattggatcatatcattcatggagaacgatgaaggaacttcatgctatgagaaatgattgaagatatgtcttctaggacatttcattttaccagtcaaagtttgtgcggagaagcatgtgatcgggtttaagatagatagtcatactattaagagggcaaacttctttgcatattagtcatctagttccacttgtgagatctaacatg

SEQ ID NO: 70865 - DNA, 612 bp, Zea Mays
caacatttggttttacccctctaaactgatggcatctcttagtgttatgggcatcacaattgcagatatcacaccacagctctatagtacaaccctgcattacatgaccctttgtcaggcatctccaacaataaagaggctttccttccttggtcttaccatgtgctgcaccacgaaccaccacatcctcctgttcactattcttccctggcagcaaagtttcctccctctcatcctccaccaacttatcccctgagtcaaaaacctgttgtacaactgcagggtgagacgcacctgaaacaaaaggtggctgcttcaaaaacgcctggttaatcaaggccacggcatgagcaagagcctcagtcgacggcgacactgctgtagaagaagaggccgcctccgcccttgaaaaattcacctgagaaccttcacgctgcccccaccttggttcctgacctccaaatcaattgaacacaccagcccctgatccaccagcccctgtccccctgaaagcacttaatccacggacactcctggaattggagaaatgattcataccacggccgaactggttaaagcttccactcctagcatcaaatccttgcctgtgtg

SEQ ID NO: 70866 - DNA, 561 bp, Zea Mays
cggatggtccgatctttcacaaaacagttcggtctttaagaccgaacatctaccacaacgtaaagacagtatcacgaatgatccagcccccgagaccggagagtccgtcatcacacaaagatcatctgattcctctgtgggggacatgatagaggaattcagagatctcaataaactaggacaggggtttacatcgaccgatcctttggagtagatcgacataggaaatggtaaaactccaaggccgacttttgtaaacaagaccctggagaccgatcctagaaatgaaatgatcggtctattgaaggaatattcggattgctttgcttggaattacactgagatgccaggattaagccgagagatcgtagagcattggctgcccattaagtccggtttcagacctttcaagctgaaagctagaacatttcgtccagaccttctcccacgaatcaaggacgaaatccaccggctactagaagctaattttattagaccttacagatacgcagagtgggtctccaatattgtgtcggtggagaaggagtcaggtaagcttag

SEQ ID NO: 70867 - DNA, 428 bp, Zea Mays
tgacattccactgcagcacattacttgagtctttacccccgcatgagacgtaagacgtaggcaggtcaaaggtagtgttccttgaaaccatgtacacacataggcaacaaagacccttttctagttcatgaattggccagatgttgatggaatagaggagggcgtcgcagcatgaggcagtagggttttgtggtgccgtctcctgacaggagtgcagtgccacgctcgtgaagtcaagcctgcaaatcagcgaggagcaagcaggtgatgacgacagcagcagcagcatgatggtgacgagcagtgaaacggaggaggaggccatcagctgctctattatgtactagtgggtagggtagtggcgattgtgacccggccgtcactatccattgaggtggtggtctattttatagcccatgcaaacagtc

SEQ ID NO: 70868 - DNA, 606 bp, Zea Mays
gcgcgggtgagctcgaccgagggctgctctgacacgcgctcggggcgagcgcgggggagcgtcagtgcgcgctctggcgcctgggcacggcctcgagcacaaggcaacacagagagtggttatgttcaagcgctcattagctccaaatcttcacgattatggccatgatccctttgagagaccttcctttgtcgtttatgtgtggcggcttatagattttgttgactggagccaaagatatggggtgatcaaatcgggtttgtctcactgcgtgaatccgagctaaaacccttgacttgacgtgtctagggcacaaatctcgatgccatcttcacacacgttgcagaggggttaatttagcacaactttgtcaatgggggcttcaggttttaagttagggattaaggtgaacacgctcgagttctaggtgagggctgaaattcagaaatctgaattttcagatttccatagagagcttccacttgcatggccttttgggggattttaaacaattattttggccaaacttttctagtagttattgtagcttaattagtgtatttcaacttttataattggcctaagccatgatttcaagtttttcat

SEQ ID NO: 70869 - DNA, 512 bp, Zea Mays
tgagtgtgtggccttcatgtcacctctcggtgaactaatgtgtaacatcttcttaagggggtacttaggtatgttgtgcttttccacaaatgactcagttataaacgaatgtgatcctccagagtcaaataaaactgatgcaggtatggagttaacaagaaacataccatacactatgtcgacatcctcaggcactgattctgcggtgacgtgattgacccttcctctactctggttctgcggagtcttgttctgagcagatccacgagcgggggtgttctggtcatttctttggttattatttttctggggtgtctgctggttgcgccttgggcagttgttggcatagtggcccagctcaccgcacttgaaacagccattgggttggacaggtgtgttgtttctggcctgcgtgttactggcgccaccttgacagttctgtgaactcccaccagacctctggttggtctgagagttgctccttggttggttctgactatgattatttctct

SEQ ID NO: 70870 - DNA, 749 bp, Zea Mays
cggagatgccacccatgctcttcctcggtcttcgaataaataaggatatcatccaggaacacgaccacaaaatcgtccatgaactcatgtgacatcctattcattgcttccataaaagcagcaggggcattagttaagccaaaagacatgactatgaactcgtaatgcccatacctggtgcaaaaggctgtcttctcaatatcctcctcatgaatcctcaactgatgataactagagttcaaatcaattttggagaacacctgggcacccctcaactgctcaagaagaacctcaatacggggtagcagatatttattcttgatcgtcacttgattcaaagcacgataatccacacatagcctcttgcttttatctttcttctcaacaaacaatactggggaagcccatggtgacctgctaggcctaatgaaacccttagccagcagatcatccaattgtcgcttcaattcaacctgctcctttggagccatccgatacgatgccttatgaataggctacgtacccggaatcagcttgatttcaaaagctgcatcgcgctctagaggaacgcctggaagctctgccggaaacacgtcggcaaagtcacacaccacccggatgtcctgcacccgcaaggcagcctcaccctccaccaccatggagaaaaagattcccgacttccttgaccggcgatccagaagcaattgcgccaacaaggataacatgaactttggggagcttcccaagaa

SEQ ID NO: 70871 - DNA, 499 bp, Zea Mays
tgaatttccgagtcccatcgaacacatgcgtcatgtgtgccaatcaaaaccatgccgtcggatcggagcacaattttaggcaaatcaaacacgcctactccggcgtcctacacctcgagatcacatgcctagcatgtagtagtagcctagtaggatccgttacgcactcaagaaccacatgctcgttgaatcgcgtaatcatttccatgcagaggagcgacatggtcaggtacctgaactgtgccaggttcaccgggttagccatggtgccgaactcttgaacgcattttgaacgaaatctgaattggaccaaatgtgtttttttttccttcgcttttcgctgtattatgggctcgtcacctcgttcacggctgctgaatctcgttgcatgtcaacacggtacaacataaaaggctacctaacatacctgtactctgcttctggtaatactgggtagtgactaaccaggaaagatgttgaaacaattcacttccgcttt

SEQ ID NO: 70872 - DNA, 628 bp, Zea Mays
caccgcccgtggataaagcttttcaccgccgtcaagccttcgccgttgcccgcctcgtggctctgcctttacaccacgtcgtcgtgactctctagggtcgtcccatcgtcgccggtgagctcgccacgactgaggacacgcacccacggcgctagagtcctttcttatctccgcccgccgcgttgttcgatctaattgagtgccaccgacgaagctgcctataaattgagcccgtaactagcttcgcaacatcattgcgcacccccacacctagtattcctcccagccgatcaccagcaagctccaattccgtattccccccaaatcagtcgaagaacaccgtgaaaccaagttcaccatggccagcctgttctggtaaaactctgcccaattcaaaccttgtttaagtgctctcgtatgcctgtgatgcccatcgacccacttaattgcacggagtagcctttggtcgccgggaacacgactgtcttgccgtaatactctcggtcaccgtggcccgagcaaaccaatagctcatcgatgaaattgggttgggggaaatgatcgaggtagctccaatttcgtgtcagtcactcggagaacctagccgttgccccaatcggtcggtcca

SEQ ID NO: 70873 - DNA, 469 bp, Zea Mays
atttagcaagtaattagaaatgcatgtgtatcttctatgtttagacacacagttaggtaagaagagagatggtcagagtgaggttcgctgatggtaagaagaacttggtaagggaagactccatccaaggtggtaaatcttgaatcatctcgagatcttatttgactcctattcttccatgtcgaggttgatctcctccttctggctctttggtgtctccatctgggttttagaaggtttagatacatagatggttgtgaaacgggatataggtcaaacatggtttactttgcttacaggttaggataggtggattagacaacttatcaagtaggtcggatggttctgcatggccaagttggtctaaggtaccaattttaggtcaacacatatttataggattagggtctaatatatttcactagaattaactaacttatttaagaactcaccttagattagatcaaat

SEQ ID NO: 70874 - DNA, 534 bp, Zea Mays
ttggttgatattgccatgtacatatagatcaaacaaacagtccatcttacttgctagcttcgtgatcacattgatgtgagattgagagcaatctaatgcatatcagttagaaagtttgcgttgtgtgacactaggtggtctttgtgaccaaggaattcttgtcactcttggtgattgttgtcacctagctcgcttgatgcttgtgtaagaccatgaaaaatattttgttgattgtcgtggtcttcggtcattggctactgtgaggggctttgtactcatccccacaagagatttgcgaagagcaactatagtgaaatcatttgtgttttagagaggttcgtggtgttgtgccatctcctatgtaaagtattgctcctaggatccaccttaatgcggtcgtaggttgccggcaaataattgaacctcaagggaaaatgctttgtgttactcactctcattggttcactttctcaacacttgtgcttgtagtgttgcttgcttagtactagcttgtgttgctttgtttgcttactt

SEQ ID NO: 70875 - DNA, 444 bp, Zea Mays
accgaagaccaaattgctatgtgcacccccacattcccactacccaacgatgcaaatatctgattttgcacatgatccaatatattatctcacagattttatatacaaggacactaccttacacataatatccaatgtgtttggttctaaggatgtcaatttgatccacggattcagatatacttccgatatctcacatgcgggagccgagtatggatatacctgtgaatcaacctcatatggatatggattacgatattaccttccacctgccgttggatattcaaaattgatccatagatttttttgtgcctaacccattttacacagtaaagtgtaaaccttaacttcataaaccccaccctaacgctcctaatttctatagttgacggtcattctagccttgctcgcttcctacgctgtactcgatgcgcctatcaagtc

SEQ ID NO: 70876 - DNA, 670 bp, Zea Mays
gggctctgatctcgatgagtgctgcagagaatctcaacgtcatcacatgccagggcgatgacacaccccgtaagcagcctttgacccataccccggcgttgttacaaccactatggcatgggcggcctccccctcgggggctcggatatacggacgaccacccggtctcggccttggctctctacgggaagtcagcaggcaccacatagacgaatacaagacctagcttcactaagggcgctacccttggtgtataaatagagcaaggttccctccatggatgggggatcgagatccaagacatcagtgtccactcatcgatgcacgtagacgaatacacgctcccccactccgtcttagatattggcactggcctcaatcatctctagggacttggggacttcccctctcccgctatgcttgtaaccccctactacaggcaccatggtgcgaataatataagcctcatcctctttgctggaagtagggccttgagcagcccgaaccagaataatcacttgagtcctctcgcacaccatctagagtcggccacgcttcacatttactggttggttaaggacccgtggtccaaatatcaatagttggcgcaccaggtaggtgattgtcacgtgaaacactcccagttctctccagcactctagatggcagg

SEQ ID NO: 70877 - DNA, 313 bp, Zea Mays
tgccgggatgacaatgaactctgtaagctgagaaatgtatcatcaataaaaagacttcaaaggcactcgaattgtttaactgtcaatctgtgtactcgcctagctcggggtgaccactataccctgctaacggagcaatcggcttaagtcggcaacgacttaagacggtgcaacatgctcacgcttacctaactcggggtgaccactataccctactaacggagcaatcggcttaggtcggcaacgacttaagacggtgcaacatgctcgcgcttacttaactcggggtgaccactataccctactaacggag

SEQ ID NO: 70878 - DNA, 291 bp, Zea Mays
cttgggatggcaagatggttaagtctgccaggaatactaccccacttaaaagaattctgacttgggaacacctgagtttgcacaggaggtctgatcccagggttcgggtgaccaaagggataactagtggtgtagagggtatgccatgcttctccacaaacttagcggctataaatgaatgggatgctcccgaatcaaaaagcacagaagcgggagtaaattcaacgaggaactcaccgagcactactcccggggcttgctgggcttcctgagcgtcgacgtggttgaccc

SEQ ID NO: 70879 - DNA, 287 bp, Zea Mays
acggaacacagttaagacaatgtcgaacatcttctttcctgcatgttgcggtgctcgtgctccacctaagggcagagcgctagaaagaagatctgtcgtcgccagagatgacatgagatttccatggcctaggttgttagctgctcatcgcccatgagaacatggtaccgctggagagtaagattctcggctatttcagcttcctcacgcccctgattcctatgatcctctgtgactgatgctgagaatgtggtttgatatatgattacgatatcgaagtatgaaaa

SEQ ID NO: 70880 - DNA, 281 bp, Zea Mays
tgacatgggatccaatttcactagttcggagttctttgatttctgcgaacaaagaagcatccagattaaatatgcatcattagcacacccaagagtctacggtcaggtagaaagagctaatggaatgatattggaagcactcagaaagaaagtctttgataagaacgaaaagttcgcaggaaagtggatcagagagttgtcgtatgtggtttggagcctaagaactcaacctagccgagctttgcatggaaacactcccttcttcatggtctatggttcag

SEQ ID NO: 70881 - DNA, 497 bp, Zea Mays
cgagttctccccttgcggttcaagatcacgttgatcgccttgaggtgctcgtcgttagagatatggaggttcgtgcgaaggtcgctgagcagctcctccttctcccagctcagcgcgttgccacacgcatggaacgccttcatcagagcagcgtaggcctccagctccagacggtggatttgttcacgacgtgattcagctacgtcgtcacaacgtggttcttcctttatgggtggttgttctttcttgacgggtggcgcttctttcttgacgggttgcagctgatcattggtcttctcaacgttacgaggcctgctgctgggagctgcagggcaatctgaagacgagtcggaataactctggtcatcgtcgcctcggtcttcctcatcgtgttcgtgctgctgctgccgatggtcactatcatcatcgggattaatgcctgttctaacgtcgttgtaacaatctttgccgctcgtctcgtcctgcttgttgctcag

SEQ ID NO: 70882 - DNA, 832 bp, Zea Mays
gttgtacccacacttgaaccgagctaccttgaagcacatgaactcggtgcagaagttttctagagcgccaaaggtgaccggcatgaagagatgcccaaacgggtactctctttcaaccggtacgatgccgaagaatggggtatctgacttaatcaggtcagcagtcgggatatccaaggcctggagtgttctggggaaggtgatgttgatgctactgccgccgtccactagaacctttctaacccggctttcttggatcatagggtcaacaagcagagggtacttgtcagggtgatcaaagttaagccactaatcggctcggcagaacatgatggagtgctccaaccactaatatggcatcgggtcactatgggttgccaccaggacctactggtcgattagcttctactgcctcttgctctctagggacccatgtcccccgaagatgacattgacctcccagtcaatgcgtaggaattggccaccaccatccccttcccgaggttgaggttgttcttgtgcggcttgctcccttcatggtgggtgcgacgacagtggttggaatggttggccattgccgactgagtttttgaagtccctgaaattacgtagggtgtggcacatctccttgtggtatgagcactgggcatctagaatctgtccagtgtccgagcgttgcttggggcatgtcgcgaggtcaggtcgccgaaggccctacagcatgcacttcgtcacttggcctcttatcccagtgcctatctggttgctgatttccctcctttgtgtggtcgatgaggtcctaggccctctcatcggcggtgatgtaaatgtc

SEQ ID NO: 70883 - DNA, 878 bp, Zea Mays
gaccctctagtgtctcagaaatccgaagtttcttggggcttgctggatattatcggtgtttcatgccaaatttttccagcattgctaagcctctgactagactcttagagaagggtgttctttacgtctggtccaacgattgcaaggtcagttatcagtcattgaagaacaagttggtgaacgcccctattctagctttgcctgagagtggtaagcgtttcacagtttatacggatgcttctcatattggtcatggctatgtgttgatgtaggaaggcagagtgattgcttatggctccaagcagttgaggaagcatgaggggaattatccgactcatgatctcaaattggctgtggtggtctttgccctaaagtcatggaggcattatctttatggcgagtcttgcgacatctacaccgatcattagagtctcaagtatattttcactcagaaggagctgaatttgaggcagcgtcggtggctcgaattgataaaggattatgatatatccattcattatcacctgggcaaggcaaatgtggtggctgatgcccttagtaggttcggggttccaaaagtggccttgccattgatcgcagatctggaccgtataggggttgctttgtgctatgtaggcaccgctagagaggagactcagatgctcattcaatcctcccttctggagagagtgtgcatggctcagtagcatgatcgtttgttccaggaagctcgaaggagggtcagcgatggtaaaccccgtgagttcaccattgatgagaatgatttggtttgtttcaggggctgtctttgtgtggcacagaaatcagaagtgaagatggatatcttgagaaaagctcataaaacgccttacaccgtt

SEQ ID NO: 70884 - DNA, 956 bp, Zea Mays
tcccccaaaccaatttctggattacagccctacagcgccctgcccatggtgaccgcaagcactacggctaacccagcgtgttcctggcgattggtggcggtctagttcaatctggtgggtggaggagcttgaggagggcctagggacgctagaacaagcgacagagagacttgaactgacctgagttgagctggccgtggcgaggtcttcttcgcgtgtgatgaaccgatttggggaaaactcaaaattcgtgagccttggagaacaattgagggtgggagcgagtgctttggtttcgtgatgacatagcacagctgccccggccttcaatttatagagggcttaggtggtggtgctcaatttggccgagcagtgctgcgaccggagatagggaagaacactggcgcagtggattcgtgtcttccgtcgtggcgacttcaccggcgatgagtaactatcgcaagccgagctactgcgacgtggtaaagtgcttagcacgtggcgttcggtcgacgacagcaaactccggcgatgataatcttggccgaccgcgcggcacgtgggcatgacggccggaccagctagcggccgagacctatccggggaagagaagatctttttaccccatggcgttatccgacacaagatagcgtgaatcgtaacgacgacgacgatcggtgcggattcatcggcggcgagcactctacgctggcggtctgatccatagcactgtaccatggcgaagtccgattcagtgcacctgacagtcaaagttcagggccaaatttctcccaaattttgatggcaactcacttaaggttctacagcaaagttgtagaccaaggattcagctacaattttgccacagcagctatagccaaattcctactagatcaaagttgaatctcagtccaaagatggctcggttacactgtcagactgatttcagattgaag

SEQ ID NO: 70885 - DNA, 668 bp, Zea Mays
cccaactccaacagcacgccgcacatgccgccggatcacgacactggctcccacgcactctcaatatgttatacaaaaggtctttcagtcttgagctctgaatactgtccgacaaaccacgttcgcatccgcatcatatccaactattcattgttccgtaagcagaccaatacctactaatttattcggtggccattagagttctgtgaaggactaaaggctatagctcctcctcctctcgggcagtttcagcgtgcaacgctactagagcagcagaactccaccgctgaaggcatccgctcgctgtagtctgctttaaagcaagtgtggtgtgcatgcgttagtggaaccaagaaaggcaagtactgattctgagctgctcttcttctctcttattccctagagctagagagcatatgtatttttttaaaaaaaacatataatgaatgaaatgaatgaatgatctgtgttgattaatgcaaacgttgtactcctgtttgtgccagaaaggcaggcaggcaccaacacccccacctgaaaaaagcacatgtcaaccaggtagccatccaggcatccacccacccaaaaagaagaactgaagaagtagccaccatagtccataggattctttcatgatatcttgttggtacatgagcatagattccggc

SEQ ID NO: 70886 - DNA, 326 bp, Zea Mays
tcagcagagttatgcagacaaacggcgaatgcccttatatttccttgagggagactatgtctacctaaaagttttgccaatgaagggagtatcacgtttcggggttaaaggaaagcttgcaccccggtacattggtcctttccctatacttgagcaatgtggaccagtggcataccgactccaattacccgaaaccttgtctgttgtgcataatgtgttccacgtgtcacaactgaagaagtgtctttgggttcccgatcgaaccattgaagtgacagatgttgtccttgaaccagacttaacatattccgagcatcccattcgag

SEQ ID NO: 70887 - DNA, 1426 bp, Zea Mays
atgttagtctgtgtttgtaatgtattatgattttagcgatatatttagctatacaatattttggaaagctatttagggcgattttcgagttttatagagtggtttggggcgtcatttttactgagctccgccactggtcgacgtcctgatcaagagcaagtcgatatcaacctcatcggcgacaagatcccatggcatcatctagctctgtagtaccaacgcctcttctaggggaaagcgttgttgtaaagctcaacaataccatcttcgcgctctagaaaacacaagttctctccatccttaggtgcacaactacaaggtgacctagatgacacgattgtagcgcccggtcaaaagatctccgtcatcaggatggcaagatgatcgacgacgtcaacctggattacatcagatgggtcgcgctcgagcaggtccttagcttcctcatgacatccatgactcaagaagtcatgggccagcttgccatctactaaacaccctatgaggtgtggtcaaaattgcagaagacctacgtgttgcagttaagagcctgaaccgtgaacacatggattaccctgacaactacaagaaaaggtaatgtgacaatggctgaatacaaagccatgatgaaatctcttgcagatgagatgacatccacaaagaagactgttcatgatgaagaactcttctcgtacattttggcggaccttgatgaagagtacatcccgatggtccttgctttggtggctcatgttgagcatgtcactgtagctgaagccacctcccaacttctcagttttgacaccaggataaatatacttcatggaggtcatcaagcctctgctaatgttgttggtcgagggcatggaaataaccgcgactgtggccatggttgaggcagagggcgtggtggtcttggtggccgtggtggctaccaaggtccattgtcatcttcgtctgatggacgtccacaatctcgacacactgataagatatgtcaagtcaacgacaaggtagggcatattaccctcaactgctagtaccgctacgatgagagttacacctccaacaccaagactgtagctgcagccacccatggtggctatggtgtcgacaccaattggtacattgacacaacaacaatagatcatgttagatccgacctagacaagctatcagtccatatcaactagcaagtacaaggggacagatcagatcctcacagccagtggggcatgtatgaacattgacgacattggtcatgttgttattgatacccctgttaaaaatcttgtatatcaacaatggcttagatgttcctcgggccaaagaatctagtctcagtccattgttttttaaagacaatcatgtcttacttgaattttttcttatcattttctaattaaggatatagacacaagtaagg

SEQ ID NO: 70888 - DNA, 523 bp, Zea Mays
ctatgcatatacacgaacaatgtccaactaaaaacaacgagaagttgtcttatagataatagaaactcaaactagaactgaccaaggtttaaaacttgacaaagacgacaaatagagctagccaacccttgtgaaagatcttgcagtcctatctgtttggtgtttctaacacttgcccaactggaggttggttagtgctcgatctgggaagatttcatgacaagcttaaccctcgttgcccatgagggctaccaagcacctcgtcgtcaccgctgccttcctcctcgctgtcgatgtcgctgccatccctttgctcgatggtggtggggcgtcctgtccatgctcctcccagcaggtggccaggtgctggacctcagagtgatagcgtgggagcagaggcttccaccgtgacgaccaatgatcctcctatacgagcatggtggctacatcacctacggtgcgacagcgtgccgtgctcccaccgcggtaccactgtactggctattacaattacagactcggg

SEQ ID NO: 70889 - DNA, 334 bp, Zea Mays
gtcagggagcccaagggaagaagcttacatcggctcatggccaacggagcacgacatcccgatagctcatggtccgaccaccgactcggacaaaggcgagctcgagggacacgtcgaggataaccagctggtgagcaactgcccggggtttataaaaaggacagagaagaacctgactccgctctgagagacaaccagtcgccataaagacgatgctaggttatgaggaaggataaaatgccacgattgctcagaaaacgaaaagacaaggcaccgtctgacccttcatcaaccatcgaagggagatactctcccctcaagggctactatcggg

SEQ ID NO: 70890 - DNA, 283 bp, Zea Mays
gtagaattctatatgaggaaattctatggcaatgattctcagtctcatgttgatggacttgttaatgttattaaaaaactatattagttctatgctagttcaactccatctacaaggtctaggaccaaaggtacatcagaggaacctattactgtcactgatgtagcagatttattagtggataaggataacaatgatgatgaactagacaaatatttatatgcattaaatggaaacgatggggctgacttgaatgagctagagaagtatatggcagatccac

SEQ ID NO: 70891 - DNA, 354 bp, Zea Mays
caagaaagtgatggttaagcgaatacaagatcagagtaccgattacggtggcttatatgtggagcttggtgggaaataataaacaaggaatgcaatctaaatcctagttgttgtaaagttaaataacaatccaactagaagttcactgcctagtgctgaccacaagatacgagtgatgtaagtagatcaaacacgcgtaaagaaattttagatttgatgcaaatcaaggagtatgattggaatgcaagtgttgcgatcagacccaaccaaaattttgcaccaaatgacaatagcaaactggttgaacaacttgatgaactttcagcacttgtgcacataaacaaactgatcgtt

SEQ ID NO: 70892 - DNA, 854 bp, Zea Mays
ttatgctcctaggcccacatgtcggggctcagcatccttgtatgtgcctcccttgagctataaaagggaagacacacaatgttacaagacagactctcagacaggctcacaagctctctcaagctcacagactgtcatgtggggtctcccctataaccgtcggaggcgcgcaagagacaggaggcgcgctgcagaacgagcagcagccaaggccacgtcagcagcagcaaaggaaagccaagaaattagtggctagaagaaggaaagaatcaaagggcatgcagccgccacctctatagaaggaagggtggctagaagaggaaataaattagtagaaatcctaaatcatagagatcagtttccttttagtagagatcctaaatcagaggagattagtttcccctttctgttgcaccttaggctatacagccttgtagctggctcctatgagagacaagcaataacacagtcatttcctccctcatccctaccactctcaagccttcagaagaggggtaaaacctcaccggagaagacggaccgagggtacgacctacgtagccgacggcccccttccctagactctaaggcccttgacaacttggtatcacggtcacgtcgatccgagacttccagttcttccgctacttccgccgcaaccagccacccagcagccctaaacaccgccaacccacactcatcacccacctccactgcaccccagcccagcgccatgaccgaacccaccatcgccgacctcgccaagttgatcgaggggctcaccggcaagatcaatacccttcaaaccgacatcgacacgatgaagaaggacaagacgtcgtcctcgggcgccc

SEQ ID NO: 70893 - DNA, 278 bp, Zea Mays
attaggaaatgggaacaatgccattacacagggtaccacaaagagcagctagcccaactgaaactaggacaaacaccacactacaaagcattccttcaataccgagcaacatcgatataaaagagacctaacatagcgcgacaccaacccagaaaacgtccataagctttgcttattacaacaaaattcaccccagactagaggcaaggctaacaaagtagttcaacaaaagtaaagcattgttagtacaagggaacatacctattaggataagaaaa

SEQ ID NO: 70894 - DNA, 306 bp, Zea Mays
aaggcagttctgaggatgaggccccaccggttggacaagaggccaagagatggagttcatgccacggggccatcaccggctcggacgcacagtggcccccatggtaacccatagatgctagatgaaataattgacaactcgtgtacctaccacaaggagatgatagataccctgtgtaattgcatggacttcatgagttcagtcggccacgaccgaccattccagccactccctctgccgctgccgcgacagggccaatagccccgacagccggggacggatgaaggggcgttcccttgggttgac

SEQ ID NO: 70895 - DNA, 471 bp, Zea Mays
gaaaacgcaacaagcaagaaataatggcggccgccggtggtaatagtggatgaagccataaggacgatggagcgcgagaggtacgtaggcagctgcctagcttattggttcctgattgggactgctggtacgggctcacactataccacaacaccaaattagtgtctgacgaccgtcgctataaatagagaattagcatcaaattgttagtcggtatacattgccacagatggtgagtcggcatatgtccatattccaaccgagtgttagtcgttatatttatatgtgaatagtgtcgctttgtcagtcggcaattcatacctatagcatctcaatgtcagtcgcaaaaaaacatgtgtggcgcacaaattagttgctggcccaaataccagcctcgccgccgcagcccaaaaccctatctcccttcccgtaattccagccgccgcgcgccaccaaaaaaattgatgctgc

SEQ ID NO: 70896 - DNA, 276 bp, Zea Mays
gtgtaaactcgagggtgtagcacttttggaccttcttcttcatcctccttgtcttcttcttcatgtgctcccctttgattattggcatcatcttgaggcacttggtcctcatcttgagtagggggttgcaccattgttgaggatgaaggtagatcttgttcttgtggtggatcctatggttgcacatctccaatcgctaggttccttagtgtgtttgtcaaagcctcctcctcatctaattcatcaagatcaacttgctctccttgagagagtaaa

SEQ ID NO: 70897 - DNA, 470 bp, Zea Mays
cgtgcgatggcgaagttgggtagcaccatggaattggtgatgatgtcgacagtgttggagaaatgatgttgaggccacagagaaggttgaggacatgctcaaaattctagactggatgaccaacgtcacggagggtgtcggtggtggtctttatgcgctggtagcagttgatggaagtgtcgccctgctgcatggagtggaactcatggcagaggaagatgggctgaggatccttgttggctcgtaagaggttctcgatggtgacctagagatcatgcgtagtctggtcgttgccatccatggtgaggttgaggatggagtcatcgacggagccgaatatccaactacggacacaatagtttgcttgatcccattaagggtcagtgggattggcagcgcctgtgctgtcgatgtgtgatttgaggccgaatttgttgcacaaggtcttgaagtgggatgcccacttagtt

SEQ ID NO: 70898 - DNA, 603 bp, Zea Mays
gtctttcggacagctgaatcaagaatctttactggcttctcacggtactgaagatctttctgaatctgcactgcctcttcttcgatgtgactttctggtgcttgcaggcatttgcggagctaggatacgtgaaatacattgtggatgtcagacatagactctggtagttcaagacggtatgctacgggtcccactctgccaatgatgggatagggaccgacgaatcgcggtgctagctttccttttacttggaaccttctgacaccacgcatcggggagactttgaggtagacgaagtctccttcctcaaatctgagttctctccgcctgttgtccgcataactcttctgccgactctgagcttcaagtaatctcctgcggatcagggcaactttctcttccgcctctttgacaaaggcaggtccttctagtgctttttcccctacgttggaccacatgagaggggtctggcattttcgtccatacaacgcttcgaacggtgacatcttgatgctggcctgatagctgttgttgtatgagaactccgcgtagggtagactggattcccaacttctatcgaatgctagcacacatgctcttaat

SEQ ID NO: 70899 - DNA, 423 bp, Zea Mays
ggacactaattttggtatagaaactttagatttctttgatggtcgtggagatggctgtggagaaggtggatccctgaagggcgatgtatgtggcggagacggtgggccaccatgaagatgaggagaaggagggtcagaaagaggatgaggagcagcatgtgaagtttgaggaggtgatgatggatgtacaataggaacaacaatttgagaaggcggagacggttgggcctgtgacgaattcgaccaatcaaccaattcgacatcccttcaaggccaaaggataaaattcttgatagcttgtccaagtgtctcgataccttcgggcccagggatgtctagcatgtcgtcctcgtatccttggatgactgtcgccacttctacccttcaatattcttctggaatgtcgtttccatggaacttgcg

SEQ ID NO: 70900 - DNA, 994 bp, Zea Mays
cacaagggttgcggctaccaattttacaaagcctagggtctaaatcgtgaaaaacaggaccgatccgtaatattaacagtataagggtggacggtgggtttatttaaaagaagtccgagggctctttagcaaaaagacccaaccgaaggggtatgggattacctggatcgttcgatcaacatcggactgctcagatcgttccggccgcatatcctaaccggtgtgccatcctgaccgtacgatcaacgattgatggacccattttactgagccgaaacggtgtaatcgctccagatctcacgcgcccgatcaggatccaacggtgtaagtgccatcttcctccctggtactgtatcccgtggcgcaggcactaggtggcggcgtccgagctcccgacgggtgaagcggccatgggagcatggagcgaggcagagaggttgcccgcacgcatggggagagaggagagatgagagaactcggccctataccgatgtggagcacgccccttggagcagccacagggagcgcccgccattgctgtgtcgtggagaccaacgagcatgaatagcagagggcccggcaggaccttcgatccaccacggcggcaggtatggacagcggcggcatatggcccgtggcccggcacgtagcgcaatggcgcggcgagcgagcagaaccacagcggcggtgatttccgaatctccctcatctcttgcaatggcggaactgggtgcattggtgagaacgaggagactgcgatgcccgatttatactccagtagcgaagtccgagcgaggcacgaggagcgacatccccgacgaggtaatcggcgttctgttgcggctccccttgcgccatagcagtcacccgagaaagtaggagagggagatgatgaagctgtcagcgcggacccacatgtcagcgaggccataagtccaacacgctgaagaaattcactgacgcagcggggagaggaaagtggccacgcatgggg

SEQ ID NO: 70901 - DNA, 405 bp, Zea Mays
tgtcagttttatgctcttatttagtactcgatcttgaccagtgatatgttatgagattagggctcaaatacaaaaagtatcttgtaaatcttctatcatctatgcactctgtccaatctgtatccatatgattggttgcctgctttcacgtgtacatggtccgtggcatgcaaaaaaacattggtctatggtgtttggttggctacatttatggctggactaggtcacgttcgtgcagacaaggagctggagccaggcccaccccatacggctgttcggcctgtatccacgcgtgcaggctacgcccaaccgcctacattcactcctgcaagcaaccaatcatatggtatttgaatatgtacttaccatcaaagatggtgacatgagtaacttcgcgtgactttt

SEQ ID NO: 70902 - DNA, 567 bp, Zea Mays
tgaccatcggatcgtggttggagggacaggatgagagatgtgcatatgtgcacagccgtaggtatgtgcataagatacgctgccctcggccgaactggcctgcttgccaattcccctcctaggccatccaacgctcacttccacccattactctatatcatgtgggccccatttgtcatttgtttcctccacctacattgaaagtttgaatcgctctctcgccacggtcgttttagcctgtgccacgccgcagcgtccatccgtttccccaccgctataactgctggcagttttttcttcattaacggttgcagttctctcctccattaatctcttacagccgcctgttcctctcccatccttgttctctcctgtttgctctatgcacgtttgctctctgcatggggaaaacaccactgacccttcgcctcctcgcacctacgcagtcacctagcggagcatcgctgtgacgcctcatctcttctctccacgagctgttcatttcttctccactcaacgattgccatcaatggaggtcaaacaccactacaccatttctcctccctg

SEQ ID NO: 70903 - DNA, 431 bp, Zea Mays
gacgattcgttcggctctaagtcttagtgttttgagtctgatgattctgggagttcgattgcatggacggaggagtcttcagatgagggcttggattattttgcagcgttggatgtggctgcagcagagccttcgccacgagcggagggttccgaggagctaccgagcgtgagttctaggtataggaggcgaagggcggtggcgaaacggagagtgagtgaattgtcgcgaagtggtaggcattatcgtagtgagatggagagtggtcgtcttcgcgtggatgggactggtaagcgagaattgttgtcctcaccgattggggtgagtgtaggtgagggggagctgcgaaatatttttgatggtgaggaattgaggataatgttgttcaactacactgagatgggtatcatcccgaaggttgagccaatgta

SEQ ID NO: 70904 - DNA, 1135 bp, Zea Mays
cccgattcaagaaaaaaaaactgcacttgagttgagaccaagagactggtattattataaaatcatatacatatacctcataaaatataatcgatatgcttcggaaggtgtaagattagaaaaacacaaaactgttcacggtctgcgtgtatctgtattattttatccgtctctctctagcgtctggtcttgggctaccacggtctctctttgaaaacgtagttgatgatgatggcagtggcagcaaaactggcgtgtgcaaaaaaaaaaaaatccacaataatgccccacatgccctttgttttatactagaacagtagttattcgttggattattggagagtactggcatgcagtagtgcaggtcacgtacgtagttgctgtgctgtaatatctaggcaaataaaggacggtcaattattgaaactaatactagatcgactggccacatgcacgcaggttattaacaccacaaactgtcctcataaaaaaaaatacacccaccacaataatcccaaatatatagttgtactccactggccggcccggtgaccaacgtgcgcagagcattgggaatttgttaaagctatcaagcagcccgtcgaccttgaataagatatatggccatcatgtattgtaccgtcctaaatcatgctacgccaccagtgcgatgcgccgtggaggacaagtaccacacgccacagatgaatggatgatcggacgtacgtggcaactagctagctgctgctgggtaggtttggttggccaaagcgaaggttggacgattttgctgcagatcgaatgcacatctcatggcaacgccaagttttcctttggattatatgagaagaaagcgactttgtactgttcactccaagctagggtaaagcgactacaagttcagcatgacaataatctgcttccaaatgaattactccaaggactaacgacgtactgaactgaaaccacacgacaggagacgacaattataattattcattatttgggcgggctgtgcctatgtccctacacccactggccgagccagagcctgtgcacatgaccgggctctagctccggctccgccactggttctgttgtactacctccgtgaggggctccagctccgacttca

SEQ ID NO: 70905 - DNA, 600 bp, Zea Mays
tgcgcccggtggcaggccaccggacctttggcagtggggctcattcgatcggacattgttatgtcgtccttcctgccgtgaccgctaaattccaggaaccacccctagaatctctctacgcgcaactgcctagagatctcgcatgtaacgtgtgtgtccattactcctggttgacatggtagtctagttgtggtatttgataaccaaataaataaaagacaaaatttaaactgatgtttagaacacgtcacgacggtcgcgtcgcaagtcacaagtcacgcgaaaaatggaaaacacgatcgagcgtggtagcatccatcgccctttatttgtctcatgtgaagagtagggaacactcccacatataatttggttttctcctacctagatgagcaatatgagactaaagctcatgtcatctctacacaccacattaacttccttattgatttgggccacacactggtgggcctaattccaacacatgatcaaatatgtagcaaatgagacatcgaaccaaacatgccctacatacctcgtttgaggctatccttttggtattgagtgtttaatgattaccttggcccacttaactaggtc

SEQ ID NO: 70906 - DNA, 423 bp, Zea Mays
gtgcgctctgcctgtgagtcagccggggtggagatgacgaccgggtatcgttaatttggtgatcaacggtggagatgggattgggggtaccgttttgcgatgcagtgatccttaccgttgatcaaccaatggagggatcagtgctgatcgcggcacgggcgtagcgtaccggttcatgaaagttcataagttaatccgatccgttgaactctaatcggatggctcacgatggccgataccccttcggccgtgacaaattcttaaagagcccctgtccttttatcaaatcaaccctccgtcctgatacgtgtaaagaaattataaaacaggcccggaattttgcacagagcgccctaggcttagttaaaatagtgtccacagtccagaatccttgggaaattcagaattaatttagaaaatgga

SEQ ID NO: 70907 - DNA, 691 bp, Zea Mays
ggcgaaggggtatggatggatcctggccattggattaaaacctacggtcacgattagatccacccgtgcctaaacctgtacgcaacccaggcccttagatccatgatcatcatccgagatccggccacgtctactccccatcccaaacgcccaaccgtggatctacggttcggatagctttacagttaatcgttatcttccccacctaatccgagccgtctaatcctagatgaacagcccacgcctatcctcctcccccgacggctgtgaacggcggtgccagcgtgctaacgcggtggcgccattgccagagtagcgcagccgcgcgattctagtcgtcaacctcaaatcgaatgcgctctaccttatgctcaaagagttgcgaatcaacgaggaggcacttaccgacgaacggcggcccggagattcccaaccacgacgttgtagaggtggtactcgacggtgagaaattccggggtccccaccaactaatcccgcgcgccgaggcctccggcaccctccctgcaatctggcaaaaccaccagacacggcgctgaggttgcagaagcgatgagcgcttggttaaactacgccgactcgcggtggctctattctacaatggcggcacaggtgactgaggtgagaggggagtcgtgaggcaggataagaggagagagagacgaacccggtt

SEQ ID NO: 70908 - DNA, 510 bp, Zea Mays
acctaagggtgcagccagaccagcaccgcaagtgtgcaaaattgaagtcttttccaaaaagactctccgtgcaaaagtcgcctaagggtgcagccggaccagcacaacaagtgcgcaaaatcgaagtctttttcaaaacgactctccgtgcaaaagtcgcctaagggtgcagccggactctccatgcaaaagtcgcctaagggtgcagccggaccagcacaacaagtgcgcaaaatcaaagtcttttccaaaagactctccgtgcaaaagtcgcctacgggtgcagtcggactctccgtgcaaaagtcgcctaagggtgcagccggaatagcacaacaaatgcgcaaaaatcgaagtctttttcgaaagaccctccattccgaagtcgcctaagggcgcaaccaaaattataagtgcgcacaaccgaagtcgttcctaaaagactctccatgcagaagtcgcttatgggcgcggctgtatcaacgaaggcgcgcagccttatcatacaag

SEQ ID NO: 70909 - DNA, 483 bp, Zea Mays
tttcaataactgtagcatgtcaaattctacagaagcatctgtctgtttgttgagattctattttatggaacacagttatccagatttcccagctcaaggcctgtttggtttccatcttttcctagcttggctcgtatctggcatgcaggctctagccagctaggcttagtacatgcaggacctccttgtttggttgactgtttcactgaatcctagccatgattagctcatgcttggttgcctagattgcatgagattgaaacaggtatatatcgtaatacttatagcatacacactcaaggcattgaaaaatgtattgaacataattattatgtgtatgtgcgcgtgcgtgtgctgttataggtggcttcttttgctcgagaaaacaaaattcatgaagctacaagaacaatcttgtcagtaattctgcgacaggtagggtccttgtttatttttcttgaaggggaaaataaccattgctta

SEQ ID NO: 70910 - DNA, 1135 bp, Zea Mays
gcagcttgaatgggtattcgaatggtacactaactgaaaaagattaggtgtagcgggtagcgcacctcgccgtctgcgatcgggcacagtgattcgagctcgccgtgaagattcgtgcacgacttagagtagatataaccggaggggtgaaaatatcatgcaagggatgagtccatgcgctggcttcgctgtatcaattgtcctacgacccgccatgctatcgacgctgaggatcaccatccatctctgcggtgccacataattgtgtgtttcaccacgtcgctgtaagtcgtggcatgtagccaattaacgcattgggccattactccatcgtatgccacggtgaacacgccctagtgaaagatcccaccgccgtcgtgaacaccttcgccccaaatttgcaaagcacacgatcggtttctttaaattaagcactccactcgctccgcttctctgttacgcgcccaacccaccctcagccagcccctcttatgtaccatagctcccagtcaccggaatcccccgagcatggtcaccggcaccgccgagttgagccccaccgtggccagcccttctcaggttcgttcatatccctctggttcccgttttagtacacctctggcctgtagatactcacgctcttgaccaattgaacgctaccacaatattgttctgggaatgtcgtgttgccgcccggaaatgccgccgtggacacccctcacgtcggccgacaatcatgagctttcttcgcccaaatttgcgcaagcatcttaatcctggtgagacactgatgctctccctactcttcaattgaatgctaccgaactaggtgcatgggtacggcattactagagcgctggctccgtcgtcgtcgcgggcagacacgaattaggggccaacctgtcaaaataacctagtagatatgctcaagtagtctttggggtggtgcctgtgtgcttgctaccactggtacgggtcaccggagacgagccccacggccggggctaggtgttcgtccagtgcgccctcgggggtttgaacatgtgaagaaacaaaactagaggggtttatgtgaatatgtcagtgactctataaaatagtgtcgcagacacttaactagatatttgaatggcca

SEQ ID NO: 70911 - DNA, 797 bp, Zea Mays
cattaatgttgtcagagaaagtcaacctggacatgtgggtactgtactgcaatgaagtgcaacacgagccgacgacagtgacacagcgagatcttgcgattgttggctgcagtactacctagtagtagtactactaactacaatacacggccaccacccgatagaggcacacgctaggtgatgctgccaagtgtgacgaggcagacgggcgggcggggtccggggcagtaccgctactggtggccatcagtggtgctcgaccccccaatcatctactactaataatacccgtacggggggcggctacttagtcctcgtctcagatctgcagcgcaccgtccctttcagctgctcatcagccgcagcggcacgcaaatcgttccgttctgttgcactctcgatctcgttgtccaatagtgcagctaactctccgcactccgttgcgagcttgcgctctgcagctgcggcggccgagcagagcatagcagagcagggcgcgacgcgatcaatcggagatgccccggaccgcgtgtacgcccatccacttttcaaaaggtttaaccaccaacatgtatagtacaagccgagcagttggacgtacagctgatctgaatcctggtctatcctactcctagaaagagtagcactgtaggcgatacatgacctctgtgtgtgattgtgagcgtttcgcctccgattggaacgtcgcagacgcctcttttcgtcttcgtggagcctgccttttctttttcatgccgattggaggctgaggcagcagatgacggacggggacggcc

SEQ ID NO: 70912 - DNA, 487 bp, Zea Mays
ctcaaccgagggatggtggtcgtagcttcgtcgaacccgattggtgcacggggcgctgggaatttctcaccgtcgtggtgtgttgtcgtagaatctcgcgacgccatggacggagctccctgcgtcgcgattcatggtaacacgaccctccatgcatccgttatcaccacctctccattttgcacggaccagctcgacggttagggttacaaggtaccgccgctgctcaaaccgtgctgtcacggtgggggttgggagttggaagatgggctggtagccgttggatggggaggaaacgaataggattagatctgacaaagtgctggccctcgaccatcgatcatgcggtggatggcatagattagatcgagcccctttaaaatcggaactgtccgatcgaaattcggtggccagggctgtgtgccggttcaggatttaatcaggtgcatcggatcctgatcgagcagttctggttgctccataccca

SEQ ID NO: 70913 - DNA, 538 bp, Zea Mays
gtccggagttgtgtagccgcttagcttggttccgtaccctaagcctgcatgctcactgctctgggacggacaccctagtatttggaactatagtcctgtgggtccggcaacctagggtctggttctagagaatggacacacgtctcatggggtggtccagagttgtgtagccgcttagcatggtcccgtaccctaagcccgcatgctccaccactccgcgacgggtgtcctagtatttggaactatgattcaaggggtccgggcatatgacttggcttcccagactaaaatctgcaggtcctgttgcatgaatcaaaggatggcagataccagacgatgggtcctatgggtgtgctactaacacttcctagccgaagctgtgtacaggtccaggtcccagtccagactgcatcctggggccgggtcagcaactaattttcccttaggaatactggtatccatcctcgacacatcgagcctacatcccaggggggccaagtaccagggagaagttggtaacgctacacacagcaaggac

SEQ ID NO: 70914 - DNA, 346 bp, Zea Mays
atctagttgtcctgacaaaatgaacttaagtaggttgcgagcacagtcttcacgtgacacgtggggaggttcagcgactgcagatttagaggaactatcccttgcaacaagttcagtagttgcctaatatatgaatatatgttagtaaacaattgcataaataattatgttttttagtgtatatataggaaaaatatgagaatataaaacgacatgacttacatctgtcagtggggttttatcgaactgaggtgcaccagatacaggagtatcatgtgtaacagatttttgtccttcctgtaaacaataaaattattaatataaacgtaatgaaacataggttata

SEQ ID NO: 70915 - DNA, 418 bp, Zea Mays
catagacagagccaagtagtaggtagcatagggtttttgttttgagataattgctatagtatagggggagttgggtgaaggaaaacgttagagacatactgtatgcataggggagaatctttaaagaggagattgtaaaataaattagaaagtatagataaagaaaaatgtataggagaaattgttggagatggcccttagaccaacaacaacaacagctccttgaatacagtgagcgagactaggctattaagccgtgatgtgagtggcgagtacagtagctctcctagctagtcctagacggcaaaggagtacgcacagagctccacggtgacagccccagcacggatagctgaaattgtcagatagcctcgaaaatcatgattcgactcagaagtgctttaccagtgtacattgc

SEQ ID NO: 70916 - DNA, 950 bp, Zea Mays
gagttttcaacgtgttccatggtagggaatgtgtttgctaacactgttggaagaatcttggtatccagatttatttggtaccatacttcctaagttaacacatatgaaggatgtcatctgactggagctcttaagattcttctgataattaggatatggctgtgtgtctgtgacagaatccaaagttgggcctaggaatttcaaatagcaagtttgaaacgtgggccacacagtagcaggggttgcagatactgcacgctctgcacatatgcttggagttgacactaagcctggcctgtgattggagcacttcagacttcacatcgttgggataaatcacatatggtggctgtaatagacttgtaaaagttggtgggccagggtagggtattttacagattctgatcctggattcgtgctgactgcagactaatcggctaaggccaacaaattagcaggcagaagaaacggatatacgcataagcaccagcatctttgcccttccttgtatccaatgcaactcctacgaagggaattttccgtggcatttttcatgtccagcaatgatagatcgacagttccgtggctggcagtgcggctctctcctgtgccagtcatttttacgccgatgctgatctctgaaagggagaggcatccagaggtcaggtcagaacagaggttggcagctagctgaagcttcaaggcgagtccgaccaccgtagtggcgtctgacgtagaacctgtcgccatgcacttacttgtacaggctacaagtataggctcgaggactgtatcagattcggatccccggtgccgcagtggcgttcgcatcttggctgtctgccaagaacagcgcacggcaataatggctgttgctttcggtcttttacttggagtctagggcaccactgccgagcgtgcaaggttccaactcaggtgacgtgccgaac

SEQ ID NO: 70917 - DNA, 361 bp, Zea Mays
gatggtatgatggactctaggatgaggcactgatggttgtctttgtatttgctcctcatcattcacttgatcaagaggcacttcaccattaacactctcgtgttcatcttctaccacagttggcatcctttggggttgatgattttcttcaagacttggatgacttgaggttgatgggtttgcttgggtggaggatttgtcacccaccacctttgcacccacatcaaaaacctcattggtcatccacaaagttctttcctcatcatccttttcttgaggtctcacttcacctattgcaagtttctttatggcctcacaaggtggttcttcatttcctgcagtgccattagaaacatgccct

SEQ ID NO: 70918 - DNA, 2241 bp, Zea Mays
aagaaccatcagaacagagtctcagggcaagcttgaacctagggggaggggccctacattgtcaagaccaaaacatcgtcgaatgcttacaggctaacctcaccatccggcgaagacctagagcattcatggaacatagacaacctgtgcaaattattcatctagtcctaaggcctgagtgcctttgtaactctcgaaacaatgtcaatcaggaccgcactcttttcctcccaaggggtgaggtttttaacgaggcggagccatgtaatataataccgcaaagcccgccaaataaaagaaaagtcaaactggcaccacggccatgggtctcgaaaaagaccgcgggaacagccttcgacattcgacgcacaaaacagtcaccgcaacaggcagcctagacagccttcgtgtgtgacacgtccgagcaaaagttgcctaagggtgcagctgaacaaaagcacaataagtgcacgacaccacccacagggtgcgaagtcttcaacgaagacacgttcgagcagaaatcgcctaagggtgcagccgaacaaaagcacaataagtgcacaacaccacccacagggtgcgaagtcttcaatgaagacacatccgagcaaaagttgtataagggtgcagccggacaaaagcacaataagtgtgagagatgacacgtccgagcaaaattcgcccaaggttgcagccggacaaaagcacaacaagtgcgcgtcaccacccacagggtgcaaagtcttctacaaagacagcttccaatcaaaaaacgcccaagggtgcagccaaaaaaccaacacaacactcgcggtacgcgatccccactacataaacaacctaccgaacatatgccgcctatgggcgcaactggataagtgaaaaaagttgtgcaatcacctatcaaaagcagagtcccctacgacacgaacgtgattacaaatcgaagccaactcgcaataggcacaacataattacatagcacaatcacaaataaacaacaagcgaagggctcagcggcaccatcgcacaatattacaaatcacggcttttaccctcacaactctattgcaaagagggggagggcagtgttttcacttaatatcgcaacagagcaatgagggcaacaaaaatgtcacataggctcctccttcgaaataagacctgcctctcaaaaattgaacaacatcatcctcaactcttccccctcaaataggtcccgcaagtccccctctccaatgcacgtcccaaacgtcgacgaaagtagctcgcgctgaccaccacgatccagtcgaaggccaccccaaagacgagacctttccatacccattcgatgacgtcttccacttcgtgacgactcaccggtgctctgtttcgacacaaccaccctttgcctctgcgagtcagctcttgcatcagttgaggtcgccagcgcctcgtgagggacagctcgcagcggagactccaacgtagcaaaataatctaagtcctcctcaaaagattcctcaacccacgagaaaggactcccaaattcctcttcatccgaagaccacgacccaagctcagaccccttagacacatttccactaagaaacgttgcatttccagccatcaaaacatcattagtatcaacatcatcagggtttgcttgcacaggcccggacataggaacttgcgcagcaactgaccttcagtatcacaaaaagtaaaacacccaaaccctaaaatccctagcgcatctcttcaacccgcgccggagcagacaccgccgcagggtcttcgctggagccatcctgaggggctgaatgcccttcaactcccacctcttccatgccacccatccgagtcatcgagctctcaataccggagaagtcgtcaacttcttcttcattcgtcatctgcaaaggcaacaaaacatttcacagttacaaaaaaattatcataaataaatacctgcgccagtgctcgatcgaccctctcccggacggtgccatgaccatgaggaccccacatcctatcataaagcgccccagcagaccgctttaacacatcatattcaacatggaaaattctgcggtcgaagtcctcgctcgcccggtcgaagacttcgaagtgcctacatccttcgcgggacaaggcattcgccgcccctcgcaggtgacaagagatgcgtaggacatgaggcccatcatgatggacgggagtgactccagctcctcctgcagccacccaagaaag

SEQ ID NO: 70919 - DNA, 665 bp, Zea Mays
gttaggcaacttaaaacattatttctacctatagcctccaattttcaccatatacaaaacctatgcaataattaaactatacatatgtgcaagtatggtttttactaagtgtgtttctatctagatctattgtaaaggagttatgcaactaaaagtccaatcctatcaactagcccatcaagcaatctagtaaggtaaatgtagaaactaaagagcgatagagatgcaagcacccatttgatgataacatcaatttttaccgaggatcgagaagtatgcaagtttccccatagtccttgttggagccgctcgcgaggatgcccatgcaaggtccaatttctaggttagataacttcatggataacccctaatcttccccacatgcaagtggttctccaaaatagcctccgacaaacctctccccaccatattcactatcaaccttctagcaaaaatgtcgtgagcctcattccctcggtttacagtggcagaaacaccacaagaacaattggtgtattcttgcaagactacaagccccttcgagtataaacatgatgcacacaagcacctaaaattatgtggtacacaaatatcattaaacactagacctaaacctagatcaagtaaataaaaagtggtctaactaacataagtgctttgcaaag

SEQ ID NO: 70920 - DNA, 482 bp, Zea Mays
caacttttccctgtggcgctggactccagtgagttttactcactttccgcagcgcgtattccagggaccatagcggttatctttgcaactcggcgtggtcggggcctaggggtctccgggatcctatggggttcggcggcggcactaggcacctgccatgggcgtggtcggctgtgcccggttgtcgcaggaaagaagacactgataggtccgtagatcaggaagcttgcggatgggattgtctgacgtactcgtataacggggaaatcaatcctgaccgcagatcagactacctaggcatgggaaatgacttcgggatagctgggcgcgctgccgtagcatgtgagtgcgaggttgaagagtgaagacgccagggtgccccttgatcctaagatggacgactagaattagttgatatcataccccttcatcccagagatccctggtcgttcatctgcgaatttgtgagcacggttccaccg

SEQ ID NO: 70921 - DNA, 404 bp, Zea Mays
ctgaatcccacgatgggggtctcggacaccggtctggcgaaccgctatgccgctctcgtcaagagtcggcagcgaatccaggatcgctgtcctcaacccttggtcatcgcaaagcggagaaatgccctcgggaggaatcaaggactcagcaatgaaggactcaccagtgatccccttcaccagaagctctagctcctcccaggacaggtcggtgcctagcccacgatggacccgattaaggtcgttcgagccagtgaaccagcagctcaggcgtgccctcgcctgcagcggcgcaatccggcgctacaagaagtcgccgaccacgtgcatcgacgtcagaccaccggtcgacagggactcaatcctgcccaacacgggctcgaactctagccccaatggcggct

SEQ ID NO: 70922 - DNA, 691 bp, Zea Mays
gtttgttgagtacgattctgaagttggcaaagcatgttccatcataaaaatactcttaccaagatggttgtgaagcggtatgaattagcggacacatttgctgagatgatcgatgatgtccttcgcacggagtctggcgacccagacaatgctgcggaagcgcctcaaacagctaaacctccagatatatctcatcatctatcgtcaggtgaccttcccacattgtaatttttttttcaatttatgtattttagttaaccatttcttagttgtttctgtttaattactaaaaacttttccttacagaggcacacatccattccggtacccaaaatactccggacctgactatgccagcttcgcaaccgactacggagttgacaggcacccagtttgaggaaatacatgaaaagcaacaacaaatgtgtcgtgcatttgagggctgccctgatgatttggacgttactgcgcccatggagacgaacacacactcaaacgcggaaaagcaggtattatatacaatctcatcatggttacattatatgttaatttccaaattgcatccaaatattagacaaaaccataataatgtcaacaggattaccactttaatgttggcaataaaatgtcgagggacataaacatcccacatcaacatataccagactgcaacattatgagctcatatttg

SEQ ID NO: 70923 - DNA, 565 bp, Zea Mays
agctcctgacagccagatttgtagcgcctagatcatagattttttataagaacttgctaattcgtctatagcaaacttgtagcccttcataccagctacaattctgctatagaaacaacccccaatcgagcaacagatcctgctcaaattcgacccaaaagtctggccaatgccactggtgacccaatttcagtgagcaaagtgactgacaccacaactttggacatatttttctcccaactttgtataataacaatgcttaatccgttaagcaaagttgtacttctataatagctctagacttttgatgtgttgaccctaggaaaaatctttgcaattttagatctacagagctccaaagtcagcctggttcatcagttttcagacttagtcatgtgagaggaattgagtggctttttgcaaataagcccatttcacatcttttgacttggaaatcctgatatatgtgaaccatatgctttagggtaccctaattccttggtttttgcacttaagtccaaaagtgtgcaaaatttacatataaccccctagggtttcagtccag

SEQ ID NO: 70924 - DNA, 302 bp, Zea Mays
cttgaaagagagacaacaaggctccttaccaaaagaagatcctgaactgtttcaaaagcggtgtcgccaaccaggtccaacagttcaccagctatctgcaaagtgggagcaccatatgattgcagaaacaaaaattaaaacagaggcaattttcagtagaacgttaaaaacctcatcgcctgctttatttgataggagcactctgcacaaggtcattgtaagttcatctcctgagagcagggagccaccacttttagttatcaaagcacactgatctttcagccacctcagactcacagaac

SEQ ID NO: 70925 - DNA, 459 bp, Zea Mays
tccgatacatattgggctatctccatcttcattctggtccaccaatacaaaggattcagatcatggtacattttggtgcttcctggatgcatggagaatttggagagatgagcctcatccaggattttcttcttgagatccttgtttttaggaaccaccaatctgctttcgaaccacaatatgccctttccatcttggtggaaacatttatacttctcgatcttctgatggaggttctccttaataatttgcactcccttgtcactgagctaggccatgatgatatggtcttgcaaagttggctcaacggaaatgtgagacaaagcaccagaagaaatcacttcaatcttcatcttgttcaactcatcacacaaggtgtcaatgcgagaatccatcataacacagttgcattgcaacttccgactcaaggcatctgccactacattggcctttcctggg

SEQ ID NO: 70926 - DNA, 338 bp, Zea Mays
catttattaggtaggatatggttagagaaagtatagaatgaggtgagaaagattagggcaagaaaatcttccatcctggctggaggatcttgatgcatccggagatcggggttgtcccttatcctcccttgacaaagttgatcttcttcgatcttggtgtctccagctagggtttaggtggttttagatagatacatggttgggaatcataaggtaggtcaaacagtgtttacttgtacttttaggtttgaatcgatggatagacgacctttcaagtaggctaagtagttgtgtttagacgagttggcctaagacattaatttaggttaagatatgtt

SEQ ID NO: 70927 - DNA, 894 bp, Zea Mays
ctattgggcctagatgaagccctttgatcattgcttcgatgacaatgtcatctggcacacttggtgcttgagctcgaagctgaaggaaccttcggacataggcctaaaaatattcatcttgctcttgggtgcactgaaataggttttgtagtagcttctgctatgacaagatagattttgaagtagcttgaatagcttatgaggagaagttcattgagtttatactatgacaagatagatcctagttgaagagaagaataccatgtttgtgatacatttttagctaccatggtgaatgaatttgccatgaccgctgagttgtcgccatatgacggtacagtagcttcgtaactcgtaaagaactgctttgaatctgtcaagccatcatacattgatagttggggtggcctgtacaatggcaaccatggtatgtcttgcaagtctgctgctaaaggagaagaatcgtcatatgataaggcatcatgattatgtatttcgaagtgaaagtttccctgatgatatgagctttccaattgttcatcttgttgtgtcatgtgacacaatttctctgatggttcatcaatttgcgaccctaagcatcttctcctttttcttttcgacctactgatggatagcttctagatttcggatcttttggtcgaggtcatcttgaggtgggcccatggcctgtcttctcccttcgtgcctcaaggaaaagtgcttcttcaaactagttctaatctatggaagtaagaatagaaccagtggctatggatttcttcgaaggcatgacaaagaaatgcttgttgtcgtgaattcaccggaggtaggcatcaatgtcggttacctgcgttgattcctaaaaggagaccaagcagggcaacacaattaaag

SEQ ID NO: 70928 - DNA, 399 bp, Zea Mays
ctttcaagtatgttccaaggaaacgacgttgttcgaaagccaagacttagatatcacagctaaacttgattccctatgggatccccaaaatgtttatgttacttaagtcacttatgttaggtgttgctcatgtgtatgatactccccatgacacttatgtctgatgtgtccagtgtctatgctacttcgtatcagtttctgtttcaagtgtgtaaaacataagtgttcccagactgtatacgtatggtatctgttatgaacttatatggttttcatttccagattgtgagatggttaatcgtttttgcccaatgtttggcgtatttctattatcatattatatttaatattcaagttttatgcaacctatatactgtcgtattttatatacaataggtc

SEQ ID NO: 70929 - DNA, 787 bp, Zea Mays
attaggttaatgagaacatatctataacatagaaactgtgaagtgcaatgtgtcataataaaggtgtgatgctcacgacagactatgcacttatgaaagcatgttggaaccattttaagcaattacccttaaggattttaaagagacttaaggaacctccacctttggaacaaaggtagcttatcctcgttacaaggttaagctttaagctctttgacaataaaatcactccacctagttttaacaaaaatgcataaatgcaggaatgaaatttttgagaggttaaactaggtatgaagcagggatatgcatagcttccttttatacaagataaagcgatagtctcaacataatcaagacatagaaataggctccccctaaagatatgcatcaagaatttgaatgagttggatagatgcactcacttttagagacgaatagggagaagcattatatatcttgatcaaggcttataggatttgcaataaacaacttatgcctggtattctcacaatgaaaaagatttagaatacttacaaccacaccattgattgttttgaagatcttactgtccaagtaggtgttgttcttgatgtcttcctctttcatttgagtgtcctccctttgtagttgtctctttttctttccagacttattgaaaatactcaagaaagatgttaataacacaagggagtatattatgaaggatgatttctttatataagaaatataaacaattcatcatccacaagtcacacagacatgaagtaaaatccacaacattaat

SEQ ID NO: 70930 - DNA, 502 bp, Zea Mays
tcatacaacccatacttggtaataaatgttgtctttggaatgtctgaaggttgaatcctgagctggtgataacgtgatctcagatctatcttcgaaaacacgctggctcctcttagctggtcgaacagatcttctattctaggcaaggggtacttgttcttgattgtaacttcattcagagctcgataatcgatacacatccttctagtgccatccttcttctccacgaacaggacaggggtggcccaaggtgaggtgcttggccttatataacctttctctgacatctcatcaatctgcttcttaagttcaaccaactctggtccagataccctgtaggctcttttagaaatggggcggtgccaggaaaaagctctatgacaaactcaactttccgctcaggtggcatgcctggtaagttcttcgggaacacatctgggaattcggacacaaccttgataatctcgagtgaatctggctccttgctatcgatagccatctg

SEQ ID NO: 70931 - DNA, 615 bp, Zea Mays
gagaaagccgaagctacccaaaccacccccccttccaagtcaccttcatcgggcaccgcttcccagacacttgccaaagtgttgcccgaaaggcccttaaacatctatgccaaaactatagcagagagatctttgaaacccccccttcgttatttcccacccagcaacaaaaatacccccacctggaggaaaagatttcaagctctgtcagggagagaccccaccaaggatgaccccaccattgtctacatggccggatacctccacaccctcgatacccactacgatgatctctcctcccactgcacccacctaaactcccaggtggaaagcctagagcagcaagtcaaagagcttaagaaggagaaagcatctctccaggagtgtctcgacatagaggaaggcgaggaggccaacacccttgaagcctatcgaaccttaaagatggactatgataagaagcttaagaagctcgcccccacaaagaaaatccggaagaaaaccacgagccaaggatgccagacggagaggaagaagaaagctcccccagcaccagctcccgccaggatagagaatttgtccgatatcgaggacatgtccctcgctagccttgat

SEQ ID NO: 70932 - DNA, 466 bp, Zea Mays
caacatcatccaacacagggacgctgacgcatcccgtaaacagacttttacccatacaaaggccctgttacaaccactacggtatgggcatccctcccctagggttcgggcatgtggccaacccctcgacctcgatctcggctctcagcgggaaaacaccaggctcaagttaataacgcagtgcaaggtcgtgtcacccactggacgccaaaacatctcccctaggagcgcgatggcccctggctcaacaacatgtatcccctaggtgtataaatagggcagccatgactcctccaagggggcaggtgaaacacttggtagtttcctcctgtctttcggtattggcacttacatcaatctgttctagggacttgtggacttcccctatctcgcttggcttgtaatccctactgcaagcaccttggtgcgagtaatacaagcttcatccccctttgctagaagtagg

SEQ ID NO: 70933 - DNA, 424 bp, Zea Mays
tttctcaagcaaccccgcagctggagaaggaccacgaatatctttgtcaaccatctcaagcacctcagttgctgagtcccacattagctccaatcggataagggttatgtgatgtgaaccccatctagtgtccccaggtctagcaagactggtctgttgatgttttcatgtacccaattcaatctccaaggaatcaagttgtcgcaaaatgttgttatgatggctttcaaccaatgcatctcttcttttgcatgaagcgcttgttgtggtcacaattaaagagacatactcaaagaaatcatgaatagccgagcaacaactagaaacagaaacaatgactaactgcaaccgatgggcaaaacaatggacataaaaagcatgtggattttcatctaaaatctttttctgtagcccattaaattca

SEQ ID NO: 70934 - DNA, 558 bp, Zea Mays
gagtaataataacttcagccatgcctcgcttgtgagctgcgatgctgtttccagttccacttgtcccccttctgacctctgttcttcagcgctgtatctacacgagaagatgctggacgtacagtgaaaataactgtgatctggtggtataggaggggctgggacgctgggtccacgtgcacgttgcagcgagtatgaattcccttcaagagagaggcgtgagtgtgaacgcccgaacgggaaaagaagaagggcccggatggctcgtacagacgcgtacagtaccctgctgtgtgcgtcgtttcgcagtgacaagggcgcgtcagcatttctctgcatgtgacggtaccggtacctccccagtttgattgcacgggctcaggcaaggtccggagaccctgctcgtacgcttctagcccggttctttttccttatcgtgtcaaccactctatcgatggcgtgcgtccaaaagtggcagtagcggcaggtcgagccctctttaatggcgctgctgccaaacggtagagcgccacggacgaacggacactaaccatgatg

SEQ ID NO: 70935 - DNA, 316 bp, Zea Mays
atttttacagcatttattgcttttgtaccaacctgctgccacaaatttctctacctctgaagctctttttcttgcacacaagccttttgtagagcttcgacattctgccaatggctagagtccgtttgaccgctagattgactactgagggtgagacgacggatatagttgagacaactcctattttggaggtgatgagagagtcaggtattgttgagccaaaggctagagaggaagtgggtgttgtagagagaagcgactttgaagctgatagcgacgaagatgatcctaacattcttcgtccgaacaaacccag

SEQ ID NO: 70936 - DNA, 367 bp, Zea Mays
ttgatattttggagtccaacttaggataaatggtggttatggacatatgtcatggcaccttatctggtttactttagtatttcacttgataagtttgttgtgctttctatctataaagtagagtttatgctccttgaattaaacccaagagcatatgcgatagcactgcctaagtaatacgtaaaattcttgaatccatgtctttgccaacaattatgcactgggactagggacggatgacttattttgtatctccgctgaagtttttttcgataaaggaagctttattaatcttagacaattacatcaagatgatacaatagaactaagattactcccggcctctacacactaaggtgtacacagc

SEQ ID NO: 70937 - DNA, 1250 bp, Zea Mays
cctaagaatctatgcttttgttgtaatcatgatgttgaatgaggaatgtatcgtcaagggatcggtctaagggaagagtccacgttctccgtggtggtttggagttgggtagacgcttagcctagtcccataccttaagcctacaccttccaccgccatagaatagctgacttagtaccttctggattaagtacctggggatctagactccgtttagattcaaggggtcgacttcaaaactaggctcgacaaggttaacttgcaagattcagaggattatatacaataaatttaagtaaaggccctaagggaacattgctggtcctagactacgtctagggacgatccctagtcttatggaagcctcgaacatccaaagccgctagagctctacagaaaaaggggaaaaaagaaggaagctgacaaccacagttggaggtgttcacatcaggaaaaacctggtaggggtccggacccataaacctagtctaatcatatacgactcatagttcgatgaggtcactcgcataaacccggtctctggtgccctctatggcctcaggatctctacgcaagatctcgcatgtctagtaaatgaagaaagattttgccctcaatccagtctcggtgaaattggatccatcgatcatgtccttggctaaggtatgctttctctttctgccccccctcttgaggttctctgatttgttgttatcataaaatctaggttatataactagtattgttgctcagtttatgtctgcacttaatactgaacacatgcataggttgactggcacctgatctaaaggagacgtccacattctcgcgggtggtttggagctaggtagttgcttagctagtcccgtcccataagcctacaccttccgccgccctagaatagctgacctagtacttttaggaccaggtacctaaaaggcctatgcctcattcaaaattaaggatcggatctcataaactccacctgacgaaaaaccggttatataattcaatggaatgagtaaaacaaagctaggatcccgatggcacactgctaagcactactcctgaaccactctcgaataccttacgctgttaagcgctattcttaaaccatacttgggagtatcttcctagactaaaggtgagccccaatgtctgggataacctccaaggagccttagtggctgggggcgggaaaaagaaattcttgacttcccaaaaccggataagatcgggggcgataccac

SEQ ID NO: 70938 - DNA, 1196 bp, Zea Mays
gtcgttctgcagtctttatattccaactcacacctcgcatgagctccacctatgggctagtcgatgagtctcggatcgagaagaggttgcgccacaatggattggggtcggggtgaggtttgtacctcttcgaaccctctccttgttccacgggtgatcctgacgcccaccttccttgtcgcaggacgacttcagctaccttcggccgtgaggcatcaccttccatcgagtcatcgtggtcgggcccattagaccctctgcctcttccctatgagttccgagagtgccacgatgctttccacgcaacgctaaaggcatcgaggccgaggtcggtggatgcaccaaggcgtcctcaccttctatgaaagcgatggttgtgcaagtcggtgggctagtgtataaaggttgcttgttctcatggagggtttcatcataacgaacggtcggctcaaagatgtcaattacaaaaacccttggacttggagggaccatccaccgtccggacgccatcttcgttggggcgtccaccatttcgttatctcatcggagaacatggtttagctcaaggccattgaatttgtcctcaagtcgtcgtaccttcttgtagtacgctgccatcctaggatcacggcactccgaatccttcattacctgccctacgacaagctggaagtctccccggacgtcgaggcatcagatgcctagctcaactacgatatgtagaccgtttacgaggacctcatatcctgccacattgttggaggcttggaggcggagttgaacgacatattgtagttgatctcccgaaggcgagatgaagacgaggccaccgctagccccctccttcatcagtgagccatcaaagtacttgacctagtacttcccctccaccggtgtgggttctgtttgggttttggtgcattttgcgaggaagtcgacgaggacttgtaaattgattgcggtcgtgggacataggagatctcgagtcccatcaactcgagggcacatttggcgattctttcggcgtcctatgggttatggatcacttcccccggggggaacgtcgttaccacggtgacaaggcacatttcaaaataatgttgatccacttctccataccctttttgtaaccaccaaggctacgcctattaaaatattcctttttgagtgtattagctttattctttgcagaaaaa

SEQ ID NO: 70939 - DNA, 637 bp, Zea Mays
aatccataaatacattgttcatcagattcatgaagaaggctggtgcattcgttaggccaaaagacatcacagtgaactcatacaacccatacttggtaatgaatgtcgtcttcagaatgtctaaagatcgaatcctgagttggtgataacctgacctcagatctatctttgaaaacatgctggctcctctcaattgttcgaacagatcttctattctgggcaaggggtacttgttcttgatcgtgacctcattcagagcttgatagtcgatacacatccttctagtgccatctttcttctccacgaataggacaagggcggcccaaggtgaggtgcttggcctgatataacctttctctgacagctcatcgatctgcttcttgagttcaaccaactctgctccagatactctgtaagctcttttagaaatgggggcggtgccaggaagaagctctatagcaaactcaactttccgctcaagtggcatacctggtaaatattctgggaacacatctggaaattctgacacaaccttgatagtctcgagtggatctgcctccttgctatcaatagccatctgataacaactccctttccttggctcaggtgagactaactcagctaccacttcttctcc

SEQ ID NO: 70940 - DNA, 708 bp, Zea Mays
gggtgaatgagagccacaaaaatttctcttctcgagagagcaccgtgacttggttcccaacttcaatctaaccccacaggactcacaaaatagcgtagcgttatgcagatcaatccagtgtcgattgattggaccaaaatgctagaggagaaccaactcaagtgtttgcaaaaaaaactagaaggaaaactaaagaaggacagtgtcgctttgatggccggtagtgatgggtgggcagcagtgccgcacctcaaaacctgcacagaatcctctcaaatttcacaagtagttaacgcatagggaaagaaggtgtttcgtgaagtttaattaagaacaaatcaaaactacacgaacatattcaaaatctccatttgattggggttttcttggggttttctcaaacgaactcaaaacaaagtgaactcaaatcacgaccacaaacatctcaaacctggtgtttgcagtgatcaataaaggatcgagttccaccccaagacaatcctaacacaaaccacaacttaaaaaaaacaaagattctcgctagaatcaaaagagaaggaagggagacaaaaaaacaaatcaaaacttcagcaagaatgaactaagaacttgatttgaacaacgctggaccacatgtggttacgaccacacttcctcaaaaagtatcacatccgaaaaagtaataacattaatctccatacctggacg

SEQ ID NO: 70941 - DNA, 687 bp, Zea Mays
tgcttaagagtgtgagctcagttgttaagaaaaatccagagataattaagctcaaagcttggctgtcaggttggtttcattctgaaattcagatattcagtgtaacagagtcagctttgagtgtgaatttaaccatgatctagtgatcaaatgagcttagtcactatagtcgatttgtagctggtatgtagcactacaactttgatgtagagactcgaggatgttgccatagaaatttgggaggaaaactgtcctagaacttggctgtcaggtgcactgaatgggctatcccatggtacagtgcctgaaccggatcagatcgccagcgcagggaatcttcaccgccgacgacccttccgccgtgattcgtgtcgccggcgtcaagattcacgctcggggtaagtcgataacgtcgcggggtcaaaatatcctcgccgtcggtgagctggacgccattccggctcatcgccgtgcctcccccttgctcactgaacccgtggataaggttctcaccgccgttagccatcaccggcgtccgccgcgtgtccgagtctttccaccgcgtcgccgtgactccctattgctgtcccatcgtcgctggggaggttgccacggcggtggacacgaattcaccgcacccgcgttcttccttatctccggccgcccacattgtccgctcaaattaag

SEQ ID NO: 70942 - DNA, 762 bp, Zea Mays
aggtgaagtagccaaagaaggtgaatggttagaggagaatgcttctgatgccgagggtgatgctattgtggaagatgagtatgatctttggtcgtccaagcctagctacattgacatgggacggtctctcataaacccagtgaattaaaggttttgaaaatgcttggatgcattgatgacaaaaaattaatgtggagactatccctgagtcacaggaagatgaaatcgtggtgtttaagagctttttccaggcaggccttcagctgccgatacacacaatggctgctgaagtgttgaagaagtacgaaatctacatgtaagagttgacaccaaatgcaatagtaaggcttggtgtcattatatggactgtacaaaaccagggtgcacgagccgacaccaagtgcttctgtagagtgcataaattgcactatgagacaaaggcgagaccttcagataatttgcacaacaactttagatgctacaactttgcttaccaaaaggattcaaagtttcatgtattggcctactagaccaaatggccaagtgagtgggctaaggaatggttctatgctaaggtagacacgaagaagaggaaggagtttaaagatatagtgaagaggccattgaagataggctttggcttaaagagacccatctacaacaagggcaaaaccgtccaaacgactattattgtgttcaacaatgtggtagacaggattgacactcgagatttagtgcaagaatttcttgcaaacatggtgt

SEQ ID NO: 70943 - DNA, 330 bp, Zea Mays
cttgattgtgaccttattcagggctcgataatcgatacacatccttcttgtgccatctttcttctccacgaataggacaggggcggcccaaggcaaggtgctttgtctgatgtaacctttctctgacagctcatcgatctgcttcttgagttcaactaactctggtccagatactctgtaagctctcttaaagatgggggcggttccaggaagaagttctatggcaaactcaacttttcgctcaggtggcatgcctggtaggtcctttgggaactcttctaggaattctgacacaaccttgataatctcaagtggatctgctttactgct

SEQ ID NO: 70944 - DNA, 381 bp, Zea Mays
cacggcggtcggcgcgaacccgagcatactgctcaccggcggcgaagttatccactccggtgatatttccagcactgtaccatgggatatgttcatcagtgttcctgacagccgaacttgacactaagttttctctcaatttccaatgatcactcatgccaagctctgcagcaaagttgtagagcaatatgccatctacaacattgcaatatggtgttgtcacaaagagccattagatcatactcaaaattgggcttgaagttgatgtcagttcactgttagcctgatttcagaatgtaagcagtctgacagcctaactttgggctaaattatcttcaatttattcttaacaactgagtttacatccctaagcaaagttgt

SEQ ID NO: 70945 - DNA, 294 bp, Zea Mays
cttcgcccatgcctcaaatcccggtaaatcacgctgatgttgttcactagggcgtctgcgtttagttgtttttgtgggtgattcggaatgctagggtgccgtttggccatgccgccgacaatacgccgcggtggcgcctgtgcgccatggtggttcgagtagcttggggggagagagtgaggtgatgggcggctggtgaccgttgatcttgtgactgacggccagtagtcgatcctgaataccgtttgagcagggtgaatggtggtcgtcaatctttgatcgggtgggtctgtg

SEQ ID NO: 70946 - DNA, 1014 bp, Zea Mays
cctgctctctggtcttctcgattcctccggaatggacttagcaaatttggattttcggtcggggatcgtcttcgaggattctcttaagctttgtctggcctcttcggtttgtcctgctcgtccgagccttccgtcgtctttctggttggtggtttcttttggaagatgcattttcaagctgaactcagattctgttggctaccttctccaagctgccctgggaggttttgcggcaggctttgaggtgcatcagctttctgattgggttttctgattttcggtttcctcgaaggctgtgggttttcatatctacaattctaagtgtatcgatcatgcggaattcagagcctttttcaatctttggaaccgtggtggccctaactggattcatgaattcaagaaatttattggtgaggagaatgcttcttggttgactgttcggggcaagaagagcttatcttatgcagatattgttaatctccctctctctggtgctaatgcggtcccgatcctcagcaaaaacaagttctcttgcggtgttgggcatccagttcagactagaatttctgtgttcaatcgcctgggttcttctattcgtaattcaggatttcagggatcgtggttctcgtctcctcagcgaaggttagggcctactggtcttcggattccgtcgactgcgaagatcaagccaactcccatgattgctcctcgtcggggggcgtcttcctcggtgattcactctgatcttaatggaggtgtttgtggcagcgggcttcatgggcgttcaaactttcaaaattcaaaatttaattggactaggcctcgcaaccttcagtggcgtcccattcgaaaacgggggcctattgggcctccggttgggctgtcagatgcttgtcgtcttgggtcaccaggtgttgacccacctgcttttctctgccaattttgtaaagcgaaagggcacttgaaattattttgtcacttaaagaaatcatctttcagatttcctttaatttt

SEQ ID NO: 70947 - DNA, 432 bp, Zea Mays
catgggcctcctgaggggttggtggaaatggctattcaatgtttagtaataccagctttgaacagtacacatcatataccagcagcttcctgtaatatgtcaacatgtaaatttgtggcagaccgcgagtttctcactctaccttcttttgatctggtggttgggaagtattacatttttaccaaacagcctccatggccaccacctgtgcagtttgtgcttcatggtgggattgagcaagaatacatatggcgagtggaagagctattgtttcaagttgctgtacatgaagatgatggaaacatgataattcagtatatgcaattgcatgatgtgttctacagattacattggcttgacagttatgcaagcggcatgtattacaactacagagactatacctgtttgcagggtatttggcagctgaaaggg

SEQ ID NO: 70948 - DNA, 563 bp, Zea Mays
atgcatgcacacctgcagctgcatgaaacaatcattaatggttcaagcaggcccataaacaataattcgatttggatcctaatactagctagctatatatccttgtgattagtcactttgaattgatgtatatgattatatccatttttattttatttgtttgttggatggttaagcaactaatattatcgggatgaattatccgacaaatatccgttatcaacccgggtaatatctaatatctgtttcttacccgcccaaattattacccggtcacgttctgtatccgtcccgaattttaactacccgtacctggtcctgtatccgagagaaatacattagagtaggatatgggatgaccctatatccgcctgtatccgtcccgttttcatccctagatttcagtataatgcaggggctcttttgcaaagccaacgaacgaaggggtgtcgcgggttctcaggcgtcagattgagtacggacggactagattagaccagtcatgcttaacccacccgctatcgctctcagccgttggatccaaaatccacgctcaagatcta

SEQ ID NO: 70949 - DNA, 441 bp, Zea Mays
gtagaagcaatatgtttactttttaaatcattttaagcctaatctcacatcatgcaagcaagaatcgatttaagcatactatgcctgcccatatatccatccaagcacattctatacattatatcatcccatcgaagaactctctctttttttaattatactatgcatatatatatccatgcaataactcacacaatctgcatctctacctagacttcacacgacgtaactatttcatacttacgcaaacacgccaagaccagaaaacatggcttcacaacaatacgtactggcctattcaaatatctctcgctatctctctgtttcagcccacgcttcgcatatacaataacaagataactatcacaaccactacatatattccctcccaccatataacataattaacatggattgtgaaagagctcaccataactaaac

SEQ ID NO: 70950 - DNA, 649 bp, Zea Mays
ataacaacacacgcgctatcgtatgcggtagtgcaaaatccacgtcctccatctacatcatgcatattagcaagttgtagcctatcgcacaaaccagtgtacttcaaagatgtagttacttttgttgtgacatgtgaccttgatttttgtgcacctcacgatgtgcggcgatttgagcaacagtttacgcaagctggaaaggaaaatatatccatgaccacgagctactcatttttgcctatgcatgaccacgagctaccagaggtagcaaagaaacagatccactaatccattatcttttttatcgactcatgtcttagactgattctaacctagtctatatcgatcgataacgtgttggtgtagtcggtcgatacctaacaccaatcgaccggtaccgatcaatttccggctgattggttgtctgcgcatactcatccaaatctctactatatattaaggcaatagtgtagaccatgggcaatgcccccgctcgccctcgccctcgcccaacagccatggatcagccccgctcgaccccacccacgtgcgcgatcctccactcgccagtacctgccccatcccagcacacacgccatcctcatccgccacatccgcgcaaaccaaccgcatgtcgtgcgtatcgggc

SEQ ID NO: 70951 - DNA, 442 bp, Zea Mays
tacgatgaacggtccttcccatggtggtgacagcttgtgtcgtccctcccccgttagaattcggtgaaggaccaagtctcccactacaaaggatcggtgccgcacagctttgtcgtggtagcgcctcaaggtctgctggtacctggccgactgaattactgtgttcaatcgttcttcttccagcacatcaatgtcttccagcctgtttgcttctgcctcaattatgttttcaaaagtcaaccttggtgccccgaagatcaaattggcaggcaacactgctttagacccataaaccatgaagaacaggctatttccatgcagagctcgactaggttgagtttgtaggctccagaccacgtatggcagttctctgatccattttcttgcaagcttttcactcttgtcgaataccttttttatgagtgcttctattatcatttcg

SEQ ID NO: 70952 - DNA, 747 bp, Zea Mays
cggggttagccggatcataaccctcatcatcactatcaaccatttcatagtcaacaccatcggaagacgcaagtttgtcattaatgtcattgcctttaaggattactaagtcattatcattttgcacctcatcatcctcctcatcaacaaccatttcaatatctacgtccattttgatatcttcggttaagtctatctcaaatcgcccttctagcccatcttcttggaagaactctccatcatatgtgttcgggtctaagttataatcttcatcgttaggaacaggtaacctcctgcacggcgataccttatacacaacattccaacccttaagatgttctttcgtttggcaagcatatgggagataatacacttgtgtggcttgttgggccacgatatagacatcgtctcctgctaaggtggaaccttgtcgaatttcgactatcccaagattagaatgtgtccgtctcgtcacttgagggtcaaaccaatgacatttgaatatcactggagtaagaggtttggaaccataaaaattgagctcatatatttcttcgattcgtccaaaataatcgacatcgtcaaggccgggcaaaaagactccagaacacgttgttttccgattgggccgacttttgtcgtagtttgttgtgcgaaaacgatatccattgatgtcatacccagaatatttcttgaccctataagcaaagctattggctacttgtctcaactcggcactcatagacg

SEQ ID NO: 70953 - DNA, 548 bp, Zea Mays
aattgcctaacacgaatgagttcatcctgggactcttgcagcttgtaacgatgattatccaagtctgccatggtaaagcgatggctcctctccaagatagtcaaagaattgttggcgtcgcgatacaacctatcaaggttatcgtgagaagctgcaagggcacatttttcttcctatagacaagaatcagctctcaaatacccagcagtcaataagaacatagcagagaaagtcaaagcaaacttacctcgttagccaccctttcagagtcaagctgagcactaagagaggaattcaataagttagcgtcatctaaagaagcagaaacttgagccaggtccatctgaccttgagagtacttctcctcaagctcagagtactgtcggaccatatctagcaagaaatggttgaagaaggacactcagtaaaaagcagactaatcaagtggccaaagaggaaacagaggcactaaccagcatttgtcatctccaactcagatacccgccgctgaagtagcactggattccaatgcattagagacaaagctc

SEQ ID NO: 70954 - DNA, 387 bp, Zea Mays
ctgctttctctctagtagtttcagtctcaaccagtctcgacgcattagttctcactttttaaaggaacaaatgggagaatctacttccttaaaagatgacccattctcaagcgctctccgcgatcccgctcttcgcccgccctacggtcgacgcgtggtgccacgggcccgaaactttcctttgattcaacggagcattgcgtcccgtaactattggcgtccgctgtccacgtcgtcccgtcctgccgcgccacacccgcaccccaaaccctaaacatcatttcagtattttggttggtgtcctttatgttgcggcgcgtactggttaggttgttatttagtatcgcattgtctccatgttcaaacatggtctactctactaacttc

SEQ ID NO: 70955 - DNA, 1436 bp, Zea Mays
gaaaaattagaggctaaagcaactagatcaaccaccatttgagttttaaaaatatttttgagatttaaacttgtcttttgattcaaaaccctcttgatatcaaagagatgtcctcttattgtgaaaattattctcttatgggggagaaacttgttgtcggatatcataattaggggtacccagattatgtccctaaagcatacctcacacctgagtaccagagaatcataagcctcgagcccggcctcggccaaagatctcaggaccacaaagcatgcacattaaatgtgattgatacaaatacctgctccgccaatgacgctgcaatcaacgaaggacgacgaaactgcagccaaatctactttcaccgcccacgatgacgcacgtcgcgaataccgcgcattgttcccacgctccggtcactattttcaaaaactccggataagacatacgacgactagaaacagtctcaacctcgctcgaagtcggcctcgataggaaactccgcctcgcccaagctcagtctcggccaactgtcctggcagtggcacattaaatgccaccaactccccgcgaatcccacatgaggccactccgactattgttgtgaccactcccagcatggctacgtgcccatgtgcagacccgacctcggtctcaggagaagtctccatctcgcccgagtatgccctcggccagcaagcatcaacagaagaacatacgacgccgtcaatcctcccgcaaaaaccgctggctacagaaaccataaggatggtgtcaagtatgctttaaaccatttcacatgacacacgagccggattaccaggcacttttcgtcatactagtcgttatttcaaccagtatgactcagacatcttgcccacaggatgggctcgagcacgcatccgagccccgaccctagcctcggctctctgcttggtcaaaatacgggatataggaatcagacttcctcctcctgattaaaggcaatagccaggacaagggccatcccgacggccatactactacaggagctcgggctcgcctcctctcaacattacgacaacccttgtacttctaggctccctccttgcggctataaaaggaggagtctagggtccccaggggacagaggacaacacttcatcatttgccctctaccttcgatattggcactagcctcaatcacccacagagacttaggatccactccctctctctcgaccagtttgtatcccgtactatgagcacttaggtgtaagataatataagtctcacccctctcgctataagtagggtcttctattgcctgaaccaggataaatcttctgtcttcttgcatcacccatctggatcgggggcacgtagcacaaatacaatagttggttaggacccttgggtaaaaacactgacactagtcttatgagaaaaggggg

SEQ ID NO: 70956 - DNA, 993 bp, Zea Mays
gtcttaagtcatcgccaacttaagttgattgctctgttagtagggtatagtggtcaccctaagtcgagtaagcgtgcagattggtaatagatagttcgagtaccgttgagaatgagatctttttattgatgatgtattttccgattacagaatacaatgctgccccgatagcttttgaaatctagctaggggtaaaactttctgagatgctctatattccatgaattccctatttccgtgccatccatctgagtaagccgatatgatcctggccgagtgacttctgctaccatgaatggctcttcccatagtggcgacaatttgtgccggccttcccccgttagaattcggcgaaggaccaagtctcccactgtgaaggattgatgtcgtatggctttatcatgatagcgcctcagggtttgctggtatctagctgactgaattactgtattcaatcgttcttcttctaatatgtcaatatcctctagtctcgtagcttctgcctcagctatgttttcgaagaccagccttggtgccccaaatctgaggtcggcaggtagcacggcctccgatccatagaccatgaagaagggagtgtttccatgcaaagctcgactaggttgagttcttaggctccaaatcacatacggcaactctctgatccactttctcgcgaacttttcattcttgtcgaagaccttcttcctgagtgcttccaatatcattccattagccctttctacctgaccgttggctcttgggtgtgctactgacgcatatttgatctggatgcttctttgttcgcagaagtcaaagaattcagagctagtgaaattggatcccaagtcagttataatgctattcggtattccaaacctgaatattatatcttgtatgaattccactgccttagctgaaaccagagaagcaatgggtttgtactctatccatttagtgaatttgtcaatggcaaccagcacgtgagtgtatcct

SEQ ID NO: 70957 - DNA, 539 bp, Zea Mays
caaattctgtaaaatacaggggctgcagggtaagaatatcaagactaagtgtatagctgtaatggacggcgggttgttattctaaaacttcaggggctcttgtgcaattttgttccgcgaaggggtacgggtgtcgttggaccgttggatccacagccgagggcacgtattagatctagagtgcgccgaaacggtacgctcggtggaacgtcggatctacgatcgagggttagactttaatgaagcgcgatcactttcagcaccgtcccttgaccgatcaacggccaagatttcaggcgcaacagggaaaatgttaacctctaatcgcagccgcacatcacaggatgagcggcggaaacctcatccccaacccgacagcaccccagcggtggagctcagctccccgcggcggctggttcaccggtgagcacgaaatccggtacctaaccgcccccatctagaaattgattggtacaagaccgagaggggattaaggcgaatctgcagagaggggtctcaccggagttagcgacgcaaag

SEQ ID NO: 70958 - DNA, 807 bp, Zea Mays
cacgacgccttccatgatgttgcgcccgggtaaaaaagcagtttgggttaaactaataactttatgtgcaacttttgtcaatctattcaaggcagcctttgtgaatattttgaaactcacgttcagaagacatataggtctatactgttctatcctaattgcctcacttaatttcggaagcaaaattattgttccaaaattcaagctgtgcaacggaagacagcccttactaaagtcttcgaacagagccatcaaatcatccttgatggtttcccagaagatttgataaaattctgtcgaaaaaccatccggccctggagctttgttgtgctccatctgaaaaattgcaccctttacctcttccatggtaaaaccagcagtaagactatcattctcctcatccgatatttgaggaatatcatctattcgctcatcattaagatgaaaattggaatcctcagccggcccgaacaggtttttgtaataagaagtgatgtgtttcttaagctcaacatccccacttattactctgtccccatccagcaatttatagattctcgtcttcctgtgtttaccattagccaccaaatgaaagtatttcgtatttgcatccccttccaataaaccttttgttttcgctctttggtaccatttaacttcttcttctctcaacatcgcagctaatctgttacggagaaagtttctcatgtctacctcttgagtggagagaagacctgtttccgctttcttgtctaagatatcaagtcgacccaacacctctttcttttcttttttattggatccact

SEQ ID NO: 70959 - DNA, 732 bp, Zea Mays
taccgatcaaacaccggcgcacctccttaacacttctttggcacccaggtctccgcgtaggcgtagaacaccaggggcgatgatctatctctccttcgacacatcgttcacacttgcagggggctcaagaacctcaccaaggcctatactcggtggaccaaggggacgaggttccacttttatgcaccggggtgggcaaagcctaatcatgaggggaagggtttggttgatccgatcaccccggtaaacgcgatttgttgagatactgaggagattgacacggagttgggaggggatgttgctgacaaactggctccacaattcagtcggcgaacacagaggattcacgtgcatggggactggggagtggcttggcgagcgacgcttatgggccagagggtgtccgagtcagggcgtgtgagaatgccactgacgcagcggacccacacgtcggtagatgcacgaggctaggcacgcgcgtagggataaaacaagtgtctgacccacggggatgggacccactagtcggcaagcctgcaagtttggatggcgggtgtggcctggtaggctgtcgtgattgggccgagcgggttaggggaagtggaagatatctgggcctatgcaggcttccgcctttttctctttttttctatttcttatttctatttctattttaattttcaaattggaattcgaatctatgtttaaattcaaatatactgcagcaataca

SEQ ID NO: 70960 - DNA, 433 bp, Zea Mays
gagagcttgtgcccttcagcgtggtagtagttgggacaagagtctaccttatgctgagttcttatgccagtctgaagatgtcactgttcgaggctctatatggcaggaagtgcaggactcctctatattaggataagactagaggaagacagttctttggacctgaacttattcaagaggtagaataacaagtccgtataattcaggagaatttgagggtagctcaaaccaggcaaaggagctacgctgataatagaggaagaccaccggagtttgaggaaggtgatcatgtgtacctcaaggtgtcaccacttcgtggaatgaagagatttaaagtcaagggcaaattgttccctcgctatattggaccattctgagtttttaggcaagttggagagatggcctatcaactcgagctacctgataatctatc

SEQ ID NO: 70961 - DNA, 304 bp, Zea Mays
agattccttgcaagcgggatataagtgataaagaaagactgtgaaactcaagtttatcttcatgattgcttgaaaggggttaagtgcaaccctttgtccaaagaggacaccacaacgtggatgtagccttgatcgaaccacgggataaaaatcattgtctcacttgtcttttacttttcggcgattttctcactttctaactctcaacttcaattgtgatattgctcttagtataattcacatcttgaaagagcaatcaagtgaagagaaattttctctcttcttcttgtctcaaacttggttt

SEQ ID NO: 70962 - DNA, 406 bp, Zea Mays
cggaattttaagtatgtgagaaaggccgaaaaactggagcatcacctttgcaagaatggtttatgcctaactatcttgtgtggcgctcacatggagaagtagagcaaaatatcacagagtcagaaagaattgatgatgatgaggatgatcagatggatgacttggtggctgatattagtagagagtatccaacattggcctcagaacaggctacaccagaggaagtgcaggagttctataagcttcttcacgcgttagaggaaaagtgcatgacgacaccactgtgaccgtgttgcaggtggttacacgtcttatggcaatgaaggcaaagtataacttctcgaataattgctataacgatacaatcaatctgattatttatctcatcccatcaaaccataagatg

SEQ ID NO: 70963 - DNA, 494 bp, Zea Mays
tgaaggccgaatcggggcaccggtggtctaaaacttgatctaaagcgagctacatgatgtaggggcaatggtgaacatgctagtggcatacataccgcgattgagtttagcagcgggccggcgacggtgtttagtggtgaatcacattccgatgagaaattcccacgcgtgcagaaggacctttcagccgattgatctccagaaacttcccaagctccccggagacgaaccccaaccacaagcacgagcgagaacttcggtgttcttgtgaatccacagcggcagcggcgcacgacttctttggtcacacgggtagctaggtaccgtggggaggagacggaaggcagggctcgatgctcgattttatagtctctcctaggtcagtttggtgcttgaacgagccgcccggagtccgcgcgaggattgcagccgaccctgacggaatcgctggttgttgcgacgatgccgcaggggtgatgacaacacggtcccgc

SEQ ID NO: 70964 - DNA, 366 bp, Zea Mays
attaaagattatgatttgtctattcattatcacccggggaaggcaaatgtggtggttgatgcccttagcaggtccggggttccaaaagtggccttgcagttgattgctgatctggaccgtttggggatcaccttgtgctatgtcggcaccgctagtgaggagactcatatgcttattcaatcttccctcatggagagagtgcgtgcggctcagcagcaggatcgtttattgcaagaagttcgaaagagggttggcgatggtaaaccctgggagttctccatcgatgagaatgatttggttcgtttcaggggtcgcctttgtgtgcctcaaaaatcagaggtgaacatggatatattgagagaagct

SEQ ID NO: 70965 - DNA, 594 bp, Zea Mays
agcgggatgaagccatacccatgcgttcttgatgccccaaaacctagatctagataatagtaatgccgatattaccaggcctggctaatagctaggtagtgcctagtgtagtgcctatacctagctacctgaagaaaggctatgtaaagctaccttttttttttgcttcttttcatcgggatatataggaggttttgtcttgcagcttgcacaatgcaaaagatcgacacccaccggacaccgatgaaagcaacaagcaagcaagctagctacgacaacgaccgaggaggacacatacatgcatgcatgcaaaaagcgagagaaaacacggggaaaaaagagcatcagggctgggccacacgtacatacagagacagcagcagtacacgcgccatgattcgatcgagttttcgtagtacgcgcgtacgtatttcgtttcgttttctccttgttgtcaccttgcgtcgttttggcggcccggcctgctccatgcatgcacgcatgctaccatatgcatcatatctctccgacgctgtcgtctcgacgtgtgcgcgcagtggtaagctacgacaccgccgccactttagggtttct

SEQ ID NO: 70966 - DNA, 453 bp, Zea Mays
atatttattcctcttgaaatccgatcgagggaaaatggccccgtgggggaggggtgtgtcctgcattggttgagcaaaacaaaatgagagtttcagcatggtgatttttactgaggacaacaaaacttgatttaatgggacgtgtgttgcttgtgatgtcaccgaggtcggtccactatgttgtcctccttccctcagcccctattgtggccgacccctagttttgctgccctagggtcgggtcacaacatgtatcaggtgtgagtgaggacaccatgtacttgctaagggtagaatcgacgtagttcctcgatattccacatgttggcgagcatcgtgcctcgtttgtcttccagcttgtaggtgcccagttagagaacttctccaattacgaatgaccctttccatggcgatgacaacttgtgtcgatccttgttgctctgcaccagccta

SEQ ID NO: 70967 - DNA, 505 bp, Zea Mays
cgccgctatccaccgccggagggtgctcccattggcagagcggcggctgcggctttcgtagatgaagtcgggggttgatttggagggttcacggatgtcctcgacctccctctccgccgacgacctcctctgacgggtagcgggcacggtagggaggctggacgctggcgtccttaaccaaccctcgatgcgtcccgaccatgggtatgtgtccctggtaagtgtccgaccctccttctattttgcgtcgtgtttcttacgtctttagttcttactgttgggattttcgttcgtccctaggggttgaggaattttaaactctcccggccaccggtcccggaggacgcgatgggccggaccgcgcgtaggctcgccgcggagaaggacacggaaaaggcccgagctcgcgagaggatgcgagctcgggaagctttggagaagcgtcgtcggaggcaagcaagggatgggctcccgttggagccgtctccggacacgtctgacgacg

SEQ ID NO: 70968 - DNA, 575 bp, Zea Mays
cacaaacagataatataaagttaaatacttaagacataaattaatatcgtatgatacaaaagtacaacatacttatataccttccggtggatgggggaacctgtccgcataagttatcaaagtatcttgtaatactcttgtgtcatgtactgaacctggccaacctatgacaacaaatgtgaacctcatagcgaagtcacaaacggccattacattctgcgatgcgtaaccgtgccgaccaatatatttggcttgctccgaggccgggacagacgctggaaagtgactaccatcaattgctcctatgcaatccttgaagtgcggccaaaatctagtctctcgcaaacgaggatgaatctctatgaaatttgggtctttgggcttgattacgtcagatgacatcttatatagtgcatcaagtacttcactatacttgcgactaatagtttccaaggagtgaccaaacttattccttatctgcctaaatgattgtggaccccacatgcccacaagaaaatacctagagcttccgttgtactgacaccacggcttggaaccagaccataactttccac

SEQ ID NO: 70969 - DNA, 603 bp, Zea Mays
accggccacgacacttaatgatcggtgctctaatttggctgagacctaattcaacacctaacaagcgtttcccctcaatcaattacacaatccgagctctaaatcgtcctgcccacggagacagtgcgaactatggatgaacaaacgtgtccccagcgatctagggcaatctagtttagttcaatgggtcggggagcatcagtggcaggtaagaatgctgaaacaagagagcagagggtatgatcggacctgaaacgagctagccacggcgaagactctttcacggtggcagaaaacagatttggggaaactgagcaattcgtgggctcaggtgagtaattggaggcatgagcgggtggattggatgctagaatacctaacagagccgaggggggctcaatttataggactcttgatcggtggctcttgaatttgaaggagacgtgcggcggccggagagggggaagagtactggcgcaagcgattggtggcatttaccgtggcgggctcaccgacgatgaccgggcgtgctagagcgagtcactaagacgaagtacaacatctaggcacgtgtcatccgagcggcaaacacctaactccggt

SEQ ID NO: 70970 - DNA, 1110 bp, Zea Mays
gtggattatgttttgggaggtgcatcgataggcgtctatgtgaaaagtgtaattgttttatgcatgtggtcggtgattgggatagtcgaggcgaatggggagtatgattagtcttgttggagttactatgatgttgatgccttgtgcgtaaagtgaggacacatatgtgtgtgccgtggtgtattagagtagtggtggcgtaagatatttgtttgaggtgtgcgggtatatgccgtaatatggttatactcacggtgaggaaagatgtatgtattgtgtaacacgacgcttaggtcgctattatataatcatgtgaaggatgctcaggaaggtcgtgtgattgaggagtcatgtaatggcaagcgagaagtaagttgagtttttcaaacggttagtggatagtgtccgtcggtgttgtcatgttttttgttgtatggcaatgtgatgcttgctttgtcaaatattgcattccattcccattagataaataaatgtcttgttgatcgattagaggtcttatatgagcgttatcgcagccaataattattggaagcgagtagcgttcataagtcggtccttgttaaaattgaagaacaatccgataacatatgcacataagtgctttaggtccttcagtagaaaatgtaagtcttatggagtttatgccatgtgttaatgcctctatgttagaccccctaaaatatactattttaggtgacttatgtgttaactaatttaagttgatcagtggttaagaaacactgattaatctgctccaacccatgtttttgagttgcaatgtctaaaatggttcgctaagtcttatacggtgattagccaactcatgttaagtaggaatcgattgcgtaagtgattgtgatatatatgttgtgtctcggattgcgataataataggcaagccgacgggtaggttatttagcgggctatgtcgttgctctagttagccgaattgttagatgttttgggttaagttcgtggtcacgatgaattgcttgttgtagtctaaatgcgtatggttatggtcgcggatgaaaagtagtagtgctcatgtgatgtctacgctaaaatgcaaactattgggtgaaaagt

SEQ ID NO: 70971 - DNA, 474 bp, Zea Mays
ggtgcataaacatcgtcgtcatcgtcgtcgtcgtccacaggagagtgagatggggctggagttggtggtgggggacgagcctctagtacgtccatgcgtgtaacaagttcatcaactcgtcgatcaagctgctcataggatgtcgaggcagagtcctggtattttttaaaagcttcagtcatcgcgcgcatcatctccttcaattccatctgagagacacactcatcgtcgttaagtttaggccccttgtccttgtccatttgattctttggtcctgtcattgttagcacaaaacagagacaaaaaggcaacaaacaatgtgaaccctacaactatctctcagggtggtggtggtggtggtggaatacaaattatgaagcatcttaccccgctcttacaacgttcttaccagcactgcaggtggcaaacggtgactggtgtgattgtccaacgagcgtgggtgtgattgcaaag

SEQ ID NO: 70972 - DNA, 555 bp, Zea Mays
attgtagatctatcaaaggagaataactttgtttaagggagtaagcatggttgttatgaagaatttgaagataaatgagcccaaagatgggctgtcagactaaaacagtctgaaaattatatgatcagtggcattggatcaactttggagtcaaattgtgactaatccagtggagttaagacttgggtcactgtgacaagattggagatcatatattggagtacaactttgtcaaaggaaggtaggtgtgctactgcctagaacagggagtaaatgtggctcaaaaatgcattgtcaggcgacatcgaaaggaaaattcagattgaacagcgccctgacgaagaacgcaggtacagtgtacccgtcgccggtgaactcgcgctaagatccgagtttcgcttgggagattcgtgctcggtgaagaatggataagaccgaggatgggtgaaaagatctagggcgggatgaattgcgattgctagctggtccggccgtcctgtccacttgccgcacggtcggccaagcttatcatcaccggagctcgccgtttcactc

SEQ ID NO: 70973 - DNA, 554 bp, Zea Mays
cgatgacaaggaacccaacgttgtgtgagtgatgatagcactgtcccaggagccccggccgtcagctggagagacggaatcaaatcgacggatcaaagagcaaaggagatattgtcggcagcaaaagacaaagcagggagagacctgttagatctatctcttcatagcaatgtatatatatctgtgttcatagtgttctttggacgatcggtatccctttatctgattagacataagattccatatgccgattggtgaagtcccttttacgaactgcaggtaataggatttctgaagccaagcatcttcttttgaaaaccgtttcaagggctataggttgtacgtgtcctaagctgaaagtaaaaaaaaaaaaaaactcaaaacacgtcagttgatgaagacatattacttggctctatgcttgagataaaagatatagctaattggtgcattaaatttattgaaaatttttattggtgcgataaatacagcaaaacacatgctttagacatacacactatatcacactatgtcttagttgcgtgttatgcttg

SEQ ID NO: 70974 - DNA, 381 bp, Zea Mays
gtaaactgtgatcctcttatccaaaacgatcttctatggtactccatgtaaacacacaatccgagtcatatataactctaccaattgagatcccttataagtagtcttgaccggaatgaagtgagccaatttggtcagtctttccacaatcacccatatcgaatcgtatcctttcggggtgcgaggcaatccagtaatgaagtccataccaatctctttccacttccattcgggtatctttaatgggtataatagtccaactgatctttggtgttcggacttaactctttgacacacttcgcacatagccacatgtgcagcaacatctcttttcaatccataccaccagtatttctgcttcaaatcctgatacatcttagt

SEQ ID NO: 70975 - DNA, 467 bp, Zea Mays
ttcgaattttgaaggttagggtctctgtccagcagtctctaggattactcaacacacaagcaatctcgacgcttcttcctctgctccttccctgaacccgggcagcatatactttgctgcatgttgcctgaaagaaggtcccccgtgcaaactatgatggacgatgataatacttcctaccttccccctttaattctctggggtcttatcactttgcctgttcaaccttttctagggtggatggtgttgttaagtcacctaaacatctaacgagtgatggggtctgtccctagaatggggtcagaaggctagaatgcatcagctgagctgcgctccacctcatcccttcataccacactgatgctccatgttgtgaatcatctttgtggaatgcatggattttaaaatattttagcttgactaacttttgttaatggtttagtatgatcaagacatccattagctcc

SEQ ID NO: 70976 - DNA, 450 bp, Zea Mays
agtcggctaatgagttagtctaatataattatattttatgtattcatcgttggtgtaggttagagtgggttgaaaatataaattatgtgacatgttgttggtgtttgaagacgagatgtgcaaataatcagtttggtgtttcactcgtctagtcgataaatgttgtcataaataattgcgttataaatttggtcataagagtgcagtgggcacatggtgttggttggatgtgataagtaaattggaagtgtgggtttatctgagcactgtgctgtcgaatgtgtgtatcaaaatgtgttgtagtagtgactgcgttaagtggaaccgaagtgtctcaagtgcatgccgtgatgtggttgtatttgagatagtaaaattataagtgttgcgtgatgtgaggtccaatcgatgcagttaataattgtcttagcttaaatagagaggtggtga

SEQ ID NO: 70977 - DNA, 1087 bp, Zea Mays
ctatcacaaggaaaaagaggaaccatcgttcctctaaaagaacagagtatgcgcggagatccaacctgccccaaattgtatcctttcgtgcacctaagcatcgccgccgcacctgagcgccttcttgcttcttctcctcgcatgtggcagtggcaactgctacatatatgtgtgctctcttccgatgccttcccagggttgtcgaagccaccgtcgtaggaccgctcccacgactaagggctcctagggccccatgggcagcagcaacatctcctcgtggctcaggaccttgggctcgacagggtcctctgaaagcaatattttgggggtcggctacgggaggaggggcgacctcacgagcagtcggtggcaactcgggcttctgctttagatcggacgttggtggctggtgatggttgtcttgccccctaccggcacgtgcccgcgcgagggagtctagcgccggagaagtcatgctcgagagaggaggggagcgttgagagaggaggtggggagaggttgcagcgcgtgccctatcgagcgtgcgtgtggggggggctgggacgatggggaggggaggacaagggaggaggccgaggtaggcaggtagttgctcgttcccgactcgtgcggagacaaggcgaggtgggagtctaggagacgaggcctaaccagatcggcaagggcgagacaggcgtgggacagaggatggttggagctgacggggtggacgatctagattgcggcgaggcagaacaggcagatggcagaaccaggaggcagcctatccccttgcgttcttcatagtagtagagattttaaattcttgaattttcccctttaaatcttaaattctactttgaactttgctatattacttttcacattatttttatattgtcacaaaaatgcacccaaatgaaattcccagaatgatgcataatttagtgacaaatattttataattgtattttttatatgatgttcacatgtgagggtaaaaaaaggtcaaattcacacctagataaagtgaaattgtttgtccttttatattatctctacaaattacaattagggtcttacaaat

SEQ ID NO: 70978 - DNA, 814 bp, Zea Mays
tgtcgatgattcagaatagatatatccaaagactctaaagagaaatctgaaactctcgtggcaaactcagactcactctaactcccaagaactaatctatacaagtgtatctactctcaactttcttcttattctcacaaatgagctcctatgggctatttatatcctccccaaactcaagggtttttatagctccataggtcagttgtgggccttaattcgtttggagggggcacattacaggctaggtggcctccacctagctgggcagacatgttggtagccgagcggccaccaccctccttccatccttcatacaatggtgcacacgcctcctccaagttggttcatggtcggtttgatccattggatgaaaggtgtgtttttttcttagcccttagatttgtgcacattgattgatgaggtgttgtcttatagctcaaatatgtggcatccatgtgtagtgacatccaagttgtctagttctcatcatgacacttgtgcagggtgaatgtgtagtggtactagacaagttggggggcaagcagccatcacatggttggtcgggcatgcccctccatggtttgacaattattcttcaagtgttgtctattctcactcctttttgctatattttgtcacatgcatccaaatacttcaacacaacttttgcaactcattagtagtaacattattcatttttcatgaagttgtctttgtcctgatgggtagttgatggccaagatcatcaataatggccgctaacatccatcatagctaagacttttcctcatcttcgagcaaagctaagatt

SEQ ID NO: 70979 - DNA, 556 bp, Zea Mays
aacgagctgtagcagaattcagggtggtggccaaacagatcagcactagagatctggtgcaagaatacctggccaacagaacatctccaatgttaagtgactggagcatgccgaagctaaagggaacgaagaaaacacttgagcttgtgcgattgccttatcattttaaatttgagaagcacttcaaggagccttgccaagagtggcttgaaatgattgagacaatgtgcaatgaaattttgggaaactacaccaaaaaagaagatcaattaatgactgtagccttccgcacccgatcgccacgaaggttgaaccgagtaatggacgctctaaattttgaataccctgattacgagcggctcaacaaaggtgccgaagggacaaaaagggcgagagttatcagtgttctaagtaggcaggctgccagaatggtaaaggaggatgaaaaaactttgaagaagagaaaatccagtcccgagccgaaagcaacggctttgaaaaagagaaaggctgtagctccagagccgaagatgaatgaagtggaggaggaaactcc

SEQ ID NO: 70980 - DNA, 687 bp, Zea Mays
ggataatgatgtttgttgttctgtgtaagtgtattcaaggtggttggattcggtagatagaaacgacatattgtttgatagtggtaagtggtggcataacaataatacaattataatttacaaagtttttcacttctattaccttgctgcaacattgatttgtttttggcactaaaataattttgtcatccatagatggacagatcttggatcaatgcaacactattcagcaagccacacctggaaggagatagtgagttcatgaagcttgtaacagagcgatttaatgcgaatgaagagatactttgtccatgccgcaagtgtttgaatcgtcttagtggacatagagtacaggtgaaggaccacgtatatcttcatgggatggctagtacatacactaggtggatgtatcatggagaagccatggatgacataattaacgaaaatggtgaccaacaggatgaacatgtgagtttcaatgaagatgctggtatgaatcaagatgaagatcttggtgatatgattaatggtatggtagccgaagatgaagataaaaggaaatctatgtttggagatatactagaggaaatgaaacaagaactttatcctagtgcaacttatacaagattttcgtttgtggtgaagttgcttcatattaagtcgttttatcgtatcagcaatgttggc

SEQ ID NO: 70981 - DNA, 801 bp, Zea Mays
cgccgacctaatattcagggcgccgaggttggctttcgaaagcatagctgaagcagaagctaccaggctagaggatattgatgtgctggaggaagaatgattgaacacagtaattcagtcggctaggtaccagcagaccttgaggcgctatcatgataaagccgtgtgacaccggtcctttgcagtgggagacttggtccttcgccgaattctaaagggggaaggacgacacaagttgtcaccactatgggaagggccatttattgtatcagaggtcactcagccaggatcataccggctcactcaaatggatggcatggaagtggggaactcatggaacatagagcatcttagaaagttttatccctagcgagacctcaaaaattctcgaagcaacattgtactctataatcgggggacttcatcatcaataaagttttcattttcaaaggcattcagactcttgactttcagctgactttgatttgattggagtcaaaatcagcacgcttactcgacttagggtgaccactataccctattaacggagcaatcgacttaagtcggtgacgacttaagatggtgcgacatgctcacgcttactcggcttagggtgactactataccctactaacggagcaatcagtttaagtcggcgatgacttaagacagtgtgacatgctcacgcttactcgccttagggtgaccactataccctactaacggagcaatcggcttaagtcgacgatggcttaaatcggtgcgacatgctcacgctaacttgacttagggtgaccacta

SEQ ID NO: 70982 - DNA, 602 bp, Zea Mays
gttcttggtattatggggttgaaaattttgttttgcgctagcgtagcctccccgtaatcctacagtggtatcacagccaggttctgtgtagttttaggtctggatctaggttcatgagatggatctacttgatgcacggtttgattagatacattggttataaagggttgaagtagattacatcggatatgacagaagagattagttcgtccttctctgttatgtgcgcgacttgcccctaccggctggaatcaccatcggggctaactgcgtacacaaccagaagattgacgtaacagatcgacgtcatgagtgtaatcttcttcgggtcgaaagtcccggatttgggttgatttgatcaaccgcatgagattttcagtggagtttccatacatacgatgcatggaaccccccgccgtggctatctgctgtagtggcgaacatatagaaacgtgtttgtctaacctgtttttgcaggacatcttgtgatcggtatggctattgtgtgtatatgatgcatattaatgaattattcatgacctgcgtgtcgtgaccagggcaatacggctggagccacatgtattgtccaaatttaatgtaat

SEQ ID NO: 70983 - DNA, 618 bp, Zea Mays
gtggagacagtgaaggcaaaggaggaggcgccgcgatggcgaggacgagtcagacgacagagaagaggaggcgacagatggtggaggtatgggaggcaggaaggatggggacatagctcatgagtcatcatggccatggaggagaaaaccttcccaaacttagatcccactacttcacgaagtgacgaacagagaggagcaactaaacaaaattaccttcggaattccgtgagggccgtgtggatctcttcccgggaggcatcgtggggaggtcaccggaccacgacagccgactgctacgagggagggtaaggaagagaggtcaggtgaagaagatatatgtagggaggttatgcgaggacgtccagccatttcggagttaggtgtagaagataggcaaaaaaaataaaaaaaagggaagatcccactgcttcacgaagtgacgaacagagaggagcaactaaacaaaattaccttcggaattccgtgagggccgtgtggatctcttctcgggaggcatcgtggggaggtcaccggaccacggcagccgactgctacgagggagggtcaggaagagaggtcaggtgaagaagatatgtgtagggaggttatgcgagg

SEQ ID NO: 70984 - DNA, 585 bp, Zea Mays
tggaagtgcattaccatcctggcaaagccaacgttgtggcagatgctttaagtcggaaggcccagtgcaactatatgatcatggactctaagatcgccactctgtgtgacgagttatgcaaattgaacctagaggtcattccctcaggtaccttgagttatatttcagtggagcccaccttacatgagcaaatagtcatggcacagattggtgacaagggtgttcaagtcattaaggaaatgatcaaacaaagggtggacaaatacaagtgcttccatcaggaccgcaaaggaattctatgttttggagactgattggttgttcccaagaaccttgagctcagaaagaaaataatggatgaggctaacctttccaaagtttccatgcaccccggcagtaacaagatgtaccatgacctcagatccttgtactggtggaccagaatgaaaagggaaattgctaagtatatatctgaatgcgacattgccagagagtcaaggccagtcatttgaaggtggcaggcaccttacagccccttcccataccatcttggaaatgggaggatatttgcatggatttcatttt

SEQ ID NO: 70985 - DNA, 437 bp, Zea Mays
ggaggaggaacaaccgcaaccacgccacagatagcacttccctggctgtcatccctaggcaagctaacgacgcaggctcccttgcaagggacctgtcagccgtttgcctcgtcccaggaatgacgacaggtgacgcttcccgcccagttggcgcttctgtgcgggttgacaatgctggctcccttgcggggaacctatcggtcgttagccctgcatgggaaacaactacggtgacgcgtgtcgcttccccgacaactcctccgactcctccacccgcggaccaggaagtgggaatggtgttccaccagatccctttcaggttcagcttcgaccctccaggccactccgcttcggtaagtacttatgctagtacatatactgatctaccgaggcaccatggatctgttgacaacccctccaacctcggagcccgcggg

SEQ ID NO: 70986 - DNA, 710 bp, Zea Mays
ctcgtaggtggatctaagacgagtgggttacagtggttcaggccggagccctagtctagctgatagtagcattgcttggagcgtgttacagttgggtgcttgtatgaagctgtgggatgtgtgctggacgatgggggttatcttacccttttatagctcaagggtagacattttaatgagaaattgtattctactaggctagagttcggcctcctgcttctggaccttgtagcccataaggtgttgtttgctgagtcatgcttctaggcctcgtagcccctatggagtcgtatgctgggtcgtgcggcgccgtacctcttgtatggcgtcgtgtctcatccgctttccaatgagttcctatagctactctgatttagacgtggcagtgcttggtgggtcctttcattacgcataggtgtatgcgtggtacggtgtattgtcatgtcccttccggcatatgggtcactgtagagaccctgatgataaggtccctgtggctagagttgtctggtcccactggtcagcggggatacgtacccgagatcgtgtttgatagagacccttaggtaccgcttccacggtctgggcatgactcggtgatggtctgtcgcattgtgacgacgtggcttgatagtacttggtcggctcttcctttcagtacagatgatcgcttgagagctggttgtcgccttgttgggttgatcggcggg

SEQ ID NO: 70987 - DNA, 397 bp, Zea Mays
ctatttcctagatttattttaagttctacggactgtgcccacaatttaataggagttcaaggtctcctgcgtgaataacaggacctagcagtaaagatctttaccttaggtaggactgcgggttcattaatagaaattaaactaggaggtctctcacgtaaaactgcctgaccgaaggggtatcatggagcctggaccgtccgatccaatccgaacgatccagattagatccacaccccgttgaaccggtatgcgccatcagccgctggatcgagatccaatggcccggattttatgaaacccaatctaaccacaatcgcccgattcgagatctatggccctagagcccatcacgtctatctctactctcagccacccgggtcaagatcaatggatc

SEQ ID NO: 70988 - DNA, 438 bp, Zea Mays
ggcttcttcaacccttttggcctcttcttgggtgtcgtgagattatttttcattctttctaatagcttcatcagctatctcatggcctcccttcatccatacctcggaataaaatttcacgcctaatgcagaagctcggctgagaaaacaaattctagctgaactacagccttgacatgttcgcagccagctttctctaagatcgatgtggccccctgtgcactagcaaaggcgcataaatctcctcggtcacttagaatttcgtcaaaagctttggttttcccactgattcactggacaactccatcagggtcgccgcagatgaatctttactaagaggaatatgcaccaaccctagcaaagttgtcctttaatctccttgcgcattccaaggatatttcatagcatcttcctttcgaagaatgaagctcatcagcg

SEQ ID NO: 70989 - DNA, 666 bp, Zea Mays
taaattcaagaggtaaggcttggctacaaaggtattaggtggaagtttgaaggtcaaactaaaggcttggacatgatgatccattttagcaatgaagcgcgagtagatatcatgtactctagtatgaagggctatgaaggtaaggcttggctactctttcttatatatcttgtctccttcttctcgcaactattgggtgtaggacctgaagtgtcatgcaactctctgaatctgaagagtcatgcaacatgactattgcctaatgcttcaactccaagcttggctaaagtggtgtctcacagcatggacatgatccaagtcatatgagaatgatgcatagaggaaatacctaggaatgactaagatatggtatgtactcgtttttccatggttggtccccacttcctcagcctagtccaaccttccccaccacacaaccacttagccaatgtctgtcggttgttacccaacaccccctatgccatcattcgaagaagtgtcaacgttccccatgtgcatgatagatctactcatttatgtgtttgtctaaagtctagtcccaccagtaggcctctatcaaacaatggtggccctaggggacatttttagtgtttggggaaagacatacccccaagtattgccaaaacaatctccaaggtttcatcg

SEQ ID NO: 70990 - DNA, 698 bp, Zea Mays
cggtggacgaagggcggagcgtgtagaggggctcgatgctgtcatatcgggcgaatgggatcctggtggccagatccttcacagaaaaaccagaagtgtcaaactcaatggaacaggaattgttggtagtgaaccaacgaacagaaaggagattgtgagtgatgtgaggggcgacaagaacgtcattgagatggaatggtccagggagaaccgaggcatctactaaggtgatcgggagagtggaaccattcccaacaacgatcaaagtggggtaggaggaatgaggtgggtgagaacgagataacatgcctgccgtgggggtggtgtggtaggatgcaccagagtcgacaacccaatcaggggagggtggagccaacaccatggtgctgtaggcggcggcaagggaggatgtgtcccaacctccagccaggggcgaccagggagtcaccggaggcacgagttgaggtggggtcagggtcgtcgggagtacgccgtaagggagcataccgaaggcaggtggtgagggagctccataggtggatgcactctggagagtcggcgcctatgaaggaggactggaagcactaggagcctgacccggccacatggagatggtgtcggtccaggggttgtagaccgatggccatccgtggccttggccgcccccagccggtggaacctccacgcgtagagctgct

SEQ ID NO: 70991 - DNA, 443 bp, Zea Mays
tagtaatttaaacttttgatggtgtatgatctacttgagttagatagagctaaatcttgcttatacgagatttttggtggtatacttggtaatttggatcaaactgagctaagttaagtggtaggtttatttttggggttccactgaattctttttaaggtctttagtgaggattgccaagaattcaagttggacttattggagtgaggtttatctttcctctttttcccttgatcttctttagggttttagggtgggtttgaactacaagtcaccttaataaatttccaaacattctgtaaaaattacagtggcttattactggtgtataattctctgtctcaaaatttaaggttctataagtgaatagttttctctggacaaaattaccaaattttagggcagaaggggtgatttgaactacaactaccattcaattgtag

SEQ ID NO: 70992 - DNA, 397 bp, Zea Mays
gcgccgaagagtaaaaagttgaaagtcctcacccaccggccccgttatattgagccggtcgtggtgcccgagtttggcaggaagacttcttcagttgttgatccaaaggagccaattcctcctacgcagaaggctgaagaaccggctaccatgccgaaggcaccctcagccgagtaagctgaggcgaagactggtaaagataaggccgaagagccaaagactgaaggaacaaaaatgttagaagttttaagcccttcggtggaagtaacagtgccaaagatacaaaaaggtcttgcggccactcccaaaagaagaaggatggcaagtgtactagatgtgctagaaacagtaaaggcttcaagccctactccagggaaaattgccaaggcttcgaaaa

SEQ ID NO: 70993 - DNA, 295 bp, Zea Mays
tctttgctacttgcattcctgtattaatgtgatatcttggtattacagtgctaccacttatttctattgatgatttatgcggcatagttgtcacaacgatgcttaggcatcctgttggttgttgtatgtgggttcatgctatgatccggcatctttctgctctatcttgcctctggttctgttcaatgttgtgatctacaggcatcatccccatctggccactagtgcaatcttctgtacagagcgctgaaggaaagctagggcgctacttaaaaacatgatatgtcaccttgag

SEQ ID NO: 70994 - DNA, 372 bp, Zea Mays
aagttatatgttgtagtcattagaaatatatgatgtaatacaacttaccatgcagttagccttgcagatatgactatcggtgccataagtttgcttaggatcattaccatggttccttctatgcttttcagacatatcgtataactcttgcgaagctccacaagttatgatccccgtagagtgcatggttaaggtccatatttaaacactacaagttttgagtcggtagggtttaactttgaggcatttacaaagatccactaaacaacatgtccattattggttattccagctgcataaactactcctcaaaagtgttgactaacaaaatagcaaataaaacattacatccttagcaaggatggggtcaat

SEQ ID NO: 70995 - DNA, 1085 bp, Zea Mays
gcatggtttggcctatagtgaaaggatggagaatcctacagtagaaccagctgtttggtttggtacaaatagagatgtttcctatgtcggcttctcatcggtcatccggactctattttgcttaggccggacaaagttaggttttacgtgtctggcccgttctcgatctttggatgttccaatcatgttgcaactaagatccaatgtagaagcatgctcctgcttttaatagaataggtttatcatcgtattcggctcatggagagtcgatcgtctttcgaacgcttacctgccgttggagctatcctatcgactcgtgggcgtcttcatcgattcttccgcatcggctccaccctgtatcaggcgatcgcggtggcgtcatccttcctagctggctagtcaagccaggtggcatgccaatgcatcactgtgcggcatacgttcgtgtgctaatcgcaggacgactgtcggttgttttttttttgcgtcaacacattttggcacgcccggtgggaccactatcgcccgattagaagtcagaatgctatgcatctttgtcatcataagttagcatgaaaatcggctcatctgataaaagtcgattcgactcggggggcaccaaagagtggtttacaacagccaaggaagataatgttgaataagcctacaacatatttggccaaaattggggggcatgtgtggccaccggaatttggacaattggtattaatttgcaatattatttaattttggccaaatatgctatgaacatgttctcaaggctcaattcaagatattcaagatgaagtcgcaagcccaatacatgttgaagtccaatttattcgcgaagccggttcggactactggaagaggctgcatgagaacggacgcccatgccacccatgccacatacggactctgattggggcgttctacataccgatggaaagctaaggagataagctttccaacccagctggtctcacgtaaaaatacgcttggagtcgacgggaattagcaaaacaatgtgatgtccagaatctgccggttgatatttagaagcttcatgaagatctgaatcgatg

SEQ ID NO: 70996 - DNA, 684 bp, Zea Mays
cttccttttttggcttcaggcttctcttaagagaattccatcttgattggtgtccaagggtgcaaggacaacaccgggcaccgttgtcttcttcggcggcatggcgaaggtggttgtaagtgagttcactagaggtgggcaccaatgttggtcacttgttcgcaattgttgtacatagttgaaaacaggcaacacgttgttaagaaggtaattagccttcgtcctcaaatagttatcccttcggaataactccattggggatgaaggttgagattttaatcgaatgaatcatagatcagcataacgacgaatatacaaggaatgcaaattgattaaatatgttaactcattttcgatatcttaacattccatttcacccctttcatacaataaatttgcaatcgtaccaccagcccttcgaagtgagttatagcaaaggtgcactagagaagggattacacgaggcaattatccaacccttcaaatggtactttatgtagggcaatgttcatctatttataggggaacatacaatttcgtatgaaattacaaatatgtccttaataccaatacatatggtttacaaatgatgtgagggcaatattgtcttttcctttagcattctagatgacatctcctcctggtttcgtcgatcttttatctttgtctccttgtgttattatg

SEQ ID NO: 70997 - DNA, 446 bp, Zea Mays
ggtttttgcccaaagtgaccacaacaagtttgtagcccaattataggagaacaactttgtttaaggattcaagccatgatcttatgagaaatttggagaaaaacccaatcaaagatggactgtcagactagttgaggtctgaaattcagaatgacagtgttttgagatgaactttgagctcgattttgaaggggatccagtgaccttttgtgagtacacattatagcaaagatatagatggattatagcactacaactttgctataggtcactgagtgtgttgccatttgaaaatcagagaaaaagaagcttaaacattgtctgtcagacactctgaacaagttcctcgatggtacagtgcacagataaggacgccagcttggacagctcgacgccggtaacccctccgccgtgattcacgtcgccggcgtcatgattcacgctcg

SEQ ID NO: 70998 - DNA, 477 bp, Zea Mays
atcaaggttttgacatgtaacccaggtgcatcgagacggacgatgtgccgaagttaattgaaagggtgaaaacaaccgccctggccatagagactgtttcagttgtgcctattgaaactattgtggacccaaccacagagctagagctgaaaaaggtagcagaaagagtaccagagtagccgaagatgaaggggacaacactagcgaagccgccagctaccacaggaactccgtggaagaggaggatggctactgtattggaagctgttctagaatctgtgaaaacgccgcctccttcttctgccgaagcttctggcagtcaaactgaaaatgtcccagagatgattactgccagtacctctgctcatgccgaggcgggaccttcggaagttgcaccaggaaatcttacggaagagagccttccagagaaaccctcggcgcctgctcccgaagcaccttcccagggtgatttggact

SEQ ID NO: 70999 - DNA, 1575 bp, Zea Mays
tttgtggactacgaaggggcgcccgttcgaggtgagaattttcggcatgcttcgcacgaatgagtcactcggttggccgcacacatgatggctggccagtagaaaccttggcgtataaccttggcagcgagagctctcggtcccgaatgtgatccgcatgtccctccatggacttctcaaagaagttttatgccttcgacttcagtgacacattttaacaggggttgacttatccccttcttgtatagttgtctgtcgatcacgttgaagtctctacttttgtgttttaaccttttagctttgctttggtcggcaggatggtagtggccttcaaggtatagggtgatgggtgcctgccagtctttggtcattcttagatttactattcgacaaccgtcgaggtcttgtgttatttgcaggacttcaggggtccttacggctggtgtgtcgatcatgtgaaaaacacgtcggatggcaagggttcctcgttcttgttctttggctaacatgtcggcttcctcgttcttgttccggtcaatgtgttgcaaggtgaatcctttgaattgcttctcaagacttcgcacaacagagatatattgcatgagtattggttctttggtagagtagtctttttcgatttggcccacgactaccttagaatcagttttaaatatgcatgttgtcactctgagggctcgcagtttgcgaaagcctaagatgacggcttcgtatttgtgcatttgtctgagtctagtgtgaaacggagacatgcggcatatctgtatttgagtcttatgggtgatgtaatcattgctgcagcgccggcgcttgcatgacaccatgctccattgcaatggatggtccaaatagtctctgcgcaaaattgttgtggctctgaaggtcctgtccagtctactatgaagtctgccaaaacctgggttttcattgttctcctgggctcgaaggtgatgttgtaaccagagagttcagcaacccatttagctattctagcggatgcctccggatttctgaataattctccaagaccccgatccgaagtgactcgtactttatgtgcctcaaaatagtgtcttagcatacgcgaagccatgacgacggcatacgctatcttttctaactctaacatgttgcacttggaggcagtgagcactttagagacaaaatatactgggcattggtggatcttacccactctacacctttcttgtaccaaggttgcactgactgcattgggtgatgctgcaacgtagagtagtaggggtaaaactaggtctgggctggttaatgtcgccaggtgagagagatattgtttcaaagactcaaaggttgtggcttgctcttggccctaggtaaagtccttagcaccgcacaacgctttgaggaaaggaaggctttgctcagcaggtcgcgagataaatctgttcaatgcatctagtctgcatgtcagccgttggatgtcttttgttgactgtggcggtgccatgtccatgatagcctagattttgctggggttggcttcgattcctctatgcgatacaaggtagccaagtatca

SEQ ID NO: 71000 - DNA, 449 bp, Zea Mays
ctcttgctgagtttgagcaagttggacatttggctatggctcaccagatctggtccaccatcgagagattccatgagggcaacgatcatgtaaagaccagactatttgagacgtaccgacaagagtacgagagctttgtgcaattggctggaaagaccattgatacgatgttttctcggttccagacaaatgtgaacaagatccgtgccaacaaggaatagcttccctatgatgatcatgagagagcgctaaagttgttacatgctctagatcgaagagtttgggaggtgaatgtctcatcggccatcgagtcgcccaactatgagacactcatcgtggatgagcttttcagcaagctaaagtccactaagattgaccagcagacccagactaagattgagaaccctattacaaccaccaaggccctgttctctagtggtggttcttcc

SEQ ID NO: 71001 - DNA, 379 bp, Zea Mays
taacgaagtctaaccttaagttgagctaacctacaagtcacttcaccagttgatagtggtaaagtaaatgcgactctactcctatagaacatgttctaacccacccaatagagtcatgacgaattgtataatctgtctatccccacctaacatcaaacaaacttttgacctacaacatatagtctatatcatccatatctatcttaaccaccaactccgatgatatacactaacctcgaatcaatgagaccaagaccggagaagaaaagatcaacatcgacaaggaagcatataacagtcaaagcgaatctcgagataaatcaagacttaaacatttggaacgaagtcttttccttcccataattcttctagactcaac

SEQ ID NO: 71002 - DNA, 1107 bp, Zea Mays
tattattcttgtgacgatgaacagacggacagacagatagatagataagcagcagatccgatccgccggagaagaagagagggatactgtagtagtaccaaccaaaatacagggggctcgggataaatagtgcgtgctgctgggtttctttcttcagctttgcggaaaagagggagagggaggagtaggagatcctgtgggtgctggtaaactggtagtattctgtatttctcgcgggtgacctagaagaagaaatctaaccagctgcactgcaacagcaagcacgagagagagagaggaggaggaggtgcgagtgtgaaaaggtggatagcaaagggtgttgctgaaattgtgcaagaacagtgggcaggcaagcaaatggcaaagtctgccttgcttgcccatgtccgtagttgcttttgggcttaaaccatgggcagcacctttgtcctttgcttgcagtaatgctagtgctggagtacactgatagttaattcattggttggttaacgcttgctttgcggtcaacaactgtacaatcaggtcttatgtgtaagcgtgcaagcgagattttttatctgttagattatgatacaatcatgtatcacatttaatacttaaaccatctcaccatcagatcatttagattcatagaaaacaccttttaaattatgattatgtctatagttagatcatcatctaatgaactaagagtctcgcttgtatacatagtagttgtttctgctttgcgaggggattagcttggggggaggttgagggttgggaccagtagagcagatcagcaatggacggcatggcgcggctcacatcacctttcttgaccattttctggcctctttgccacgtcatatgtccctctcatggtcaacgatctccgctagtccttttgagctggtaataattttccaccgagttttatttatggtatctatatgtttctctatactcacttgcacttgcacttgcactttgagagaaggaaaaaagaataatttactcgtttgcactttcaggcaaaaaatagggtaggggataattttggttttaactctcaaagaaaatccatttccggttttccaatccaag

SEQ ID NO: 71003 - DNA, 491 bp, Zea Mays
cctgggtatagctcttgggtattatctatcgctaactgattgatggcttctaaatctacatcagtttcatctgaaccatcagatacttcaaaatcccctttatcatctagaccaccagctaagccatgaaccaaattggctatgtcatcttcatctgaattgtttacaacctctatatcactgtagtcatgactattaataggcatagagtctctttctccatgataagtccaccttttgtatccctcttgaaagccatcacatatcaagtgcgcacgaacttcattttcatctttccatagagaattaacacattttctacaaggacatagaattctgtttccacctatagaattgctaaatgcaaactcaataaatctagctaccccatctatgtagaccttcatgtgcctataaatattaggtacaaaaacgatatgttggtcaaaggtgattactacaaaataatggtttatagtacattgtcagaa

SEQ ID NO: 71004 - DNA, 551 bp, Zea Mays
tttgaatttaggcgaagaaaaagggatttgggcactcggctcggaaacgatcgctctaaacgggaaatttggtaaaatttaagcctgggatctcggattggcgtgaaatttggcaaggaggttactggaagtgttgtgaaggtgcctgaaaattttggattcaattggagcatttttggctggtttgggcatttcaccgagcatgtggtgtgcggggaattagggttttggtgaaacggccatttgaggagtgaaaaccctcccgaaggagctaggatcctgcagggatacataatggggacaaaggaacacatttcacaacatggattcactgggattctcaggatttggaatttagcacaaaggggtgtgcactgcctaagagacagagagatagagaggcaggggagaaaacaaagctgctcaccgagggggaagaagagcctggcgaggtcgccggaggatcgtcggagatggtggccgccggtggagggagttcgccggcggggggagaggaaatcgccaggagcagagggcaaagggagctggcg

SEQ ID NO: 71005 - DNA, 647 bp, Zea Mays
ttgtctgcgacttcagagccgcctttgagctgacggtggacaatggaaaacaatttgacaaccaatatttttgagaattttgtgattctatcagtacacgcgcaaccttcacatcagtcttccatccacagtataatggagttgtggagcgcgccaagggcaagagcttcaccgcaataaaaaagactattgcaagacaaaaaaggcaaatgggcagaaccattacccgaggtagtgtgggcactaaacacaacggagtcccatgccacaaggttcatgcctttcagactaatgtacggggccaaagcaatgactccgcaggaactcaaacatatatcgatgggctaacaacaaaagacctcctcgacggagactgtgtcaacgccctcaacacactgaacaaatatgaagcaacaacgaagagctagagagacaaagctgtcaccctaaagagttcgaagaaggagacctcatccttattaggacaacaagaatagaatccaaaggcaaactcgaacctaagtgggaaggtcccttcatcgtcaagaagacgtccctgaattcatacaggctcgcaaatcaaacatgcgcagacctcgaacaatcctagaatgtagacaatatgagaaaacactacctgtaggaca

SEQ ID NO: 71006 - DNA, 368 bp, Zea Mays
ctcgacatgggcgtgaccaatcacatgactgggtcacgtgttgtcttctccaacatcgacaacaacatcatcggaagcgcgtggttcagggacgattcactcgtgaagatcgaggtctcgaggggcgcgtgactgtgctattcgcgtgcaagtctagtgagcatcgggagctcaccgaagtttacttcatcccacgcttcgacaccaacctcatcagtgtcggcctgtcgggcagctagacgaggacgactatgacatccatgtcagcaaggggttgatgcagatctgtgaggagcgatggtgccttcttactcgcgtgcgatactcccccaaccgtctgtactacatccggctcaacatcgtgcaac

SEQ ID NO: 71007 - DNA, 1191 bp, Zea Mays
ggaagtcctctttgtcatcccctccatataccaaggaccctcgagggtactttaggtccctggaataatgctctactttggcaatctgctctgaagacagctgctttccgaagcatgtcgaatgatgaattacaactctttatgaggtgcttcgggggcaggatgtttagatccctcgggagcactctcttccgccagttctattggcctagtttctgaaggcccagcttcggtaagagcgatggcagcgctcgcagcaatagcttctttcacatccttagtttttccgctagaagcttcggcagaagcgggagatggcaccttcgtggattccaaaacagcgtctaatacactagccattctcctttttcttggagtcgctatggaaacacttgatggcttcggcagttctgttgtagttgctggtctcagtaccttcagctattctgctgccttctctaattttggctcctcagccagatttgtatgagtttcgattgacatgactggacatgattctgtggtagaaggggtggtttctgcaccttcaataagctttggcacatcgtccgtctcaatgtgtctcggtctacgtgtcaagaccttcactttcttcgccttcgacgcactagaggatgccaaagcaacaattttcctttttctcaattgtttccgagcaggaaaacagtaataagggtagacgaacctgataacatcaaaaactctatttagcctctttttccctcgagcaccgaaggcgaccgtcatagcttcgtcttcggccttcgagtaagctccaagtagctcatcactagttgcctctatagcatctagccagtcatcgtttggttcatcaaattggattctgtatcggaaggtatacttcagatagaccaagccaccttgactagagccagcagcaacctccttcggcatttcccatccacttgcaagaggccatactttgtaagcaacatgctcttgaaccaagtctcttgtgccaatataggtgcacactgtgttgaaagctgcttggcacgcttgcacatcattcccaagagcaatggatggcctcctaatgtcaaagtgagaccatatagggcattgaataatccctttcacatcctccctctgactcaggtcattcttcacataaaaccactcctgcatccaagagcctagccacttttt

SEQ ID NO: 71008 - DNA, 714 bp, Zea Mays
agcaagggagaggttggtcctggtgttcttcttgggagccatcgtgggctgttctttgaagccagcacgatggacaccaaatgttgggactggggatagtgggcccaagcactcgcgagcgaaagtgacagatagcacggcaaaacagatggcggagagctcaaatgtcttgtcatgtgtgtcccatccagctacaggtcgggtgtaattatagggtaattgggggcaggtaggcctaagtacggttatgcctgctagcctaagcacaccaagtattctaccctcctcagaggtttacaagtgggaccaccatcgcccggtcggaggtgggccctttgcaggaggcctggacttcgcttacaaggacacgtccttctaggcgaagcaccaaagtcgtttgacttcccaccgggagttagtgcaaggtcttcggttgccaccggtcggggaacttcgcttgttgacgcacattcgtccgcccgtatcctcaccgtagggcttcgcttctgtgatgcgttgtcttcgttgaattagctgcttgggtccctgcccgtgcgatctgagccccctagtttgctttcgtctcccttcgccggttatcatgtatcagaaatcttggtgactgatgagtacgaggggtgatcgagggtgggttccgtctttgctccaccacttaatcttaaatgtggagttaacataacttaaatgcaaccc

SEQ ID NO: 71009 - DNA, 402 bp, Zea Mays
cgctcgcaaaagcaccgtcgtgcggacatcttttgggggcagccgtatccttctccaactgcgggtaaggacatgtctctgtagttcgccatcgttcgcgttatacgtaggaaatatccacgcttccgtgaccttggatgttggtcgtcggacacgggcttccgcattgcgccgtagcccgggctctacacttgacatcggccgaaattatttgcagcagtgagttcggagagtcgtcaattgcgtgtgggacgagtgaatcgggttatggcgttcgtatgggccgggtttgtgatctccggcgcgcgccgccgtgcggtgtcctgcacctcgtgtgccagcgtcgaaggaaggtgaaggtcctctaaccgtcgattgaggagaggacggcgccgattagaa

SEQ ID NO: 71010 - DNA, 311 bp, Zea Mays
atttgtgatgataataaaactttattttccatatcccattacaggaaatatgaatgtgctgtcattttacaggtcgcaaatggagacacgcaaagatgactagtgaaaagttgttgacaatatgcttgcgttcagctatcctacacatagttcttacctggtttctgtacgtaatacttgatgttagggtgcaacagccagtctctagtagatagatcgaacacatagttagggctttttccttctgcagtgtcatctgtaaaactctcaagttaattaatatcttgcataatagattttgcagttggttg

SEQ ID NO: 71011 - DNA, 287 bp, Zea Mays
caatctccaacgtgtaaaggtatcaaatttagtagacggatttgatcggttgatatgtttcaaattgtaagtcattttaacttgagcgaaaactatgtattttaaaatctcagaacgacttaattggaacggagtagttgcttatggttaccatacgtcatatctcttgatctattgctttagtttttaaagaatgtcactcgcaacgagtatggccattgtgtttgattgaagttgctcatttcaatgtctgctaatcatggtcaagcactgtgttggggttgatt

SEQ ID NO: 71012 - DNA, 544 bp, Zea Mays
aaaaattggtcatatatactatgtacatccatctacaggggaaagatactatttaaggatgctattaatgatcgtcaaatgtactaagagctacgaagacttaaggacatataacaatatgttacacccaacattcaaagaagcatgtaaagcacatggcctttttaatgatgataatgagtggtataatgcttttgatgaggttgccagatgggccacctcagagcaactgcgacatctattcgttaccatgcttatttattgcgaagttggagatgagcctacattttttgaaaaagtatggcaattactagcagatgatatccaatacaatatgagaaaaacattgaaccttccctcttaccagatgcccataaatgaaattagggaccatttacttgacaaattatctatacttttcaacaaatgcgactcaaatataagggattacaatttgccactgaaaactaattctgcgggatcatcctacggtaatcgatatatagaagaagagttatcatacaacttcaatgctttattaagt

SEQ ID NO: 71013 - DNA, 446 bp, Zea Mays
cgccgggaacctttaaccacgtcactgctagccgcaacagctcactagtgaccgcttttgctcctctaccagtgactaccacggtaaaacgccacggtgactcagtccctctctccagccaccgcgtgtcttctaaaaattagctgccaccaccgatggaacctataaatttctgccccggtaaactctgctagatatttacgcatccaacgcacaagcccgtgcctcagattgtccaccagaaccgcccaatcgaccattttccccaaattagtcagaatcccgccgtgaaggtttctcaccatagtcagcctgtctcaggtcaattcatgtccctctgttgaatgttctagcatctcttaggtcttctgttgcttgtaggctcgatcgattaaactagaccgtaatagattgccctgaacaccgtagcttcttctcggatttcg

SEQ ID NO: 71014 - DNA, 737 bp, Zea Mays
gatgcggtggaaagttagagccacgcggcggacgccggtgatggcttaacggcggtgagaattcttatccacgggttcggtgagcaagggggaggcacggcggcgagtcaccggagttatccttaggcgcatggcttttacctggcggccttatctggtcactggtggcgtaaatctcaacggcggcgacgtgaatcgcggcggagatcggtcttcggcggtgagattgccgcgctggcgttctgatctgcacaggcactgtaccatggcaattggcattcagccgttctgacagaccattctttgagcttgattttctcccagattcatatggcaacacaaccagtgatctgcaacaatattgtagtgctataaaccgactacaactttgctatattgtgctcccacaaaaagtcaatggatcttgcttgaaattgagcttgaagttcatgtcattccagtgttagtctgatttcagactttaagtagtctgacagtccaactttgggcttaattatttccaatttcttctcaacaactatgcttacactcttcagcaaaatcgttctcctttgtttggtctacaagtttgatgtggtgacctagggcaaattctcattaatttgaaagatacaagggctcaaagttgaagcaatcacactgaaattcagacttcatcacatgagtcaagtgtggctcttttgcacttaagtccaaatctcaagttttggattgca

SEQ ID NO: 71015 - DNA, 407 bp, Zea Mays
tcctagagtcactgacactttacaaaaacatccccctagttctatttcttcacagcccgaagtccacgatggcgaacagcgcagggccgagctccggtgagcctacaccggccgattcacgcaacgatcggtgctctacttcggcgcagacctaattcaagccttaacaagtgtttcccctcaactaatttcactatcggagctcaaaaacgctctgtccacggtgacagcggacacgacggacattcaaacgcgttctcggtgatctaggactgcttagctaaattgaatgggttagtgagtatcaggagcaagtaagggtgctgaaacaagaggacagtgggcatgaacggacctgaaacgctttggccatggcgaggtcacaccgcttggtgttcttgggtgat

SEQ ID NO: 71016 - DNA, 1040 bp, Zea Mays
tgggggccgggcggtcagcgggagaggggagagtgtggcgcaaggggcgggcacacgggataaaaggcatatgatgaataaaatgcttcatgagatgaggtattagaggataaataatggggggttaggagtatagggtttctaaccttgggaccaaaaactgggatgttacagacctaccccacttaaaggaatctcgccctcgagattcaggctgggtttgagaaaagataagggtattccctcctcaatgagtcctcactctcccatgtagcctcctcttctccttctctgctccactagactttacagagccttacttctgagtttcgggtctttcgaatggctgaatcgagaattttcactggcttttctcggtattgtagatctttctgaatctgaactgcctccttcgtgatgcgactctctagtactcttatgcatttttggagctgagatacatgaaatacattgtggatatctgtcatggactctggtaactgaaggtggtaagttgctggtcctattctgccgatgataggataggggccgacaaatcacggggctagcttcccttttgcttggaatcttttgaccccacgcattggggataccttgaggtagacaaaatctccttcctcgaaactgagttctctccttctgttgtctgcgtaactcttttaccgactctgggcttcgagtagtctcctgcggatcagggcaactttctcttctgcctccttgatgaaggcaggtccttctagggtcttttcccctacgtttgaccacatcagaggagtttggcacctccttccatacaaggcttcaaaaggtgacatcttgatgttggcctggtaactgttgttttacgagaattctgcatacggaaaactggacacctagtctccatcgaagatcagcacataagctctcaacaaatcttcgaggactttgttgactctttctgtctgtccatctgactagggtggtaggcggtgctaaagtctagcttggtgcccatagattgctgaaggatcaac

SEQ ID NO: 71017 - DNA, 1023 bp, Zea Mays
gcaacaagataaacagtggatggctaccatgaacttatagtgcatggtgcacctaaggatcatgctatagggcatgtggagcctagcgacattgaaggtgacatactccgtgtgtgatagttggtggtgccaaaggtgatgggcaatgtcacctacctcattgatgagatgccacccatggtgacccatgggaagggatacctaggggtcaacctgttataggggatctgcatcccctcgattgcttgcaaggacaaaatgtttaggaccactacgccatcatgaggagcccacataacttgacattgtcgatgttttgggagacgatgagcgagtggactctagccctaaccatgttggtgggacagttcgaggagtcgaagacgataggggtagacgctcactaagggggctagaccactatgccatagtgcaacatctttacaacctacttagatgttgggctggctgcgtcactgtggatgacaatcatgatgcgacaggcttcgtggaagttgaggtcctcatcattgccaacattaccattttgttgtgggccaggttacccctaaggcagatcctcggtaggaaggttgctagggatgctaccactaatagtgcttgatgagctctgtcagctcccaaacggcacgacgatccaaaatgttgtggtcgttagaattgtgggttgtgcagaaatctttctacttggcccataatgccatgaggccccactatttggcctagcgtggacccctatcattgtcacttgccttggccccacctaggctaggagttaaagcaatgatgtattggttgcccttctttttgttgtgggtagggctacatgttgggcctttgccatagatgcctggattgatggcgcgtggagcagagtttagcaacgtcatggacatcgctagtggccaacttatctacttctcctcatcgtacaaaccctacctaaaggcgacgatgatagaggcaggggtgatgcataggatgatgttgtgaacctagctg

SEQ ID NO: 71018 - DNA, 1047 bp, Zea Mays
cgaaggacgaaggcccccaacactgtctatgccaaaaagagagaaatcagttgaaggctgaagattgaagtttagaaaatcaaaatggtaccagtgtgatgcaattgatttttgggcactataacttgtaatctatgagatttgggtccatgaaacctatagtaactttttaggtccttgattagtgaacaagttatgttaatggtgactgacctattattaatcaaaataaggagaaaaggctgactgaagaagggaggatcagtcaagtgatgtagattctaaggtgctgaaatatctatctttgatatttattctccttgctgtgtcttactttagaatagagtgaagataaagatgaggacatggcagggatgttcagaactttggtcatcactgaaatatcaccaagtctgaaatatctactacagtgccatcttatctctacccccttccatggataaacttccccatgccttactgtgctctagaaaccggcgtgggactgcagggttgagccacgcctccacatccatgcaatgtctaacttccccaaagttccccttgctctaatcccaagaagccagccatcccttgatcttttcactgcccatttaagagtaaccgaggggaagaagcaagagcaaaggagagatccttacctctgttgtcaaccacggtgtgtagcttcaacgtagttctattgccttcctttccccaaactataccctagatgcgcccaacttccttggtcaagttactcaacgtgtctggtgaccacgtcgccgatgccttagcctcatgtggccaggtgactatggtatggtttgacgtatatgcatccatgttctagtgtccttatagactggtgaagctcactgaggtatctatttagtctttgcggtcatagtttagttggaacatgggctcgacgtcacttgaactgctctggtgtcaacccaccaaaactcagtcagtcagatgccaattcatgtaagtgtcgcgtcgtccgtatcctactagtgctccccatgcccttaattcgaa

SEQ ID NO: 71019 - DNA, 660 bp, Zea Mays
cgtcatcctagtccatataagatgcaatggcttaatgattgtggagcgttgcgtgttagccacgtggtgaatgttcctttttctgttgggaagtacaatgatcatgtggaatgtattgtggtccctatgcaagcatgtcaattgctgctaggtcgaccttggttatatgatcatgatgtctagatttttggaagaaccaacaagttgtctttcttgtacaaaggagagcgaatctctttgtttccattgacactggaggaaattctgaaggatgatctaaagaagaaacaacgagagagcgagaagcacttgagagtgatccacaaaaatagtaaggaagagtttccaaagccaaataaaactccacagcctccaataacctagacaccgggaaaagagggattagtcatgatgacttggaagggggatctaaaataattgagtgaacctaatgccatgttctttgtgctcctgtacaaggacaaccttctttctactaacaacttaccctctacttttccaagtattgtctttgatgcattataggaatatgaggatgtgtttcctgatgaagtgccactagggctaccacctaagagagggattgaacatcaagtaggccttgtgcctagtgcttccctcccaaatcgtgttgcctac

SEQ ID NO: 71020 - DNA, 711 bp, Zea Mays
taacattccaagctaaaataagaagaaataaataaaaacccctaggataatgtagtttaccagttcatcatagacaaatggtagggacattcaggacaacattattgaacaagcaatattggtgccttggtgggatgggaccacaacctgcatcatagattcccggactgaaggagggcagccttttatcagggttccttttagttagttcttgcttttgttagtttcagtttacttgggtgattggtgttgtacctagacttaagattaacattgttctgatctctaaaaaaagattactattgctctgttcaatggttctactgattagcaatgacatcaagaaggcaaggaaacgaacttttttacctgtgaaaatccaggattaggtggtgtcttgttagagcacctccaagagaaaatgtaaaacaacccccaaaagattttataagatcaaaaacactttttagccatccaactgaatcttcaacttttccccaaaacattcgcatcccgaatccacagctccctctctcgcaaatattctccctctctcgcaaatattcgcgtcaaccaaatctccccaatcagacacttcacgcgcagagaaagttgtttcgcgccaagattttgcccgtgtgaatgtcttgttgatttctgatgccctcgctcgtccaataacactaataaaacattttggggaagaatttt

SEQ ID NO: 71021 - DNA, 693 bp, Zea Mays
gtcttggttcgaccatgtgcaaccaataaaggcaaagttagaaacattgtcactagtgacccacacacgacaaatctatcacgatggtccatgccctaagggcagacaatccaatgtagacacaaaattgtctagctatgaaggtcagacaatccacggacaacctcaagcaacaacgccctcaaacctctaggtcacgacatctagaagtaggaacatagatgcaaaatatatctaaagcatctgaccgactcgttagtgacgaccctacttttgaccaggcgctctccaaatatatgaatacaattgttttgcacaatcagtcagcagaacaataaggttcatccacaagaaggaagcaatatgtgcagaggcaaagacctattaaaccagcccgaaaggtggcgcaacgaatgtcgcttgctcatccgcctccagggatgtcatggtactttacagtctactcatcgtcgatgtgttgtcctactcaaggatagggtagtacaacgatgaatccatattacttgcccaatctgtttacttattcaggctggagcaccacaagtttttaattattgacatgttgatcaggtagctacgaccaaagatgatacaatcttaaacgacctctgtgcattagagttctatcaaatagttatattgtctgatcaaaaaagtcagtgacttacatcg

SEQ ID NO: 71022 - DNA, 557 bp, Zea Mays
ttgaaaggcgcacgttcttctctctcggaaactgccaagaacgggggagggatatataagataaaaaaagattaaaaaaaaggaacgcgcgaaatttctcgataagggaaaggggaacacgcttctgccattgcttggctccccccacccgaatcttttctgcttgttgaatctgaaatttgtgctgggttgagcagcgtccgtccttgcgcttagcgaattcgcggtgtttacgctccgatgcctcacgtaaggctatctctcaggcttcccaaaagctcgggtaggttgaatcgtggagagttccacagcgtcctagccgccgccgtggcctgacctcgccataaccttccattccatggaggtctccaccatcagcttctcgtccccgccgccgcgggccacgccggccgacctcgaggccgtcggcctccgccgcctcagcgacaacctccagcgcctgctcgacccggccttcctcaactgctcggacgccgagatcgcgctcgccgcggcgaggggcggcggcgccgtcggcgtccaccgctgcatcctcg

SEQ ID NO: 71023 - DNA, 855 bp, Zea Mays
ttcgacatgttgcatcttagtttttgcgggggatttttgcagatatattacatggctccgcctcgttaaaaacctcaccccccctgtaggaaaagagtgcggccctaaatagtgttgtttggtgaattacaagggcgcgtaggccctgaggacttagacaaaaaatttgcgtagattgtcaatattctaggaatggtctaggtcttcgccggatggcgttgttagcctgtatgcgctgggggatgccttcgatttgacgatgaatggaccttcccactttggctccagcttgccccgtgactctgtccgggtggttcggacgagtacgaggtctccttcgttaaattctcttgggatgactacgtggtcgcgccaggccttcgtttgagcttggtatttgtttagggcctgcagggtgaagacgcggtctccgtcaatgaggtctttggacgtgggttcgtcgacgtcggggacggcagatgcgcttgttcgaggggacccgtgctttatttcctgcggggttatggcctctgatccatatagtagtcgaaatggagtgaatccagttgcccagcattcagtagtagtagtttacttcaggcagctggtcggcccatttacccttcctgtcgtcgagaagcctcttcttgatggcagtgaaaatcttgccgttggcgcgctcgacgacgctgttagattgcgggtgatatactgaggcgaaggcaagcttggtgccgatggagaagcagaagtccctgaaatcctggctgtcaaattgtttgccattgtcgactttgagctcagatgggactccgaatcggcaaacaatgttttgccagaagaacttttgggcgg

SEQ ID NO: 71024 - DNA, 503 bp, Zea Mays
aagaaatatcgcgttggggatgtgctcgggacactgtttcaccctggccaccatacccccttgccttacggtcagtctagataacctcgccggagttgtccgcctgccgcgcgatggccacgtgccttgaagctttaccacgtcgcagtaagccgctttagatagctggttcatcgccggtaagcttgccacggtgaaagccacgcatcccttgcgccagtgacctcccctctctccgatcgctgcgcgttttctcaaaattagccaccaccgccgatggaacctataaatttccgccctagtgagctccgctaagtagttgtgcgtccagtgaaccagccctcacctccaatcatcccccacagctccccaatttgtgatttcccccaactttgtcaagaacaccgcagtgtgtgagctcgccgtggccagctctccacaggtctaatcacgccctcctcgcacttgtttcagcactcttgtgtgctcttgatgcttcttga

SEQ ID NO: 71025 - DNA, 576 bp, Zea Mays
gtggcataattgtgccagttgtagtatctttttccttttcaactctacaatccatagcttcaactatttttcttttaggagcaggtcaaagatccgctctgtcttggcaagatcaaagtcaaaatttgtcgcggcctcacgagccgtgatccagggtaaagagacatgttgtgcctccgaccccaattgatgactatgacctcgacttcatcagccgagtcatcaccttcctattaaacctgcacataagatatccacttttttatacctttcttggcatgcctcgtaatgttgtcattcaaaagacaatgaccatgctaacagttcaccaatggacttgaagcccatcacggcatagatgtcgcatgtagggcaaagaaggtgtccgaaggccaactctactaaggtcttctcggggacacagggtgagtaacatttgttcacatgtattggaacctccgactgattcgtcgattcacctcgttgttgttggagagcgatgaggtccaaaatcgtcatctctttagagtcaaagaataatacgtgaaacatgctcctccatctacctccaagacg

SEQ ID NO: 71026 - DNA, 690 bp, Zea Mays
agttttgccaatggaccgcatgcatgctgtatatataaattaaactttgcgcacgaacagctcaaccccttatgactcgtagtgattgctttgctgaaaaaacataccagcggctagcacatactagtgctctactagtagtagcgacgaaggaagattcttcacacatgcatgcgatcatttcgcccaggaagtgccgcgccggcccctgatcgctcgttagcttgatcctaacccttttccccttcacacgactaaattaaaaaaaggggcacacaatgcaatgagatggcattgacatctttccatagtactactccatccgatccctcgatccatcgcacaattaaatcaaaagttcatttgccgatctcttggcttttgtgattcctctcgccccctttgtgactttcttctaagatggctgcatgtgtgtagcccatttaataatcatcagttttgagtaagttgctcacacatgtcttttctgttcgatccccggctggctagctagctgggtctttacaatattcataagcagaagatgcccttttggcgaagctagtgtatactagtacgcatagattcgaagaggggggaaaagcgagcttcttttcacggagctagtaggaggaactaaaccatggggcgccggcgaacagcccgtcattcttttcagcagaaatttta

SEQ ID NO: 71027 - DNA, 411 bp, Zea Mays
gaaagtcggacggtttcttagtgtagtgcacgatccgacggacaatctgggctcaagtccattgtcttctcgggtcggtccattccactcgtagtctttgcccggcccacgatgagatggccttgcggggtaactggccctttgccccgcacaaggaactttcgccttctagtggacccaggggatatatgtcccccacagttgtctccctccattgcgcacaaccagagaaggaaacgatgaagggatgggaggcctcccaacagagtggggactaagagtgggagagcacaccaattgaagcttaccgaagtacaaccatctcttcctaaagttgatgacgagcacctcatagacggcacatccaagcatcacaaaccaccatccaacgcccttaaaggggaggaagcc

SEQ ID NO: 71028 - DNA, 407 bp, Zea Mays
ttcagaagttattatatgcagtacttctaaccgcccacaagctacgtcactactttgatgaccacaaagtcatagtagtcactagttttctgatatgagatattcttcacaacaagtcaaccaagtgggcctgcgaactgggatctcatgacatcgaatttcgacctcgcaccgccatcaaaactcaagcattggttgacttcgtatcagaatggactgaacaacaagtaccagataacccagaaaccgcagaagtatggcgaatgtattttgatggctcgttaaaactgcagggagcaggcgcggggattctctttaccgcacctagaggcgagcacctcaaatatgccctccagttgttatttccagcctccaacaatgcagccgaatatgaagctctgattcat

SEQ ID NO: 71029 - DNA, 478 bp, Zea Mays
catatgtactccaaccggtaaaaatagcatacgccatgaggtcatgcaccgaccacaaatacgcaactcgaagtttgaacatctgttttttaaaaacatcgtatgcttcgactcctttccgaagctccttcaactcttcaatcaagggttttaacatgacattgagtttctttctaggatagtccgggccaggaatgattaagcaaagaaatataaattcatatttcatacaaagagaaggtggaaggttgtatggaataacaaagacgggccaacatgagtataatgatgccatttgaccaaaaggtgtgaagccatcggtcgcgggaccgattcaaacattcctcggttcagctgcaaagtctggatcaaacgtgtcgagagcctttcaagcatccccatctaaagtgtgcacgattatctcatcgttctcacggacaccttctttgtgccatcgcatgtgcatagtggtttttta

SEQ ID NO: 71030 - DNA, 402 bp, Zea Mays
gcggagcaaaaggaattcccatagagattgactgacgacgaagattgtcatccgtctcctgctgccgccttgccagctcatgcacatcagcagatatgtccctgcacatagagaaaaaggctgcaatcccatgagccaacctggcccccaggccgtgaccacgacttcgaccgtgaccatgtggagtgggagagacacgaccaggggaaggacgggagggaccagctgaggtctgctcacgagagctggcaggagccttcttcatcctgccagcgggattattaggatcaatccaaaaaggggtataagagagatgtctggtgcccttttcatatctgatttgggtgacaacctcaatcatcttcatgatgtagggggcatgcaaacaacctttgagtggag

SEQ ID NO: 71031 - DNA, 380 bp, Zea Mays
acgatggcattgggtgtcaactgatgaagatatatttcaaaattctttaaaacttctcctatcatttcatgtaaaggggaccgaagccctgccctgaagaagctcttgaaaacaacaacttcgtcctcttttggttctggaaccaccacctccccagcaaagcggacaagtttgctctcggcctccccaaaataacctagctttttcatcataaacatgtcgcctgttgttacagtggatttcccaaatttaatgtggcttggcttcgacaggcttaaaatgttgtaatcttcttcagactcatcatcacttccgtcctcagctgcaatctgctcagcttcgggagcttcacctttggaaatagctttttccgatgtcac

SEQ ID NO: 71032 - DNA, 391 bp, Zea Mays
gttggaacttgctaactcatggtcagtcaagctcaaacagtggaaagataggaaaatgtttgattccaagttacacaaacacaatgtattagggaagcagtgttttttcctgtcccccgcaatggtgttgtacgggggtatttataggtaaccgagggttggccctgccctgtcaaaggcgattataccctcggttacctacgttatccccggaatattctcccttggggggttatggtgggtcattatagtgtaattaattacaaacatggactaacacactaacaactctgccagcatagcggcctataggtgggatcatgtaacatgggccgactatacatgggccccttattacaattgatagtaggttacaacacatggtcttcgc

SEQ ID NO: 71033 - DNA, 658 bp, Zea Mays
ggccgcgctctagaagatcgggctctagaagcatggaacatgttcagtgtaaagtcacgctcatggcaagtatttctaactaatctggccggcatagttgaaataatttcttatgttattgtcatcaaacggtgcagtttccttatagtccttaaccaattcatatatatttgatgcataaacaggggccggaactaaagatttttgtgcaaatatgaaggtagggggtggtatgcctctggactaattcatgatgaatacacgagtaccccagatccaaattaatgtaacaaaatcgacacatctgctagtctacgcatatatgaactctaaatctatctatgcacaaatgaaacagatctaagcgaagagggcagtgaggagaggtatttcaccttccttgacgacgatggaccaaatcgatgaagaggacgatgacggagacgggctgcgcttccttttctctgcatcgaccttccttcgaggagggaacacaggggtggaggtgtttacagacggtggctgcatgcgcctgcacagctgggcctcgaccctagcagcataggcgccctccacaatgtccctagcaggcagcagtggcaaacacggtcgaacgtcgaggtgggagaggatggtggcaacgatgacggctagcaac

SEQ ID NO: 71034 - DNA, 490 bp, Zea Mays
gataaatcatgatggaggaaaagcgaaggcagacgaagactgatggagcgaaggccctaagacggagggagcgtaaaaggcaagcgaaagccttaccggtcccagtcagagccagaaacggcgaaggcctctctgactgccgaagacctggcgcatggagcacggaggcttctgtcgtcgcccgcgcgttgttgaaacggtgggcccgactaaaatcgccctgggccgcctagtcccacttgtaagccactacgtgggtagagttgatggtgtgtccatctgtgttgtacctaatcacgctgtaataacctgtaatacctctttagaggggaatattttagagataacgtagataaccgggggcataactgtatttgccaaggtgaaaccgtcccctggttacctataaatatcctcgcactgtaccctattgcggggagctaggaaacactgttgtctaatacaatgtgttgacaaacatcaaatcatc

SEQ ID NO: 71035 - DNA, 345 bp, Zea Mays
gtgatatataggggccagtcttgacacagttggcttacactatgacaaaactgctttgttggctcaaattcaacatgcgattatggaaaggggaaaagaaaattttggtaaatctttttcatcaagcaacgttgttgtggtcaataagcctaaagtcaaggaagttcatgagtctagagggttgagtaaggagaggcaattgagagagtttagagggatgaatgggttgtgttatacatgtggggaaagtttgagccaatatattaggccaaatatccaaaagggctacaactcagttgaatgctctgtcagtagatgatatggacatgttattatcaaatgaaa

SEQ ID NO: 71036 - DNA, 696 bp, Zea Mays
caatgagggtagacaaagcaggagagggaactccactactttcaccgttggcgatgaaccaccgactgtttttccgagtcaaaggagcttcagtctcttcctcctcatcatccacattagcaacacaaacagcacatccattggggtcagcaacagatggagcatccacattgggatcagcagcagattggggacacccattggggtcagcatcaacaagtccagttgcaggcatttcttcagtagcaggaaccgaggtaccagcgtcctgatcaaagctggatactcgccggaggcgtcttcttttcttcttctgctcatcagcagaaggatcaggctgattgactcggcaagggcgcctcgggcgagtactgacaggtttctgagcatccaaagtcgtatcaacctctaggaggggcaccattgccaacgccccagcaggagcagcatcagaagaatcctcagctagcaaatcgagcatagcgtttatatctgcatcactagggtgcaggggcacctcaaaatggacctgccgctcgtcattaggaatctccccaagcgaagcaaccaaagcactaacttcttcagcagagggtcgcactctaaggcccaagctgtcatcagtaatgggtggattcgacacgaaaagggtgaaggctttgggaggaggcaagttccaggccgagtacgccactg

SEQ ID NO: 71037 - DNA, 366 bp, Zea Mays
caaatttgggagatccttttggaatcaaacaattctgtggcattgtgaatcctctgcattcagacattttggctattggctgagataacatgtttcctgaatttttgtactggtcctaccccattcctctagtttactgtcttgtagttgtgttaaagaaaatgtttgacaagcattataggtgtatataagtatgacggtttgtgccttatggtaatttatgctagttgcgaaacaacatgttgctctgtgttgcttgtgtcagattttcctactgctgcaaaacacacaaaaaaccctttggtttgtttctatttaagatctttatgagttgatactttagtacctaaaaaatctgctgaactt

SEQ ID NO: 71038 - DNA, 387 bp, Zea Mays
gtcatcctcaataggatctcttcctaacagggcctgaagtcttttcctccaggcaggggtatttttgttgctaggtgggaagtaacgaaggggggtttcaaagacctccctgctgtagttttggcatagctgtcggagggcttttcgggcaatattttggcaagtgtctgggaagcggtgtctggtgaaggtgacttggaaaggagggtggttcggttagtttcggttttctcccaggtagactgccatagagcacttctcagttccattctcgtggtattctttccagatgtactccgatttcttgcgaatctccatgcgaagcgcgcaactccacaagagatgagggaatccttccacctctgagcagtaggatgtcctaatgac

SEQ ID NO: 71039 - DNA, 728 bp, Zea Mays
gttatttgtaggttcttagttcacattgaactcttctaaaattaaggaacttcctttcttctttgctccgcaatgtatactaatcaagcgaccttcatcatcgtacttataaaatggttggtcttctgaattagtgtttaggtcctgcttgacagctttcttctatagtcggtctagacgcttcttggggcattcacgaataatatgtccttcatttttgcagtagtagcaagcacctcttactttgagttctttgtgagtcaatttttcttgaccaataggggatgagggttgattgggtgtctgtatcttatatagctgagcctgacttgattcttctgtttgggtatccatgtgtttcgtggcttttgcttgtgattgaggtggactaatcatgtatccaaacattttttattccttttgttgttcttcattccattcatcagatatctctgtgattcatttttctcgttcatagttgttaaggtaggaattttgtcattggcatcacctacttcactggggttcatcatctggttagagagtaaaagagatagtgagacaagattgcataagaggcttgcatgacattaagataaagagctaacacaacattttgatttccaagataagattagttaaggatgatttccgattccgcctaacttcatcatactacaagagtgtacaagtgttataatccttaacaaagatcttttgaatttttc

SEQ ID NO: 71040 - DNA, 485 bp, Zea Mays
agaatgaggaaatatcttttgcactcgatgtgtttatgttagtgtattaatttcagtattattttctgctttattttctgtagtaaatagcagaaaattatttgaaatacatgtgaaggttatactatgcataataaaatcgctctaaatatttgtgtcgctttgagctttcggactcatgtcgagcgattagattgtgtaatgggtactcggactcgtcgatcaggctacgttgttgatcggctgagttatgacattggttgtgcattggctgcgtcctggcaatacgacgcagtatttgtgtcgtacgaacttggctgcgtcatatgattgctatgtcgcactctcgtttattcggacagctcctgttgagtcgaaccgccatcactgagtcacgtatttttcgcatgccctgtaggcactgtctgtctgccgtgatcattgagccacaattgcgcctgttgcgcacgttacgtggacttatc

SEQ ID NO: 71041 - DNA, 594 bp, Zea Mays
atgtattgtgtatttgtgtggttgagacttgtatgtggatgtgaatgaacaatcgtgttttaagacttatgtgttgtgtgttaaaatttaagagtggacatgtatgagtgtatgaccaattatgtgtggataagattgtgttttgtgtacttttgtgaatgagacttgtatgtggatgtgaatgaacaactgtgtggttaggatttgtttattgtgagcttacagctaccgtttccctgtcaatttcgagttattttgctcgtatttatccgttttcgatataccagaatttaccggctattgtccgtttccgactttcgcgtttaccgattctgaacgaacaaaaaattatgtggatgaaaacggtgaaagattttttcggaccattatcgaccattttcatcttaggtgtgttgtgttacgtttgaaaaaaaaaatatcatgatttctctttttagacaataatacaagggtagccattttggccctgcccgtgcccgtgccgaactttcttactgcagaagttgcttgcgggaaaccgaaggagaagatgcaagaatcacttaacaatgactgttccctcgcccaaaagtc

SEQ ID NO: 71042 - DNA, 786 bp, Zea Mays
gaaaagggtcacctcaagaggaaattccaagtcctttgagctcagcagcaggacaggcaccagagaattcgatcctttgggctcccacccaagggaccaagtttcaacaagccagctggacccactccatcacattacagtcagtagggtcaaagctccttttaggccccctccgttgcaagcaaccaacctccagctaatgcctgttggcactgcggagaccccagtcactacaagaataactgcccccagttgaaggtatccgggcctacctactccaactcggtgaatggccccaagaatgccccatcacccgcctccaaggcaccctcctccaacagccagcagagtaagacccagtatcatggcagagcacgagtaaaccacgtcgatgctcaagaagctcagcaagctccgggatagtgctcggtgagttcctagttgaatttactcccgctactgtactttttgattcaggagcatctcattctttcatagccactagttttgtggaaaagcatgacattccctttacacacctagaaattcccttggtcatccgaaccctagggtcagaccttctatgccaactcaaatgctcctaagtcagaattcttttaagtggggtagtgttcttggtagacttggccgtcttgccatcccaagggattgatgtgatcttaggaatggattggttaaacaaacacaagggcatcataagttgcacaaataagaccattcttctcactgaccaccaaggaaagtcagtttcatgtcaggctcaac

SEQ ID NO: 71043 - DNA, 568 bp, Zea Mays
cgagtacaaataagatgcagggctagtaagaccacaaagtgtttgatcccatcgtaaggattggcctgcactccttctgattttgtaccttttgtaaacaagcatgctggcctcaaacgaccttggagattcggagttggatgctgtattagtcagcaatgaaaccctttcatgcgggccatgaccaaccacagcagacacatggccagtctggtgtccggtactccggtgggtgccaatgtcaagccaccagcgcagttacattaatgtcctcaacttccttcgccgtcgttgcaagaatggccggcggcggctgagtcgacgcgtgttcaccgtgagaaagatggcgcaacagaaaaaggaggcggaaagctttgcgaacgaccatggagatggatgattcattttccaaaaggtgcctgacagatatataaactgataatagcaggtggagtcatttctaagccattgcgtgtgtgtctgtgcaactgtgctgcatccaagctaagaccaagatcatcgtcattcgtcagagccttcctaccggcaaccaactccaacgaaagcc

SEQ ID NO: 71044 - DNA, 432 bp, Zea Mays
gataaaaaatgaatttggaaaagaaaaaaaacacaagaaaatagaaccgtcggccaatctccttggcccaatcgcaccttgccttctcctctctttactcacttacgcatggggccctcttgacagtatttcttcaacctttagcatgtattcagttctggctctgctcgccgcaccgtttgttcgtgcgctgcgtggagccacactctgcccacttttgtgtcgcactgcgctgtgccgtgcccaaaaccacaccaccgtgacttctcccctcccattcgcgctgcgctgtgacttgcctcctctctcccacttgtgccgaccgtttcttccaccgtgctccatctccattaatggccgcgactgtttcctcgagtaggtaacgctcttcttcagtccgcatcaatggagtattgaatctagccgcaagcc

SEQ ID NO: 71045 - DNA, 1019 bp, Zea Mays
gccaaattctggaaaatccaggggccaaatcccaactctcccaagacacagagcacagtcaggcaggactgcaggttgttttctgataattatggggtctcttatgcaaagttacaaggccgaagaggtatggaatactactggccgtccgatcgcgcaccaaccgcccagattagatgctacttccattgaaccggtatgcgctatcagcccttggatctaggatccacggtcagagcatcacgtgacctaaaaaccatccgatcgaagatctgcggtcatgattcaatgccgcgaatggttatcctcttctctaatcacatccgtccgttaagatcagacggccgaacggccttgctcctattctccggccgacccgacggcctcgccgccagaccccacggcggaggccattaccggcgatagcgttcctgcgacctgagatccccactcgccgaccaactagcgcaaatcgaatcagggaacatggagaatctaaagaagtaattctcaccgcgatcggagcagtgggatttcctgcccacggtgagccacggccctgaagatccgacgagcagttcgccgcgcgcccttgcaccgttttgcccgcgaagacccgaaggagaaacttggtggcgtggtgaagctcactgggtcgagctcgtgctccgaatggcaacaggaatttggacccatggcggcggcgtggatttcgcccgcggcggcgtggatcaccccatagctcagcctcgagaactatatggcgaaggcgtggtcatcatccgtgcgcgcccatgaacacccctccggaccctgccccgcgaccgaacaccggtgagtcgacgactgtggcggcggtaaatctccggtcccgagcgaggcgcacatggcagcgggttttcctccacacagcaccgatgatggtgccaggccgaggcaagatgggatgggcgaagggccatagagcatggttttataagctgaggtggagtccgaccgaggatcaatcaccacggaat

SEQ ID NO: 71046 - DNA, 396 bp, Zea Mays
tttagacagctttttaccaagtatgtcttgaaaattaaaatccttctcctccgaagtatcttcgacaatctccttctctttcccgggcactggggccagggtctcttcgacagatgtagcagcttcttccgcggccaagttcaaaaccatcttgttaatatcagaaaaagtgccctctagatttgtatctttggccgtctcagcttcgacagttgcagcttcggcgggggcagcatcagtagctgcagtgtcttcggcagccggtgtttttgacgccgaggccggcggtggcgtttcttcaataacatcaataacagtgatgatccttcgcctttttttagcaggcttcttgattgccgcaggctcctccttcttctgtaaaagcttcatcagttg

SEQ ID NO: 71047 - DNA, 473 bp, Zea Mays
agaaaatggaggtcgacaaagctaattgttttaggaaacatgatcaaggagtgatatggtttaaagaccgcatagtggagcctaaggatgctgaatgttgtcaacaaatcttggatgaagctcatcttagtcagtattccattcaccctggaagcactaagatgtaccaagacttgaagcagcattattggtggactaagatgaagattgaaattgctcattatgtggcaaaaatatgacacttatagatgtgtcaaggcggtacatatgaaagctgctggacctttacaatcattgtcgatcccaacctggaaatgggaagacatcaatatggattttgttgtgggattacccaagacatctaaggggtatgactctatttgggtcatagttgaccggcttacaaagacaactcattttcttccactcaaaacatattacccggtcattacctatgctcagttatatgtggc

SEQ ID NO: 71048 - DNA, 563 bp, Zea Mays
gaaaaaaatcgagaaaggggagacaagggttcgaccgagactctctcccctgcttaccatgttcatcgcaaagagtgttcttgacaacacattttatttatgatcgttcggggttttacaaagaaggcgtatatccgcttcggctagtcatctactacgggatcttttgccgtaggcattacatccgatgtttcctccagtcctaccatgtgtggggtcccaccctagtaggattatcgacgaagctatggtggctgaacagtcctcgtcccccttatcgctaggggggctactgatcatcgcccctagagggacctagatctgagtccgagtccgtgtagagtgcatcgtagatgaggtcctcgccgccaccggccatctccatgaactttagtcatctgtcgtgtggaggtggccatgggccatgagggcagtgattatcgccggggcgtggtgcactcgagatggaaaggcgtcgaagccgttgcgagagctgtcatggtaaggcatcgtctctgcgtcatacgacgcaaagagctctgtgtaggatgcgaagaagactg

SEQ ID NO: 71049 - DNA, 334 bp, Zea Mays
atggttgaagaagaagctgctgcggctgcggtggacacgacaattgagaaaggaaaaaagcaaattgaagacactttggaagaagaaaactttaattttcaagatatacttggacaagagttatcagaaactgagaaagaagagctaaagaaatatgctatatcctgtggatacaaaccagggtctctgttgtttggcggagtcaatgaagggaaattaagatgccttcggaatcgaaccgaggccaaggttgttaggactttctcaaagagcgttggcctgccgaagattgaagcggacctctgcaggtaccagcgacagcatatcgccggta

SEQ ID NO: 71050 - DNA, 626 bp, Zea Mays
gacaaagtggtctcatgtcccactaaccttcaacacaagagacattgacctccacacagcgcctcactcagatgcactggtcatcagctgcaacgtggcaggatgagagttgcactaggtcctcatcgacaatgtaagtcaggttgatatcatcttcttgtatgccttcgattgcatggacatcaatcacagcctactccaaccaaccgacaacccattgtactattttggaaggaaaggaacgtttccagtcaacaagatagagctcccactctctcttggcacgcctccaacgcaagatccgagcaggtaaccttcaacatagtcgacatggtctatccgtataatgccataatgggacgaggatccataaacaagctcaaggcagtcattcacggactctatctttgcatgaagatcccggggccccaaggtgtaataactatctatgccgaccaataaacgactcgtaacattgaaagagacttcgtcctagtccaacgcaatgttcactgtctcacctccaagagcgaagacccaagcatgaagcgctcgaggaaaggacttacaacaaaagcttggctccaaagcatcaaagtggccaaaaaagtcccactcgacacatc

SEQ ID NO: 71051 - DNA, 427 bp, Zea Mays
gataatcgcttgtgtctcctcgcacaccatctaaagtcggccatgtagcacatttactggttggttaaggacccacggtctaaacacagacaaagctggtcctgactatgaatacacacatctcgaaagctacagtatgtgtggcggaaccacccagattattctagcttaattggctgagtcccgccttagagccaatgacatacttaaatttgaataaactgtcagtctgttgtatctagtccgataaaacctctccaaccagatcaaataccacttgctcacttgaaggtgagtcacagagaaatacaataaagcagaataccacaaatttaagagtaccaatattattacaaaatcagagttcaaaagtaataaaccatagtttttaatgcagcggaaataactaatgacgatactgagtaac

SEQ ID NO: 71052 - DNA, 604 bp, Zea Mays
aggaggtttgtaatttaaattgaggtatgaaatgacgtggaattgagctgatacttcacgaataggtttatatgggtgaatatgagtgaagtgtgtgcttggtttgaatttaggcgaagaaaatggaatttgggcactcggctcggattgatcgctcgaaatagggaattgtgtgaaattgaagcctggaatatcggattggcgtgaaatttggtgaatatgttactggaggtgttgttaaggtgcctgaaaagttgggttcaatcggagcatttttggctcgtttggacatttcaccgaacacgtagtatgcggtgagatagggttttggagatttggtcaatttaggctgtaaaaccctccctaaggagctaggaacctgcagggggtattcaagaagcacaaaggaacacttccaaccagaaggattcacaagaattcacaagaatttgaatttggatcaaagtggtggaagaggagtgcactgctcaatagaaaaacagagaggagggagagggagccagagctgctcaccagaggggggaagaggtgagcaccggggtgaggtcaccggagggcagccgccggtgagaaggatcgccgg

SEQ ID NO: 71053 - DNA, 542 bp, Zea Mays
ttgagagcttgtatgaacttgtgagttcgagtgagtgtgagagtgtaagttgggtatgagtgagccttttctttgtaacgtcgtgtgccctgccttttatagctaaggggggcacgtacaaggatactgagctccgacatgtgggcctagggacaaacggaaggaagcaactaacgcatgtaacaccagggtgaactccgagcaccataatgtccatagtgcatacagtgttgatatgccgccgcaccttccttggtacgcgcgcgtcatgatgagtgcagcgcatgcggcagcatgggcgtattgcctgccaacggaatggataggcacgccgcctgtaagatggcctggtcgccgtctgttagtatagtggacatggaacatttaatgctgaggcggcacatcgcctgccagtggagtgatagggctcattaaatgctgaggcggcacatctccggccagtttgacaggcggcgcgccttatccgcaataaatgcagaggacgcgtggcccagaggccttatgtcaggctccgcccgctg

SEQ ID NO: 71054 - DNA, 885 bp, Zea Mays
taccgcctccgggaatggagcagggtttcccctgagagctgaaagggaagccgatagagaggaaagtgaaacccacctccccgcacctccacaactacccttagatctagcccaagttctagccaatcaaacccgactcatcgaggtcctcactcgaagtctggaaaatcaacgtccgaatggtggaagaccgcaagatagaatgggggatttcctgaggctcaagcctcccacgtttgccggatctagcaaccccctcgatgcagacgattggctgcgcacgattaaaagaaagctggaagccatcggatgcccagaaaatcagcgtgttcaactggccgctcatcaactttccgggatggccttagcctggtgggataccttcaacgtcaccatcagaggtgctacttgggccgaatttgaaacggctttccgggagcacatgtgccccaggggctcgttcagcttaaggaagatgaattccgggaactgactcaagacggaagatctgtcagtgaatatgtgcacaagttcacggagttagcccgctacgcgccagatgacgtcagtaccgaggtcaagaagatggcctatttcctgaagggactcaggccagaactcaagacaattctggctagccaagacttcctcagtttctctcacctctccaacaaggccatgcaagttgaaagggcaaaggaggaagaaaaagggcatctcaaaaggaaattccaagtcctccgggctcagcagcaagaccggcatcagaaaactcgatcctttggatttccacccaagggaccaagcttcagtagaccaggtagacccaccccatcatggttcagtcagtagagtcaaagctccttccatgctccctcagttgca

SEQ ID NO: 71055 - DNA, 473 bp, Zea Mays
cttatgctatgtatagcagcccatagacattcatgtgaaaattgggtgacttgcacaaggattcgagcatgaaaagaagttgtctattttagcagaccgcagttgtgggtacagggaggagagaaacaacataaatgagaggttgagtggagccggtccactcgtagcctgtcaaagcctttttcacatcgaagacgttataggagagctagatgctagactagcattacattaactattttaggtgtgggaccatgaaccgaattatggttgactggcttccatacgggagccacgaccacacaaagaggtattcgtgaggtttcatagccccatgcaatgattgatttagcaaagtagaggtgcaatggggggcaaaaaaaccttttcaccatgcttcaactcactttcccgctcttcgtattcgagcatgcacaacgacgacctcgatgtcgttagatctacgactcaat

SEQ ID NO: 71056 - DNA, 364 bp, Zea Mays
caacacattcattcattactgcatcatgggtagaagcacataatcttccaatcactaccatgtcaacccccatttaaattgactcagccggtggtagaattcaagccgatagcatttgcttgaatgtaagtgtggaaataagggggatagcgtttcccgctaacctcatagtaatgggtactcagggaatagatgtcgtcctagggatgaattggctagataaatatcaggcagttatcagttatgataagaggtcaatcaagtcaatgtccccgctaggagaggaagtggtgactgagttagtcccgcctgagccgaagaaaggaggttgttatcagatggctgttgtagcagtgaagcagac

SEQ ID NO: 71057 - DNA, 410 bp, Zea Mays
aggaggtgtcgatctacctgcacgcattcgctgaaggagggcagtagctaatccacaactggagatgaatcccccaaatcctccgcctattgggtcggaagcctttttcgtcgcccaaatccagctgctgcaacatatgtccaacaccatggtgaatatgcaagctaaactccacaataatcagcaacatcgaccaccaccacccagggataagcatcgcgagttcatgagtcacaagccatccactttatctagctccctagatccactgcaaactgatgattggttgaggtcaatggagaagttgatcaatattgtccaatgcactgacagggagaaggtactctacgcatcggatcgccttactggccccgctgttcactggtgggattcttactgtgctgcacatg

SEQ ID NO: 71058 - DNA, 710 bp, Zea Mays
gtaagaacggagatgctctctcatggtcaaaccaagcttctttaccagcttaatgttcatcgattgttgcaactatcggtatcgatgatggtatgtacacgatagcccttaatgacgagaaacatgtggataagattatggtgttgtagcttatcatactaccccaccgtgacactcaaaattcactgcataatagtgccatttcgcaacagtaccaagagccttcacatcagtactatcgtcattgctcattgcaatgttagcctcaagaatatcttcatcctcaatatcagaaacattaacatacgaacccaccattgctgatggcaatgcacacccattttttgggcaatcccacatcatatgaccaagtccctagcaacaatggcacttaatgtttgaagttcggtcggtggatgtgttggaagaagtcatggttgctataccctagtggtattgttgttgtccagaacacgtgacatagaaggtgtggtgttgcatgcactagtggtggatggaggcgtcggcgcacatatgctcaaagaaggtgttggttttcgcaagttcattctacaaaatgatagcaaattgaagtctttgaactcactagtagcatgtctaactctttgttgctgaggaataagatgggatatgactctctgttgtcttgaatcttattatcgcatatcccttttgttttaaattataag

SEQ ID NO: 71059 - DNA, 335 bp, Zea Mays
aaaatggcgcctaaagacccctagaacaccctggaaaagtttgaacccaaccctaagtcgtttgacatgacttgacacggtttttgtctcggtgtggacagctcggacagagccaacttcccacccctatatctctcaaccccgaccatatctttgcttggaactcacatggaaaagataggatttggtgcagagaagagaccgtacatggaatttttgctgagatctgcacgctaaggcgaccaaacaagccgttgaacactggaagaagtaaaccaccacgtgttcgacgtgggcagacactcgggaacgcgacagagcacgcccgcacgtgc

SEQ ID NO: 71060 - DNA, 923 bp, Zea Mays
gtcgacgctcgcgtttcctgtgctgctactagtaaatactgtactctccgtgctgttgctgctactagcatcttccgcgacagctagtcgacatccgctagctccatgtgcaacgtaacttgagcggctaggtgtagtatgcgattcccttcgtcgggaaggaaagaaaggaagtgagcaccgcggtgcccatggtgtgcagtctgctgctgccgggtctggtgctaatgcagacacgacaggacaggtagttcttcccgtacgtcccagtcctccatgtgatgattgctagatggtaggagaacgtagtagtagtatgtggttccattccatccactgagccgactcaaggattctcgaaacaagagcagccacacctccgatccgacctatatagaaacaaaacaagacagacgagcatatcacctgcctgctgaacccaacagtacgataccatagcacgtgaaacaagtatccgatcccttgcttgattcccttcttcgctcgcacgcacaccataataccatatcatgcatatgcatgggaatacccataataacgcaatgttatgagcacatgtcagcttaaccatgcgcaactatagttgacttgtgctataacatcgcgctattatgttgggtgggtgggtactcccatatgcatgatacggtaattaacaaagccatgcatgcttaaccaatgcaaaccatgttgtgttgagagttgagaccaatggtcttcagtctgtcccaaatatatgcagacaccggtatgggaaaaaaagaaaagaaaagaagcaagacgacagactggcatcacagcaagcgtaatgatcaatcaagttgttgttgttttggcgtgattaaactaggtgacaggatacgcccctgcctgctgaaccgcccagcagtaagagagactgg

SEQ ID NO: 71061 - DNA, 459 bp, Zea Mays
caagcacgcagggcacgacttccagcagcggctaggagggaaagtaggggatctttagctattttggttagtccttaattagtggagtttgttactccttttggttgagccgaaaggctataaatataaagatctttagctattttggatggtccttaattagtggagtttgttactccttttggttgagccagaggctataaatatgttgtaatcaaacacttgggaattaagaaagatattaccatctaatcctctctcttcctctacctaagctggcggcagagggggtaacccaccgacgaagaatggcggcaagggggtataacccggccggccatcacggacagcggctacgatctacgtagctaaggtccccctaccctcgggctcactacccttgacaacctggtatctcagtcttatcgatcctctcccaccaactccacccaatcttcc

SEQ ID NO: 71062 - DNA, 630 bp, Zea Mays
aacacgcacaatcacgcgtgcatgtacgccagagaccagagagcctgaccacgcacacagagacacagtgtcttctctctctcgagtctctctccatcgacgtctccaactgaaatgatgaaaccctgcttccggaggaggaggagaaggaggaggtaggagaccagctagggaatagtgatggccgatgggcatggaaacagatgcggacgcgcgcatggttttcagtgccgggatggctttctttctcggtctatagctgctgactgctgatgctgagcctgagctgatccctcccagtcccagcctctgcctcgccttgtctgtcatggctagagatacccctgtctgatctgtaccgtctcgtagcactgaaagatatgcagaaagctctcacagacctatctgccatcgtctgcacgtttgctagctgctgcatgcgtgcatgtgtgtgcgtgagcgtgggggacgacaggcgacatgtacgaagagcccaaaggaggcagctcctcagtcatgctagctagtagctagtgctgcttgcttgtgttgtgtcaacggtctctactctactctctactacgcactgtagtaaacagtggtaatctattgtacgctggcgtctttgcc

SEQ ID NO: 71063 - DNA, 520 bp, Zea Mays
atgaaagaccatgaaaaacatgaaatcatggcttaggccaattataaaaattggaatactaactaagctacaataaagattataaaagtttggccaaaatagtttgttaaaaactccaaacaagccattcaagtggaggttcaatggggaaatctgaaattcagatttctgaattttcagcctttgaaccaaaaccgagcgtgttcaccttgatctctatctcaaaactctaagctcccattgacaaaaatgtgtctaactaacccctctacctcataccagaagatggcattgggacgcgtgctctaggcacatcaaacctgggatcttctctctgtgttcggcagtgagacaaacccaacttcacccctccatatctcttgatcaagtcagcgaaacctgcaagcctccacacacaaacgacaaaggaatgtaaggggaagagatctctcaacgggatcatggccataatctcaaagatttggagccaatctgcgcttgaacacgacctctctctgcg

SEQ ID NO: 71064 - DNA, 435 bp, Zea Mays
aaagatcacagatgcagtgaacgttgccgccggtgaactccgcgccgcgatccttgccagcgttgcgattcgtgcgatctggcatgcggataacggtcgacggtgaaaagatcttgcgtgaggatgaccttggggtactgttttgccctgtcgccatacccacttgcaccggcgacgtggctgcacgaccgtcaccgtcgtgccaccgtctagctcgattgtgacacgccttatgtcatctcaccacttgtcgcaagccgtgaagactcggtagtgaccaccgtagaccgtaaactagtgggcgccacgttagcaactccggtgactcttccccctttctcaccgcgagcacttccccatccaaattcgccctcctcgaggtcgtcctatataaattgatgcctcggcctgttccgctagattgttatgaaccca

SEQ ID NO: 71065 - DNA, 682 bp, Zea Mays
gagcattggcgcaatagctgcgtgtctttcactgtggcaggcttaccggcgacgagccagcaatatagagcggcttgctgcgacgtggtgaagcttcaaggcacgtggcacccgatcggtaggcggccaactccggtgagcttatctgagccggccataaagcaagggggtacgacggccagcccctggtgtcatccgcggcgaatatctttttaccctaaagcgttatccgggcaccagtgagcacgaatcacctcgccgacacgaatccaggcgcgggggtcgtcagcggcaaggtgcactacaccagtgatctacttcagtttactgtactatcagaacaccattcagatcatctgatagagaggtttgcagcgcccagatctccaacttttatgtgagaacttgctaatccacctgtaacaaatttctagccctataatccagctacaatcttgctatagtaaccatactcgaatacttgctggattatcttcaaaagagctcccaaagttcatcccaagtcactgtcagtaaaagttcagactctgagctgactgacaacccaactttgagtccatttaactccaacttttgcacaacacgtgtgtttgatgacttaaacaaagttatacttctttagtagctcttcaaatttgatgcattgaccctaggcaaattc

SEQ ID NO: 71066 - DNA, 606 bp, Zea Mays
cagatcttggcaaaaccccgtgtacggtctcttccctgtaccaaatcctaccttttttatgtgagttccaagcaaggatacggtcggggtagagagatataggggtgagaagtcggctctgtcagagctgtccacaccgagacaaaagccatgccaagtcgtgtcaaatggcttaggattgggttcaaacttttccagggtgttctagggatctttgggcgccattttgtcaattgggccaaaaggttttgagtttgggatcaaggtgaacatgtttgatctttgaaagagggtcggttttgaacttgagcaaatcctgattttccttttatgctctactctttggtgacctttttggggtttttctgaaatctttttggagtcactctctgtctagtttttgtagggtattaagtgtactacaacttttataattagcccaagtcatgacaatgtgatttacatagactttttgccataatcccctctagggctccaattgcctacaagggatgtgaactagggtttgagtcattctcttctctttagtgcatgataaggccaaggcatgacttctaagatgggttacacctacttaggatcttg

SEQ ID NO: 71067 - DNA, 766 bp, Zea Mays
gttgaggggccattttgtcatgcgactggacgcatcccgattattgatgatttcaccaaggggtgccatggacaccacctgcacgaagtgtcggtcaaagaagtggatcaactcccacttggcaatgaggactgcatagagcagtttctagatctaagggtactgtgtcttggactccatcagcacctcactaacgaattaaatggacttctgcaccttgagcacgtttccctcgtcctccctttccacaaccacctcaacgttgaccacctgggtggtggctgcaacatagaggaggagtgtttcacctgggtcaggcacgaccaagaccagtggcgagctcaagaacacattattcggtcgagggcctcttggatttcaattgtctaagaaaaatggttgctcttattgaggaatttgttaaggggaatacccttttcttcgagcatagagtcgaattggaaatctctatgaatctgtgtcttctgtgtgtgtatgcattgtgaagttcccttgcaggtgatgttctccctttgggaggtttgcccctaaaaacccttgtttcacctcttttgctacaccacgcacaccaggtgttcgatagaatgtacaaaccagccttctgtgctcaaatcaaccccaactttttccagtgggccacatatactaccaatattcctcccacttcatatcaccttcggtctaagccaaaaagatcaccatatcaccaattgttgcttctccacatgagttcactctctgcaaa

SEQ ID NO: 71068 - DNA, 426 bp, Zea Mays
agaattgaggaagggtgcgctggtatgatggcggggccctcgccggcagagcgccaccgcgaccatggggcaccgccgtggggagctcgtcgacgggagggatgagctcgtggccatcgatccatgtgccgacggtcgcgattagattagagataacccttcgctagataaaaatctgaccgttaagtttggataggagcgggcatggttgtcttggtggccgtagatcctcgatcgggcggtggccatgcaatccacgcgactataactgttagatctagatccagtggccttcgtcgtatgccagtttataagtctgtggatctaatccgtgccatccactctagatcgggcggttgggatttgttaataccccttcggcaggatacttttatataagaacccctcggttttcatcgtattaac

SEQ ID NO: 71069 - DNA, 288 bp, Zea Mays
gctaacagatttttagaaaactgaagagaaccctggggaaatcttagtgggaagtaaaagtggtttttccaagagcattcatgatctagtaaaatgttttcttagaggatttgaaaaggtttggacttagctcatcgcacttacttactcaactattgcgaatccctcttaattgaacggtgattcctatgactcaagaattgtaaaaagtaaattgccgttgttcccaagcacttgaagcacgctatatgatgtagaattttaatccgttgtgcttttacatttgcg

SEQ ID NO: 71070 - DNA, 401 bp, Zea Mays
cctggcgttgcttcgtcgttgcatcacgcgctcaagcgatcactcaattagactgaagaaaccacgagctctttcctccctgttcttagctccgccgcaagaatccatccgtggccagtgcaattcgagttagctcgcgtcttccacttcctcgtttgagtattctcaggtacccgtgatgcttcccgacctatccaattgaattataccatcattaatcgctcggaacatgcggttcctttaagattctccgctgtcgccgtgggcagagagttgtagagctccaattctgaaattgagtgaggggaaatgcgcgggtagagtccgattccggggtccgctactcgggagcaccggtcctggctccctccgaccagtccagctcgccggagctcggcccc

SEQ ID NO: 71071 - DNA, 867 bp, Zea Mays
cggaggggacctgctagcagtagcatctagtagcttggcgccttgccgacttctcttcgcctctctaccctttgaaaagcgacagcacatggtggagtactctgtccgctccgctgggccaccagcccaccaccgtcgcgtggaccgtagttacgtgcgggcccacgaccctagtgtcttgccttcggcctctcaagttgtgttccacgttcagtgctactgaaattactgctggtgccgtacaaaggcctgtcggcgttcagcgttctctgtgatctggtgagatgaatgcagtgcacttgtgcttttcggccatcaacctaattaaccatcattgagactgacacagcagcggccaaacacggtgattagattagtaaccctagggagcttttgtcacaggtcatgggcggcaggtgtcgcctcccgagccgtcgttgtcctatcgttagtcgagtcgagcacgagctgagcagcagcagccacctctcgctctgtgttaaacccccacccccgctccctcgtgcggcggtacgaacgattaacgctagtaactagtattaattaaccctctcatccacgcaccgtcgtcaaccacgagaaattcctactcgtcttttgcccttttgctgcagaatcgctaattgcttccaacttttttttccagattcagatcggaggtctgctactgcttccgctttgcttcgatgggtgtatgcgccgctttatcaacagggcttccgagtgagtgtggcgtctgcaggggacagccagtggccacatccacctctaagatgtatctaccaagaacatggcgaattggcgacgcacatttcaaagctttgggctccacgacgacgttattac

SEQ ID NO: 71072 - DNA, 379 bp, Zea Mays
caaccatgtatcacatttaacacttaaacccttccaccgtcacctcgtgtagatttatagaaaactcaataacaaaccatgattatgttatagttggatcatgatctaacagatcagaaacctcgcttgcatacttgtacataagacctgattgtatattagttgttgccaccaagatgaaccaaacaaaatatgtaatcaacaatttccttcccatccctgttagatgttacatacgtacaaacgtaggtgagagagctcgtgtccattggatctgaatcgtatgattgatattaaaaatgatgacatggacacacgtgatgcgagtattgtgtccgccttcggctttattatataggaatactacctccgttttttt

SEQ ID NO: 71073 - DNA, 395 bp, Zea Mays
gacggtggggattctggggcgtcggtcgctgttgcaccagcgagctcaccgaagggtagggtggagctctggcacctgggtgcttcggttaggaagaaacatcgtgggaccttgattcgtgagtgggcggtccagattgctctagggataacccttcgcagggttaatttggtccgaaggaatgtgatcggacgactacgatctgtcggtcgcgtaccacttcgatgtgatcgaccctatcccttggatcaagatcgagtggagctgacgtgatctctattaattaaaagctgcaccatcgattttggatccaagagtcatgatagtgtaccggaacattatagtgaacatctaaccggtgtcgtagaattttgatccaacgtccttagttcctg

SEQ ID NO: 71074 - DNA, 505 bp, Zea Mays
cctcaattcttccaactcgtgagtccgattaggcaataattccgagattgcttcaccacgtagtcgatgccaccagaacacgttagagagcgctcgtcgttcctagatccgggatcaaattaaacttgagattagtgtgcggggttcgccaccagcggccgaaacgatgactgaagcgacaacgacctccgcagcgtagcataagtcctagacgtacctgcacagcgagcaacaagcggcctccaccccggtggagcttacgcccgacgcagttgaagacaccgatcgacggggagaaacgaaggttgatggctccgacatggttcaagacgctgatggggtggagcctcagcccgacgaggtaggtggcgtcgatgtcgcttgcggcggtgggaggttggacccgacacaagacttcggagtgagcgagtgaagtcttccgacatgggccaatgtggtccattttctgcgcggggggtgggaacaaaaactgaagccgcttctt

SEQ ID NO: 71075 - DNA, 636 bp, Zea Mays
tggaagggcctccagcaagcaatgggcaccaagctagatttcagcaccgcttatcatccccagtctgatggtcaaacagaaagagtcaacaaggtcctcaaagatttactcagagcctgcgtattaactttcgacagagattgggagtccagtttgccgtacgccgaattctcgtacaacaacagccatcaggccagcatcaaaatgtcaccattcgaagcactgtatggaagaaaatgccagactcccctaatgtggtccaatgtgggggaaaggacactagaaggacccgaccttgttaaagaagccgaagagaaggtcgctttgatccgcaggaggttacttgaagctcagagtcgacagaagagctacgcagacaatagacgaagggaactcagatttgaggaaggagatttcgtttatctcaaggtctccccgatgcgtggtgtcaaaaggttccaaatgaaaggaaaactggcaccacgtttcgtcggtccctaccccgtcatttctcgaatagggcccgcaacataccgtcttgagctaccagaatccatgtcagatattcacaatgtgttccatgtgtctcaactccgcaaatgcctaaaggtaccagaaacccgcatcgaggcagat

SEQ ID NO: 71076 - DNA, 359 bp, Zea Mays
ctgcaaaccctcacaaagtgcacactgcgcaggtgcaggggcactcactaagctagccttctcaagcaaagctatcctagcatctctttctgcaagcccagtctacaagctaggacaaacaatacacgcacccaacaagttagacctagatctcaactcatcgcactcatctaggaaggtggagtacttggtctgcaaagtggtgatgttcgacatgtatagagcacactcatcacattcagtcttgtcgaacaccacaactgaagctctagcagactcaagttctttaagcatgctctcgtacttggatctaaactctctcctctcatgagcagctttcctaagcaacctatcctgac

SEQ ID NO: 71077 - DNA, 670 bp, Zea Mays
gcccaaaagagttttgcaaaatccccaaacaagccactcaagtgggggcttcaaataaaaatcatgatttcagaattctgaaatccaaccctctcacaaagatcaaacgcgttcaccatgttctaaaccgcaaaaccctttggcccaattgacaaagtcatggctaattacccaacctaacccctggcaaaatatggctttgaatctcgaagccggacgtgacaaaaccctgccctcaccacgggaagacgcctgctggacagatcacacttgagtgggtaagatctgcttggccagtggacaaaatccgtcgacccccacacattatctctagcttatagtgtaagcaacagatcgtatacaaagatttcactgagatagggcttgagcaagcgacaaaatggctaggaaaggggatcggagaacacttgccaagtgttcgacgccggttgatagaagccaagcgggctctgtcttccgcaattgcaccaacccacgcgcctgcccccgcctgcaccacgactagggaaactgcaacgtcatgagcgccacgcctataagtacccctgcgccctcagtctctcccggtgcacccattcaagccttcttcatcggagttcgcgaccgctggagtacgccccacccgcctcaccagccacaggaccgacca

SEQ ID NO: 71078 - DNA, 365 bp, Zea Mays
ggggagcccagttctatttgtgaacaagaaagatggttcaaggagaatgtgtgtcgactatagaagcttgaacgaagtaacaattaagaacaaatacccgttaccttggattgaagatctgtttgataagatgagaggagctaaaatattctaaaaaatagatctaagatcaggctaccaccagctgaagatttgtgctgaagatgtacctaaaatggccttcactacaagatatggactatatgagtttttggttatgtcatttggattaaccgatgcaccgacttactttatgaacctgatgaataaagtattcatggaatactaaaagggaaatgggcccttgggccatttctatattgttt

SEQ ID NO: 71079 - DNA, 374 bp, Zea Mays
accggtgtgctgaagaatatgcgtcatgaatgcccggtgctctaccctgtctgctaagagctactgctgaagggtgtcctggcggtcctgaatagtctgaaacattaagagcatccgctcgaacatctgctgctgaatagctgcctaccgggcatgctctgatgccaaatgagcctgctgctgagtgagtgactgaagaatagcggccagagcagggtcaatggcaggaggggtaacaggagcagcactggaactaccagcctcgtgatcatgtgagcgaggtggcacaggaggcagtggcaagatccccaggtcctcatcatcatcagaggaagagtatgcaatggcaccctgagtctcgaactatctgatag

SEQ ID NO: 71080 - DNA, 492 bp, Zea Mays
aattttcacagctgtcaagaagatgctcctcgacgaaaaagggcaggtgggccgacttgttacctgaagcggtctgggtgctaaacacgactaagtgcagggcgactgggttcacccctttccgccttctatatggatcggaggccatgaccccacaagaaataaagcatgggtccccgcgaacagttgcgtcagctgtccccaacgtggacgaacccacttcgaaggatcttatcgatggagaccgcgtcttcgctttacaagccctaaataaataccaagcccagacaaaagcatggcgcaacctcgcagtcatcccgcgggaattcagcgaaggggacatcgtactcgtccgaacagctcggacagagtccaggggcaagctagagcccaagtgggagggccctttcattgtcaagacgaaggcctcccccagcgcatacaggctcgcaacgccaaacggcgaagacttggagcattcctggaacatcg

SEQ ID NO: 71081 - DNA, 853 bp, Zea Mays
taaagaacaggaagttgtcaaaccatggactatagtccaatggaggtcattgaactagtttgatgatacatgatagctcttggggagctgtctatagggcatcaaaccaagcgaatatagtttgaggatcatctaactagacagtgttagcccaaagagaaactagcggttgtgatataagaggcaaaatcaaatggctagcacacatggcatgatcagaaggaatcaaaccataagaaatggactaatagtaggccatcagaccgttcgatgatacatagatggctaagctcactttctaatggctagttcatatgttggggctataaataggaccccaactaggaatggtagtgttggtcacctattttggttcctagaaaaaccaaaacagggcaacacagttaagagtttaggatcttcgttgctctgtttttgtcttcttgtggaagataaatcgtagggacaatggtttcaaatttaaaagtaatattcgaaaggaagatataataggtgaatataaaaggcatagtttaatactattcaacttcatttcttattgttcttcttttgcctacaaatgattacaacaataccttcgttcacaagcaaagtaacacgaaggtaaagcttcgaaggttgaggattcttgatctcatgatcgcctgcccccatgcattgcagtgtacctttacttatagtggtggcatggcatataacttcatacaaaattataatcattatcatactctcaattcctatacacataaactataagtctcatagggatatcatcatccttttcccttcagacatggtgatcaagcttctaaatccttctcattcacctttg

SEQ ID NO: 71082 - DNA, 378 bp, Zea Mays
taaccggatttggactctaaaggcctccaaaacgccctgaactactacaggcgcatggtgttaacctgacagcaacagtagacgactttcatacctcataacacctttaatccacaacagaaaaatgtcggtaagtacccatatggaatgtactgataagcactataagttttgtttaaaaaagtatttccagattcaagctctaaaaccatcaaaacgtctacactttgttgtaaccttaatctgaaaatgaaactgaaatcgggatttcgcgagtagggttccttggctgaccaagaattgaattaaaacgacaaaggaaaaagtgattacacagttagtcacccgaaagaccaggatctccttcctgatatctcc

SEQ ID NO: 71083 - DNA, 363 bp, Zea Mays
cgaaaatgaggagccgcacaacaacaacgactacagatagtaccaggcttggtaccaaggtgctactcagacaaagttaaggagccagtggatagatgtcgattacgccgacatcgatttatctgaggatgaagacacgacgtatgcccaatccactagagttggtactcaagtcgagactgcaccgatcttggaccgagtggtactggttcaaacttagcatatttgttttcatttcgtaataacatgaaaactatgtaatcaatgttggttattttttgcagggtaacacactaaaacgctcagtacaggatattgagcggattagtcccaatgtgagcgacaacgtcatacgtaccttct

SEQ ID NO: 71084 - DNA, 692 bp, Zea Mays
cacctccaaacccctttgattttccatgtcctgcatttttggcttctactgccagtgtcgtactgacatccctactgtaattaaggtccaagcaggtagccattttccgctgaagcctgtcattgagtcccctcataaaacaattctttttcttcagatctgtattcacttggtcaatggcatactgggagagatggttgaacttactgatatacttcattatagtatctcccccttgctataaccggataaactcttcttttttcatatggagcactccctctggaacataatgctctcggaatgctagcttgaattcctcccagatgatctaatgtccagccggttgaattgctacaaaatttgcccaccaagtactggcaggccctcttagctgttgtgctgcgaacaatggcttttgtttctccgtgcttcgaatcaacccaaacttctgttccataactcttacccactcatcagcttctagaggttcttctgctttgatgaagagcgggggccgggtctcagaaaattccaagtatgtagtttcacgcggtccttgaggaggagctttcccaccatacggttggaactgattgcccgccatttcgcgcaagaagcgcgtattatcagcagtggcattgaccagggcagcgatagcctcggccaaagtcggtggtactggtggcggg

SEQ ID NO: 71085 - DNA, 624 bp, Zea Mays
ccgggcccgggtcgtcagccggctggaaatcgccccgcgcgcgcaccaacgatgtggttccgctgaccggtggggccgtttgaccggacccatgcaatagcctgtgtccacttccacatcgcgctcagacacaacgccaacaaataggccctagcagctagccacacaatgctccttcctgccattctatcaccgccatgtgggaccaggtgggcagggaattcttcccagccgtatcatctcacaacgaaatcccgcagatgctggatcaccccataaccaacctccccttgattggagaaaaaaaatcgatctcctgctcctccccgtgggactctcttcagataaatacgtgcccctctagccactgcacgcatccaacaaattcaccgtgcaaatcgtaacctttgcgagctgagaacccccattgtcgtaggtagaaaaaagggctcgccgccatgggaaaactctagtacgccgccgtggggaccttgggtgcgatccaggttgcgtcgtcgtgatacatcgatgcagacccgtgtcctcaccggatgcgaatggtggccagggcgctctgaaattctcgccaatgccaaggacagcagccgcagcctccgattcgcg

SEQ ID NO: 71086 - DNA, 547 bp, Zea Mays
agaataataatacaactaatccagttcaacccaatggctgtttcaagtgtggcgaacttggccactatgccaacaactgcccctggagtaacccacggacaccccagaagaacaacaaccagaggaatgaccagaacacccctgattgtggatctgcatagaacaagactccgcagaaccagagtagaggaagagtcaaccatgtgacatcagaatcagttcctgaggatgccgacatggtgtatggtatgtttcttataaactccatacctgcatcagttttatttgattctaaagcttctcattccttcgtaacaaagtcattcatggaaaaacataatataggaaactatcccttgaagaagaaactattaatccgatcaccaggaggtgaacttagagccactcacacatgcgctcagactaagattgaaattagaggcttatttttctagtagagctgataattttggaatcaagtggaatcgatgtgatacttggaatagactacttgaccaagtatgatggagtgatatcttatgccaag

SEQ ID NO: 71087 - DNA, 319 bp, Zea Mays
ccgaagagaggcttatgggccttgccttgagtaccctgttcctaggtacccgaaagcagccccgagccttctcgtgactccttggagtcggtcggaggctttcttgtcggggattgcaggcctcgagtgtgtgcgagcgcattagtgtgatctacccttcgagccccccgagtaattcatgaggattgcttgggtgtttacttagttcttggcgaagccatgggcctcccttttgccaacctcttttgaccttcttgtcgtgttagatacgctttccttttgtgtcgtggttctcgatccttacatgagcggatgtaat

SEQ ID NO: 71088 - DNA, 415 bp, Zea Mays
ccaacatctcctgctgtaattgggctaatgatgcaaccttatctacaatggtaggttgatgcatctgcaccgcatgctgaatctccaacttaagcccatgtataaactgtcacaaaaaacagttcatccaaccttgtgttgtgcacagcagcctgatatctggcatgttcaaactcatgcacatatgagtccaaagtatccacctgcttcaaatttctcaattttctcagagccttggcatacgcatctgccccaaacttgccctctactgctgtcacaaactccgtccataccctcgctccttgtttcaatttctgcacctgccaccatcttgctgcattctgttccatgttaatagaagcagccaaaacccacagagacgatggaacttgatacatgtgaaaatattccaggc

SEQ ID NO: 71089 - DNA, 768 bp, Zea Mays
gtcggcagccttcgggggtcaagggaagaaaaggttgaacagggtatttgatgcaatcggcttcgtataccctgactatcactacccgccgcaaaggcaagggaagaagagaaaatctgctgtcttggccaccactgctatgacggctgtgccaaaaagtaagaaaataaaggttctgagccatcggccgtgatatattgagccggccgtagtgcctgaatttggcgaaggggcctcttcgactgtcgaagcaagacaagctgctccagttgtgcagagcgttgaagagccaactatagcgccgaagatgcttacagtcgggccagtcgaagctaaggatgataaggccgaagagccataggtggaagaaacaatgaaaatgccagaaattctgagccctccagcagaggcaaaactaccgaaggtgcaaaaggctcatgccgcaactcccaaaaggaggagaatggccagcgtgctggatgctgtgctggagaccacaaaggcattgagccccgctcctactaggaaaattactgaagctgtcaaagtccaagccgaagccgaagctgggccctcagtgcccactgagacgaaggctgttgcgcttgaggacaaggctgatcagtaaacttcagggcaaagtatggtagaaaaagcaaaatcccctgcccccgaagctccagtcgaagatgttgattacattttccgacatgcttcggggaaaaaattatccgaagaagaagtcctggaagccagacactatgccca

SEQ ID NO: 71090 - DNA, 338 bp, Zea Mays
cttgagtactggactcaatccgtcagctagctagcaagccaaaaaagcgcgggcaccatgcctcgtttccaggatgcacgggcgcaagacgcggaggatgtgcgcggaagcgattgggagagtacttttctcacgcatatttgtgggacgcgatgcctcgtttttgggtcacgtataaatgcgggtgacaaagggggaggtctgttggagcacaaaaaacaaggtttcgcatctgaaactggttttggggagtctttacgtggtttcttggagatgctcttatgtcttgactagttatttgcccgtgcgttgctacgatttctctaaatattacaagt

SEQ ID NO: 71091 - DNA, 874 bp, Zea Mays
gggatattcatctttaggagttgctctaatcaaattacgaaaatcaatgcatactctgagcttacctaattctttcttctccaccgacacaatattggagacccactctatgtatctgcaaggtctaataaaattagcttctagcaaccggtgaattttgttctttattcgtgggagtaggtctggacgaaatgttctagctttttgcttgaaaggtctgaaaccggatttaataggcagtcgatgctctactatttctcggcttaatcctggcatctcagtataatttcaagcaaagcaatccgaatattctttcaatagaccgatcatttcatctctaggatcggtctccagggttttgtttacaaacgtcggccttggagttttaccatctcctatatcaatctcctccaaaggatcgaccgatgtaaaccccagtcctaatttgtcgagatctcttaattcctctattatgtctcccacagaggaattagatgatctctgtgtgacagcggaccgtccagtctcgagagtcgaactgtccgtgacactggttttatgttgtggtagtcgctcggccttaaaagtcgaactgttctgcgacagaccggatcgtccggccttagaggccagaccgtccacgaccagggacatgtttgccatgtgtgtgctcatcatttaaattttatttaggatttagctaattctccatcggctctagcattacaggaatgaaacactttttatctatacttatgaattgataatcagaaaaatctactcctgtgagacacgtagcagtctcataggcccaaagtacaggggcattggccatggcaatacaggccaatgcatcgacatgtacttgttctac

SEQ ID NO: 71092 - DNA, 789 bp, Zea Mays
atgacaatatgcacatgcttgtcaattgggagggcactaagaatttccctcacaacattgggttgtgaaaattaagtcctagcctgttgaattccttaaaagaacatttaagcgagagtacatgtcgttatcacttttgtgacaaagcatctcaaaagaatttagctttttcataacaagatgatagtgttcttccccatgctcactctttgttccttcatggagaacacaaatattcaaccatagtgcatgggtgtccttgtggtcccacacatggttaaaaatatccttgcaaagacctccacagagggtgtatttagcctttgcatttcacttcttatagtgtacctcatgtgaaaacaagaattaaattgctgaaaagtaaatactcaaaataataaagggtttagaaatagtgaagttttttctaaggtattagagagttgacaatccccactaggttataacataagcttggatccaatatatcgagtatgtatctattgcgacctaactatcgactggtctgtatccactagtgtcagcctttatctaccacaacttacaatgcacaacctttatcgtcagcctataaccacatcagcacatgccagttttccttttacagactcatatacacaatgaaacctcatttttaattataataaaatacgaaaagcattaaaaacatagtacattacaaaaataaaactacataaattaaacaaagttcacaaaatgtgacaaatttaaaaacaaacaaatctacaaagttcatataaaaacaac

SEQ ID NO: 71093 - DNA, 487 bp, Zea Mays
ccacggtgctcgcccaggctcaccggcgtccatggcctacgacctctactcctggtctacgacctcaccggatctccgccttcatgctgcgcccatggattcggccgtgcggttcctcccagctcggtatatatatagtggtggtggtaccgcggcgctatctccttaccttttcttctatgtaaaattgtatgcatgggggtcaacggattcacccatccgtttgtccatgtcctgtccaagttgtgttacattgatttaattatcttcaaaaatacatcagtttaattgttatcattttaacatgatattctgatagatttggttcatgctttatagtgccaaatttgtgttgtggtcttagtgctgtgtcaccccatgggccaagttcttgcgaggcggtcactggtaattctatattagattttgcattcagtaacactctaaacttatttcgaaagttttattccatatatctttcaaaaag

SEQ ID NO: 71094 - DNA, 619 bp, Zea Mays
acggtggtgaataccgaagtcaaaccgaggtgttcttggtgattacgtgcggtccagttcaattaaacgagtctacgagcaataggagacttaagggatgctagaacatcaagcagagaagcttgaactaacctatagatggctggccacgacgagatacacacggcggtgcgaaaaacggaattgggggaaaagcgaaattgggacgtttatagaggctttgaggggcggctccgaatttggaagggaagcgctagtggtcggagaaaagaggaagtcactggcgcaagctaccgtggcggtcactcaggcaatgcctcaagcgatggacatgcctcctcagttggtttactgcgatgtggtaaagcttcgaggcacatggccttcgagcggcaggcggcaaactccggttaggtcacctggatcggttgcagggcaagtgggtacggggctggatcccggtctcatccacggtgaaaatcttttcactctaagtcgttatccatgcgcccttgggcacgaatcgcatcgctggcgcgaatccaggtgcaggggtcaccagcggcgaggtgcactgcatttaccaatctttgtcaggctactgtaccatcagaacccc

SEQ ID NO: 71095 - DNA, 403 bp, Zea Mays
aaagaaagcaccatccaaccccattcagttgcaatatacacagatacgctttctgtttactttctgtttgtggaaaaattatttcatacatagttctatctcagtgccaaggttattaagatgttttgtgcttcatttttgctttattggataggctgtatgtgatgtgacatttggctgcatttattgagaaacttcaatgtcccattgttagtgcttgtgtgcatatgatattgtataagatttaggatttaaggtgcctttcaatgagttaacgaacttcattattgctctttggagcaactaaaatgattgaactttttatcatataccaatggattgtcatctgctgtattttttttcaacagcaccctaccctttctatttacggtgcgcttttcat

SEQ ID NO: 71096 - DNA, 713 bp, Zea Mays
ctgaaagctagcgaagtcaagcttagtgcacaaaccgaagcccacaaagtcgaagctgaaggtttaaagaagaagcttgcagaaatgaatgaaaattttgaagttgcaaaggtgaagcaggaaataagtgaaatggaaagatcaagggtgtaaaagaatgtcgaagagcttcaggactccaagtagagatgttatgaaatatccttagaatgcgccaagaagctaaaaaatagttttgcaaaggtgggagcatactcttcggagtagaactttatccacggtgatcccaaaggggttatctagtgaatcggcgaagaggtcaaagcttttgatgaaatactcagcgatcgtggggatttctgcgttttcgctagcgcacgaggggtcgcgacaattttagagaaggccggttgtgaacatgttaaggccgcagcccagccggaatccattttctcagcaaatgacacaaaggacccttcggccgaaacctctttgctaggcgggaggttttactccgatgtttggatgaagggcggtcgtgagatggctgatgaagcgattagacagaatgagaaagaatctcacgacgctcgagaagaggctaaacgagctaaagaagctgctgaacgcgccaggattataggtacttttattgaggtttagcttcattgttcgcttttagcttcgaaatgaaccaacatattatttattgc

SEQ ID NO: 71097 - DNA, 1712 bp, Zea Mays
tgctttaggttcttgcataagaacatcctccgtagtgtagccagtcgcctccaaaaacaacgggaatggctttttggagaaatgccagcaaagtgtcagcaaattgagaagatactttaaatcagcaattacttcagctcctttgagctccacactatcatttccagcgtatatgcttgctacagataagtttccctgtaacacatttcagaagcagagctatcagaaaccttgtaggagtactggcaatcacagtgcaatctgcatttttggttcatcaaatacaggattaatcatttgtttacgatagacagctctgccctggcccctggttatgtatttttacagaggaaggctttaaaggatgacatgagcacggtatgagcgaaatgtgaaggaccaaactatatccactgcctagcttaaatgtacagcactccacattggctttcaacctccaagaatcagaactagttcaaacgggacaagattaccaacaaagtgtgagccaccaacctgtctcttgaggaggaaactgatcccgaaggcaaggtcgccgatcggccacttcccaagggtctctgaatacgtgaaccgcagcgtctctgacagcgtcgagatagtctcaagccaggtggcaggggcgcggacgtccctccgcgatacacggctcctgctgggagaaccctgtgcggccctgggtgtcacatccctgctatcgctgcactccccttccttattcagcctctctgtctgcaggcggcggttcagtgtgtagtaaagcagtgccgcggcccccgcggcggttgccattgtcgctgtcgccatattgtcggggagtagtctgcaggggcttcgtcagctgcaatgagccccggatggcctgtgggtcgcagcctcctgtgcagttgtaacccaaggttatcaatggcgcagtcagccagtcagataacgttacttagcagcccccgaggcttccactggtgatgcgatcttgatcctttggggcagggcagtatgaagtcaaacctgataccacagacagataaaccgagtttttttattccaagaaggccatcgattgggcgggcactggtcaccgatagctcaccctccccctctcctttttttggcagtggtatgaacagttggaccatccaaccacatcccatcaaacactactagtacactagatagagtaattcacacaaacaactaacaggttgaagaagtccaacgcatcaagtgaactaagaagaaatcgtccgacgcggaaaaaggaagtacggagaaagaaaacaagaaaatcatccaggtagagatattcgattggagacgttacctcgatggctcaacaattgcgcgcggcagcggtcgatctgattggcctgggaggtcgaaacccgctagggttttgggaaaagggaggggggagcgggagacgagtccgggtgagcctacctatcggtgcggaatgcgcgggaggtggggagtgagagagaaatagggagacgagagaggaggcaggatatggtgcctttaattctcgccgaatctcgcggggcagtggcggcggatggggaggggaagaagggcttccgtccgaccggacgaggcgcgtttcctttttgccctttccgggaagaagcggttgcgcttgggggctttccggacagagccggttgccgatggggtccgcctctggagccgcg

SEQ ID NO: 71098 - DNA, 652 bp, Zea Mays
gttaccgttaagccaccgtgcaacgagggtaggagtgctgcaccatgcgattcctagtaagagtttgtccctatgtttcgcccacgagtatgcgtcgtgtagcgccgttagagttgaagcttgaggctctgaaatgctggagcacggtactccggcgtgctcgtcgccgagagctcgggcgccgccatcctgggggatggattcaaatcgggtggttgaagggagtcgcagcgctgagatcatgccgtggatgttgatcgtgttcccaattccctggatgttgatcgtgttcccaatggcttagattagatcctagtgttataagatcctgagcgatggattcagatcgggcagttgaggggagtcgcagcgcaccccttcgcggctcaagaccttgaccatcggatctcgatccagtggttgatgtttcacaccagttcggcatatgcatcttctaatctggattgccgattttgaatcggacggctcagaaaagacgataccctttcgacctatgctaaattttaaagaggtcccttgattattgcgaatccaacccaaggtcctcttctatgcaaaggttaatacaagtaggtctaaatttatttaaactgaaccccgaatttctagaaaatacgagccatcatccagc

SEQ ID NO: 71099 - DNA, 451 bp, Zea Mays
ggaggccgaagcttttcacgagatactcagcgatcgaggggatttctgcgcttttgttggtgcccacagggctgtatcaattttggaaaaggtcggctgtgaccatgcgaaggctgttgttcagctagaatttgttatctcacccgacaatattaagattccttcagccgaagtgtcttcgttaagcggtaaattttactccgaagtatggataaagggtggacgtgagataacttatgaagctattaggaaaaatgaaaaagaatctcacgacgctcaggaagaggccaaaagagatgaagaagctgcacagcgcacaagacttataggtaccttaactaaggtttagcttcgagatccgtttttagcttcggagttaacaaacatctttttatgatgtagctgaactttcacctccaccagagccatatgaccctgaagttgacccggc

SEQ ID NO: 71100 - DNA, 586 bp, Zea Mays
tggcctagtacatatctaaaagtattagtggatgacaatagtccagtttgaagaaggacctcattacttgtgaaagcaaccttgtcctagtaatattggccatatggacaccgtagcccaagactgatgaatcccatgtacgagacttcatctagtcgtctcgatgaagtgtagccatggccgcgttgttttgttttccatctgattttcacgagtacacgcaagagtagaatggtgccctagcgcagtggcttaatacaaccgacacacgatggttgatgaccggcgcggccgccgatgtgtttaatctagtttggtcaacggtgagacggctgccaactacactacggtcggctgtcacaggatggtattcctaattttccagttcctatcaaatgatcccatttcggtacttgattttttatccccacattgccaaagagcaaaccattcgatatacatgaatgccttttttattctatgttgaatggtccctactgctttgatatctcattatgtacagacttgggatttttatttttcttgcacaagaaagcaaatccacaatcacgagctgccaccccat

SEQ ID NO: 71101 - DNA, 567 bp, Zea Mays
caacacctcacgccccactccatcctccaggcagcgatcttcgcccacctctgcgagatgtttgtaggtgtggccccctacacttccctcttccgctattttttcgtgctggccaggtccgggaaggctagggaccacatcggtgcctactactttcagacgaggccagatccggccatagtctacatccccacctttggtggtgcgaggtgggaaaactggcgcatcgactaggtgatcgccagcactgaggccaacgaccgcctcatcctgccgaccaatgggccagcactcgaccacaagaaatggaggaccaagccatccctctcgccagagttcctgcccgtattggacaggatcaaggtcttggccacgggcagcctgacatcaatgcacgtggttgacaatctcctaaagcgccagatcacgccgctgcagaagaggccacgcttgtcctgctggttcaccggcccgaacgacatctgtaggatccagcgcgggccgagtaccgatctatccggggacaagctggaactcctggtggggggatttctggggagacttttg

SEQ ID NO: 71102 - DNA, 521 bp, Zea Mays
ggaggtgaggggttggagaaaccatggctactgtaacatttgtgccatactaagatgccataacgctttgcagtaaggatctatctaggtgatgtttccttttttccttccattcaaacatccgatgtgacgggaccaacatttagtcacttggatccaaacgggccctaacaacatttcaatttataattctagaaatactgatgaaatgattctttgtgtttctatatatatggataatatatgtagatacatatgagtattcttagagtacaaatctagagtttgtatccaatcctatctctatttgtaacactagcatatagctcatgctaacactacgacctcggggagaggagggagaggtcgacagtggggatggtgtgggtgagggggagggcggtggagtcatggggggagggggaggctgggggcggtgaggtcacaggtggagggggagggatgattcaattaatattgtccatttgatttgagtgagtaaaggagaggggttatccagc

SEQ ID NO: 71103 - DNA, 337 bp, Zea Mays
atgagtactgagtacatattctgtccatccagtacattcttatataactgattgattcagggaaaatgacaccgagatataatttaccctctcacactggattagttgtactctttaatgctggagagaaaatatgtgtgttaaaaataatagacacattttagcttttgcacatgagcgatatctgcgggcgataagatcgaaactcgatagagattgtggagtcatgacaaaatttgatgcatttttctttagctgaaactagaggtcacccaagcaaattactgggatgctgtgctgaaagagccattgtgtaaaccgtgagttgtatgacctg

SEQ ID NO: 71104 - DNA, 823 bp, Zea Mays
acgtgcgaggcgttgtcgcagcggtgcataaacatcgtcatcatcgtcgtcgtcgcccacaggagagtgagctggggctagagttggtggtgggggacgagcctccagtacatccatgcgtgtaacaagttcagcaactcgtctatcaagctgctcataggatgtcgaggcagagtcctagtattttttaaaagcttcagtcatcgcgcgcatcatctccttcaattccatttgagagacacactcatcgtcgttaagtttaggccccttgtccttgtccatttgattctttggtcctgtcattgttagcataaaacagagtcaaaaaggcaacaaacaatgtgaaccctacaattatctctcagggtggtggtggaggtggtagtggaatacaaattatgaagcgtcttaccccgctcttacaacgttcttaccagcactacaggtggcaaacggtgattggtgtgactgtccaacgagcgtgggtgtgattgcaaaggagtacctgttctgctcgagagaaaattggagctatgggaaggctgactaaatatatatatgtggcacacaagtcagtaacagatagcaatgctgaataagtgtttcaactactcgtcctagttgctgtcctagaaaatataatataacagttggaccaaagcacaagaaaggaggtacaagtgtctagtgggaatggcaattctgtaaatagggcagatttttcagcactagtagaaatcaaaggcacgtttcaaaaggagtaccatcaaaagagctcaaaatattctgaattgtttaccactgatccaaaaacacaaaggat

SEQ ID NO: 71105 - DNA, 356 bp, Zea Mays
aagagaagtcaaatcatcattatcatcactagagctaccctcatcatcggaagtagtatatttggaggtatctctagagtgtacctttttctttttgccatccttagccataaggcatttgtggccaaagtttgggaagagaagacctttattgacggcgaagttggtggcgttagaggaggagtcggtggagctcttgtcggagtcccattcccaccccaagtgcgcctcgtcacccttcctatgtgacttgatggagccggcggattcctccttgtgctccttgtgcttgtcgccggcctccttcgacggagtccgttcttcattcttctttcccgaagcttcgggcttttcgc

SEQ ID NO: 71106 - DNA, 410 bp, Zea Mays
gtctagcttcggcaatttcctcttctgacaactttctacccaaagcgtgtcgaataatgaagtctagctcttcagtagacgcttcgggagtaggagattcatccttcttgggcacatcttctttttctaggaccggagtgacatccgaaggttcttgttcaatactctatctcgcttcagcaggccctgtttcaatgggcactgaaggcccagcgtccacttcagcatgaattgtagtggcttcggcagtctccttcacaggagtaggagttgacgcccttgtcaattccaagactgcgtccagcacgctggccatcctcctcctcttgggagttattgcaggagctttggataccttcggcagtttcggctctagtagcgggctcaagatttttggtagctctgtcggc

SEQ ID NO: 71107 - DNA, 338 bp, Zea Mays
attttggatactaaaatttccaatctgataagggtggagaatatttaaaagtttataacatcttttttgcttgcttggttttgcacatcgtttttaagcccatacctacatcaacaaaatggttctaccgaacacaaacatcatcataatgttgaaattggcgttgcccttctagcttatgcctatatctataccactatataatacaccaatttaaattgtgctaaacctactcaattaaatcacccccacacccataaccttcactatatccaccaaacaaattgcacccacacataatacacttttataaccaacagttcatattgctagataac

SEQ ID NO: 71108 - DNA, 315 bp, Zea Mays
gaaactagccctacatagcgctcagtggttttgaggctgaacaactaaaaccgctgcaagtagcgcaccgcatgcatgtccccccatgtcttggacatgtgtccccaccagtcctcgatcacaccaacgacacgatttgctatgccacatcctcgcactagtgcgtgtgccagagtgtcagccactgcgactagtcacatggcttctccgatccctcaatcaaggcctagtgctcatccttcaccgctcctagtccactgacacaaacctgcatgatcttcacattcgccattaaccattgtccatgtgctccac

SEQ ID NO: 71109 - DNA, 665 bp, Zea Mays
ctatttttaaattagtttctctgattttccaattctctggaatgggcctcattttctggaaaacgcaggggtctcggggcaatatttctaagactctgagcacagtcaggatggacggcgagttcattttgaaattaccgagggctcatatgctaaaaggtctgggtgaaggggtacgattctttctaagccgttggattagaacccaagggctaggattagatctctcataaaatgaatcggtattcaactagggccattggatctaacttcaacagtctggattttatttgaccgagatcggcacgaatccatccgatctcacgtcaacggctgggattcaaaacgtgaaggggtatttctatctctaatcgtggtcgttcgttgcacgatcgatggccgagggccattcttcttcctcgctccgctctcctctctccgacggcgcaccccgctgctagtgaactactccggtgatggcaaccgagctcgatactacaccataatgcaattacgcggttctacacatgcatgatgcgaaggcgattcagatggaagctcatttaccaggaattaggcgacgattgtggctgcccacgctacgcgtgacctccctgctagaagcgaacgacggtgatgaattgccgccgagctgatgatcactg

SEQ ID NO: 71110 - DNA, 614 bp, Zea Mays
ccgcgtggatggcgggttgattgtataaaactgcaggggttcttttataatttgtcacggccgaagaggtatcgattaattctggcgttggatcagagatctaggattcagattaaaataacccagatcgattcctgatcgctggatacgagatccacgatccagattagctggcgcaagaggtaagtgcgcaccaatctggaccgcccgcagtccgatcaacggtccaagattaccaaacggaatcagacatatctatcagatctggtccgcctatccatatcttaacgtctgcgatcataatacggaaaggcgagttgacgtttaaatcgcgatcgtccatttgaatcggacggccactagcgtgcttctatactcggtggcaactcatggtggagccacccaccacccgcggcgggccatcgccagagcaatccccatcaagagtccccaggcacaaaacgttgatcccgaccgagctacgcaaggcgagaatcaaggagtgtattatgaagggccttaccagcggctatgtcgcagtgcggtcagcttatagagtaggggtgggttcccggtggagttttgctccgatgagtaatcaggagcgcgcagag

SEQ ID NO: 71111 - DNA, 508 bp, Zea Mays
tggagatggacgacgaactaattaatagtaagcaatgcaagcacgacgatcgaaagctagctcttgctcttgctcttgctagtagctaatgtatgagtgtgattggttgatcgaatagctgatggattcatgggtgtgattggttgatctgcgcgcaggcctgggatttatagcccaagcaggcaggggacggagagagacgacgaccccttctgaaactagaacacaccggccggcaggtagtttcttggttgggtcgttttctcactcaccgttccctcgcaggattagcagaacgaaagcgcgggaaacaggcggcacgcaaccgtttcaaacgggcgctgcggcttggccgccaatccccacgcgccacgtcctaccagtcacgggaaaaaaaaaccccttccctgtcagcctcctgataaagaaataaacgcttgcattcgtctctagtttagctgacaatgattactgtctgtaatggctaaatttgctattttacttcctg

SEQ ID NO: 71112 - DNA, 589 bp, Zea Mays
atggatttgaggtgttacaaaacctacccctctaaaaagaatctcgtcctcgagattaagaaacttccaagaataactggggaaattctgctctgagttcatcttctctttcccaagtggcctcatcttccgaatgatgactccactgaactttgcacatgttaataactttactccgtgtaattctgcgagatgtttccagaattctggtaggatactctgaataagtcaaatcctcattgacattcagttcttccatgggtaactgttcttctggtactcttaagcacttcttgagttgtgatacgtgaaatacgtcatgcacatccgataaactatcgggtagctctaactggtaggctacttcaccttttctttccaaaatcttgaatgggccaatatagcgaggagataattttcctttaactttaaaccttttcattcctctcatcggtgaaactttaaggtttacaaagtctcctacttcgaacatcaactctcttcttctattatcagcatagcttttctgtcttgactgtgttgtcttcaagttttctctaataatctgcacttgcttttctgctccttg

SEQ ID NO: 71113 - DNA, 546 bp, Zea Mays
cagcctattaagtcatggtcgtcgatccatgatagggcggccgtggggcatacacattaagacacacattcaatctaatctgaacagttgatccctgattgggtgggtctgggtggatctcgaatctttgaaatataagtcgtcggatcgggatcggtctatcttgagtgcataccagttcataaagtgctcgatctaatctcgcacgtccaaaatggatcgtgcggctctagacagcccataccccttcggtcaggtcgttttgcagaagagaccctactctttcatatattcaacccgcaatccacagcaaggaatagaccatcatagttaggtcctttttcttctaattaggcccctgatcatgtggaaaattatacatccatccattttaatggttaagtgaataagaataaattagaatatcctcgaaatcattattaggataaaacttattctataaacttaataaattcataacttatttgttttaatcccgatttgatccatttcagttgcgttagttcataataaaattatctacac

SEQ ID NO: 71114 - DNA, 657 bp, Zea Mays
tttaagatcttctgttcgacctgcacttgaaccggatattgatctcgaggagttagaggtgcatcactcatctttcttgtaacagaaagttttttatggcttctctttcaaaggttgcttttatgtgcagaaatgtcacacaaacaaatatcctacttagtgagaatgaaaactttcttttgtttattctctaggcaagattgggtgaacatgagcatgaactgcctgagatgaatacaacagaacagacctgtagcactaaaagtatgcaaattgggggtaggaacaaaatagacctagcaacgtgtctgaatccttgtgtctgaatccttgcatttgcatcctaccagcagctgtcgcgagtgctcctggataccacttctggataccacttgctccgctcgactcaggctcggccgagacagctgtcgcaccgatggagggagggagtaggcgaggtcctccggctcctgatgcaggaaggacgaagggggaagggagcttgcggacctcggcaaagtgcaggaagggagcgagaggggaactgactcggacgcggcaccatatatctccataatccagcgcattgaagtcaaagaagtggaggtcgtggagctgaccgaggggaactggcacagacgcggcagcctgcgagag

SEQ ID NO: 71115 - DNA, 435 bp, Zea Mays
gaggaacacgttctcaagggtggtccggagtcgtgtaaccgcttagcctagtccagcgccctatgccctgcacactccaccatcctaggatggttgttcccgaacctagggcttggcccttagaggcctaaaccttaccctgaccaaggaacatgtctcgagaacctgctcggcaaggttcggaaacaaaatccagaatattgaagcgctcagaacaacgacccgtagatacattgttgagcaccataacaaggttgtgtgtagggacaccctttttgtaggtcactaggcgaggaggcgaactggagctgcgcaaggaagagcggtggcgactgctactcccctcaccaggcgaggcctagcgctgcgacgtatcctgtgacacataaggtggatcaccggggaacccgatatcgacctctgagtacaatgtgc

SEQ ID NO: 71116 - DNA, 721 bp, Zea Mays
gttttataaaagaaaagagacaagtgaagctgctcggtttttggaccttttggcatgctcccgcgctcgacctaccccgcgttttggcctagatcgcttagcgatcgcccgcccatgtctctcccactctctttcgctgataggtctgccccaattagggatttcctgttcctcccgccacaccgcatagcagcgtcgccttgtcgcgcctccatatgcttgcttgcttacttgcccgcccactagctcgaattcactttgcagtggagcactactgccgccacggttgttacctccaccaagtgtcgatgtcgttttctctgccccacaggacataaatccggtgagctattctcactccctagcgtcgcctctgctccccctctcggcctatataagcgcctcacgccagagcaatctcctgcatgcctttattccccctatcaagctcccatgcgccctatccacgcatgtcgagcatcgccgccgccatctgccatgaacagagcaactctgggcaccccactactgtcaagctcctccatgagctcgtcatcgtccccaccagcaatcccccacctacctacatcgatctcatgccgccgcaccattcctgatcgtcgctagagctccaccgtcatgagagtttgaatacgcccgttttgtagaaagctccttgacttttgaattatttatgcccacacactcctcagatcaagaa

SEQ ID NO: 71117 - DNA, 284 bp, Zea Mays
gaacctgttcgggtttcgttgtgggggcgtgcgcgaggttttagcccgttccggtttgttgatacgtgtgtactcgatgtggggtcgcagcttggaatgcgatgggttgggtggcctggcctcggtgattgtggtttgggtggctcattagtgtttagcgttgttgatcactgggggttagggtttaaagcccaaggttttgcggccttgcgggtgccgattgcggggattgctagttcgttgcgttgtctacctgttaatcgcagtaaatcgccctggttttg

SEQ ID NO: 71118 - DNA, 758 bp, Zea Mays
gcgaaaccctagcagagagattgcaggcgagtgaatgaggaacgagaggggcacaagtgtaaataggtgtcggaccatgaccgacggcggcagtgaggacagggaatcgagcaagtgaaaccctagcacagagattgcaggcaagtgaatgaggaacgagaggggcacaagtgtaaatagctcgaggaagcagtaggcttctcgcggacgtggccaccgaggacgactggcaagttgctccgtggccatcgcgaagggtggttgtgacggctactgcagagcggaggggaggatggggacctcggtggaggacgcgacgtcaaaaacgcacgaaactcggcgtggtccagcaggattctcaggggcaaggatgcgcatgcgatggttctgttcgacggtgaggggggagggcaggccggggcatgcaatggtctacactgccatcttattaagtagtagagatacacctatacacacgagagtgtcagcaacaattgattagaactaggacgttcatccggatgttggcccccccgacatgtctctcacctctctatgttcaaacagttaagcgtaaaactcctacgtgtattcttgttgtaggtaaaatctgttgtaaaccaggggcggaacgagtagttggcggggcaaagtgggccatagttccaccttaattttttctctctttatatatacattgaatgtattacaatttgagaaaacatagcaagtatttggagccaaaactacattgagca

SEQ ID NO: 71119 - DNA, 637 bp, Zea Mays
aggccaaatattcttggaccaaatccatggtctcgatctgctcggctactaccctgaattctgatacagcttctcggcatggtgaccctagcaccatacggcacagcggcctggtcaacccgtagctcaaactcagcgggctcagcaccaatgtcttcagcttctccctcttcttctcatcagctttaacataaaaccactcattttccaaccagttggccatttggtgcgatagctaaccaccggggtcttcatatctttgtggtaggcaaagttgtagcaaccaaagttctcatgaagaccatcttctctggccttcgtctgatagtgaagctcgtgcactcgacagaaggcttcggcattcaggtctactccctgacttcgaagagctcagatgaaaacgctgagcctaacgatagcgttaggagtcagctgatgaagatagatctcgaagttttccaaaacctctccaatcattttgttccaaaggaaacctcaatcctgctctgaagaagctcctgaaaactaccacctcatctttttccgggtgtcggaatagtttcttctccgccaaaacgaaccagcttctccaaagtagcctagctttatcatcataggcatatcagcctcagaaacg

SEQ ID NO: 71120 - DNA, 513 bp, Zea Mays
ggttgatcctagcaaggtcaaggatattctggaatggaaatctcctacttcagtgcatcaagttagaagtttcctttgattggctggttattaccacagatttatcctggatttctccaaaatcgttaaacctattactgagttactgaagaatgatgttaagtttgactagtctcctaagtgcaatgaggcctttgaacaattgaaaatattgctgaccactgcaccggttttggctcaactggatattgagaagccatttgatgtttattgtgacgcatccggcattgggcttgggtgtgttctaatgcaagaaggacgagtaatagcgtatgcttcaaggcagctgcgccggcatgaggaacattacccaacacatgatttggaactagctgcagtagttcatgcccttatgatttggcgtcattatctacccgggaatatatgtcatatatatacagatcacaagagtttaaagtacattttcacccagttggagctaaacatgacaca

SEQ ID NO: 71121 - DNA, 304 bp, Zea Mays
gcagtataagaatcccaccaatcagcagcaggacctgtcagacgtccagaagcatatagaaccttctcctggtccgtgcactgtgcaatattcaacatcttttcaacggatttcagccaatcatccgcgtccagtggatcaggtgagctagcgaatgtaggtggcttatgactcatgaactctctatgcttgtctcggggtggaactggtggtggtggtggaggcaatggcacttgttgctgctgttgctgttgttgtgccctcctttcctggcgtatctcatcccgctcctggcacaactcct

SEQ ID NO: 71122 - DNA, 792 bp, Zea Mays
tttcacgtagatttcagtttctttatgtgttgattaagtcatcatattgcttgctactgttccatatctaaactggttgtgtgtacggatatgctggcatgaaagggatatgtgtactctttgatatttgtgttggggatgatgcagaattcatgtcctagtgaactaattggtgcaattatattgttgttggaggtttggacagattgtggttgtgcagatctaagattggaggaaggtttatttcatgtatatatggtgttcaataatatgtttgtaaaaaatagttagctaattttgattgttccgctatgttgtcacgactacatattcacagttgtgtttaacaaagaataaatgagagcaaatgtccggtagcttggtacttaaccagaacaacaaaagtttttatagaagtaacatgcatttagaatgtaagaaaattgcaaaaaagaaggccagcaggtctcatatcaaatcctctatctcaaactcattctgtaaacagtgtcatctacaatactatgtcaccttttttatacgatccattgaagtcaaccaaaaggaacgaatacatgtttaaagacaggaatattggaccaaacgaaacatttgcttcaaattttcgctatagcaactagatttcaaaaagaacaagaaaaatgaaaaccaaagatgcaaatatctcaaggatcaagatgcacctaattgacagcaaaaactagctaaacacactaacacgggacagccgacaggcgacacatatcaagcgctaaactgcactatttttct

SEQ ID NO: 71123 - DNA, 454 bp, Zea Mays
aaacgatctcgtgcgcgtgccccaccccggcgggtctgatctcatcccggcgggtctgatctcgtgcgcgtgagagagcaatttgatgtctgcgcgtgcagttaggctctgcaatttcgtgcgtatgcagtcagagagcaatttcgagatcgtgcgcgtgcagcaatagctatcctctgcaatttccatgcgtgcagtagtcagagagaaacctcctacatcttaattggttttctgtatggaacttagttcatgtatatatgtgatgtgtctagccatcttaaaacatcgttttctgtatggaacttagtgtacttggctgaaaaaagctgtaagagctatccaatagccatgggttctgttgctagccgcatcaattagtggttgggtacggccattaattgaagaccactgcaccgcatatatgtgagactgattgacaagcaaaatacac

SEQ ID NO: 71124 - DNA, 435 bp, Zea Mays
tgaagatctataccttcaatatgttctagaacctttcactatcatctaataagacttgccttccttataccttgagttacaactcaacacttcaacaataaaaataatacatgcttacccacttattaaaataattgggcaccacctactggctagaaaaaggatggcacaaaaatggtgtggtgggtcactttagtctccttagtgctatcatccatacgaacctaccatttgaccatctttccattgttgtttggcatgaaatcaaatttacaagatttttgacattccttcatttagatgggagatggcaattcaaaggacgagcgctccatggttaactagccaaatgtgtgtcgatgtaaagatctaggaggccttatagtggtttatcttgcctattcggtaggatactctaaccaaattagctctagc

SEQ ID NO: 71125 - DNA, 488 bp, Zea Mays
aaaaattctactgaagccgaagcttcctgctccctgtgagcttgctgctcaagcttcggacaaaagttcaattgtttaagcttcgtttgtcaagaaccgaaatggctagagtacagtccactgttagggtaacacgtgaaggggaaaaggctgggacttctgagatagcccccatcttagaaatgatgaggcgttccggggtgattgtactagaagaaaaagtaacagtcccaacagaagatgttgttgatgccgaagttgaaccaaccactgccgaagctgatagtgaagatgaggatgacgacgacattttaagtccgagcaaacccaaccatattgagttcggaaaatccacagttacggctgaagatatggttttaatgaaaaaattaggatattttggggagaatgatgacaagctagttcggtttgctggggaagaggtgattccagagccgaaagatgacgaagttgtagtctttagaagc

SEQ ID NO: 71126 - DNA, 417 bp, Zea Mays
cttgtgatcattatcacatgtgattttaattaagcaagagacatcaaacttaaggaactaaaacctaagttaagtctctttcatctcaaaagccacactctaaacacatcatacacctcaagagagaaaagggttcaaaaccctaacactaaccaattaagcttttggaacatgaaggaggaaattagtgaaaagattgtgaaagatgcaaaatcttaatgtggaccttttatcaaagatgtaatacaccaaataagctacaaagcctagtgagaaattctaatcaaaagagttgtgcaaaattcccaaatcagcccttgaagaaaagcctccttgggaaattcataaattcaaatttctgaaatctgacctcttcttaaagaacagctgcgttctcttaattcaaaaacacaaatc

SEQ ID NO: 71127 - DNA, 544 bp, Zea Mays
ttctttcggccacagggaagcaattgctagaagaggtccatgtcgggcaatgcagaatacacgcagcatcaagaactctagttgggaaggtcttcaggtctagtttctactagccaacggcaaagagtgatgcagctgagttagtccagaggtgtgaagcctaccagtacttgtcaaaacagcagcatctaccagcacagcaactgcaaaccatacctgtaacctggccgttcatgtgctgggggctggatatgattggacctttcaagaaagcttaaggaggatacactcatgtactggttgctatcgacaaattcactaattggatagagttcaagcccattgcttctctaacatcagctaaggcagtggaattcatacaagacataatattcaggtttgggataccaaatagtatcataaccgacctggggtccaagttcacaagttcagagttcttcgatttctgcgaacaaaaaagcattaagatcaaatatgcctcagtggcgcacccaagagccaacgggcaagtagaaagagccaa

SEQ ID NO: 71128 - DNA, 444 bp, Zea Mays
gtcgattttccaaattcaatgtgactaggtttggatgggattagaatgttgttgtcctcctcactttcattatcacttccgccttcgtccacggtctgctcagcttcagcagtagcaccttcggcagtagcttctttcggcacaaccagaccttatcatctcatcacttctgatatcggtgctgtttcagctatttcggtctcatccccctcatgggacaccctagcagtggatcttactctggccattttagtgtttactttccttaagacgaagctaatctcaagtgccgaagagcttgttcgaaagcgcaatgcaaaaagcttcggtttcggttaaaatttttaagagcacaacagtgcgatggcaatgaatgttgtggtaacttctcaccaacctatctgtttatatagtgctgcaggagaagaaggcgaactgccagac

SEQ ID NO: 71129 - DNA, 585 bp, Zea Mays
tttccatgtttgcaaagatcgtatcagagcatataattctttatcataagtggaataattaagaacagggccattcaatttctcactaaactcaccaaattattgcagcttccaccatcaataataacacatgcacgccgattctcgatggcgaaaaaagtctggaacaaattatggcgttgctgcttctcttatgattcaggctgagaactaagaacacgctgcaccatgatgcttcgaaggttcaccgtagcattagcaccaagcatggcatcatcattagcagcaacatcactggagtcatcatcgtcaccctcaccgtcggaagcactaatgtagccatcatccgtagcaatgtatgttcgctgactcgggcaatccttcttcacgtgaccaatcccatgacagtggtggcaaacaatacccgaagaacgaccactggaaggtgctgcaggtgctggtgaattctgtttcttggcgggtacctgcaaaggaagtttaccaacatgtgctacagtctagcttcgtaagtgcactagcttcgtatctgacaaaacaatgttttatgtagcggaacattctttc

SEQ ID NO: 71130 - DNA, 555 bp, Zea Mays
cgagactgtcgttgtttcccagacatgcatttagttgtgctgattctttcttccaatcttctagaaagttggttccttttattccgaatggttttcgactgagggcgtcggctaccacgttggccttcccggggtgatagtgaatttctaggtcgtaatccttgatcagctctaaccatcttcgctgacggaggttgagatcttgttgagtgaatatatacctcagactcttgtgatcggtgaagacgtggcatttgtttccgattaggtaatgcctccatatcttcaaggcatgcactatggctgccaattccaagtcatgggtggggtaattctgttcgtgtggcttgagtaggcgtgatgcgtaagcaatgactttctcgttttgcattagcacacaccctaagccttgcctcgaggcatcacagaagacgacaaaatcttgatgaatatctggctgtgatagaacgagtgttgttgtaagtttctcctttatgacctggaaactcccttcacattttggggtccacacaaatttatggtctttcttgagaa

SEQ ID NO: 71131 - DNA, 389 bp, Zea Mays
tcggcaactggtctagctctcggcaacggaaacaccagtgggccccgttgctagttcttttgccgagtgcatttggtagcactctcggtaaataaggtctttgccgagagtcttatttcgacgaatatcgcggccaccaacactctcggtaaacgaggtcattggtgagagtattatttcgccgaaagtgtcactgagcaaaattgttttgttgaatgacctacaaaatgtactcggcaaagcgtagagcaccgaataagtagacagattcacgtagtgctgcacggcagcctctgattaatctttgcgccacggaggcccccatcagaaagaaccaggtcgatccgcccaaaaagctcggacatatccacgctgtgactccaaccaaa

SEQ ID NO: 71132 - DNA, 529 bp, Zea Mays
tggattgtacaagcggtgatgggttcttgattagctgttacaattggatcattcagctttgttgattacatttttgtgcagggctagtgagctatcctcggatgagcttgagcacctcgtgatcctggttggcaaccccgctagttcaagttccccgaccgattcctcaacaggaaaaaggactataatgatggtaggttctctcaggattttttcaacactcgtcatgtgtgtttaagacttagagcaagagggagagggatatggtaggggcaattctgtccttccaacaacatctaactcgtttaaatcttaaacacacgggagtgctgttttgtccactagcaaatgttggcaatgccattttggcgatgaagctgtttagagtgccaaaacagcaaagtgcaatctcgggagtggtataattgcaaatttcttaaggcgagatggatggtgaggtgtctcctcatcaaaggggccatggctccctcatgtaggttggcggcggctccttcttaggttctggttt

SEQ ID NO: 71133 - DNA, 400 bp, Zea Mays
cggagatggacgctggccacaccaatgccgagatgggactcatccctaatggtactagcgcagtgcttgcctcgccagcccaagcggcgatgcgctgagctccggctcgttgctctgcccgaaggtcgtcaagtgtcttcctcaacacctccactgcctgggggcccggggctgactgcctcgtctgcgctgcctggaactggcggacctgcccctccagcgtccgcactttcccttccagatgcttcactttctcctctgcctcgagctcaagctcatccagcagcttgttccgccttgcccacatctcctccctgaaggcgaggtcctcctcctgccaagtgaggtcagttattcattttgccagggaagcttcccttgccttaaggtttccctcaac

SEQ ID NO: 71134 - DNA, 364 bp, Zea Mays
cctcaaccacaaatttgctcagcgggaaccgaaggcctgccttcaggaagcttcggtaaacaacttcattttcctcaggagcaggggcagtgttgtctcctccaaccctcacaatagacatgtcgcgaaaatatctccctctcatggcatcaatatgactctgtttaatgcttgatttcccgaagatggtatggcttggccaccagggccgatcctcagaatcttcatctccactctcaacatcataactatcgctgtcatcagagttttcaaacaaaccctccattatctccttagtaattttctctgtattcgtttttgccatagactcataaaacccagcgataaaaaagatccgcaactt

SEQ ID NO: 71135 - DNA, 688 bp, Zea Mays
ggatgaacatcaaacaaaaaaaaagaaaaaataatgacaaaggttgaagcaagtctttttatcttaagaaattctccttaatcatgtcatgaacctcaaggtaagaagaactctcaaaccctaattaatcttaagtggaccatttaagcacataaagggcatttgggaaaagacttaggagaaaaatacaaattttggtaaaaaccaaatgacaaggttttagtacactaaataaccaacaaaatatagtaagaaaattttgccatttgaattttttcaaaatccctaaatcagcccctaaactaatgcacttgggaaaagttcagaaattcagaaatctgaatttcagcccctttccaaagatcaaccgcgttctctgtttttcaaaacttaaataaaacaagtccaaatagcaaagtggcgccaaatttcctagaacacacaatgacaaagtttggaaacctctctccaccgtttgacacgatcttgacatagatttacctcgggactcgaccttgtgacactgccaccttagcgacgcgacaactctctgtacacagccccaaaccgctcgacttccacacataaacgacaaagctctgtcgggagagcaaatcttgtgcagtgatcatgcccaaatacgcgaagatctccaacctatgagcatttgaactcgggcagaagcaaa

SEQ ID NO: 71136 - DNA, 1017 bp, Zea Mays
gtgccccagtagaatggtattgttgaacgcaaaaatcatacccttgttgagatggccaggacaatgcttgatgagcataggactcctaggcgtttctaggctgaagcgatcaacactgcttgccatgtgtccaatcgcatctttcttcggacttttctgaacaaaacttcttatgagctgcgatttggacggccacccaaggtcagtcatttcagggtatttggctgcagatgctttgtgctaaaacaaggtaatctggacaagtttgagtcctggtattttgatggagtttttctgggttatgcattacattctcatgcttatcgtgttcttaacctagagactaaccgcattatggagacttgtgaggttacattcgatgagactgcaccttgttcatcccctgtctttgagcctgcaggtccagatcagatgggacaaaccatctttatggaggaggatcacgacgacgtcgattgggttgctctcgagccaactccaccgaccgccctagtcgagcctgcttccactactatggctgatggacccgaacccactccttccaccacttggggtccactcgagctagctcctgctgagactggaggagttgaagctgctgttgaggggtaggccacttcctcaagggcagctccacagcatattcagcgccgtcacccacctcagcagatgatcggggagcttcatgagcgagtcactcgctctaggtcacatcacatttctcattttgctcactcaacttttgttgctacttttgagccccgagatgttggacatgctttatctgatcctaactgggctaatgctatgcatgaggagcttgaaaattttgaaagaaatcaggtttgggttttggtgccacctccttctaactgccatcccatcggtacaaaatgggttttcaaaaacaaacaaagtgaggatggtttggtagtgagaaacaaggcgaggttggttgcccaagggtattgccaaaaagagggaattgattatgag

SEQ ID NO: 71137 - DNA, 865 bp, Zea Mays
cctttcttaggtgttgctactgaagcggatgttatccttgacagccctagcactaccggagaactctgcagcttcggctgctgctcggtcttagaactctctgttttttatttctctagttgaatagtgggaacttcgactgctgcaacgggtatgttgatcatctattcaaaattctaaaagcagcattagattaaattttcttcgatttaaagcaaggaaaaataaaaggcattacctccgaagctgagagggtatctttggcagattcaacaacctctgtctttgaaacccctacagcaggcagtataatagccctttctaaaaaatacgacttcagccagtgagttacaacttttgttctctttggcttcggcgcgacaaaagagttcgttgatgcaattttcctttttgtcccttgtttctgagccagaaagctgtagtcaggatatacaaaaccaataacatcaaatactctattcagccttttccttctacgggcaccaaaggcaatattcatggcttcatcttcagctttcgtataagcccccagcaaatcgtcactagtcgcctcaatggcctcaagccattcatcatctggctcaccgaactgacttatgtagcagtatgtatacttcaagtaaactagaccaccttcgcttgaactattagtggtttccttcggcatttcccaatcattaacaaggggccacactttgaaggctatctgctcctggatcaagtctctggtaccaatctagctgcacacagtgttgaaggccactaggcatgcttgagccttatcactgttcacgatcaagggtcttctgatgccaaagcatgattgtatggggcgctgaattat

SEQ ID NO: 71138 - DNA, 1529 bp, Zea Mays
ctcttgagcaagcaacgtgccatctccatgactgtatgatttcgtcgttccacaacaccgttctattggggagagtatggagttgtagtgttagtgtttgatgccatgttcattgtagaacaacacaaaagcacctaagttgaattcaccaccatgatctattctgaaagctttaagacgacttcaagactccacctctatatccaccatgattttcttaaaatactacaacacttcatttttggatgcgagaacctcaagccatatatagcagttgtagtagtcgacgatcaataggaagtatgacttccctctaggtgtggtcagtgtgatcttcccacacagatcactatgcactagctccaggcggttcactgctctataatgcaaagcttgtgggaagggtatgcaatgttgcttcctaagggtgcagctatcacatacatgttccgcacggcggatccatggtatgacctccaccatctcctttactccaagctcatgttgggacctaaaattgaggtgtccatactgagcatgctagagccatgcttcctcttctattttggtcagcaaacagacgagtgatgttagattcacctttatgacatatatgactttgtctctcctcttgaattaagactgtatgttgttggttttgtgcatgtcggcgttcaaacacatgtagaacgctgtcatcgatctcaactctgcaacctccttcctctaactgaccaagactaacaagattgcattttagagatgggatgtgtaaacctcagtcaacaccttgtgatcctggtccttgctagcaatcgtcatagcatcgatcccatggatctccatcttgcatctatcaccaaaacgcatcgctccacgcactgactcatcgagagatgacaatgatgatcggtacctcgtcatatgggtagtggcccaagtgtccagcacccaggtgccctcgttgtacgtcattaggagcatgtgttcctggtttaggaacacatgctggctagtcgtgactactgtccacacatgttgcacatctgtgccaacatgagcactggttgttcgacatcgacgtcgaccacatgtgtggcctcctatcgctcctcttttgccgccttcttgcactccatttcccaatggccatagatgccacacttacgacacttccatttgtggcattgggtgctcatggatgtgagtttgactcttgggtcgcgtgcaatactgtgctcgcctgatctctctttcttcttggaatgtacatcgctcttgttgccatatgaagatgacttcgtcaacatgcaggtcttgttcttggctgcctagtcctcctccatgtgcagtaggcgacccaccttgtccatgacctactccattgaaggctcgaatcgatctttcatcgcacgaagatgacccaccagctgctcgagcgaaaggttctttatgtcgtagaacatctcaatcacgcccatcacctaattgtagcatggtggcatgactaggaagaacttcatgacgac

SEQ ID NO: 71139 - DNA, 328 bp, Zea Mays
gaactgggttcctctgtctgatactatcttccttgggatgccatggagtttgactatctccttgaggtaaattcgggcaagggtggctcctccaaaggtagttttcactggaatgaaatgggctaccttggtgaggcgatctattactacccagatggagtcattccctttctgcgtccggggtactccggttacgaagtccatgcctatttcttcccacttccattcaggtatcgggaggggttgtaataggccagcaggtttttggtgttcggccttcgtccgttggcagatgtcacatcgggccacatactgagctatttctttc

SEQ ID NO: 71140 - DNA, 386 bp, Zea Mays
cgccgtccactggataaccccttcgggatcaccacaaataaatttctgttgcgaagagtatgctgccacctttgcaaagctattttttagcttcttcgcgcattccaaggatgtttcgtagcatctctccttggaatcccgaagctcttcaacattcttttgcacccttgatctttccatttcacttatttcctgcttcgcctttgcaacttcgaaattttcattcatttctacaagctttttcttcaaaccttcgacttcagctttgtgggcttcggtttgagcactaagcttgactttgctagcttttagcctgtccactaaggaaaacaataatttatctttctcaagagcttcgttcctcaatgtgatgacctctgaccaaa

SEQ ID NO: 71141 - DNA, 421 bp, Zea Mays
cttggtatctattgactcgtgcaacttctgtcaaaagcgtgaggtaaactgagtttctcggtctgacacaatcttcttagtgactccgtgtaaacgcacgatcctagccatatacagttctgccaacttggctccagaataggtggtcttagctagtataagtgtaccacctttgtgagtctgtccataataatccagatagaatcatagcaatctctggtacagggtaatccaactataaaatccatactgatttcctcccatttccattcgggcaccttcagtggttgaagcaaaccaactagcctttgatgctcggcttcactctatggcatacgtcacaaagagttacgtgagtggccacgtctctttttaaaccaaaccaccaatacttttcctttaaatcctgatacatcttggt

SEQ ID NO: 71142 - DNA, 504 bp, Zea Mays
cagcaaccatttttctcatgatgacaagggtgacagataagatctttctcatatttcaatttgggcaaaccttgggtgaggtcaagtgagcttaatcgaaccaaaagatcaaagctcaaatgacccaacctcttatgccatttccaaatctaagaggaagaacttaccataatacatcgagaacgaccagaagtgtggaaaaattagcatgaaaaactcaccaaaatggggaaatctaacaaacaagatctcccttagcatccaaaacacgaaaaagacccttcttaaagcggacttcataaacatcctcaagtagttgcaagttagaaagcagatagaaatgcaaattagaaaccaaagcaacatacttgagcacagagctctcgttcacccaaatggtgccacaagagacaacattacctctcgacttatccctaaaagtgatgtattcattacagatcacggggtcgaggctgaagaaccatctagagctttcggtcatgt

SEQ ID NO: 71143 - DNA, 374 bp, Zea Mays
caggtaaccaagggcataattgtacttagaagggcacattcacccatctggttgtctataaatactcctgcaatgtacattgataggacatgcttaacaagacactacagttccatacctactgtttattgagcacatgaataccccctttccccgtcgtttaagcccgcttgaccacgtgtcaatcgataccaacaaccgtctgaagccaactagccaaagctcgcttctaccgagttcatggatggcactattagacaaaagcccacgataaagaaggcttgtacattaacttcgtctcctataactttcaataccactgagacattatcttcgtctactattggcctattggagcagtgtcccaatggttg

SEQ ID NO: 71144 - DNA, 554 bp, Zea Mays
tgattatggaatagtgagggttccaaggtcgatcgccgttgtcatcattattaaagcttgcttgctctccctccctctctctctgtgaataaagttctgccaaagtggaggtaactttatggagtagtagaacaatagactagcatttgagctgtgatagaaaattggctaatcggaagtgtgaagaaaagtgggaggacaagctaggcaaatggctgtaaggacaaagtaaactttcctaaagtactgctgataaagtgataaaaaggaatgctggctatcttgttggtcccaaaactgacatatcatttcagattgaactgatgattgctgaattactatggtcgtacctgcattttgtcgattttattttgatttggtccaaaggtgactatagtttggatggtccccttatcataacctcctacttttccaccccaacatttcctccagtttagaaacactatatacttatacaacgaaaccaggctgctaatagctgtttcccgttctcatgcttttttttatgtactccctccgtacataaatatatg

SEQ ID NO: 71145 - DNA, 803 bp, Zea Mays
tgggaaagactttggtgaaggcgaggagattcagaaaccagagggtgctcgtcgcaagctttcacgcctagtgaaccatctagctgcacctgtcgaggaggagaagaagaaaaggcgactccggcggttgtcatgcttggagcaaggcgctggcccctccacattattccttggcgatggcctggagagcaccatcctcgaggacaatgtcggaggttgcgatgatgttcaggttgccggcggtgcgcttgatgaggaagaggaggaagaagaggaagaaatttcgttgatccgcaagaatagccgtcgccacagggtcagcgacattcccacacaatccttgtcagcgctcgtcagcctccaggggttgtcaatatctgattttgaccaagcgctagaagagatcatccctgaggaccttctatcatagcctcctgaagctaacaatcccactatttgttcagatgtcccagatgatggtcttctgccgcatgatcccgccggacaagaaataacccgtgtagtttctcatgcttcgtcgaccttggagggtggtctacgttgtgaagacgctgatccgagtcacctggctcctatcgacatggccgagggatcttcagccttagatgtggctgtcatggaggacccaacccccgagggtggtgctgggagcgacccagctccccagggtgttggggcaggctccccatctactgcttctatggatgtccacattggatcgccaccagtccagtccaaaaaggctacggtgacacatctctctacggctctcgctggtctag

SEQ ID NO: 71146 - DNA, 513 bp, Zea Mays
cgagtgtcagcccacgtcgaacacgtgggggtttacttctgccagggttcaacggccgatttgatcgccttagcgtgcagatcttggcaaaacccccatgtacagtctcttccctgcaccaaatcctaccttttttatgtgagttccaagcaaagatatggtcggggtagagagatatgggggtgagaagttggctctattagagctgtccacaccgagacaaaagccatgccaagtcgtgtcaaatggcttagggttgggttcaaacttttccacggtgttctaggggtcttggggcgccattttgtcaattgggccataaggttttgaggttgggatcaaggtgaacatgtttgatctttgaaagagggtcggttttgaacttgagcaaatcctgatttttcttttatgttcttctctttggtgacctgtttggggttgttctgaaatctttttggggtcactctctttctattttttgtagggtattaagtgtactacaacctttataat

SEQ ID NO: 71147 - DNA, 993 bp, Zea Mays
tgcacggcggaaaccgtgacatcaagctcacgttcccgctcaatcatgcccgaattggttaaacgggtgtcacaacaagcttcctgagtatgcagagctactaaaacaacaatcaagaagtgcagatccttacccgagtgctctggctacggagcgcggagacctgtgctcgctggtgacaaataaaggggaaaatggcgccgcgacggctctgggtggaattgggaggtgaaatcggggctacacggccgtaaggaactgtagtttcaccgtgcacactcaatttgggaagaggtggcagaggcagtgcgaattttggggctttgattaaactctcaggtggagatgtgagtacctcgccgtggatcacggtgctatttatagccacggcggtccggctagctatccacgaccacggataacctcgttagtgcatgcttaccacgtagtgaagagatacagtgaggaaggagcaaggcatgggcgacaccgcgacggatttgactgagtcacggtggccgctggtgattatctccggccacgcacgactgagctcgcggaattgcgccacgttcaacgttatccttcccgcgatcaaattcccaccatttcatctgagctcatctaattccgcagtgcggtagatcttttcccctgtgttcttcaaatatttcagtgcacgggatctttagaggtctcctgaaccgaccacgttccaaccttttgatctcttgattcttgctaaggacagagcaaccttccttaataaaatttattcactaatcatcagtctacaaacttactataggatacttgggtcaaaaccgagcgaattcaaagatatggcgcgcccaaattgttcccatatcactgtggccatttctggttgcagtttcagtttcagttactcgacaccagtccgacagagcaactttgggcagcaatttctttaatttttgtataacagctaaagagactatctgcatcaaagtt

SEQ ID NO: 71148 - DNA, 645 bp, Zea Mays
cctgggcacctctcagctgttcaaagagaacgtcaatatgaggtagcggatatttattcttgattgtcacttgatttaaagcacgataatccacatatgacctcttgcttttatccttcttctcaacaaataataccggaaaagcccatggtgacctgctaggcctaatgaaacccttaacaagcagatcgtccaattgttgcttcaattcaacctgctcctttggagccatcatatacggggccttatgaataggctgtgtacccggaatcagcttgatttcaaaagtcgcatcacactctggtggaatgcctggtagctccactgggaacacgtcggcataatcacacaccacacagatgtcttgcactcgaaagacagcctcactctccatcatcatagaaaaaagaattcctgacttcctcgtccgacgatccagaagtaattgggacaacaatgaaagagtgtacttgggagtgcttcgcaagaataccacctccctacccgacggcgtctgcaaagacaccgtcttccaaaaacaggatatgactgcgcgatattgagttaaccaatccatacccaaaataacatcaaatgactcaagggaaatcaccacgagattagccgaaaagatctcatcagcaa

SEQ ID NO: 71149 - DNA, 795 bp, Zea Mays
gatggatcggtggtcgacatcaagggcaaaggcactatcctgttcgtgtgcaagtccggcgagcaccgtcatcttgatggggtctactacatcccgtgcctcaccacgaacattgtgagccttggccaaatggacgaggacgggttcaaggtcaacatagagtcgggcgtactatgcctctacgacctgcagcgcaaactaccggcgaaggtgcatcgatcacctagccgattgtacctcctcgacatgaacaccgctgccccggtgtgtctcaccgcgcgggttggtgacgtggcgtggcgctggcatgagcgctacagtcacctcaacttccagtcgctgcgcaagctcggatgtgcggacatggtgtgtgggctgccggcaattgaccacgtcgaccaagtctgcgaggactgcgttctagcaaaacaaaagaggacgccattctcgcaggctgccaagtaccgggctcaggaggagctcgaactcgtacacggtgacctctgtggcccgatctcgccacctacgccggccgagaatgcctacttcttactgttggtcgacgacatgagccgttacatgtggctcacgctgttgcggtcaaaggcagatgcaccagcagcgatcatggcgttccaggcgcgtgtcgagcgtgaaatcgacaagaagctgaaggtacttcgtaccgacaatggtggtgagttcacatctgtgcagtttggcaaatactgtgcaggagaaggcatccaatggcaccactcagcgccgtactcgccgcaacaaaatggtgttgta

SEQ ID NO: 71150 - DNA, 424 bp, Zea Mays
ataaatcttcccctcttatggaggtatggcacatatcaagactacccaacggaaggcaaccgaacctcgaggcgtgccccggcattagttggctcctcgccatgaagggagcagtagcggaagtaatgatcccataggggatctcgaggtcagagttgaacgactcacgatggaactgcgccatggaaacagggaactagcgcgagatagccaacgtattactgagctgttggcggaggttgatcgcttgcagcgggagatagtggaacgagacagggctatagactgggccgtaaattcgtactctatagcctgggattgcgaggcgaatgcccaagcctgggtgatggagttaaatgtagccctggagcatttgcaagcgtacaataacactttgcatgagaaagtgcacgtgctatacgac

SEQ ID NO: 71151 - DNA, 482 bp, Zea Mays
tgatggtaccttggcagtggtgccccttccagaggttgatacaactttgaatgtcccgaaacctatcagcactcgcccgaggcgtcctagccgaaccagtcagcccgagccttctgctgatgagcaaaagaaaaagagaagacgcctccggcgagtatccagttttgatgaggacgccggcactttagctcctgctgctgaagaagtgcctgcaattggtcttactgacactgatcccaatgggtgtgcccaaactattgctaatcccaatgagagtgctgcttgcgttgccgctgtggaggatgaagaggaagaagatgaagctcctttaactcagaaaaacagtcggcagttcattgccagcggtggaagtagtggagttccttctcctgctttgtctgcccttattggtctgcaagaactgtccatggccaactttgatcaaactctagaggatatggtcccaaaagatttgctatcag

SEQ ID NO: 71152 - DNA, 526 bp, Zea Mays
gaatgcctggaagctctgccggaaacacgtcagcaaagtcacacaccacccagatgtcctgcaccgcaaggcagcctcaccctccaccaccatggagaaaaagattcccgacttcctggaccggtgatacggaagcaattgcgccaacaaggataacgtgaacttaggggaacttcccaagaataccacctccctatctgatggtgcctgcaataacactatcttgcaaaaacaggatataactgcgcgatactaggataaccaatccatacccaagataacatcgaatgccaccaaggaaatcacaaccagattggccgaaaagacctcatcagcaagaatgacagaacactcccgacaaactgaacagctactaatggagccattagcagaactaaccaaaattgggtgacccaacctctgcaccgaaagaccagcccgtgacataaaatcatccgaaacaaacgaatagctagcgccagagtcaaaaagagcatgggccacaaatgaatcaactgaaatcgta

SEQ ID NO: 71153 - DNA, 411 bp, Zea Mays
atcttggaagaatagagaaggaaggggatcaaccaaggatgttgatgaagcatcgaaagaaggatgaggataaaaaggacaagtctcatcaacgacaacatcctgagatatcctcatccgatgagcaattggatctcaacaacaatgtcccttatgctcagcactatactcacgaaacacacactcaattgactgggcagtcaacttagtccactcacgaggtgggagaaacacagcatacaaccaaacatatgaagacttgaatcctcaggtgtcttgccacaaagacgcttaaaaggaatccctccttgaagagttgaggaaggctagatgtttgtcaagtagcagtagaaacaacctcagcccaaaagtgaggaagaacagaagaggcaaacataagagcacgagcag

SEQ ID NO: 71154 - DNA, 649 bp, Zea Mays
gcgtgatgattgggtcgcgtggcatggcatcaatgcttgagaaagctggttatgaacatgttgagaccataggaaaaaatgattttggagctgtggaagacataaaggctctttcgaagagtgtacttgatgctacaaaaagattcttcttcgaattgtgggataagggtggtcgatagctagttgctttggaggccgaagcatatacgaggaaggtttctcttttaagcttttactgtcgaaggtttatttatgaaaattccttaatatttactttgcctctctttctgtagagcaaagtggccaagaagaagatgagaaaaatgaagaagtataaaaggaccgaaacttagctaaactattaagctgaagggttttttgtattgtgaatgaacatttatgcagttgaactactgcttattgtaatataacacttttcatcacctttttcttttctactctaaacgatttgttgcgcgtgaaaccaaatcttactgatcttttgagccaaaggcgaaaaataccttccttcttttcactcgaaacaaagtaagcttggatcatgcttgtcaagaataacttaaaaatgcctggtacatttaactcaacacctttgtccttatggatgtttaggcaatcatgattaagc

SEQ ID NO: 71155 - DNA, 529 bp, Zea Mays
tcaaagatcaagttgaatcgccagcggaatcaagatccacagttctagatgaagtctttccttattatactcttccttgccacaaactagacttgccataaccatacctcatctgacataataaatggctagacatacatatccatataaaaaaacgttaaacaaaactttgattcccaaaaaaaagagagaaactaaattcttaaaccgaacttaacacatcccttttcttacaaatctcgaggacgagattatttttaagggggtaggatttgtaatgcccaaatttgtaaaagcataagaactaagattattctccctatatgtgttgcctttactcattggtacatgtgaataaccacattgaaaagtgaataattaacaagtgacacataaacaacatgtgcatcatgctggtttttatttttgtgtacatcttgtgacaatataagaaatcatatgaaaagaaaatattaaaatcccaaagtggaacctgaatataaaaagaattctagagtttagaaaagaa

SEQ ID NO: 71156 - DNA, 837 bp, Zea Mays
gttgagacgggggagaaaagggtttttttgacaggtataatataggcatcaaggtaagatatagaggtgacaagggtaaagatgataatcgtgaaaagcataaccaaggatagagttaaggcaagactcgcgaaatgacaaagtggaaaaaacaatcaaggataagataagtggggttccgataggagagttgaagaaaaatattgagagaagttataaaggaacaacgagatcaccaaggatgtgcaacctaaaatgaccgctccaggatcattttgaaacaagggtggccaagggcatgtaagtgaaatgtttataaacaaacattagggtataaagataagcaaatataaaaagataagagtatgcaatatcccaaggatacatgcataccaagacacaaaaaaacaaaagatgatgacataacaacggaatagggagggatctcagaagaccagaagttcatggatatataaattggagtgtttaaatagataatagagtttctttttgaggcaagtatttaaaacaatagtattgaagaatctaggggtatgagcatgtcaataccaaggcaataaagatagtcaaagggtagaaacttaatgacggaagagggaagaatcccaatagacaaaaaaggttatggtcagggggcatctacaaagatgtcgcaagcacaagagtaagatcagatctagtagattgagaaaggttagaccataatagaataaaatatttttgtcaaggggcatttagaagcacaacatagaattagtcgaggtgactaatattttgaaacagtatcaaggatgaggtgaagtaaaaatcaataag

SEQ ID NO: 71157 - DNA, 329 bp, Zea Mays
ctcagccggtggtagaattcgagtcgatagcatttgcttgaatgtaagtgtggaaataagggggatagcgtttcccgctaatctcatagtaatgggtactcagggaatagatgtcatcctagggatgaactggctagataagtaccaagcaattatcagttgtgattagaggataattaatttggtgtccccactaggagaagaagtggtagctgagttagtctcacctgagccaaggaaagggagttgttatcagatggctatcgatagcaaggagccagattcactcgagattatcaaggttgtgtccgaattcccagatgtgttcc

SEQ ID NO: 71158 - DNA, 495 bp, Zea Mays
cgctgaccgtttgcaaatagccccttcggtttctatctcttcacacggccaggtccacgatggcgctccgcacgggaagcttaactccggcgagctagaccggccggaggggaccacgaccgacgctagtcttcggtttaccccaaaatctaccccagagaggcatttcccctcactcaatttcagaattggagctctacaaccctctgcccacgatgacagcggaaaaacttaaaggagtcgcatgttccaagcgattcatggcggtataatccaattggataggtcggggagcatcacgggtacctgaggatactcaattgagggatcagagggcgtgaactggcttgacttgcactggccacggtaaggctgggtttcagtgttctagaactgaattggggagagtgcggaattggagcttgttgatgatcggctgggagcaatactaagtgtgggggtgcgcaatgacgttgtgaagctagtcccgagctc

SEQ ID NO: 71159 - DNA, 366 bp, Zea Mays
gcaaactgcagtacaccggccggacgaactgtacactacaccccgtaggagcacagtcgcgcaacagttgatgacgatgctacaacatggacatggagtaggtgccttgtgtttaaaaacgtcctgggtgctgttgctcggatttgacgtgacaatatttacgcacggtctgtttgtgtaggtgtggtacgtgtggcagcgcaccagctgcggcatgcaaactctatctatatacatacgtaaaagtactagcaggtatgcatgtggctattatatatgcacaaagcatacgcatatgcatgcatgcaaatgattatccggcggccgtacgtatcatcgatcggccgaccggaaggtacattaatt

SEQ ID NO: 71160 - DNA, 609 bp, Zea Mays
ggacagggcatcaattttcagaaaggccagggatcttgtcgcaagattcctaagacacagagcacagtgtaataggacgacgggtttaattcctgaaattcacaggggttctttaacaaaattgacccgcgaaggggtacgggtgattctcggccgttggatctagttttagcgtgtgggattagatcacgaggcggtacgtgttctcgaacgtccgatcaacagcgaacggtctggatttaattatgtgatatacaatcgtagcccttggatccgatcaacggtcatgatttaatcgcgcgaataggtatgctatcatctaatctccgccctccatcaatagatcgacgacggtcgacccttctaatcttggccctacatcgtggagctaacggtccgcgccgcttcctccccacaccctcgttcaccggcggcggtcgatagaaacccgagcgccgccgcggtgccattgacggcgccctcgatctacgcccctagctcacggtgcttgcgtgaaacactattttacgcagagaacaaggatgcaggagcgttggcggggtaattaccagaattcgaatggagttctgtcctgtccgcggcgcacgg

SEQ ID NO: 71161 - DNA, 697 bp, Zea Mays
tgaacatcctgaacatatatatatgaaagcacacgtgattcacaatcctgtgcatatatcctgaacaagggacaatgctgaacagcctgaaaatcctgaacattctgaataatggtaaaagagcagattctgaataagcaccagaactgtattttcagattacattttcagtgtgccgagtttcacattacaacccagaaaatataaataagcaccagaactatcgcataatccacaaacttaaagatttcgtacaaacttaaatggaaaacacatgaaaccatcatctattctgctggtggctgctgtctcgaaattttcagcttgcgaggtttcgacagttcttttgtttttttaattcttttactccgtcctttggatcgaacatcatttggtggatgtatatctacttgagatggaatttggcatccaatgaaatcctcatactcttgttgtttagtttgcactatggtaggtacaatggtaccaagagaagcttctatgttcatcacacttgaaactaagaaatcaattccttcctttgaactcttcgcgtgctgaattaaatcttcaaccttgtttcgtaccatggctatctttttccttttctccgcttcattagcatctatgggcttctcatctaataggttgccctcctcgtcatacacactctctctaaagaaaaaacaacaaaatc

SEQ ID NO: 71162 - DNA, 466 bp, Zea Mays
ctctgcctcaagccctcaacgagtaaagttgagcgagcatgtcgtcagtgttatgcaacattgcccctgttgcgcctgtggcaatgtcgcgtttgtgttgatctttagggaccccgccactggcagcattcatttcatcgcttgatctataccactctccaccaaaggacgagaagaagacacaagtcgaaagcaaacctccaaaccccctttaagccaagtctatcgctgctctcaagccatttggtgttacaacattgttgcggcgttttatattcgtacatatagatatcgtggagccactattgttgttactacgacaccgatcaacaatgaacatgaggagcataggtagagatgtcattgctgcttggtacacgagaatgtatggcttattctagtactatattgtcatgcttctctttcattgtattgcacgtctagtggtaacgattcgtcatcttct

SEQ ID NO: 71163 - DNA, 757 bp, Zea Mays
aaacttttgggtcaaattagagtaagatctattgctcgattgagggtagttgccatagtcgatttgtagctggatcatagggctacaagtttgctacagatgaattagcaagctcttatacgaaaatcaaagatctgggcactacaaatctgtctgtcacgcgctctgaatcaggttttcaatggtacagtgtccggatcagaacgccagttcagatgactcaccgccggtgaccgtgcgcctggattcgcgcctgccatggtgattcgtgcctagcgcagatggataacggcgaagaaatattgcaccgtggatgaactccggccactattctactccggccgccgtacccgcctgtgtcatggccgcttcggataaattcaccagagttagccacctcgcgaccttgcgccacgtgccctggtgtcttaccacatcgcagtagctcacgttatgcatatctggtgatcgcttgtgagctcgccacggtgaaagccaccaatcgcttgcgccagtgcacccccttctctccgaccaccaccacgacatctcaattttatggaccaccgctcggggagcctataaattgagcatgccttcagttccgcaaggtagtctagcatccaatccacccactcgtgcctccaattactcactagagagccccaatttgggatttcccccaaatcggtttgaaacaccacacatagtgaccttgccgtggctagctcgttccaggtccgttcatgctctctgc

SEQ ID NO: 71164 - DNA, 1068 bp, Zea Mays
tttgtacatttaatctgagtacaagttcataacaatatttgaattcaaattgacaattcaaaaataaaaaaagaaaacagaaaagaaaaagaaaaagaaaaaaggaagactgctcgtgggccgcgaaccttgcttctggcccactcgcacattcattccacacggcccaatatcgctcatacacacccgccggtgcgcgccgacatgtgagcccctctagccattcacccagtcggattccgcgcgccaaccccctagcactcgctgtccccatgaccccacctgtcatccacttaacgcgagcgactcaattcctctcaccgctgggtgggccctccccatcagtttcgtcccctcaaccaccctcgcgaaggttacagccgagcttgcggcaccacgatctccacgggcctggcgcaagtccgattattcctgggtatacgaccttgtgtctgacgttcctcactccgtcctctcatcccctttttaccaaaccctaagttgcgccaccgttgtcaagagaaaaccggttgccaacgtgcggcggaagctgctccgctggtcatcaccatctcatcgctgtccggatccctgtggatgcgcgcaagacgtctaccacccatcactgaaggtggtgtgagacttgcccacacctagaacggattgtgtcgcagatccgtccctcgttgcggctaggactcaccactgctcggacttcggtaatgatccctccatgttgtgtgtgatgttctgtactctgagtgggtgtttgtgatctagctgggagggctcggattgtcggatgtgaccaccgatgtgctcgccgggtagcgctagcacgtgaggctctgctccaccgccctgcttcgtcggaatagggagggtcgcctgtgtcgttgatccataggggcacgacccggatttgatcgggtggaaaggagatatgggccgtcgatcttgtttgatcggccatcattagaacatagataccccttcggccgggatcaagttgggtcgttgatcggtattcgggtggccaggaatagatcggggcgtgggtgtctctag

SEQ ID NO: 71165 - DNA, 445 bp, Zea Mays
gtgttttcaacaataccactggtcttgttgaaatagcggtagatgtgacatttgatgaatctaatggctcacaagggcatatgtctagtgatattgcaggaaatgaaaacttaccttgtgaggccatcaagaagctcgcgataggtgaagtgaagccacaagaaaaagatgatgatgaagggagaatttggatgaccaatggggtcattgttggggtgcaaaggtggttggtgataagtcttccacccaagcaaacccatcaatctcaagtcatccaatccttgaagaagatcttcaaccacaagatatgccaaccagtgtggaaaatgagcaagaataagttgctaatgaagaacctcttgaacaagaggaaagtgatgatcaaatttaaagacatcctttggtgcctcaccctcgagtgcaccaaggcattcaaagagatcat

SEQ ID NO: 71166 - DNA, 386 bp, Zea Mays
ctttctcgcctctaatagcttcgcaaacatcagcacgtgtgagcctgctttgagttccttcttcaaaacttgcttgttgcgcttcctactgatgaggaccatgatgaggaccactgcacgagtcacctttcaactttttttatatgaactttctaccagctgaagagaatgttgctcctgcaaacttcattaaatggcctacgacacaagatcatccaatcgagaataatatgcaatgggacaataactagatcgtcctgggatgtttcgctgcagctagagacaacaaacttcggtcgagcatgttctatcaagtgctgcgcagtggggggacgaccgtggatgaaggagctggtttgtttcatctagagaagcagggcgccgcc

SEQ ID NO: 71167 - DNA, 292 bp, Zea Mays
gtatttctggaacgtgggtccggatgaggtatttacgctaaatcgatattgttgcataaacagtggattgaaatagcgtaaacatgttttgactgtggcagtagtggttgatcgcgtggaaagtgggcctaatccgccttttctggaacgtgggttcgggggtgttattctgtttacgctaaattggttcgctggcataaatagtgagcgaacgtgggcttaaacggatttgttggtgttgttggtcggggctctccacagttatatagagcctagggctcttaatagattt

SEQ ID NO: 71168 - DNA, 544 bp, Zea Mays
accaaattgagtaaaggacttcaaaaattaggaacaaaggtttaattaagtctttttcatcttaagaattatgccttaaccatgtcatgcacctcagggtgagaagaattcacaaaccctaaataaccctaaataggccattttagtgcaagagggaaaaacttgtaaaaagattttgaaaacacaaactcatgatgagaaccaaataacaaagttaaaatgcactaaataaactacaaaatatagtaagaaagtttgattagcaaagttttgcaaaattctcaaaaagacccttcaagctaaacttcaaaagggaaattcggaaaattcagaactgaattttcagccctttgtaaagttcagtcgtgttctctattttccaaaactcaaatctacaaaacctaaaagaaagaggcgccaaattaccttgaacacaccctggagaaatttgggagcaaaattcggtcgtttgacatgatcttggtagggatttgcctcatgactccaccctgtgacactgccacattgccgaggcgacaactct

SEQ ID NO: 71169 - DNA, 473 bp, Zea Mays
gtcacagattgatacatttctatgaccaaatttacatcttcgtcaataattacaagtgtcgaagattagacttgaatattaatgacgaatatgaaaggaacgtcatagacacaaagtttggacgcaacaagttcgtcacagattagatttgatatcgtcatcgctaatttgccttgatcggctgacgtaatgatgaaataaattggtcacagatgagtttcagtaaaaaacgccccacgtgtacacaccacttgacggcgtgggatccttggcctacatgggccgcagttttttggtacacagcccccgcctggcgacgcggccccggcccaccaacgggaagcggtatttgtttatttggcaaaaaaacttgcacccgtggagcttcgaaccagagacctgcgcctttcttcgaatcggtgttaccaccagactactcacttgttcttgtaaataaagaaagtatcgttctg

SEQ ID NO: 71170 - DNA, 387 bp, Zea Mays
ggcatcctctctccttactcacccttgccaatttctcttggagccaccaccgccgtagaaatcgcgcgtgcggctgaagagcttcgccagatcctgccgtagtcgaccggcatccacgcgcgctgcaccgacctcaacctgtcatcggggagtcgtctctgggttcgcaaaacctcacgaccaagtgcctgagtgcggggttctgctggtggccggaaattcgtcaccataccagcaaatccgccattgaacgccgccggggcaacctgcttcacctggtgcggtatgtttacacctatcacactcagctccttgtccagtatctaccgcacccacatttcgcggaattagttcattaggggccgcgaatttgtcgtcggggctcct

SEQ ID NO: 71171 - DNA, 452 bp, Zea Mays
aatacgccatatccgaggagctccaccagcgcaaagtcgagtctcagaggaaacccaaagacactccacagcccagccgcacgtggacgaggacctcgcaggcagactctggtcgggacggccgcaatcagcaacaggtgcacaacatcgccaaccagacccccgctggcgaggcccctcgccgccaggagtatccccccagggccgcggaaacggaactcgcggtcggggccggggacgcgcgcagcagccgcgcagattttactgcctgttccacggtgaagactgcgtccaccctacaagagactgcccagaaacgaaggcaaccagagacaggatggcacaagcgcaaccagccgacaaccctagagttgtcgcgcacacataccagcaaccccttcagccatacaaccacggccccgctctgcacccaccgcaccatgcataccaac

SEQ ID NO: 71172 - DNA, 695 bp, Zea Mays
ggttgctggacgtagacttcttcctggagctccccgttcaaaaatgccgacttcacgtccatgtgatggacgccccagccgtagtgggctgtgatggcgaggagcaagcgcacggactcctgtcgtgcaaccggcgtgaagacctcgtcgaagtcgatgccaggctgttgcacatagcccttggcgacgaggcgggccttgtacttgacaatgttgtcgttctcatcacgcttgactttgtacacccacttgaggcctatggagcggtgaccatgcgggagctcggccagtgaccatgtcttgttgtcacggatcgacgctagatcctcctccatcatggcaacccaatttaggtcaccatcggcctccttcaaggtcctgggttcctccacgctcatgacatgcagctcatcctcctcgtcgtcatgatgcaccagcccaggtgctgcaccaacgatgtgaatattgtccagcgtccggtaccgaagctcccccacatcatcggcgtcgaagctcgggtcgatggagagcggcgtcgcgaacttgagctgagtccctggtggcggtggtgttgcaacacagggagccaccgatgtcgagcttggttcagcaggcgatggcgtgagcctcgtggatggctcgcgttccatgggcagtggagtggaccctggtgtgcgctgctctggggacgccac

SEQ ID NO: 71173 - DNA, 1084 bp, Zea Mays
ccgcacaggatggcgggttaattgtggcaaagagaaggggctcatgtgcaaaacataacagccgaaggggtacgggtagagcggagccgtccggtcacgtttctagagcccagattagatccgaataatttgatgaatcggtaagcaacgcgaaccatacgatccagattggacgcgcgagattagatcaagctctccttgaaacggtatgcgaccgggatcgtcaatactaagatcgacggccaggagacgagcaagccacattctaatccgacccatccgatccaatcccgatggcccagatgttaatcagatacgatccaatcccaatcgctagttccggatcccacggttcacaccggtccggttgaatcgttacgtcgcttctaatctcagccgcacacaccagatcgaagggccaggaggccatcgtccaccccatgcccatccggcacgacagagctttctccccacggcggcgacatgaccggcatcggggtgccccacgcatcaatgacgcactcctgacgcgactacccttcacataacttgaagaataaggcaaacccagtcatgggtgtcttaccgggaatggagatgcggtcgacccagtccatggtgcggagaggaactgcgtcggtgtgagaacgacggtgcggaattgccgccgcctctgcccgaggtcaacacccgattccttccgcccaagcgccctaccggtgcagtcatgagaggtaaaatgctgccgagaaagccaatccgcgaagaccagatcccgccccggtgttcgtctaccgcaccatcttccacacaggttgcgcggagcccagaggagagggataaggggagggaaaacccacgccatggatttatagatgggtgaagtccactatgctcgaaggaacggatccgcgattccttcgcggaggttgggatcatcgcgatcgccgcggagaaggtgaccccagctgcccagcgtagagggcccaccgcctagcttccctacggcaccgcgagcaacaaccagcgagcgaagattctggacaaaaactcagagtccagttcgctgagccccacggtccac

SEQ ID NO: 71174 - DNA, 490 bp, Zea Mays
ccttctctgctgcgtctcgcactcgagacgctgcccccctccccaacctgctccgccccctccgcgtggacgtcgtctcccgtcgtccttgcctcaccgattccctactccgttccaccgggcgtccccggggtccgcacccaagacgcctccccgttgtcctcgcttcctccctccaacgcctgttgcctgtctcactccacgacatggatttggaatggtgaatccctcactgaggccccgaatcccgcaaccaatgccgccttcttctccccctcccctctgcacgacattgcctccccagccggcggctgaggtgcagcgccaagtggccaagtggcgccgccaatcccccatgtgatcacatccctactcggcaacaacctcctttctcgcaccgctgacaccgcgcatcatccacatccacgcctctgtgccagtagcagcaccgtcggctcccgctgccagatccaggtatccagccacgccc

SEQ ID NO: 71175 - DNA, 959 bp, Zea Mays
gagagattattccgtccgtttttgcgggatcctgttttttcggattgaacccgtatttattccgtatttgacaaatatgggacgagcctaatatgcattagtatataaactaaatcaccgtgtatttaggtgacaaattatagcacaattgaccattgtaaccaccggatctttttaaatgacaagtgatctaaagtcttaaacaacatcggatgtagctaaatgtacacatttagcaaccaaacaaaaatagaatgttgcctctctatatctatttgttttatgttattatctaccaatcaatcactagtcaaacattaataacatttctatttgtattaaattatgagtttccgttagtatttccgtttccgttcgttttctcaattccgtttatcccgctcctgtttccgttcccgactattccggacccgatcccgtttccgatgataaaatgcggatacggaaacgggagaggagtttttccgtccgtttccgtccgttttcatccctattgctagtagtggtttggatcatgggccacattttgacatcatagtccatcatgggccagcagccataacgctgttcaggcccacgttttgacatttccggggcgtccaataggaaaataaaaacatcagtcgtcttcttcaacctctgtctgccagttgaggcgctcggtgctgcgtcagatcgtcgctggatttcgaccggctatgccagcgacctgagcgcgtgggagagtaggaggtgttcgcgccggcggtagccccacctctgtgttgcggtaggtcctcccgttccccaagatccctcgcatcgccgacgctgggagggtggcgcctcggcgatctctctgcactttctggaggattctaggataagggagacgaggggacggcgttatggggtccgtggatctgatcgcctcctgcatcgactccatccgccaggtc

SEQ ID NO: 71176 - DNA, 355 bp, Zea Mays
cggcctcattgttggaggccggaaatagcagctggagggcatatttgaggtgctcgcctccaggtgcggtgaagagaattcctgctcctgctccctgcaacttcagcgagccatcaaaatacattcgccacacttctgcagtctctgggttatctggtacttgctgctcagtccactctgatacgaaatcaaccagtgcttgagttttgatggcagtgcgaggttggaacttgatgtcatgagatcccagctcgcaagcccacttggctattcggccaatggcctccttgttatgaagaatatcccctattggaaaaccagtgactactatgactttgtggtcatcaaagtagtg

SEQ ID NO: 71177 - DNA, 1249 bp, Zea Mays
cttgtatgttgtcattacacattttttccattatgtttgttatatacatgtaaatgatcagccacatgatgctggaaaacatgttaataatagacatatgggttgtaactccaggaggtgttttgctttattttgccttatattgccttatattgtaattattttgctgtattttttgttttgttttgctgctgctgttttggtgttgcttactttcatgttttttgtttgatgtttgttttgatgtattatattgtaataattagtattgtatgctactatgattttttgttccatgtatgattttgttttagtttgtttttctaggttcttaagaaatcaagtgacgaggaaagggagcaagctgaagagatgatgaagtactaggtatttttgttttgttttgctgctgctgctgttacggtgttgcttacttgtaatgttttgctactgctgttacggtgttagatgtttccatgtttgcttacttgtaatgttttgctactgctgttatggtgttagatgtttccatgttgttgatgttttttgttttgtttttctaggttcttaaggaatcaagtgacgaggaaagggagcaagttgaagagatgatgaagtactaggtatttttgttttgttttgctgctgctgttacggtgttgcttacttgtaatgttttgctactgctgttacggtgttagatgtttccatgttgttgatgttttttgttttgttttctttgctgtattatttgttttgttttgctgctgttattttggtgttgcttactttcatgttttttgtttgatgtttgttttgatgtattatattgtaatgattagtattgtatgctactatgttttttttgttccatgtatgattttgttttagtttgtttttctaggttcttaaggaatcaagtgacgaggaaagggagcaagctgaagagatgatgaagtactaggtatcactccctctgcccctttgattttggttcgcatcattgtaatgtctatcatgatgtatgatttgtttgtgagttgttgatttatccttttttctagatttgtgtctgagtagcaaaattccagaagtgtttggcctcatgcaggcaactactgttatgtgagtacataaaatttatgtgtgttttttgtggaagaggtcatttttgctgttctacatccatctttctcaacaagaaaaacaagacaacatgttaaatattaacacaacaacttgtattatt

SEQ ID NO: 71178 - DNA, 454 bp, Zea Mays
gaacactcaaaccttgcatacttaacatttttcattgttttgctctttttgttctgtttgaggtcggagttggactctaaaactctaagtctccatgacttggtgattatgaccacttatgagctccaacaccctgcaatgtcagatagaatttttccaaacacaagaatgactcaaactaaaattcaaagtgaacttagctcttttgcgtcccttataggttatgactttgatagttctgctctttctcgtgacctcgtcctactacttgagctatgatcttgagccttatgacttgaaccataaaccttaggagttacctcaatggttccaagtcatgtacttatgttgtgatcctcgatgcacatgactcttcttatcttgaccaaccttgacttcttccaagccatctcttcaccactggctttaggtaccttggtcttcttgaccttcc

SEQ ID NO: 71179 - DNA, 646 bp, Zea Mays
aatttggttatggttacctagctatatagttagttagttagctatcaagtagttccaacacttgcatacaaaaaatagccctcctctagtttaaatgccccaaagctaatttaggttagttttgagctacctagcaattagtacgatccaaacaggctctaagcctattattgatatatatacacataattaagatgggctattggcagtgcaggggatctaggcttgattggcaggtggtgaatgaggtctaggagagtattaagcaatgcaagtgtctctatatatgcatgggggcagctcgcgtacttggtggtagagagggcaccgaccgtcagaagaagaacctaagggtcaaccacagacgacgagagtttatatcgtcattaggttttacaatgtcgtttgcagcttcagcgcgccttggaaaactcggcaagcgataatttcgttgcaacttgataaaaaaatgctatggaagttcatcggatgccttattagcttgagaaaactatttgctatactatactatttctgtttaaattcttagcttacaaatttaattaatgcactaccggaaacgagtgctttgccgagtgtccgaagtactcggcaaagccttaaaaacactcgacaaaggttttac

SEQ ID NO: 71180 - DNA, 652 bp, Zea Mays
attccgtaaatttggttcagatttttagtttacttccgttggatggtgtggtcttcccctactccattgcccaagcaatcagaaaagacatgtttatctgcaatgcaggattttgttcatactgcttcctttatttaaggaaacatatataattcatttggtttgttccttctgttcctgagttctatgattatttcgtaagtatccatgtgggaactgaggacgcaaaatgagtaagatattggtccaaaaaaattaagtgtctaatcttccgtgggaaatttaaactttgatcttgctactatctaaatttgtcgttccaaggaacctttggttgagtattggtttagtctttttaggttaatgagacaagtatatgctttatcttagctttttgcggttgttgttttgttccttttgatcttttccacctttgctttcatgaggggttcggaattgtaaggaggaaaaagaaaaggagattatccactaagaataaaatggagtaggaagggataaagacatatgtatctttcaactagtccagtagaacctctgattcatcactgtcctcaacaatacataaatgacattgctttgggtgctcatatgatcacatgagttagaattacaaggaattttttgaacaatg

SEQ ID NO: 71181 - DNA, 603 bp, Zea Mays
cttaaatggatgagatatatgggagaggcgcatgaacaaccatgagtgttgaggagtgacgatgacctcattagaaccaacagagaccgaggaagaaagagccatttgatggatcttaggatctattgagtccaaaaacttagttaatctgagatgaattgattaaatagggaatggatctagacttgtaatcactgttaaacacataaacaaagacggatcaagacataccgtcttgcccttgattaagggcaaggttggagtggtttcacgttgtgggttcctccttacagtggtagaggagcatcttggcatggtggaggagggtcttggatgtcgtcgccgtctccattgccttacagaggaggtggctcgaatcctggacccattagggatccattatccatcgacaccattgggttaggagtcttcctgtcacaattagcacctggacgatgggaacccttgggaatgtaggattagggttagggcataaggattagcaatggcttaagtcatgtaggcccctaatccctttatatatggcgcatggtgaacctgggatgcaaccataaggttaggtgcaccccacctcgatcaagg

SEQ ID NO: 71182 - DNA, 933 bp, Zea Mays
acaagaaaaagctagtagaatattttatgttgaagatttacaaagacatggctactgtagagattactcgattcatggatgttgtgaaccaattgttccaagaatatttaagtattacaaatcaaggctcttgtgctcaaccaaaccttactgcaggtaaagataaagataaagatattccaattggtctaaatactgacattgatgagtttctatatgaagatgaagctgcaaccagtaggggtgaagtaagtgaattggatgtttacatgaaatagaaaccaattaggtgggttgatcctagtggtaaaggtctgcagtttgacatattatcatggtggaaggctaaccgagtgacatatcctgttttgtcacgccttgctcgtgatgtattggccattcaagtctctactgtagcctcggaatctgccttcaactctagtgggcgtattgttagtaaagttcgcagtcgtctagagcctcatattgttgaggcactagtttgtaccaaggactggtatattgcatctaatagaggtaaaattgatatgttattttctctactatagcctactaatactaattttcaattcaagttatgttagtgttactaattattaaatttgtgcacttttagattgcaagattaaggtaccatcaattattgatgatctcgttttagacaacaaggaatgcatctatggaaatgaggaggtatcttatatcgttttctaaatcttagttggtttgtacatatttattttctaaatccatttgatctccaattctccacaatttttgtaggctcaagctgaaggcctcgctaacgaggaactctatggtgatgacgatgaggacaacaacattgacgacatggagatctaaagcaatatgtgactaaggagaaaggtgttagtttctaaccatttgttt

SEQ ID NO: 71183 - DNA, 782 bp, Zea Mays
atctgggacctctgaacagatggttggaatgttagcctcatgaggctctgataaaatgtcttcaagaatgacctcttccagtgcctgatcaaaatctgatattgaaagtccctgaaggctgacgagtgccgacagggcttgggagggaatatcgctgcccccgtcgctgcctctatagtgatggttgttcttgcggatcagcggaatctcttcttcttcctcttcatcctcgtcaaacacgtcgccagcaacctatgcatcatcacaacctttggcattaacctcagaaatggcgtccaccaggacatcaccaaggatcggcacagaaggaccagcatcctgatccacgcacggcagtcgccgaagtcgcctctttttcttcttctcctcaataggtgcagccgggcggttcactcggcgtgaacgctttgggtgggcaccttcgggtttccggatctccacatcttcgccaaactcttgtccagtcatgatggccatcggcttggtacaggtagagttagacgattccccggccagcaggctaagcacaacgtccatctcagcatcatcggtgctagctggcatttcaaagtgaatttgcctcttagcctcgggaagactcagaagtggggcaatcaaggcctcaatatcctcgggggagggtcgcactctatggcccgggctaccatcatgagcaggagggttggagacaaatacagagaatagcctatctggaggtaggttccacgcagagtaagctaaaggagcaccagcatttgaga

SEQ ID NO: 71184 - DNA, 485 bp, Zea Mays
gatggggaaaatctacacgaacctcttcttctctttcccatgttgcttcatcttctccatggtgactacattgcactttgcacatctttatcaccttattccttgtaactcgagtcaatgtatcaagaatcttgataggatactccatgtaagtcaaatcaccctgaacactgagctcttccattggtaactgttcctcagggacatggagacacttcttaagttgagacacatgaaatacattatgcacatgagatagagtagcaggtagctcgagttggtatgccatctccccaactcgcctaaagatcatgaatggtccaataaagcgaggggacaatttgcccttaactttgaatctcctcattccacgaagtggtgacaccttgaggtacacataatctccttcctcaaattccagtggtctccttctattatcagcataactcttttgcctggtttgagctaccctcaaattctcccaa

SEQ ID NO: 71185 - DNA, 797 bp, Zea Mays
gccgtcatttttatataatgcgaaattggcgaatttacaagaaaaaggaaaatcatcaataatatacatatggaacagtaggcttccgttgaaccagcaataatgcaacatatggaatatcggcccagatcgcacatagcgggactccttgttgggtgcagccaccaagaagcaaccagcagtagatcgagtaggacaggaggaaacgcacaggccaagttgcgacgctagggggagggcaggtaggggagagcgtgggatagtggggggaatcagcgctacacgagcttcaagaaaaaaagatgaaatagaaagatacaatgcaagaggttcatttgagagctaactttagagtcggctttattatataagtgtgtttattgttcgctttagatgacatgataaggagttagagaaaacaatagaatctattattaaacttgctctcatggccatactgtatgtttgcggacatcctcccgctcccgccatggccatggaagaaccgggcaaagaagtgaagaacagtccatccacggaacctgcatgcatggtcgcctggcctggcccaccgtctatgtcgtccaaaggagctagggcctagggagcctcgaaatgccagacctcaagctcgccattatcatgcatggttgtggctgcagcacattagcacataaatgggcatggtccattggtccgaggtacccatcacgtacggctgcgacggcggaggtatcagctttcttttaaggcatccactttcgcggtgctcggtaatgggaggagcaccaggttct

SEQ ID NO: 71186 - DNA, 771 bp, Zea Mays
actatgtgatttttaaaccatattattccttggtcatcttatatgaagcaatttgctttgtcggcttctattttctcatgaatatgcttcatacccttgtcggttctttgagcatcaataattctttgtagaaggatttactcaagctttaactgtgtcaaatttccatgttgtatcatacccaggttcaacttttccatttcttgacatagagtggtgtcaggtgtccttactataagacaatgacaggaagctttgtgactcaatgcatctgccaccacattggcctttcctgggtgataatggatttctaagtcataatctttgattagctcgagcaatcttcgttgtctcatattcaactctgactgggtgaaaatatatttcaaacttttgtgatccgtatatacatggcatgtattccctagtagataatgacgccatatcttaagggaatgaaccaccgcagccaattctagatcatgagttggatagtgttcttcatggcagctcagctgtcttgaagcatatgctataactcgcccttcttgcatcaagacacattcgagtccactgcctgatgcgtcacaatacacatcaaagtgctttccaatatccggttgggccaaaactgaggtagtggttaacaatacctccagctgctcaaaggcttcattacactttgaggaccatccaaactttgtatcattcttcaataaacccgtaatgggtttaacaatcttggagaaatccggaatgaatctacggtaa

SEQ ID NO: 71187 - DNA, 631 bp, Zea Mays
aaatcacttatccttgcactgctcccttttcgctcatgtttttaacgcagcgctcttataaatacttgctcgaaatttgccagagcaactgcattcgaagctcatcatcgtgttcacaatcacacccgcttccacacgagtcactattcagggtgagaaattcgccgaattacagtggaaggataagaatcgtgattgccacggtgaagacaaagccatggcgtgatgctatgcttccttgcaaatttctctacaacccaaatctgaaaattcagacaccgcggttgaccatcgttttcttcttcgactgaaaaggagtgcgtagccatctgcccatcgtttagctgatctgagattttgataatggaaaagaatttttaatcaatatttgaccagtatatcatctaactgattttttttaatcgagcgcgcaacatactcactgttatttcagagcttgttttggtgtatgtataagatgtgtgccacatattgtcatatattttctctcacacttagttaaggttatacgtttaaatctttcgccgcctctttgcatttctaagtgaatattgtcacacttttacaagttatttacgagtgagaccaaagcagaagaaaatcttgccat

SEQ ID NO: 71188 - DNA, 813 bp, Zea Mays
ggtacatctactcaatagttttcgggggtggcggtgtcaactgctgttgagctgcatcctcctggggtacctgctgctcctgctgagcatgccttccacttctgcgcctgttctcagacatctgttgagagcacacacatatcagatatgactccatagtctttcaacatgagaaaagatatatggaaatcttcataacactgaacaattgatcatcttcactgactctcaacacagccaacacagcttctcagataaagaggaaagtgggaataaataggttgcccaactaaacaactgacttattaataactataccaagttgcaggggatgcccacaccttgatgacattcattacaaagatctgacttcattacaaattcatcatgacaagcatcaaaacatatgataagcaaactaattgtaactaagatttactaagactaagacactgaattaagcattattacagactctgactctgtcgatctatggctctaaatctatttgggtcctgcagtcaggggtgccacaatcaaagcgaccatggggcgacgagtggtaagggtgctgaatcccgacaggagcggaaaaccaccatcttgatagtggcgcgttgtgcgctcagcatgcaattctgcaacctctccccgaacctttcccaactcgtcaagggcgtggtccatctcggtgttgagcatggtgaccaggttgaccatgttgtttagcctgggattgccctcaccaacgggcgagacaatcacacctccaacactgcctattgaatgacgagggtagtacttcaagtcgag

SEQ ID NO: 71189 - DNA, 645 bp, Zea Mays
aaaaaagtaaaaaactgtttaactttatttttctttttgttcacagcaagcagccttttcacatgacagtacaaagcacaaaatattttggcagacagtataaccaaacacacttttagtgcgagagctattttagtcgaaggctcccacgtatatgaggtctaggattaaacgaccaaagccagccagcttaaacagtttgcaacacgcaacagaatatcagcgagctgatcgatgccaaagtgtcaaatggtggtgttattattggtagttcaaaactcagcaagcagtttgataaacaaaacaactcagcaatgtgacacgacactatatatctatgagagaacagaacctcaacatcaacgccgccgttggatagaataaaattacaaacctcaaccgccacatcagcatctatgtaagctagctagagtttgttatatacacagggaaggtgaggaggaggagggtcaggtgccagcagcagctcaaatccatccgactactagtataaatgaagaatctcaagtcttccctctcctctcctgtcctctcccccaccgcacccgctcttctctaatgtacacttcggtattcaaaatgctattacaccttagggatctcaattgtgcagcgataacacct

SEQ ID NO: 71190 - DNA, 338 bp, Zea Mays
gcgagaccttgcagtaattgcatctgtgcagcaataaattactccattgttgggttaggtggtggcggtggcaactgctgatcaatgtgttgatcttgattgtgtttggaacctgcgtgagtattcaccatctggttggttaggaagtgcatccttcttgataagtgaagaatagagaaagattttagggggactatcttttgaacacaagttgaaggattatttgttagatttaatgttcttatgaccttcattccataagatcattgcactcaaacaaaaatccaaatcaaacattatgcaaatatcactatcacatgtttattataataataata

SEQ ID NO: 71191 - DNA, 1438 bp, Zea Mays
tgcttaccttccactcatagtttctgaataactgaacaaattcttcttgtgtgctactcagatcaccgctaggattcaacagataatatgtattgaaaggatcgatgacaggaaaaggagaactgtgatctttgtaatcattattggttcgagataatgctaaaaagatgctacccattgacggcatgcgataaatttcttgattccttagtacaggcaggttctcccaaggaagcatctgcagttagtaattgaagcaggtgaggtcactggagatgtagtgagactatactatgctggatacaaggatgttactgacataacagtgctaaataaacagcacagtaaatcgagcgcaaagcaatttcctagcagcactaggtgctaatttgactgggatatttaaggtgccaatttgactgggatatttacagagcaaaatgtagatatccaaatggaccacctcacagcgtgtactgtttagttatctactgcatagcaccaaaggaaactgaaatggacaaagtgaggctactgacaaataatatataacagcattcatgatattcacctttaccagcaaaatatgcaatcaaataataattcatctagagttctagacttataatgcagatgaaaagaatcaagaacatgtaaaattattaaatcacatagaaaataactaacagtcaagctgttttgttgctcacctgaacattgacatcaagaactaaaataactggatctctatcagctggctgaggcaactcatatgatgcatccgttattatacgtttgagtgtctccatagatccatcatccatttggcaggaagagaaagctttaagtctatctttcccacagcatcctccccttccaaagtaacctttatacaaaatgagttggagaaaacattcttgtacttcatccactgacacagcaccaccaaggatagccttgatgagcattggattgacttcaaattcgaattctgtatccagaccagtgataatcattgatgaggcagtctcaatgtgttcatcagataattgatggcccaacagaaggcatttccagggtccaaaccaagaatcttcaatgtctctgtttgaaagaatgaaaatgatatcaggaaaacaaacattatcttgtgtccacaccaccaaatttcaactttgatatgcataggtaatcttacttcaatgtgttagcaaggtaattgttgagcttcattctatgggaccaccacctgacacgatctgcatttacatcatcaatagtaagggttgcgctggagagggacataaaattctcctcgagtatatttctaaaaactggggctacatagtcagtaattccatagccccaagggcattgccacttatctaaaactctcgttggattgcccaaatctttggtgcaggaatcttcaaattgc

SEQ ID NO: 71192 - DNA, 355 bp, Zea Mays
tagcctcttgacccttaagattgcgctctaaggtcgatgaggcacgggacgctgctcgagataaatccaacccggcatcaggcacatcagcgcaaacatccatcattccaccatctgccggctctaacaacagatcttctgggaccatgtcttcaagagtctgatcaaagtttgccagagacaattcttgcagaccaatgagggcagacaaagctggagaaggaacaccactactttccccgctagctatgtagcgccggctgttctttcgaattagagggacttcattctcctcttcctcatcttcatcaataatgcagacggtacaccaattgggatcagctgtggccagatt

SEQ ID NO: 71193 - DNA, 506 bp, Zea Mays
ctagtatagtttgttccccaagaaataaattggaggaaacctttcatatagaaaaatcgggtactatggggcttgccacaaagttgaaatacattaggcccaaatgtggatttaagccattaaaaaaattgggcccaggcctataaaagtggcatagtggacccagcatccaacatggcaacaattgacggtggatagtgatgtcaatgggtaaatacccgtcggatattattgtcccatattcatagtcccgacaaaaataaccccatcagctcaccaatattcattggtggatatgaatttacccccatactcatactcatacccatgtgcgtatggatcactcatcgagtcacctgtacccacaaagattagacatatttcatatgtcgtaaacatcattcaacatcaaatttaaataaaccatgtgccataattaagcatcaaaccatttgatttctaacattatagacacacgaggcttcaaaaatcaaactacatggcta

SEQ ID NO: 71194 - DNA, 584 bp, Zea Mays
cagggttgcgctgactgcgctgggtgatgctgcaatgtagagtagtaggggtagagctaggtctgggctggttagtgtcactagattagataaatattgttttaaggactcgaaggccgcaacttgctctaggccccaggtgaagtccttggctccgcatagcgttttcaagaaaggaaggcttcgctcagcagatcgtgagatgaatctgttcagtgcggttagtcttcctgtcagccattggatatctttggttgattgtggcggggccatgtccatgatagcctagattttggttgggtttgatttgatccctctatgcgatacaaggtaaccaagtatcttgccttgtcggactccaaatatgcacttcttctccgggttcaagcgaagtctagcctcatgcatgttagcgaatgtttctgcgaggtcagatagatggtcttctttgtttttgctcgcaacaactatgtcatcaacatacgtgaaaacattgtggcccatctaatcttcgagaattgttttggtgagccgagaaaatattgacccaacattcttgagtccttcgggcattcgcacgaaac

SEQ ID NO: 71195 - DNA, 522 bp, Zea Mays
tgccaaaaattagacatggtctggttgctgagtgtgcactagaccaaagttacagagagacaattttgtgcggaaagggcttgacacaccggactgggttcagtggtgcaccggaccgagtatgaagagagatttttttaacactaatgcagatggcgcactggaatgaagtccagtgtgcaccagatcaacagtatacccaacgatcagaagggtttggctaacagtcaaatgacatgggtgatgatgcggtaagatccggtggtgcaccagacagtttgatgggtgctgacaagctgacaacttttcaaaatggtcgttgaggttgcaggcacagttagaggtccaatgagcaccgaacctgcaatagtggttggtctggtgtgaccaggaagtgtagaagttaggcaatagctagttttggcattggggttatatataccacccctccccggctccaaagtgaaaggaaaatgacaaccattttctctgattgattttggtgtttgatgaccttcaaac

SEQ ID NO: 71196 - DNA, 834 bp, Zea Mays
aagacattgagactcagagtgctgtatagggtggactacgggttggttctcaaaaagcccagggtcttttatgtaagacggcccgggccgaaagggtaccgggagaccctgaccgcctgatccgaagtgaacgtgtccgattagatccagcgcatagttcaacccgcgattaattcctggtcgttcgatcagccaccaagcgctagatttcatcccactttacactaaccggtacgcgataagggcttttggatctagatccaacggcaccgattaaactagcctaaacaggttgcgcgtcacgatctacaccgtataatggccatccaatgacacaggcgcgccccacccttccacgatctagacacggcggcgcaaatgccgcagcggtgggacttcgccgccgagccgcacccagggcgcgtacacacccccattttcaaattggtccacagatacgcgaagggaaggtggtagtgaacatacgaaatggagttttaccggaattcgtgcacgtggaggttgccgaccttggcacttggtggacagaaggcggcgctagcttcacggcgagagattgccaccaaccctgaccttccgagtccaattagcagcctgcgcacgatccccgcaggatggggtcctgtgatgaggacatcctccactattacccgttggcaaagacgcaattggcccagttggcccaattgtagtcggacggtgaccgtgtgagcctcagaattaccccacctcgcttaacttgggtggaggaaaccactttaaaagggagagcctcccttcccccattggactagtcttttggggcgattgagc

SEQ ID NO: 71197 - DNA, 342 bp, Zea Mays
tcacttttgacctgactagactaggggcagttgggtcacatagaggagaacctaaatcctctttgtgaggaggaaggtctgaggaatcccaatgagctatcgacattggagtttcttccctctccttacatcttgtccaagggcatctagccatcgtatgcctatggcagagcctatcgtggccttctgtcgatgtgtctggtacttgttgtccttaagagagtcaggtggttgtacacagatgtcttcaatgtcattccactatactttcattcttcggtgcacacctagtcaggcacatgcaccgagtggggatagagccataaatgtggtagccctata

SEQ ID NO: 71198 - DNA, 838 bp, Zea Mays
gaaaaaaatacatgataagaaatctaccaagtagtaggtttgaattagtagtccattagaagacaatgttgtatcgattgagctgttagaaacaaacataaagaatggtgattgcctcaatgaactgaatagaaaagataatgaaagaagagttgatccacggggttgcatgtgtcgggcgccagcggcctctgcagtgttcgcccctcctacgcgtcgttaagatggctccccgtcaagaaggttcaggcttttctgatctcggcccggtggagaagatgcacacatagagatatacaagttcagtaacatccacctatttattgtgcacggtcaaaatagtgggacctcacttaaaacatgagaattgacacccacatatgcttatgttttcaacgctaggtacatcaatggcctgaatgtcagccagtccttaggtgagcaggctacatcagagaattagcaagtcatcaaatacatcgacttacctgtcccaacaattactatccattttgaaatcaacacgactctgtttaccttggtcggaaggttacatcaagaatctaataatctctcaagtacacattcacatctcccaccaaccatctactgtgacatagaggctagttaagagatataagcatgtaaaacactaccttttataacgatgatgtcaggaaaatgttctggtttcaccaaacaacaaagaacagaaaacactaaatacgagctaactggttgtattaatagttacatgtaaataatggagaaaaataatgcccactcctccttaaatttcatgcaaaaagggtccataagcatatgaaccaccaaaaac

SEQ ID NO: 71199 - DNA, 490 bp, Zea Mays
ccgagaggtacgaggcgatcaagaacctcagggagcagatgctgaccggccacgccttcctcttcctgtccaagggcgaggcagacgatgacagcgatcggcgtcgccgtggtttcgcttctcattttgaagaagatggggacctctggtgagccaaattgcttggtgttcaaccgttgacagtaaaagcaccaatcctttgttcgaaatttgtgcatagttttggttttggtgctccatttgcacagcacagttatagagttctttatctctgggatttggattcatactcagttttggtgttttggcactggcattttgcgtttgatgtcacaataaaaaaaattaccaatgcattatttctgtatacagaactataaacttacaattgtaaagttacacgcttattgtaaacttcattgtatctatggcagtcggtgaggacagcctaaagtcctcgtcgcatacttagagtgcgtttggttacggt

SEQ ID NO: 71200 - DNA, 737 bp, Zea Mays
cgggggcataaccctgccggagttatcatggagcgagagtacgagctccggagtagaggtccggcatccctgctgaacactgctcttgacaccaatgcttctgtttgtgttcgtctcctaggtacgcacctctctctcctcgctcatcttccttccctcccggggatggtcgccgccggtaggccatagctgcactcaaggtccccacacgctctcctgccaccaatggaggtccccatggtgaatcttgtatcacttacgcatcccgttcacgatctccccatggatgatgtccgccttgccaccttccgtggcttcccccacacgtgtcgccacctttcgtggcttcccccttacgcgccaccggcgtgacggcgacagcaatgatgtcgcgagtgccatggctgccctcctcggttgatatattggtgcacccctatctacgccgtcgtcgagaacaacgacatccatgatcaggtcatggacttcgcacctgatgtcaacgccatgattggtgtttgtcaactccaacatcctccacccctacggttgcatggtcctgctcgtcatgtacgtctaccagcccgcacacctattctagaaccaaacaaagaaacagagtccaacacataacaaagtcgttctattcttataatctagaataaagccactctgtccaattagactttagaaccaaacactaccttaatcatattagtgctcccatacaataaaac

SEQ ID NO: 71201 - DNA, 587 bp, Zea Mays
caagcctgccagagctgatgctaacttccgggacattgccgcgcgcgcggaccgacgaagaaaacgtttttgacggatatattcatctgatgatgacgcaacctggaatatgcaaatgcaagcttacatgcatgcatgggattcctgtaacgtatccacgtttaaacgtttcaacgtttcaagagactggactgacgactatttgatcgttccatgctaaagtgtccaagttcaaaactagtttggaattctctgaggtacagaaagcatgcatgcctgactgaagtttaaagtattcagttcggaacgtgaactgctatctctattatctggtgtgcgtaccttaggggccagaccttttcaaactcaaccggaccccccgacccgttcattgccagagatctacctgagaggaacacgacctgggcctcctcgctagtagaaaagagctcaaagactgcggcacgttcaacttttcactagcggtttccgttatcaaacgtcagtgaaagaaacaggtgggcccggctttaaaaaccgccagtgaactgtctgttataaatacccctcttcttcccccgacagtg

SEQ ID NO: 71202 - DNA, 1718 bp, Zea Mays
attccaaatccctggagttgattgaggctagtgccaatatcaccatggaggaaaaaacagtgaagtgtttgccccctgcttgaagccctggatgttctatttatagccccaagtaaggtctctaggggtgcctgggtttgtcgcgtacggtgaggagtcgaggtcgagcccctatagtcggtacgacctgtggtatgatccttgtactcgctgttgacttatgcccgatggagacgtctggttcctgtatttgaatcttttactacgcagagagccgaggccagggctaagggatcgctcaggtacccgagtggagctagcctgatggggaagctgaccatgcagtagtggttggagtagtgctgagtatggcaaagcgccttcggtagtatgatagctctgttgtttctggtgacgtcggacgttccttcattggttttatcaaggccgaggctgggctcgggcgagctaggcggagatcttcccgaggttgttgggagcaggtagcagaggacaggctcaggcgaggcggagtttgttccgaggctgaggtcggcttcgggtgaggcgtagtatcctcccgaggaacagctcacgctttgtcgtttgcgtgtcccattaggggttgacaggaggcgtgggggaacagtagctgatgttgcttagcatgcatcactatagtcggtgaaagttgatgggaccacagtcttgtcgctctagttcgtatgcgacgttgcatggggtaggtatgcgcattgaatgctcatgtcatctacggcctttggctgagacctggctcggggttgtctttcttgcccgagacgagctcgggcaaggcggagatggtagttccgtggagaggggatcttggtcgggacgaggattttcccgagtacatacctgttccgcaggctcggttgaggcgagtttatgagtgaccaccgagagggcctcaggcaaaacgtggtttaccatttcttgatctcagggattgtgtctgacggtggtattggggttaagcatgtattatgggcgtaatctaggtgatcctaattacaatacccgagagtagcccgaagtcctccaaggaattcgacacttgtgtggaggcttttttgttttcgtgtgggtatttcaagtggtgctacattcaacctgttcaccaactgcttgacatgtacttggtggagctcagttgttgagatagctatcatcatcacagttccatgggatcctagcgacctccacgacaatgacttggggacaagtcgtatttttaaggaggggacaatgtcatgtaccagaagcgatgatgggctcaaaggaggcattgggatgggctagcatgggcccaagtggtattgcaacaagctatgctcaaaaggtaacgacatgggaacgagaggggatggaacaatcagaacctaaactctctaccactggcggttgttcgtcttatcctcccctcttccctctcatgtacctccagtcttctagaaccttctattcctaccccaactatattcctttgtaattgctactgttgagttgaatcaatacactccattggtgtagttgctaacagaacccttgccttgctgtgagtgatgacgcggttgagcggaacccttgctgagaggtacggtgtggctgctgacttgctatgcgtcgagctcattgccacttctacgctcaggttcggtactcctgggctcatc

SEQ ID NO: 71203 - DNA, 523 bp, Zea Mays
gcaaaatttcattcgtcgtgatcttgagggtgtgatcaaattgattgagagcgaagttgaagcatttgacgaagttctaactggtaggggagatttttgtgcatgcgtagggtctcggtgggctgtatcactgcttgaaaaagctggatgtgaacatgctaagactgtaatttagccagacttctcagtttcagcgaatgacattaaagagccttcagccgaagctacaacctttggtggaaaattttattctgaagtatggatgaatagaggccgagagatagcaaacgaagctatcaggcaatgtgaagaagagtctcgtcttgccttaaaagaagcatgaaaagctgaagaggctgctgagcgttgaagacgtataggtacgcttgtcatattttagcttcgtatctgacaaaaacttatattttggtgcagctgaactctctcctcctctagagccatacaactctgacaccgatctagccctgaaggttactctcgatgaaatcagaatagcgaatac

SEQ ID NO: 71204 - DNA, 277 bp, Zea Mays
ggtttgaggaggttaaaattgtgttgtgaaactgttctgggatcattgccacctctggtatggtctgattcaagtcatggacaagtctctatccgagttatactatttgaaaaaaccctaattcgagtttgagttatgtgatgtgattctcaagtattgatcttttggagttcaaacttttcgaaccatataatcttctctcaatctcactacatacaaagtttaatctcaatcagaacaagtttgctcaagtggcaccgcatgcacgacactaccg

SEQ ID NO: 71205 - DNA, 1119 bp, Zea Mays
atcaccctgaacactgagctcttccattggtaattgttcctcagggacacggagacacttcttaagttgagacacatgaaatacattatgcacatcagatagattatcaggtagctcgagttgataggccatctctccaacttgcctaaaaactcagaatggtccaatatagcgaggggacaattttcccttgactttgaatctcctcattccacaaagtggtgacatcttgaggtacacatgatcaccttcctcaaattccagtggtcttcttctattatccgcgtagctctttttccaggtttgagctaccctcaaattctctcgaattatacaaacttgttcttctgcctcttgaataagttcaggtccaaagaactgtcttcctctagtctgatccaatgtagaggaatccttcatttcctgccatatagagtctcgaacagtgacatcttcatactggcctagtaactattattatatgagaactcagcacaaggtagactcttgtcccaactactaccatgctgaagggcacaagctctcaacatgtcctccaatacttgattagtcctttcagtttgtccatcagtctaacgatggcaggccgaactaaaattcaacttcgtaaccatattatcatgaaaacttatccaaaatctgggggtaaactgtgatcctttatccaaaatgatcttcttcggtacaccatgtagggacacaatccaagccatatatactctaccaatggagatcccttatgagtagtcttgagcaagatgaaatgagccactttggtcagtctatccacaatcacccatatagcatcatatcctttctgggtgcgaagcaatccagtaatgaagtccatatcaatctcttcttacttccattcgggtatcttcagtggatgcagtagtccagctggcctctggtgttccaccttcactctttgacacacatcgcacataaccacatgtgcagccacatctcttttcaatccataccgccagtacttctgcttcaaatcctgatacatcctgatactcccaggatggatagaataatccaagtcatgggcttcctttaaaatagtctcacgaaggctatcaatctcag

SEQ ID NO: 71206 - DNA, 437 bp, Zea Mays
tagacttctgtgaggtgatcatttttgttgttgtttttgtagacgacgaaacaccgcgttcgcctccaaagatctgcgctaatcgcctacggagtactttcacatgtaattcaatacccaggcaaagtgctaaaatcataattacaatatcagagaaaggtatataaacccaaacaccatattttgctcgtgcaggagaggagcgcgcagacaaaaggtcaggtgatagtaacaattatcgttgggatatatttctttatatatttcattttcgtaaagggtgttttactctttcgcgtgaaaggtgatactataccactctaaccttttttcgaatgataggccctatatataaatgaaaagactgtaatgtaaaggtgtgagcgctgctgcctggcatgtaatgcacagacagaggaggcatgtgttggggcgtg

SEQ ID NO: 71207 - DNA, 340 bp, Zea Mays
cgatgacatactcctcggtgcctaagatgagacccaactcagatgtcgagctactggacatcatcgactcagagatcaagtacgcccgaggactcaggactgcgatgaccacgatagggtaatggacagattcccctatctattgtgtgtgtatctattttcacaatattagagtaaaaaaacaatccttgtttcttgtgtagattcagtcacgctagagagtgtatttggtctgttagttattctgttgcattgctgtgaattagatcctccagaacgttgttgtcgtgtttctattttccttgggaagtaatgtcgtgtttttatttttggttaattc

SEQ ID NO: 71208 - DNA, 1078 bp, Zea Mays
cagatttccaaagctctactgaaaaagaaaaagaaaaagtttaaacagtgatgggccggtttcagcctaggacagcccaactacacaggaaacagggtcgcgtgcccgcgtgctctggcaactttgcacagaggccctcggtttatcagctaaatcgaagtaggtttgtttactgttcctctgtgtcacatgcaatttgcagagatgccctcgatcttctatctcttccccacgaataccactaaccacggcgcacacgcagatcatccctaacgtggtccgtaccggccatggccggcgatgactgctcgggataactaacggggaggcttcaccgatctaagatggcctcggaacacgcatcaatttgacacgaacgcactgagaacgccctgtccacatgcacggcgaaaaccgtgaccacgggcacgcgttcccgcttaatcagggccggattgagcaatcgagcgccactgggagcttcgcaagcatgcagaggcatgaaaacaatgcatggattggccagtgacttaccagagcaagccggccatggagcgcagagctttgcgttcgccagagacagagaaaggggaaaacggtgtcgcggtggctctggacgaaattgggagatgagatcggggctatagggccgtaagaggctgtgctttcaccgtgcgcaattgatttgggagaaggtggagagggcagtgcaaatttgacttcgatttagtcattgtgtttgcgatgatctcaactcgccgtgaacccaatggctatttatagccgtggcggtccggcgatcacctcgtggccacggacaacataactagcgcatgccgaccacgtcggtagaaggcacagtgagggagatcatgacatgagtgccaccacggcggaattaactggtctcggtggccgccggtgaggtctccggctggactcagggaacagtgccacgtatgcgttgtttaactccaactctatccgtttcttatcgcgcgtgaatccggacggcggcggcgcgaatcttcgcgcagggaggtcgccggcggtgagcacgcagcgctggcaatctgat

SEQ ID NO: 71209 - DNA, 308 bp, Zea Mays
gcttgggtactaactgctcatggatggatatgatctatgatcgatcggccagtaataacttggagcatgcccgtgggccgtgtcaagtctgtaatctgtatggattggattggatgtgatgtgatgttatttttcctttttcaatcctcgtggatgtgtgttgttgttacttattaaacgttgtacgggggcttttcaaattaatgtcttgtagtaacttcaatttgtggatggtaactctaatttgtggagatatggcatgtgccgtgtggctttcgtacgtgcagtgtgttcgtaggttcatctcg

SEQ ID NO: 71210 - DNA, 649 bp, Zea Mays
cctcatgctctccacttaaaggttgtctgcatgatccttacattatgaagatgattgaggttgtcactcaaatccgatatgagaagggtaccagacatctcccttacactctcttttggattgatcccaataatcccgctagcaggatgaagaaggctcctgccagttctcgtgagcagacctctgttggtccctcccgtcccttctccgctcatggctctcccactccacaaggtcgtggtcgtggtcgaggtcgtggtcacggtctgggggtcaggttggctcatgggatagcaacttttttctccatgtgcagggacatatctgttgatgtgcatgagctagcaaggcggcagtgggagacggatgacaatctccgtcgtcagtcaatctctattggacatccttttgctccccgctcgcatgatgtgcctcttcatgcaccccctcctgatatcaatgaatggcaccaacaggcatacagtgtaccattcatgtctgctgaggatgaagacattgaggaagaattttttgatgatagagatcagtttgtcccgccaccctaccaaggtgatctgggcccctcatcttcttatcctccccccaggatccatcaggtagcactcctcctcctgctaaccacatggag

SEQ ID NO: 71211 - DNA, 609 bp, Zea Mays
tgctcaccacctctgctatatcttcttgaggatgatccaaccaccagagtttgaggctactctctgagtttccagactagcgtttagagtataccgtcctcagcacctgattgacccgagtcatgatgatcccttaggtcaaagatataaggaagagatcagacagctagagcaggctactctaacaccttttagagataccgctgagacatcagatgactcctcaaatgatgatgatcctcaagctcatgattctgagggtggtggttcgagtgttgccccctcttctatacctccagtgactaatcctactatatcggcacttcttcagcacttagttcagtagtaggctcagttggctgttgagcaggctcgtcaagcagtgattcagcagtagcagtctgatcggatactctccttgtttgagaccattcaagctcactaggacgttttttagcggtagcttcttgtagatagggcagagaaccgggccttcatttagcatattcttcagcacaccgatgctcctttgaccctagtttagacgacacctctccaccacttaagtctgtaattgtgcctgctattcagtcgagtgctttgtaacag

SEQ ID NO: 71212 - DNA, 458 bp, Zea Mays
tttatttaaaagacactccgcgcaacagtcgcctaagggtgcagccggaataacgttaatcgaagtctctcattacaaagacactccgcacagagtcgcccacgggcgcagccggaccaacacaagcgtacaaatacggccaacatgccacatcaccatacaaattacaattacatacacacggcgagggcatcacatattacatcggctcaaccttcgggatgatacccatctccctgtaattaaacagcattatcctcaattcctcactctcaaaaagcttccgtagatccccctcgcctatgcccgccccaatcggcgaggacaacaattctcgtttaccaacctggtctactcgaagtcggccacgctccatacccatgcgacgacgcctgccgctccgcgaaaattcacccacactatgttttcccaccacccttcgccgcctacacccagta

SEQ ID NO: 71213 - DNA, 883 bp, Zea Mays
ttttgtaatatctaattttagcagcaagctggccttgttttgttgatgaagcagcctggaggtttgttggaccagcatgaaattgtcttgaataatctcccttttataaatgcgctcttattaggtgacaccatcacattgagcttgctggccaatctattagcaagaattttggtgaccaacttggcaaaactatgcaccaaaatgataggcctaaaacctttaatattatcaactccatcttttttggggatcaaggtgatataggcggtattaaggcacccaaaattggtaaatttcctaccccaaacaacagagatggcatccataatatcaggcttaataattgtcctgcaaaccttgtagaacgttcctgtgaatccatcagggtctggagccttatctgaaggaaggcatttgatggcatcccatacttcttgttttgaaaagggggcttccagatcggccagatcataactaggtattccaagagcctccaactcaatcgcctgttccctatccatactgttccccaacagatcggtgtagaattggtccacacaggcaggtttgtcctcatgactagttaggatttgttcttcatcaaccagccttgccacaaagttttttctcttaaggtgatgggcatgaaggtggaatagctttgtattagcatccccatatttgagccatgaaatccttgctttcagccttgctatagttcgcttgaaagaggataataataatgcctgtttcttgagtctgaatttgagccagagttcaccagggctgagcactctaccatcctaggctatttccagcatatgcaagatttctttggcaagagcatgttgggatgtaacatgcccaacctgcttttcgc

SEQ ID NO: 71214 - DNA, 559 bp, Zea Mays
aactgcagcatgttggttgcaggtggtcaggttgaagcaaggcttgggagattggagaaacttgtctaggcttgtgctagaaaagtttggtgtcgaagagtacccgagggccatgagaaggttgatgagtattaggcagaaaggaggagttgtagaatatgggaaggaatttgaggaattgggatatgccacaacagttcacaaccatgtttgtccttctatgttactcagtttgtccgagggctgaagggtgacattcagtatgcagttatgtctcagctacctgctactattgacagggcccagttattggctcaagttcagcagtacatcatcgacaaaggtggtatgaagtttgtcaagcaacccaatgtaaatcggttgggggaggaaacagagcagaaggaaaaggaatggagataggaggatggagtaaggagaggcagttgaaggaatataggagagttaatggtctgtgtttcacttgtggagaaaaagtatgagcctggtcatcagataaagtatcaaaagggaaacacaacctagttacacgttttga

SEQ ID NO: 71215 - DNA, 669 bp, Zea Mays
cacacgcagaggtttatacaggttcgagccgctagaatgcgtaacaccctaatttctgtcggggctgagtatttaagtatcactggtgtataaaagttgcagacaagctgtggcggtggagagtgagttctcctgtcgatctagtggtggcgtggttactatgagggggctgatgagctatgaggtggtgacgagctgagatgtgttgtgagcccagatgagagatgtgttcgtaggggtacccctcggccttatatagacaaccagagagttatccctttccaagttgtgatctttaacacacctggtgttaagcatactcatacatttcatacgcattatgaaagcattatcatgagcatcatcaatcattcactacttacatcagaatcttaaagtgtcactatttgctgtgaagtgaattcatgtttgaactaataggaggcctatgttctatgacaataggttatcattgagtgctcgtgtgtataagtaaacccacttagagaatttaggttgattatggataatctttcaactcttgatttcatgtagtgataagtttcttaaactatatgtaattgtgtggcttagtgaatgttgtgcttaatgagtgaaatgttactaagaaccaaaacctaaggagtaagtatttgactactaaaacta

SEQ ID NO: 71216 - DNA, 634 bp, Zea Mays
gggactatgtattctctgccttcgaaggtgtttcattttaccttcatgctcacttttgcaaagccgaaggtatctttgtaacagttcataatgaaaggagatgaaattgaattaattatctaagatgatttgctatgttatttcattacgattcattgtattattctttcatactcaaaatgctctaagatttcattcatattttgcctactccctttggtcaaccccttcagaaaatggaatttactaaagggagaaagaaaaattaacccatttgtgttaccttgttcttggtttctctcgtgagtcaaaagcaagtgaccaacaattaggtatcaaaataatcgaactagtgattatgtttcttattaagcccttagatctaacacggaaaagtaggaaggcatctctcgctgaaaagaggtttacgtctaaattttaggggccttgccggcagggccaatcctataggaggggcaggtgggcaggtgccctagtcccccaaaggtatggggtcctagcctccaagtatcaagtatgcaccgagtatattgtataccatatatctgatgttgagatagaaatcaacgtagatctaagaaacaaatcgacgccctcatgccctcactagttg

SEQ ID NO: 71217 - DNA, 2396 bp, Zea Mays
ccggaaagagaccaaaaaaacagaaggcaccttacagtggccaaaaacaaaggaaccagaaaggatccatgaaaggaaacaaaaaataaactgcccactaaatccccagaattggggctattagaagagccaatcttttgactccagctagcttccagaagtccatctcttcttcagctctagtaatagcttcttccaagtcagggttacgatcaaacacacaaccgtttctatggttccaaagaatccagagaccaagggtgactaaagagttcaacccctttttggtgactccttgcagctggtcactgattcttttccaccacagcatggtattcccttctacttgaggagcaaaaccctgaaggttgacctaaccaagcaaccaaaaccagaaattcctcgcgaagacacagccaactagtaaatgatctatggtttcagattcctgatcacaaagagggcatttatcaggatgatttagccctcttctttgcagcctgtctgttgtccaacatctccccaaggcagctaaccagagaaaaaattgcatttaggaggtgaccaggactgccagattctctcccaatgctcagactggattgatcaaataaaaagaccttcataagctgctttggccgagtactttccgtctgaagcaacactgaatatgtgtttgtcattccccttcgagcaaatctatctgttgtccaacatttattatgggatgctagccagatgaaaattttgcatctcttaggtgcccatgtctcccaaattctctcgaccgattcaaaatcaatggaaccagtgatgaagcgatcatatgctgacttggaagaatactcacctgtggctgttggcagccagcagagttgatctgaaactccaggttgcaactgaacttcctgagttaaatcccatatcaagaagcccataagaacatcagccgacagactgccagttaagtccgatacccacctattatttagcaatcaatgtgtgatcttctgatttttcctggggatgcagctcaggagtgctggagcaagttcacccgctgatttcccatgtatccatcgatcatcccggagcaaagtattttggctattgcccacaatagagcagacagagactgagaatagggttgctgcatttggatgtacatgtatgtcaaattctgaccaaggccgatctggttggggttttttaagccataacaacctcatattcaaagaccagcccaaaacctccaaattaaggattctcaggctcacatttttataggtttacataccttggcccatcctacattacaatggcctcctctaacatttgtcctttccttccataaaaccccctgcgaattttgtctattgctttgattacccgtttggggcaatggagggcaatcaaatgataaattggggttgttgtgaggaccgacttaaccaaggtagctcttcctgcaggattaataatagcaaccttcaatccaggtagtttgtcagcaattttatcaataagctcagtgaaggaggacctaggtaatttcttaactgacagaggcaaacccaaatacttacaggacaaagtcataaccttgcaaggaaaagtgttccttgtctccacaagctatggatcatcacattgaacaggagtcatactgcacttgttcaagtttgttaacaatcctgaagtttccccaaaaattattaggatttctttcaccacagacacttcctcacctcttggctgtaggaatagaactacatcatctgcataccgggataccctttgcccatttccatttctcaatagttgctgcagcagtcccatttcactagcctgtgtgagtttagaaaacttgggccccctccaaatgtcacttcttcctttggctcacggctctaaataagtgctggacaactaataggttggctatgagagggctggaccacccagaggtgtcctttgcatgatcaggattctgaactcacataaaatattgtgccaaaattgtcctttatgtgatcaggaaaatgttcctttatgttagattgaaaagcttgtaaccggtccataggcctctgctatgtaaatgtaatccaggagataactctactatagataactagcctaaaatatagcagattctgttatgcagagttaacccttaggtttttatacgcggcagtcatctgcctatataaatcgatcattgcggactgccttcttagcagagacgcttacccaatcccggttgctattctaacaaaaaggtgttgaattgtttcttgctcttgatcacaaagagagcaagcttcaggatgggggaggtcacacctttctattagactcctgtttagggttaggctagggtccccttgtattta

SEQ ID NO: 71218 - DNA, 672 bp, Zea Mays
gggaggtccactgttaccgaagatgatatgcctaagttgatgaagttaggctatttcagtgaagcaaaaaagaagctgattcgctttggcggagaggaaattacgccgatgttagaaaaggatgaggtggtagtctttaaaagcttctttaaagcaggattaagatttcctttgaatgagatgattgcggatgttttggagaagtttgggatttatcttcatcagctaactcctaacgccatcgttatgcttagcgtctacatctgggctctctaaagccaggggcagaaccgcttgccgaaggcttctgccgggcacatgagcttcattatcagacaaaagctagagaagatgggctgcacgagaacttcggctgctacaattttgcttatcgcaaagatgcgaagtctccagttatcagctatcgtaccaaatggccagctggctggaagactgaatggttttatgtcaaagttgatgagaaaaaggagaagctggttcaaagcccattagaattaatcttcggagagactaggcctcggtgcgacatgaaaccaaagtgtccatgccaagtttcactgggcgaatttcgagttattgcggagcacattggtactagggatctggtgcaagaattcttagcttttagagtattcccaactttgaaagaat

SEQ ID NO: 71219 - DNA, 681 bp, Zea Mays
ctgatgggcagacagagaggactaaccaagtgctggaagatatgttaagagcttgtgcccttaagcatggtggtagttgggataagagtctaccgtatgcggagttctcttataataatagctatcaggccagtttgaagatgtcgccgtttgaggctctgtatggcagaaagtgcaggacaccactgtattgggatcaaactggagagagacagttctttgggcctgaacttatacaagaggcagaagaacaagttcgaatgataagagaaaatttgagaattgcacagtccaggcagaaaagctatgctgatacccggagaagactgcttgagtttaaagagggagattatgtctatttgaaggtgtcaccactccggggtatgagaagattcaaagtcaaaggaaagttgtcccctcgctttattggacccttcttaatcttaaagcgagtgggagaggtagcatatcaattggagttaccggatcatcttgcggatgttcatgatgtatttcatgtatctcagctgaagaaatgtctcagggtgcctgaagaacaattaccaatggaagaccttaatgttcaagatgacctgacttatgctgagtaccccatcaagattcttgatacattgactcgagtaacaagaaataaggttataaagatgtgcaaagttcaat

SEQ ID NO: 71220 - DNA, 400 bp, Zea Mays
tacacttctatacttacctttggtataagttatttttttggagtgtaggctatatttagatagggactctaattccattcctacctactcgaagtgatattcttttcgctacgatctagtcttcgagtagagtaagatttctaagttttcgagttagttcgcctatttaccccctctaggcgacatccagatcctattcccgggaaaagggaactttcaattggttttggagctaggctttccatcgtgggcgtatccatttggaaatgacgatgtcacgggaggaggtaacactggaacttcttaattttgatggctctaaatttacatcatggtcttttcatttgcaaaatgcttttaggaatttaggttctaaagtagatcaaatattcaatgttag

SEQ ID NO: 71221 - DNA, 465 bp, Zea Mays
gccgggggtaagtaaatatcacgccgtggatacactccagccactattttactccggccatcgtacccgagcagatcatggttgcttcggatgggtttgccggagatagccacttcacggccttgcgccacgtgccttggcacgttaaccacaccgccgtgactcacgttagcccatccggtggttgccgggaagcttgccacggtaattgccaccaatcgcgcgtgccagtgaacccctctttctccgcccgccgcgcgacttcctcaaattcactggccaccgctcaagcctgctataaattgcgcatacccatggctccgttaagtagtcaagcccttcatccagcaacccatgcctcgaatcatcctctagagttccccaatttgggatttcccccaaatcaacctagaacaccgagcggtgtgacctcgccgtggccaacgagtttcaggtccgttcatg

SEQ ID NO: 71222 - DNA, 649 bp, Zea Mays
caggacaagggcgaggaagtctaccttgagcagcagggaggcaagaaaaagagaaggttggacagagccactcgtgcaacaattgcccccgcagcagtagatcaggcagagcagggtggtcggttgaggatcgcctttgatcagatagccttctgagttcgttgactcccgtctcgggcttgctccactccttctcggttcgacccttccaacccattcaccactccaccttcttccactacgccagcccctgccactcttgagccttccaccacacctattgtgtccattgcctccaccacaccagcttccactgtttccgcttccgttccacctattcctccacctcgcttccgggagcgtgatgagtcagaggtgcgtcctcttgacgcggacccacgcctgctcgaccttcagagagccacaactgccagggtgcatcggttccgacacgtaccagtggtttcttggttgcctgctcaatgggatccgacaactacacctctgttcagcaccaggacctaggagtccttctaccgagcacagttgtcaaaccagatagctctgagggctcagcggtgtctggatctttctgcctaccgagcaaacttgttttttcttcaatttcacattgttcattacaaactcc

SEQ ID NO: 71223 - DNA, 672 bp, Zea Mays
gattggacttaggatgtgaggatgcaacatcttaaaagaagacatgaaaagactttaagaagacgtacaaatattcagcacaagtacaagacacaagaccaaaaagcccaagtgaaaagactgaaaaaacccaagactgggctaccaactagcgcaccggaccggcctggtggtgcaccggaccgtgtgcgcaaagagctctgcaaatagctctcgggcagctaacgcataggaccgtcctagtggtgcggtggaccgtggtccaacgactagtctccaacggtcgtctaacctaacggcaccggaccgtgcaggtggcacattgcaccgtttacagtgctgtcagagcggtcctaatatctctacaacggttgtctgacctggcggcggtgaccctccaccacaacaggatgcaccaccacctctacaaggtacatgatcttgcattgcccttaatcaaggccaagacattattcctaatatctctctatttaagtgttcttagttctaagatcgattatattgattcctctatttaaataagtgcttggatgatctaagtttgacatataaagatcctataaacctatcaaacatatcttacctgcatcccacattcatttgcaatggtcctgtaggtttgtcagtgctagaaaaaacatacaccagatg

SEQ ID NO: 71224 - DNA, 566 bp, Zea Mays
tgtgcatctattcttccctcacaactgctgctctccctaaatttcgcaatcaaaatgaattcttggtggaaatcggaagggggagaaagatgggagaaaaagaccgcatcttttttggctgcttgctctgcttcggatgctattgctcatgctcgtggggagggagcagaggacgagcaataatagtggcatgattgagaaagaactgctaatggctgatgctgatggcgttcccctctccccttctcccgcgctccctcctctcctcactcgagcacctactttttcattccttgtgctgatgtttctcgtgtgtcgctctccttttctctacgccaactatggatggattcgatgattacctcacccgagtaaaagtttggtggtgacctagacaaaaggcggcatcttgctcttgcatgcaacagattctcgccatccttctgtttcttctctggtaaagtggtaatggattaccatccctctgtatgcccaggcggccgctagacatcgactacttgcacagctcgagcagcagcaagaggacggggaaggagaaggtggcc

SEQ ID NO: 71225 - DNA, 639 bp, Zea Mays
cacggctgcaccactgatcgacaggagcaaggggcatagttgtcattagtgctagcttaagtacccaataatttctgcggcgatgtcttgtaaagactttgcacccttgcttggagcctttggacgcttgggggcccgtatgtaaattgttttggtacgccatgcagcatgctgatcgatgcggcccagcaagtcgagagtgcgtcggtgattagtactacgtcatcagtgctgcgctggctttatttgtctgactaaaataagtgggcaaataaagactattgggggcatgcatgcatatatgcgtactacactggagtctggacaggcacatgcatgcatgccactgatcagaacttagtagtatatcgtcatcggtgcagcagctagctaacttgtggtcagatctttgtttcatgtactataatttaagaacattttcgtcctgattaattagttccatcgtgtgcaaatagccgtattggattttctctccgttcaaccctccgccgtcgtatctgcggcccaccaacctccatcgtcgtgctaggctaggctaataatggtctcagtagttggccgcgtcactattgccgtctctcgttgggctgtcattccataacccatgtagactcaaag

SEQ ID NO: 71226 - DNA, 481 bp, Zea Mays
acaaagtgaaacgcaaggctgatggcaccatagacagatacaaagctcggctggttgctaagggttttaaacaacgctatggcattgattatgaagacacgttcagcccagttgtgaaagctgctactatacggctgatcttgtctgttgcagtgtcaagaaattggtcccttcggcaacttgatgtccagaatgcttttctccatgggtatctagaagaagaagtatacatgcaacaacctcctggctatgaagacatgagtcacctaaactatgtttgcaagttggacaaagctctctatgggctgaagcaagcaccgagggcttggtatgccagattgtgcaagagactccaagaattgggatttcttccttccaaagctgacacctctttgttctattatagccggggtgagtacaccatttatatactggtatatgtcgacgatattatagttgctagctcctctcccaaggctac

SEQ ID NO: 71227 - DNA, 530 bp, Zea Mays
gtcagggaaaagatccttggacccctaaggttcaccagccagagagagcattggggaaaggtccccggactaccggatccaccggtcagcaggagggtaatgaagcatctaccctagaagcacttgtccctggataaatctcgaggcaccgaacccggggtcaggcgaggcggagctacaaaagggggcagacgaacctaagggaagccacttgagtgaattcctcgcctggctcgagactggcccgccataaatgacctaccactttaactacgcctggcttcgagccatagtaggagagatggtctgcctctcaatcatgacctacgagccccttagcctgcggcgcactcatgatctattgaggctaggcctaagcgtgtagaccatctataggacctgcaacacgacgagccacaccacgatccaggctacggaggccaggggtcagcgtggcatagaggcaataatgatggcgccagggctccacgccacccatgccatctgtcataatgagcacgagtagagac

SEQ ID NO: 71228 - DNA, 1027 bp, Zea Mays
ccgaaatcaactcctaataaccatttcccctcgatcaattgcacgatctgagctcttaatcacactgtccacggtgacagcgcgaacaacggatctagcttaattgaacgggtcgaggagcatcaggagaacataagggcactgaaatgggagagctgagagcataaacggacctggaacgagctagccacggcgaggtcactatgcgcggtgtttcggaccgatttgggggaaatcccaaattggggctctctggtgaacaatttgggacacgagtgggtgcgccgagtgcttgaataccttgtggagctgagggtacgttcaatttataggaccccctagcggtggcccatgaatttgagatgtcgcggtggcggtcgaagagaaggggggcattggcgcaagcaattggtggctttcaccgtggcgaactcaccggcgatcactagatatgcgtaacccgagctatggcgacgtggtaagacaccgaagcacgtggcacatgatctttgagcggctaacgtcggcgatgatgattccgaccagtcgcggttcaagtgggtacggcggcacgacggtgagcaagtccgagctaatccgagcgccaatatttttacccttcttcgttatccatctgtgctgggcatgaatcaccacggtgggcgcgaatccgagcacacggtcaccggcggtgaggcatctgaacctagcattctgatccggacactgtaccatcacactgcctattcagtcagcctaccagagcaacttgcagggagatttgttcccaaattcatgtagcgactcgatctgttctctgtatcaaagttgtagccctatgatccagctacaatcgactatagcaactatcctcaatcgagcaatgaatcctactctaatttgacccaaaagtttggccaatgtcattggcgacctaaattcagtcatcagagtgactgacagcccaactttgagcttatttttctccaaactttgtatgtgatcaaagcttagttacttaagcaaa

SEQ ID NO: 71229 - DNA, 557 bp, Zea Mays
agatgatggattacctcatttctcaaaccaaacacgctataagtacattgctaactatttgatagcacccacagatttacctatcctcaacttacaacctaaagtaatttcttcataatgataaaagcaaagatctgaagaaaatggaggtgagcgaaagagttgtatgaaaccccatacatatccccgggccaaatttaacatgacaaaagtacaaatatgcaatacaaaacatagctcgagtgttgctcactttgaccggctggccgcacacgcgcccgagacctaaaataattgtggctaaagaatttgtgtggctaaagaatttgtattattggaaaccctaaccctagaatagggttgggcagtatattaatagaccagattaactgggccaggctcattacaagggacgagtatctaacacccccgcagtcgctactctatcctgtacagatgttgagactgaattggaagtctagaaatacactcgacggtaaccccttggtgaagatgtcgacgaactatagtgtggttgggacactgagaacccaaac

SEQ ID NO: 71230 - DNA, 473 bp, Zea Mays
gattatatagacttgttcttctgcctcttgaacaagttcatgtccaaagaattatcttcctctagtcttatcccaatatagaggagtcctgcacttcctgccatatagagcctcgaacggtgacatcttcagactggcctggtaattgttagcatatgagaactcagcataaggtagactcttgtcccactactaccatgctgaagggcataagctctcaacatgtcttccaatacttgattagtcctttcagtctgaggtaggccgaactaaaattcaacttcgtatccatattctcatgaaaacttttccaaaatctggaggtaaactatgatcctctatccaaaacgatcttctttggtactccatgtaaacacacaatccaagtcatgtataactctgctagctgagaacctttataagtagtctttacaggaatgaagtgagccactttggtcagtttttccaccata

SEQ ID NO: 71231 - DNA, 856 bp, Zea Mays
aaagctctcagctgcagtccaactgaatgcttgtcagatcttcatcgagcgtcattgccattccatgacccggccggcacaagcactcgattgcatcacacactgcctgcaagcattcattcattcccccagtcgctaatccaatgcaagatctctccagccctgcactgcagccagccagctttcgtgtcccgtcgtcgcgcgcgctgcctgccgttctggagcaacaggacacgggcatgaatgcgacgacgcgctttcccgccaattattacggcctcgatatgatgtgtaccgtaccccccgcctgtttccgttcccagaaaccttcttccctccctgctgccctgtgctgtgtgtgcctgcctgcctgggcgggcgatggtgatgcaacagctgatgatcgaagaatgctgttttgtaggagctcctgatgagcccttacggtcgatgcccaacgacctttttttgaagacgtcgaaagtcgaacggatgatgcgcgctgcgagtctttctttattcgtggagaaatctggctgaggaacacgtggcagttcttagcctttcaatagtttagttgctgctttcctactatacatcgcttgttgtcacagagcaagtagtagtcgtgttgaacccatttgacgacgtacttttggtgagtaacatgcatggtgattatttatttaacgatgaagttaactattccacaatctaaatcacctcaggttgaaatttagagtttttttgacacctcatatatgcatgcttcgatttgggtatagaacagtataccggccggccgcctagctatagcgaacttcatgcatgaaacctatagtgataactaaccgtc

SEQ ID NO: 71232 - DNA, 292 bp, Zea Mays
tttttgtgaagacttcgaatttacgcacttgttgcgctagtccggctgcacccttgggcgacttttgcacggatagtctttttgagaagacttcgaatttacgcacttgttgtgctagtccggctgcacccttaggcgacttctgcacggatagtctttttgagaagacttcgaatttacgcacttgttgtgctagtccggctgcacccttaggtgacttttgcacggactgtcgcacgcgagggtggccatcgctgcccctcgcggtgacttttgtgtcggtcgaatgtcg

SEQ ID NO: 71233 - DNA, 579 bp, Zea Mays
ggcatatggggcccacaggtcggtcaccacccacactcccatgccacgactgcaaatgatgataggagagggccacactttagcccctcaacaacctcgctgcaggttagcctcgcccatgctgcccttaaccctatcactgctggtgggccctgacagacaacttcatattctacccgagaccacaataaactcgaccgaggatctcaggcccgacccggtcgctgccacctcttcaaccaaatctagctctgttaggacttctgctgaggagtatataatccgaccctagggaaccctcatggacataggagcagtaaggagaaaagttgtagccatcgagcgccatcatcggtcaagtagaagagacgttaggagtcgctactgttgtcactcatgtacatagttgtctagccttcatcgagaagccgagcgaattcccctagtcgtatagagcgtgtgtgtgtcctagctgagcaaggtagaacaccggagggatgggaattcatcgacggagcgtgagtactgtcgtcgagccgccattcctcttggaaagtgctgctggtacctctaatccgt

SEQ ID NO: 71234 - DNA, 670 bp, Zea Mays
tactagattggttagctctaaccctctgatctagaagttttagtattcaagcttcgcttgaacactattataatatgtcatcctacccacatagatatggttggtagcccctcttactaacagcaagagtgcggactatgtatcctgactctatcgtccggtagacccgtagatggtagctggcttacgtagatgtttcatctatctacccctaggaacccttagaacctcataatatcgctcgaagcaagttcgttcttgtgtttgattatcaataggttaaccgtgaataatccttggatagcttggttcaaactcctcgttgtcctctctgacaactttgcctagctaccgaccatagggtccatatttgtttcttcctcatacacctagctttcctatcattggattgtgtttaccctagtctaaatactagtgtgtgtatttatcatgtttacaattcaatttcaagtttgagttggttagtttatctctagcatgttgcttccctatggaaaatacagtacctagaatactcccggtgaagggctacatcggtctttcatacgcttgtggattaaaatccaattggcataagaatcgccaacagctggccacaacatggcctctgggctttgtcctcagcctatgtgtcctacttaaggcccac

SEQ ID NO: 71235 - DNA, 497 bp, Zea Mays
gacacatatgacagagagttcttccaagaagatgggctagaagggcaatttgagatagaattaaccgaagctatcggaatggaagtagatattgaaatggttgttgatgaggaggaggatgaggtgcaaaatgagaatgacctagaaatacttgaaggcaatgacattaatgatgaacttgtgccttcagatggtgttgaccatgaaatggttgatagtgatgatgagacttatgatccggctaaccccgacacaaatgaaggttatttttaatcgatgtaatgctattttttatttcgctaaatagatctttttttatatgtgcttatttgcttactcttaattgcaggttgttggacaaagatcggcgttgggatgaggagaagagcacccgtaggacggcggaggaggcacaacaggacgatgatgtccagcagcaggctgcagtcgatgcgacgcaggaggacaacgacgacgatgctcagcaggacaactaa

SEQ ID NO: 71236 - DNA, 443 bp, Zea Mays
cagcggaagaggtgccttcaccaaattcaggcagtatggctgtttcaatatatcgtggccggtgggtcaaaacctttcttttcttgcccttcggcacagcagtgatggccgaagtggcagttttcctcttttttccttgccttcgcgaggggtagcagtaatcagggtatatgaaaccaattgcatcgaaaaccttgttcaatcttttcttgccccgacccccaaaggttgaggataaagcgtcatcttcggctctggtatatgctccaagtaactcgtcgctagtagcttcaatacattttagctagtcggcatttggttcgtcaaaccggtctttgtatctgaaggtatatttcaaacgaattaatccaccttcactggacccggcagcggtctccttcggcatctcccagttatccacaagtggccataccctgtaggct

SEQ ID NO: 71237 - DNA, 291 bp, Zea Mays
gtagccgatgcagaggtcactgctagccctcgtagtcgcgccgaggtttttcagtggtggaggttgggcttctggggccctgactatttcgccttcatcgtcgaaggagaagtcgaggctcccgaatggatcactgcttcgggaacgtgattggtgtcgcggttggccatccggagcttgaagagcttcatcgcaaaacgagtaagacccctacctagcacactaattgtcagtgtgtcgaacctcactttgacaagtaaatttattatgctcgttctgggctctagacgg

SEQ ID NO: 71238 - DNA, 702 bp, Zea Mays
tcatagtaacagaggtcactcggccgggatcatatcgtctcactcaaatggacgacacagaaattgggaattcctggaatatagaacacctcaggaagttttatccttagctatatttcaaaagctatcaggacaacgatgtactctgtaaaacgggagatatgtcatcaataaagaaggcttcaaagatgctcaatttgttcatgattgactagcattcttacttaactcggggtgaccactatgccctgctaacggagcaatcggcttaagtcggcaaagacttaagacagtgcaacatgctcacgcttacttaactcggggtgaccactatgccctgccaacggagcaatcggcttaagtcggcaaagacttaagacggtgcaacatgctcacgcttacttaactcggggtgaccactatggcctgccaacggagcaatcggcttaagtcggcaaagacttaagacggtgcaacatgctcacgcttacttaactcggggtgaccactatgccctgctaacggagcaatcggcttaagtcggcaaagacttaagacggtgcaacatgctcacgcttacttaactcggggtgaccactatgccctgctaacggagcaatcggcttaagtcggcaaagacttaagacggtgcaacatgctcacgcttacttaactcggggtgaccactatgccctgctaaca

SEQ ID NO: 71239 - DNA, 357 bp, Zea Mays
aacaaattcaatcacctgtcgcagtatgccatcgaccaggtgaatacggatttaaagaagaagaactgttttatgcggggactgaatgatcggctacaaaggaaaatggccacatgtatagatctcacgtatggaaaggctgtcagaacagccttatctgtggaagccaaatacacaaactctgggaagaacaagggatttggtggtgagaggcctaatcagggccaggcgaagaaaccacggtttgtgattcgaccttcaaaccaaaatcgcacttttctcgtccaccttcatttcccttcaaacagcctatcattatccgccccaacaatacccccactaccccaaaacagccgg

SEQ ID NO: 71240 - DNA, 492 bp, Zea Mays
caagaatcttggtaggatactccgtgtaagtcaaatcaccctgaacactgagctcttccattggtaactgttcctcagggacacggagacacttcttaagttgagacacatgaaatacattatgtacatcagatagattatctggtagctcgagttgataggccatctctccaactcgcctaaaaactctgaatggtccaacaaggtgagggaacaattttacccttaactttaaatctactcattccatgaagtggtgacaccatggggtacacataatcactttcctcaaatttcagtggtcttcttctattatcagcgtagctcttttgcctggtttgagctaccctcaaattctctcgaattatacaaatttgttcttctgcctcttgaataagttcaggtccaaagaactgtcttcctctagtctggtccaaaaatagaggagtcctgcatttcctgtcatacagagtctcgaacggtgacatcttc

SEQ ID NO: 71241 - DNA, 797 bp, Zea Mays
gcaacgtggccgagccaccatcgctatggtgtcgtcgtccttctcggttgcgccatgtcgtgaccgtttcaccatgtatctataaccgtggcaatcgaggagttactatcccggagccattgcaccgacgggcgccacagtgagttaccagtgaaaaatcacaacgtcgccccaaccatgttcatccaaaattggatcacactgtggttgaatcctttaaattgagtgccacgctagctccgcctatccattatgaacctagtccaacacttgcttctcccttccatcgactatagcctgagaattctggatttccctataatcgaccagagcaccaccgtgatacacctcgccgtggccaaagtgatccaggttggttcatacctctctagtctgtgttctagtgtccttagggtctcttgttgctcgccgacctgaccgattgaactctaccatagtaaactatccagaacaccggcttgtcgtcgtggaacgcctcgtggactacctcaacatgggtagccaactcggtctttcctccggttgtctttggcgccattcctgagtctagacattcttgtgatgctcaccctatccccaatttgaactctaccacacccaaaccctggaaccaagcttagtcatgctcggtgtccgccatgaacgtgagtagccaagaccatggaccaaggtggctcaaatatccttggagtaggggtcggttaggctcaaaaatagggcttaggtgctcgctacttcgagaggaggtcgtcgatgacatctttgggtagccttgg

SEQ ID NO: 71242 - DNA, 338 bp, Zea Mays
taaaaaaccaaatatatctttgaacaccatgagttcttcaaatctggttttcaaagaagtgattgccatatcaactacaaccaaaaaatatttcactttaaaaaccctttcggtctctagaatttcttcttgatcattactttcatcaaattgtttcttcctcaaggcactacgttttactggaaacgatgcctctagacccatttcatctgcaatgcctttggagatgatcagactagaaggaaacccctcatttctgtatgcctcaaagtattgcaccataccttgtatttgattcaaagcagagtcaatgcacatatctggcgattgcaatttct

SEQ ID NO: 71243 - DNA, 637 bp, Zea Mays
ggctgttaccaaacatttgagaaattatcttcagccctttgaagatccccttcatctttatcgccatcggtggaaccctttgacggaagagaaagagctcctgcaagaatgtggaataagctcaaatgttcttggagcacaaagaaaaggtcttggctttcatgctacaaaaagatacactaaaacgtggggaagggaaaaggagacaacagggatacaatttgcatgaatgacaaggatacacatatctcctgaatgttcatactgaagaaaagatttcctcatgcagtagaatggagcgcaaacagaaggaaaaaaaaaagcgaagcaccgcctccatctcacctctggaattattctctcagttgtgcagctcctattagcagctttcgcttctgaatcgttagaccaaagttcactccaaagatgaagagcaaaacagaagcagttcggtttagaggggtaggaagcagagggagctaaatcttccgagaaggtagcatagaacctacttaaatatggtgacaagttagttgggaacaactcctgttgctgctgttcttttattttattctgtaagtgcaaccaggcttttctgaaagaaaaaaatagacgatacttgtagctgtacttggat

SEQ ID NO: 71244 - DNA, 408 bp, Zea Mays
taagataatgattaaaaataataggacatatgcaatagtgataaaaaatattagtagacccttgaccactattgtaccactacaaaaatagtaaccaccccagattatcacagtaagtgggttaaacaaataaaactaggattttgccaatacttcaaataaatcaaaagagtgactaaaagtgggaaacagtgagcaactttatgtttccctaagtacttatgatgtgtactataatggaaaaatataaaactaaggtgaaaatacagtggaatacaccccacctctgccccatgagaaagatcatatattctaagaaatcatacaatccatcccctataagtaaaaataaccaactttaggaataactgcccttgcgcaaagaagaaactagaaaaaataggaaat

SEQ ID NO: 71245 - DNA, 302 bp, Zea Mays
ctttgctctctcccaggatattcatctgatttccccctttggggatgagagtcattctgcagagagaattgatgtacctgtagtacttgtgcagattggtggatttccaatattcatcagactcagagatatgaagatccttggcttcatccttggtgggaggacgaaagtcatgaatcttgattttgtctcctgagatatccccatcagtaaatcccaggatgtgagcaaacctcctgtagctcaccttataccagcttccttcaatgaagaaattgagatcaggaaagttgtatggactt

SEQ ID NO: 71246 - DNA, 547 bp, Zea Mays
atcacatgtgacttaagttgggaagagtacaccaaagttggagctcaagatcctaagtaagtgcaacccaccttaaaagtcataccttggcttgttatgcacatataatggggaaaatggcccaagccctaattcaaaccccttttggacaagtggagcactagaaatatggatcaacaaaagggtatgaaaaccacatgatcatgacttgggccaattataaaagatgtagtacacttgataccacacaaatgatagtcagaaagtgaccccaaaaagaattcagaaaaaccccaaaaggttcaccaaagggttaagcacaacagaaaaatcagaattcttctaagtccaaaaccaccccctttccaaagatcaaacatgttcaccctcattcaaacttcaaaaccatttgacccaattgacaaagtggcgccaaaatacctctagaataccctggagaaagttgaaccccaccccaagtcgtttgacacgacttggcatagcttttgtcccggtttggacagctaggacagaggcaacttctcac

SEQ ID NO: 71247 - DNA, 553 bp, Zea Mays
ttaaatgatcacatcccattaaaagctagtctgctaactgcttatccgtgacatgaacctagacacgtcagtttctaataccttggaacttgcggagataaccattgactgaatcattgctcccttgctagagcaatgctagatcaactagatctaactcttaatccccagagaaaaggtgttcatgaaacttatgttatagatcatcccagaaactaatcaagttaggatccaacacaacataccttgctcgtgagtgctcttaccacttttgcctagaaatttggaaaaatctagcaccttactccctagaggttatgttatggtgtcaaatcggtgcttgcatggttttacaaatgcatgtctaacatactgatctcgagtctatctttgaacaattcatctatttcctcttgaatcttatctatggtagccattggtagtggaccgactctcatgatgtgaggttcaagtggtctcacatagttatgtcgggcttctgcccaaggatgatcaaggggcacattcgatacatgatctagtggcatatttg

SEQ ID NO: 71248 - DNA, 517 bp, Zea Mays
cacggagaagcaggtggtctccgccatcgccgtccgccgcggaggaactccactggcttaacatcgaagccgtaggcccgtagcctcgggagagagacgcccagaggaaggaaagaagaagcgatttctggaaacatcgcgtcatctgtggaggatagaaacgacatcgcgtctgcttgtccttcgattgtgaatctaacggctgaaaaaataaatgtcgacgtggatagccctagaagccgtgttttgtaccgcgtttcatatataagaaatttcttttcttttctggaagaggatgataagtgcccgcgagctcttccatccagctcctcacccagaatccgcatcatgcatggctggattatcagatcagatcgacttcctaatcgggcgagatcctcatcatcggcaacactctggttaacagggacagggagagacaattaattgtatttttgggactacaagaactgcgcttcgcaataataataatgccatcttaaaaataaaattttca

SEQ ID NO: 71249 - DNA, 1124 bp, Zea Mays
gcggcatcctgacctgatgactgcaaatgagagatagagactaagcacagatcgataatatccgatagaatatcaaaggatgagatggctacctggaaagctcacacgagaggtgacgatccagacaggacaggagatggcacacaggcaatcaaggtcactgaaatgacagaagaggtgagcacgtattagtcacatagtcataagtatatgaaatgtgaataaatacatacacagagaaatatggcacagaaaacaagagatgagacgatcgagaggtcaaacgatgtgaaaacgacgtttgaacgataaacagtgccataggaggtttggaatttgaattgagacacgaaatgacatggaattgagccgatacttcacgaataggtttatataggtgaatatgagtgaagtgtgtgcttggtttgaatttaggcgaagaaaaagagatttgggcactcggctcggaaacgatcgctcgaaacggggaatttggtgaaattaaagcctggaatctcggattggcgtgaaatttggcaaatatgttactggaagtgttgtgaagttgcctaaaaaatttgggttcaattggagcattttggctggtttgggcatttcaccgagcacatggtgggcgaagttttaaggtttcggggaaatggctatttgaggtggaaaaaaccctcccgaaggagctaggaacctgcaaggatactcaaggcacacagagaaacacatatgaccacttggtttcactggatttcacaggaaattggaattggcacacaaagggtggtgcactgcctcactgtctaaagaaatagattgaagagacagagggagaggagagctgagagctgctcaccgagcgagggagaagagacgagcgcaggcacagggtcaccgaaggatctccgccggggaggggagatcgccggcgagggggagcagtcgcagagaacagagagcacagagggagaaatgaacctctggctcggtctcgggctggaggccttttttttaaaacgcgatatgggcgcaccggatagtctacagtacctgtccggtgcacaccggacagcgcacagtagctgtctggtgaaccaccggacagcgcacagggg

SEQ ID NO: 71250 - DNA, 317 bp, Zea Mays
tgatagcgacttgatcaatagaataggaaagggtctcaaaagacagaaaggtcatggtcatataaattgaaatgtttaaatagctagcagggttttttgaggtaagtatttgaaacaagagtattgaggaatctaggggtacgagcatgtcaataccaggggaatagtggtggtcaaatggtataattttaatgatggaagaggaaggaatctcaaaagacaaaaggctatggtcagggggcatctacaaagatgtcgcaagcacaagagtgagattagatctaatagaatgaataagtaaagcatagacaatacta

SEQ ID NO: 71251 - DNA, 654 bp, Zea Mays
aaatcagaccccctccgagcatttcccctaagttaattgcacgattggtgacccattccgctctgcccacgaggacaggaaggttatggacaccagctcgtgttcccggcgatgggtggtggtccagttcaattgaaggggttgtagagcttgaggagggtctagggacactagaacaagcaacagagagactggaactaacctgagttgggctggccgcggttgagctgttcttcgcagtggcggagaccagtttgggggaaacaagaaattctcgagctctggcgaacgatcgtggctaattagcggtggctggatacttcactgccttacggagctcgcggcggggtcaatttatacgcttagtgagcggtggccgtgaattcgggcgagacgcgcggcggtcagcgaaaggggaagttcactggcgcagtgaattcgtgtcagatgtcgtggcaattactccggcgatcaacggggagcgagaggaagtcacggcgatgcggtggaagtgcatggacacgcggtgcaaggctgggaagcagtgatcaccggcgttcttatcggtttccatcgcggtgaacatggtacggcggccggaattgtttatcggccggagtttatccccggcgacgtacaccgggtgttatccac

SEQ ID NO: 71252 - DNA, 737 bp, Zea Mays
tgggaaacaagatcactgggcgaagcactgcccaaagaaggtcactcagcagtcgccagctttcaacacctcagcaagacaaggagcgccacagtaagcaccaggaggtcgtggtcaggcctacaattgtggaaatgtgaaccacttagaagctgaagcaatccaggatgctcaggacgtggaagtaggtatgtttctagtcgagtcccatccagcaaaagtattgtttgataatggagccacacattcttttgtttctacatcatgggtataagcacataacatcttcatagaaccaatgattccacctttaagagttaattcagttgggggaaaagttcaatccgatgagatgtgtccgaatctaaggattgaaataagggggatagacttccccgctaacctagtagtaatgggtactcaagggttagatgtcatcctagggatggattggttgtaccgaaatcaagccactgtcagttgtgacaagaggacagtcaagttagtgtccccatctggaaaggaagtagtaactgagttgtacatgcctgaactagaaggagcctatcactatttgtctgtagatagcaaggaggataacctgattgaggatattagaattgtgtcggagttccccgacatgttccctgaggagttaccaggcttgtcgcccgagcgtaaagttgtgtctgctatagagcttatcccatgcaccgcccctatttccaatagagtct

SEQ ID NO: 71253 - DNA, 1112 bp, Zea Mays
atcacactaaacaactcggatggtgcaaccgaactgagttgacacccacgcgaagaagtgagaaagcccggtgaaggtgtcaaacttacggtggaggggaaaggtccaaagaaaatgagagaaaaaatctataatgaccagatagtactaacaactggttatgctgagaacagcgggtgtctaaaggtcataatggatgaggtcaaaggggcgagtagcacgggacatggaagaagagaagggtaagcgagtgtgacgcccgagctgacaggcatgaccaagtaaggtagcattactgctaggacaagggatggccgaggtgactgagagtctaaagaggatgtcgtgtctgggtggccgagacaatggtgccaagtggaggcaagggcgcagggtgtggtaacttgggcggaggaaggtgaggcaggaagcgaagatgatataaggccaagattgtttccataggagtcaggccagagtcctttgtagaccaagattgtttccaaaggagtcaggccagagtcctttgtaggccaagattgtttccacaagagtcagaccggagtccctacgatggcctatggaaactaaaaaccatctgcgtggagattttttccattatgaaacatggcacgctcggcttcatcgaaacggaggttttgggagggattcgacaatttggaaacccacacgatgcatagacgctgctatggactcaaaatctctcttaggcgccttgaacaaccattaatcctccgccatcaaaatcagtttgtgctggtgtagccgccgcccgtgagtcccccccttaactcttattcgttcccattctctacagtagatgcttccgattgtgagatctcctcgattgtagtctagatcccaggcttggagtactagttgttgttaccatctctccccattccccatttctggcaatggagcacgaccggctgactggactgcattctcaccatctcctacatggatgcatcgggtctagacatcaacgtcgaggtggacgagacgtccccctagatatgtctctttgtgttggttgtgataggcacttgtaagatttgttcttgattctaccatcaagagagtttaac

SEQ ID NO: 71254 - DNA, 732 bp, Zea Mays
tgaatctgtcgacaggagagagggcgtgcgacgtgtggagtggggcgtcggtgttgacctcgcccacgactggcgttcggggatccgtggtgagccatggtgcttcgtgtggattgccggtggatcaccgtagcctgatcggggggaatcgaccctggggtggcccgaatccatcactgtaaacatcgagccgctgcgtcgcgtgggcaacaccaaagtcgctccgatccgcggtgaggaacatcccatatagtttgtcttgctcccctctttgtttcacacgtgttcgcgctaaggttgggttgctggtgcgctgtgccagtcttccctggcatggcctccgccgtgtggatcgggccgcaccaccgctctggtcgtctggggaagaacaagtcgtggccctagatctaggagtgaacggtggtgattagatcacaggagtgttgcgcctcgtccatagatttaggatcggtcggccggtgttgatcggaacccgcatgtgatccaaaccgtagatcagaaatccgatggctatttccgcgcgctggtttaggatatcgacgatctaatctaagccctaggattttgatcggacggcccagatttgagaataccccttcggcccggatgtttcgcaaatgaaccccccgattatttcagaatgaacccgcagtcctacgctgtggcgctctgagtcattgtatatttcacgtaaaagcccctgcgccttca

SEQ ID NO: 71255 - DNA, 556 bp, Zea Mays
gatgaactttggacactgtggctgctctgtcgtccatccacttgcgctggtgatgtgaccaagcgaccatcgtcgaggtatactttgcctgccgtgatcatgacacgccctgaccctttaaccatgtcgcagtgagtcgccttagcccacccgttcatcgccggtggtcttgccacggtaaagtccacgaatcgcttgcgccaatagcttcttccctctccaaccgccaacgtgatctcttcaaattgaacgccaccgccctcggatcctataaattgagcgtgccatcagctctgctaggtattcaagcatccagcgcacccactcgtgtctcagattgtccactagagagctctaatttgggatttcccccaaatccgtcatgaataccgtgctgtgagagttcaccgtggccagctctccacaggttcgatcatgccctcctaactattgtttcagtactattgtgtgctcttgatactcctcgatccatccaattgagctagaacacgtagaatcaccgggaacgcctcggtctagccattgatcgcactgt

SEQ ID NO: 71256 - DNA, 610 bp, Zea Mays
agaagaggtaatggaagccctgtgcttccattagtatgggaagccccagtcaggtatatccacgcgcgcccgatctggttctgtttctggctcgggcggattccagcgtaaaacgtgagctaaaacaacgtaaatgagtacaaaatttagcgtaaatcctatatctgttttgtaacagcaaacagggcccaaaattacggcgtcaaaatcgcgtgcggccgatcgtgcgtgggttctggctcgggcggattccagagtaaaacgtgagctaaaacatcgtaaatgagtacgaaaattagcgtaaatcctatatctgttttgtaacagcaaacggggcccaaaattacgcagtgaaaatcgcgtgcagtcgatcgtgcacgggttctggctcgggtggattccaacgtaaaacgtgatcttaaacagcgtaaataagtacgaaatttatcataaatcctatatctgttttgtaacagcaaacggggcccaaaattacagcgtgaaaatcgcgtgcagtcgatcgtgcgcgagttctagctcgaatgatttcagcgtaaaacgtgagctaaaacagcgtaaatgagtacgaaatttagtgtaaaacacgctc

SEQ ID NO: 71257 - DNA, 376 bp, Zea Mays
gtcttgagtttactctctagatgggcctcgctgtcctcagccacagtggacaaacgatcctccagggattgtgacgcaccttcctcggcagcacaaatgtttaatacgtttgttattatagctagtttaggagccacaaaaccggagatgattgtacgggctataatccctttctcattagggacttcaccatgtcccttgccttattgtaagcatccttcagtgtctcacattttttcttaccaacctcgcaattatgcttttaagttctagctcttctaattgctcttttcgatgaccggcgtaactccccttgcgggttcctctcatgaaacttatcgctcaagctccatgttattattctggatgtggtctc

SEQ ID NO: 71258 - DNA, 438 bp, Zea Mays
gtttggtaacatggacaattgcaccttttgcatgcaacgtgtctcgtttcttggttatgtggttactccgtagggcattgaggtggatagcagcaaggttgaagccattcaaggctggcctacaccaacgacggtcacacatattcaaagttttcttggaattgtaggattttatcgccggttcgtgcgtgattttagctccattgctacccctttgcatgaactcacaaagaaaggtgtgtcttttgcttggggctccacacaagaagaggcgttcaacactttgaaagataagttaacccatgcgccactcttacaattgcctgactttcagaaagtgtttgaatttgaatgtgatgctagtggtattgggttaggtgttgttttgttacaagaaggaaaaccggtagcttatttcagtgaaaaattaagcggtgc

SEQ ID NO: 71259 - DNA, 1006 bp, Zea Mays
tgctgggccacatctggctatgactgatggcctgaccgatgtgtaatactctctcctctcttgatctataaaaagtagagcatagcaacatagaaggggttagaggtcatagtcagaactagatcctagactaggattcttagtcttcatagaggaggcataaaggtgaactaaggaccattaggccaaaactctcacaaaaaccaaagtggaaagggagagctcgttggtcatggcattcacttgatactcgagcttgtgattttcttcgcatttgtgttaatcattgtattacataaaagatggttaaggttacatatagtttgacccaaacctctctacctcatactggtaatcattgcaccaaagtttaacagacatctttttgggtaccttctgtatctaatgtcatactatgatgacatttggtgtgccaagtaggggcatggtgctattttcttattggatttagagtgtttttgttgtgtggtgtgatcatggtgtcaccggtatgcccgtcgtccaaagcagacaccttggacacctgctccaatagctttggccgtcaactatgacactggtggtgttagaactatgtgctaacttgcccattgtctcctccaacaagggccatgctttagtagggacacttggagctattctcacaatccttgctttggcccatgccccttctagagtgtgccacactcttgggccatcacacactttgcctccgtggacaatggaggaagtgacaactcaccgcgtgtcactccacaaacttgcatcaagatcagggtgatgcaagctccaagcatgaaggttcctcctaataatgatcatcctaacaagctcattggtgcttcaattttggcactaatgacattgtgagtcccctcaatattgtggaggtccttctccataacccattgactcttgaagcccaagaagtggtcgttgaataatggtgacaagatgttgctaggttcatagccgccattagggt

SEQ ID NO: 71260 - DNA, 358 bp, Zea Mays
ggggtattggattctcagccatcatgcttgaaacggttacattgtaagatttgtggatttggcacacttttatggtgtagatgggccaaataacaaggtcaacatgcccaaccagccgctgttgttcgttgacgtattcaaggtagaagcaccaaacataaacttcacggttaatagacatgatacaatcaagggtactatatcttgccgatgacacctaccctcggtgttcgacgatgtttgtgaagatcatccacctcccatagactctaaatcagcagatgtgtgatgcatgccaggagggcacacagaaggacttagaaagagaatttttgggatcctcaaggctcacttccac

SEQ ID NO: 71261 - DNA, 488 bp, Zea Mays
gaaagcgttcgttgaattttcttctcgaccacgtatctgcatctgaaggagggtccgctcatcccatgcattaaagacctcctcgaaccaccattattattaggcacccaccaatatctatcattatcgccaagcaacaaactggtcataaacagttaaacaccccagcagcttttgctggcgcgagctggagatgattttcaaagcgacgagacgaccaacaccatcaagctgcatcatggcttctctcccgttctccgtggaatacaaagcctgcactacagcttctgctaggcatggaccaactgattctcgacctgctacctcctatgaagtgcctatatatgtagcagaagcgaccatctacagatgcttcccccttcctcctctagctctacgcaactggaagaagatttctacttgcattggccgggactactgtggattctcgatttgacatataatcacacagcatgacgacatgaaac

SEQ ID NO: 71262 - DNA, 1095 bp, Zea Mays
ataagtagtagcaaatattgttagtccaaatgcttatgttgttcttaaacaccaaaacttcactatggaatgggcctcaatccattttccttacacctacaaatgtcatggattagttttggatgtttatgtgctcttgcaactacatagcttgcacaaccagacaaggagggacaccctaaatggcaaggctatggtttagtttgtttgctacaccttgcactacaagtgtagcatgacttttctagttcacgcatagagaaccaagtgaccagaatggtggaacaagcattggttttattatacgattacatgtacaaatggaagagagtgtgatttgtgtggaggtttggctctgttgagttctagcactagcaaaggtgctatgatagaggcctccaatcactcgaaggaagctttatagatgctatcatggcactagtacatgtgagaactatttgaggagtgtcaggggtaagaaccacaaggggccaaggcccatggatcaaggaaaagaagaagcatgctcaaaccaaacccagacaaaagccaacctacaagccacggacacccaaccactcccccgcttcaatataagactagggtcgggcatggctaaagctgattcctctagtcaagctaaacacgcctgactcaggaggtctaccggatcgcgcccatgtcaaggccgacctctccacggacaaagatgaccctccacatcgccttctatcatagaagtccggcaaggaaggagggatgcgtgaacgacctacatggcagcatcttcttacagaacttgtgggtgaggctaccaatctcgagggatggtgacgacgttagatagccctacgacgactacttaggcttaggcctcttatcgaggtaaaaagaaccccaacccccatgccaaggcccggggcacgcttacgcctacactgcaacccgcgatcttcgtgaaacttctctaagcaagtcaacaaagctgtgacaccagtggtaggagacgacaatggaggaaaaaagccccgactgttttacaagcataccaactccttcaccacgatagcaccacacaagattgtaacccctctc

SEQ ID NO: 71263 - DNA, 915 bp, Zea Mays
catggtttgtcatgtaaggagaggaggcgagtccgaacccttgaaccaggaggaggacgtccggtccctgtatttgcatcttgaccgagcagagagccgaggccaggatctggggctcggacacgtacctgagcctgtctgatggaggtgctgtccaaacagtgataagtatggtgataagtgcatggtaattctccccatatggcataaagcggacttgacgttggtcctatagccatcctgttgtcagaaatcttcgtggaggagttggtggtgtcctttggtcgatgttatctaggttgaggccatgctcaggcgagatggaggttcctcccgatgccttggtcgagcctacctcgaagcatgcagccgtacaaggaggggtagttcagttgtcggagtagcctcctacgggattggcggggggttgttgccggggcagttggccgaagccgagctcgggcgaggcaaagtttcctcccgaggctgaggtcgacttcgagcaagcggagttccctcccgaggttgggaccgtgcttagatgcacacacattcaatccgtagttgtttgagcacggtagtcggcgtgggggagcagtggccgttattctcgggcgctcgtcatcgtagttggtgaaagtggatgggaccatggtcccatctctccttgtttgactacgatatcatgtggggtaggtaattgaatcgttacattaaatctacatgtctccatggttcccatgacctttgacggaggttggtctcgggactatcctcctttccgagacggactcaggtgaggcaaaaaccgccattacatgaagaggcaacatcaggcaagacgaggatctcccctagtactgccttcgcccgaggacaaactcggacaaggcggagttttgagcaaccatcgag

SEQ ID NO: 71264 - DNA, 342 bp, Zea Mays
taagtagtagagatttctcaccacctaaattggccgtactgatatatcagttctagcaggaattcatcgaacttacagataactgcaaatgctaatatccgtgctaggatgttattgatcggctgaaggatgagggtcaccagcaaccgtttgaacatgttcttgtcaagatagatagtagtatttttgtatattatttttatttggcatgaaaatggaagacgaacaatagacaagagaattacttagagttgttcagccgtggatgatagctactgtgatatataacctaaccggtcagtaataaatatgatcacacttgttgatgcatctgagaattac

SEQ ID NO: 71265 - DNA, 1290 bp, Zea Mays
tacaagctagtgagagagttggtgtcgaagcttggctggaaagggatggggttgaacacagacggttctcccccagccgttgacatgtcctgccaaggagtgaccggctcctcctatcccacacgtgggacgtccggcgtggctggttcgtcctgccctatggtgtgggaggaggagccagaagagttggtgcggaggatgtgtgtgccgctggtggtgctccaggcgtgacactgacattggtcaggtacctcgcaagggagtctgcgtcatcagtcagcctgggggccttgtcagtacacggggtaccacgggtggcatggttgcagttgctccatctctgcctcctacgacgagaaggatggggacgggtgcctggacgtccctgagtgtcagctaggggaccagggggaggagcaccatgtcgtactcaatctcgagcgacataaactccagactcccaaacctgatcaccgtgccgagcctcaagtagtggtgaaagccagccatctggagtcttgatgggagctaagtgtttagcacgcgactacccctaccttgcatgccaacttttggtgttcggatccatggacctaaccaactagtgaaataacgtcgtgtgccctggactaagatggtgatgcgagttgacacaagtcgtttatcctggttcgtgctaggaaaggccctacttccatcagagggggatgggacttatattactcgcaccgaagtgctcgcaatagggtttacaagcatagcgggatagggaaggatcccaagtcctagaaaatgattgaggcaagttccaatatcgagtggaggagaagactcatgaagtattcgcccgcccttgagaagccatagaatgtcttatttataggctcaaggggtgcttcctggaggacgggagttggctgcatattgtgagagggtgtcttgcgtatcctgtagacagtatggtcttgtattgtgttgttgacttgtgcctccttgttttctgataagagccgaggtcgaagccgagggctaggtcaagttcccaagcccccatggcgaggtgttgcccataccgtagtggttgacatagggttaggtatggggaaactgcttaagacgtgcatcagccccactatgtctgatggcattgaggacgtcgtccgtcacggatatcgagggcagagtcgagctcgggcgaggcggaagtatgctcgaggtcatgaccgagcctttcctgggattcgatgatgtgtgccacagtcgacagagtggcttcctgcgggattcgcg

SEQ ID NO: 71266 - DNA, 286 bp, Zea Mays
gagaaatagtcgacgttgcggtgaggagacgggtaaatattttatgcgttcaagagaccaagtggaaaggacagaaaggcgaaggaagtggaaggtacaagcttcaagttgtggtacacggggactgcagcaaacaagaatggagtaggcgtcttgatcgataagagccttaaagatggggtagtagatgttaggaggctaggagatagaatcatcctagtcaaactggtcattggggacttggttctcaatgttatcagcacgtatgctcctcaagtaggcctta

SEQ ID NO: 71267 - DNA, 983 bp, Zea Mays
gcaaggcattgggtcctcgttcattgggactttctacctatgaaagagaatacttggcaatcttgatggtcgtggagcagtggcgtccatacctttaatatggggagttcatcattaagactgatcaacgaagtttgtcccatctttcggatcagcgtcttcatagcccttggcaacaaagttttttcactaagttgcttggtcttcagtacaaagtagtatacaaaaaggggtccgacaattcagtggccgatgccttgtcccggcgccctcatgaccaaatggaactttatacattgtccttggccactccagtttggatgttgttagcaccggttacacggagcagaactgaggaagggaatggggtttcgtggagaagaagaacaggaggtggaggaataaggataggcttcgatagatattttcttcttcgataaccattcctccacgtttcagcagtataagtatttacttattacatgggcagcactggccctcatttcacccactctgggccagacagaaccacattgggcttaagcttcctcttgggcctcgtagccatgccttggtgattgccagtttcttcaacagccttgtcttccactattacatctccttgtgtgctgacattaccccctccaggagcaccagcttgcccccaagcgggtgctaagggaaaatgttgacgcatagcttcaatatcctcccaagttgccagggatggcggaagagaggaccattggataagagcttgtgggactgccttcactccacgatagacaaccctgcgctgcagcactgccataggtattgtaaatgaatcagctaggtctggcaatgcagtagttacctgacttggaggaagcaccgattgtttcaacagggaaacatggaaaaccgggtgaattgacgaagatgatggcaagtccaatttgtaagttgttgttcccactttagccagtacacggtatggccca

SEQ ID NO: 71268 - DNA, 574 bp, Zea Mays
caccaagatgatcattgtccatctcaagtctcatatcctttctccataagcaaacatctttgtctgagacttctccaaatcatcgtcatctcaagtctcatatcgaatctgtcaacttgtttgctttcgtatattatttgtgatattccacatatacatatccattgatctcctgtggaatatccccaagcttgcattgtgttgaacctttgattgcattccattggcatgctcaagtatatccattatacttaactttcatgttcaacacttagcaaattggttagtcctttaatattgttgtcattcaatccaccaaaacccacaagggactaaatacactttcacttagctttgtgttgattgtacaaacaaatcataggtttttgatggatcatctgcttgcttaaggaagcacactatggagaaggtgtgtctcttatatgaccattcggatgggtcatgggagcaacaacagggtcaactagagaaggtgttatatatgtattttggtgcatgcttactggtagcctgtggtggtttacaaacaatccgacataataagactctaagg

SEQ ID NO: 71269 - DNA, 599 bp, Zea Mays
agtctcgattaggaaactaggactagagcccattcccaaccaagactaaacctcattattctaatagtgtgttcggttgtgacattattctctagcatgttgtactagactatctggcatgtgcgatttgtttttagtacacttcattatttttactatgtttcttcatgattatttgtgccacttcttaccttgcaccctgaggacctattacattctttttactacatctcaacatacatgttagtcctagtgcttgtattgtcatctcaatcaccaagaccattcataatcatgcaatggttgcacgattcatacataaaatgatggccaagagggcaaaaacatggataagcaatttccatggcatcgactagctaactaatagcactagaatacataggaacatgataatggataggcttctggtcaccaagacaatatttctcttggctcttggtctacaaccgtaaaggtggtcacctagataggctcgctacatacaaaccaactattattctcataagtcattactagcctctctccttttcacatgatgtattctttacttgagcttgcgtcatcaaaataaggtatct

SEQ ID NO: 71270 - DNA, 578 bp, Zea Mays
attgattgagtactctattaattctattaagccttggaccaggataacacaattgcatccacatcttgtctccgagtgcttcttttgcttgtttgattcaacacgtctctttgcaaaaccttccctcgaacacacaaatctcttattctcaaccacatcgcttttcttggattgagctccaatacaaaccgaaaacctgctttcatgtgcatatgtcttgtagaattcttccacttcatcaagagtatcaaataacattccaatgactagtttgagtctctcgtccttgcaataaggtagaaaccatgacgactgcgatgagaaatatcaagtactcaagtcaaagtatgcactttgtcacattcataaatgttgaacatattggatcagtgagaaaattttctcaccgatgttgaattggctggatcctttttaggtgtattgaattcctcgcaagaatcaacaagaggcatgggagcagtcgtgggaacaggggcttgaagggaaacatcatcttgagctgctatgtcatccatgctaccaccaggaccggctacctgtcgtgcgtccatggcatt

SEQ ID NO: 71271 - DNA, 925 bp, Zea Mays
ccctcatatcatcagtataagaatgtccattgaaccaccactccaaagatttcaccatctgttcactctccataacctccccatttgccactttcaccttaactaggtgacactccgtcatctgtaatcccagtcgctctaccaaggccttactgacaaaagtagttcctgagtcgatcaatatcaatagagtttgattgcccaccatggcccacagcctcatacattcatgactagtggaaccactgatagcatgtaaggacatataaaatctctcttggtttgtctccttctgaatctgacccaacatctcctcagtcagattcatctccaactcctcagaggttaaggcattcagctgctattgcaccttcttagaatagtgggcctaatgatcgggctcaaatttctcgcacatgtgaagcatagcccattttgtcgcctatattccttcactagtctctccttggacatttcaggcacaacactaactcctcgattctcaaccttagatcccagcccgcgaaatttgctaggtccatccactttcaacgattttgacgttgtttctccagaatcctatattgcaccctagccagcaacatagctcggctaactgaggttagtagatgcgcctgaactgaaccttgcaattcatgtttcaatcctgtaataaactgggccaaaagaaagtctcatccaactgatgattgtgcatggaggcgacagaacatgcttcctcaaagttcttcacataatcctcaacaaatctagcctgatacaaattcagcagggctctcatcgcctctaggtactcctcttcaccgaagcgctgcataaccgccctaccaaactcctcctgcgaactcaatccattcctgattttgaaaatttggaactaccgagaggcgttcccttccacgct

SEQ ID NO: 71272 - DNA, 698 bp, Zea Mays
aatactgtaaaaactagggcttctgcgtaatgattctataaagggccaggactacgggttaattttgtaattcaacagggcctcttatgtaaaatgagcaacgtgaaggggcatcacgtgaccacaaccgtccggtctatactcgacacgccagattagatcttcgccttcgcgaactggtactcgctctagatcgttggatggcaatccgatggacgtgggacgatcacgcaccgactcaatctaaaccacccattaccgaaccgatgccccggatttaatgtcgcaaagaggtatcctaagatctaatcacagccgtagacgctcaatctcacggtgcatgtatcatctcttttccccgaccgcgacggcggcgatgactgaggcaccacaacaacgccatggtcggtctgtggccgaacacaagcactaggtcaccagcacgtgactaaccgaaaaaattatggagagtagggttcggcgagtcgtctcaaggggtcatactgggatttgatgcggtgacgaggccggtcgacagtgaaccacggatccgggatcgagcccatctctagcgagaaattcgcccaaccccctcggcttccccgaccttaatctgccacggtcacgatctgcataaccatgcgagttgccaagacctcctgccgacctcggaactgcggcggaagagtgaatctatg

SEQ ID NO: 71273 - DNA, 854 bp, Zea Mays
gaaaagagtgcgggccggaataacattgtttgctggattacaagggcgcgtgggccctgatggttaaacaaaaaatttgcagagattttcaatgttccaggagtgctctaagtcttcaccggaaggcgttactagcctgtacgcgctggggggatgcctttgacttgacgatgaatggaccctcccatttcggctccagcttgccccatgattctgtccgggtggtccagacgagtacgaggtctcctttgttgaaatctcttgggacaaccgcgttgtagcaccaggccttggtttgagcctgatatttgttgagggcctgtagggcgaggacacggtctctgtcgatgagatctttggacgttggttcatcgacatcggggactgctgacgtgcttgttcggggtgacccatgctttatctcttgcggcgtcatggcctcggatccatacaatagacgaaaaggtgtgaatccggttgcctgacattctgtcgtgtttagggccctgaccacttcaggtagttggtcgacccatttgcccttcttgtcatcgagaagtcttttcttgatggcagtgaaaatcttgccgttggcacgctcgatgacgtagttggattgcgggtggtataccgaggcgaagacaggcttggtgccgatggagaaacagaaatccctgaagtcttggctgtcaaactgtttgccgttgtcgactgtgagttcggacgggactccgaatcgacagacaatgttttgctagaagaacttttgggctgtcttcgacgttattgtggatactgctctggccttgatccacttggtgaagtactcgacggcaacaaaggtgaatttgagg

SEQ ID NO: 71274 - DNA, 407 bp, Zea Mays
agttaaaaaagatttaaaaagacaaaaaagtagcaatgttgcaatcaattgaacattgaacactattgtacttcattaccatacaagccgaggtgcccatgcgttggtagtttgcttcaaggtctcgaatacatgatagtttaaaattgtattgctggaactgggtgatgttccacagcttagaaagtggtcttataagtaggcctgtgggtaccgtgtacgaatgtaaaggagcaagtcgaagtggtttcagccaaaacaaatagactaactatgtacatttcatcttctccacttcctcacgcagccacagccattaattccctcacactgtcatgagctcacggtcgcacgactccttcccccacttcctctatgcctcccacaacggtgacccactaggcgaa

SEQ ID NO: 71275 - DNA, 658 bp, Zea Mays
cgcctaggcatgtgtctcacctatacctaatggaaggtcaagcctagtaatcaaccaacataatttagttcgagcaacaataagatcatactcctaattatgcatagaaccatcagaaaagatgagactagaccctagcaacgtgatcaaccttcttcctacaagctttgtagtgcctaagcaaatgcccagccagcagaagatctatcacacaatctagccttacacattctacaacatgcatgaattcaaaaattggacccattcactttctcaaagatctcatcaaaatcaattaagacactagatttgcgcttaccaaccgatgtaccagtaccaccatcggtgctgctagagccgaccagattctcggttgccttcgcggccctccaccactgtcgtcgacgtcgacatcgatcgtagcagagctggcatcgatgccgagcaaggcagcaacgtctccccaaatgtcgtcttcatcatcagggacaagccctgccgcgtgaaggtcgtcattgccggtgagcggatagacatccttgtcatctgccatgcatggcaaccttcaccacatttgatcgatctccagctttgttcctcaatggtgcgtacaatcactattctcggtctactctagaggaggaagacgaggcattgg

SEQ ID NO: 71276 - DNA, 991 bp, Zea Mays
gaatggttttacgtcaaggcagacaagaagaagagggaaaagcttatgagcatggtgatgagtccactgcgactaaacttcggcatgactcggcccctgcacaacatgcagctggggtctccttgccaactagctgaagtggaatttagggtcgtggctgagcatatcagcacaagagatttggtacaggaatatctggcaaaccggatattcccaacttctggcggctggggaatgccgaagaaggaagaagaggggaagaatacgagctttttcacctgtcgtaccatttcaaatttcagaaaagattcaaagaaccatgcaccgaatgtttagaattgataggaaccatttccaatgaaattcttggaaactatacgaagaaataagatcagctaatgactgttgccttcggcacctggccaaagcgaaggctgaaccgtgtaatggatgctcttaactttgagtatccttactacgaaaggcttgttgaaggggccggaggcgccaaaggaagaggattgtcagtattctaagtaggcaggctatccaatcggttaaagaagaccaaaaggctttgaagaagcaaaaaactgtaccggagacgaaagtatcggctcccaaaaaacggaagcttgccgaaatgtcccttgagaagacgaagatgcaagatgtgccgaagcagactacaagcccttcttcgtcttctgctgctgaggtctcggagattttgaaggtaatgaccgagtctttcccatttgcactgctaagtcctctcaagttggaactgactagcctcttacagacaagggaaatctcttcggctgccgaggggggaaataggggccagaagaaacgacgtatgatgaatatactggaagccattgaacagaccccaacgttagctttggcaggcaaggctactaaatcgactgatcctgaagctgccgttgcaaatggagacaaaaatctcacaaccactctgtccgaa

SEQ ID NO: 71277 - DNA, 390 bp, Zea Mays
ggaacagacaagcgcagggaagccaaatggccatctgaggcatcgcgcacgaatattccaagcttgtcgttttgtaacgggaataaaaaggtccaggctacaggccgacggattattcaatggtttagatatataggccaacgttttggttatctatgcgcccagcccaactgagtaagcgacaaaacagcatcggactgagcagcatgacatgatattcctcgtccttcccctcgcctgagtggtggttggttgcgagctgtgacacgataacgccagccgccagatgggacatgacgagcattttggaaggagaagatgtcaatcgcattactccggatctaagaccaaaattgagtgagggcttataagcattttttttgtctaatc

SEQ ID NO: 71278 - DNA, 402 bp, Zea Mays
aagacccattctgcgtatatgcaaggtctaataaaattaacttctagcagccagtggattttgtccttgattcgtgggagaagatctggacgaaatgttctagctctctgcttgaaaggtctgaaaccaacttaatgggcagccgatgctctacaatctctcggcttaatcccggcatctcagtgtaattccaagcaaagcaatccgaatattccttcaatagactgatcatttcatttctaggatcggtctccagggtcttgtttacaaaagtcggccttggagttttaccatctcctatgtcgatctcctccaaaggatcggccgatgtaaacccctgtcctagtttatcgagatctctgaattcctctatcatgttccccacagaggaatcagatgaac

SEQ ID NO: 71279 - DNA, 414 bp, Zea Mays
ggagccgccaccaagcaagaactcttggggatactataggccacggacgagcaaccgcccaacgcaaagaggacaggtgcgccttcaaaccagtgaatgatgtgaaggaaatacccctggacaccgagtgtttcgacaggcggacgagacgcatctgctctagccttcctccaaaataggaaaggcgctcgtcgacttgctctgtacaaaaagggacattttgcctagaaaccctctgacatgaagggtgccccgagggaagacatcgagcattctttgcgaatcaaccgtgggtctaacccggtgagacagcagctgcgccgctttgacgaagaaaagcgcagaccattggggaagaggtcggcaagctcctcgttcgggttcatccacgaaattaaccaccctgaatggctg

SEQ ID NO: 71280 - DNA, 386 bp, Zea Mays
gtttttgtgaatactcggggactaatctgtaatttctagaattctagagtaaagctgtgtatgtggccgaggacggcgggtttatacaaagaaaagatagggtctcttatgcataagtcactcggcgaaggggtacaaagaggtttcaaccgttggatcggcatttgagggctcagattagatcaccaccttatgtgaaccggtaacccccctgatgccgttggatcttgtgtcaatgcctcagatttaaacaaccgcgatctcctcccatccctccatctatcgatcaacggttgacattcaacgcttgaataggtaggcgggttttaaccccagccgttggcccggcatccgacggccaatccatcgtcttcccaggaacttgc

SEQ ID NO: 71281 - DNA, 340 bp, Zea Mays
ggtccattgagttgtctctaggacatctagaggttgattggttgcatgatatctttgagctgatttatatctcggcttggcatccagggcctatcattcttcatggaaccaatgaaatagggtcaattcatttggaccagcgaagcccaagaagctcttgatgaactcaagaaatatctggcaagtcctcccatacaggtcgctcctagactagtggagatcctacaactatacatctttgctatgaccatgttgttagcacagacctagtggtggaatgatagacctcagatagtgtctagccaacttagtacccagtctacttttttctaaggtattg

SEQ ID NO: 71282 - DNA, 832 bp, Zea Mays
ttgtggtaacccatctatgaagtccatcgagatgattttccaagcaccatcaggcacttcaagaggttgtaataatcctggatactttaccctttcactcttagcttgttggcagatagcacattcactacgccaagctgcaatcattttcttcatgcctgaccagataaacaacttattgatcctgttgtaggtgactgcaaatctagagtgtccacccactggtgttgtatgcaggttgtgaaacactttctgaggaaatttagaagccaaagggagcacaattctgctcttgtataggatcataccatccttgattatgtaatcacccaaagggttttgaagtgacagggcttgtagtaaagaattagtgtctttatgtttagaataagctgcagctacctcgtggaactaagctggttgaataactgacagagccaatacctgatctgtcggaactcgagggagagcatctgccacccggttactagtaccctacttatagcatattttgaaccttaaacccaatagtttggttaagtcttttttgttgccatggtgtagttaggcgttgatcatccaagtgcactagactacgctgatccatttggatgacaaattccccactgatgagataagatcaccaatggtcaatagccattaaaattgctaaacactcctttgctaatgaaagctaaaggatgacctgcctgatgcaacacaacacctattcctttgtcgtggccccatggctttgctaatgaaagctaaaggatgacctgcctgatgcaacacatcacctattcctttgtcgctggcatcggtctccatt

SEQ ID NO: 71283 - DNA, 283 bp, Zea Mays
ccgcagctggtgggattcactgctctgttcctgtattatacaccgcaactttctagatcgattatactgaattggttgacggttatacagttaccgccgttctgaacattaacctgcttaagcatcgccctgcacaatcatgatgtagggagtagggaatagggactgtgagcacgagcggagtcaggaactagtgaatggaggatcaaaaacacacgctctctgtttgttctgcgttagctgcattcatcatccttttccctgtggccttgttggtgtccca

SEQ ID NO: 71284 - DNA, 790 bp, Zea Mays
tccttttgcaaccattagaagcattctaagataatatctttcccctgcagatggatgcacaaagtgtatgcggcctatgttaccttgtctatgtctttgttcccatgatctttttttcgtcccacctccactcagatggaaaatcagggtaagttaggacctagcactttcatgtaattggttagcaacaaaccactctattagcattgttcggcgtaggaattcttatgacaagatttgtgacatgttggtgctagcatgatatgtaatgtaattctcattaggcaaatgaactgacaatctagtaacaggaggaaagtgccgatggatttcgtaaccaagaattctccaacatgaatcatatgggcatatgaatctagcatataagtattctttgacctcattccttgtgtttgtttcctcatcaataggagtgtattgaccatctaaaactcgttgtaggtatagtttgctctggtccggaccttttgtcacgtacttgaacagatatttgatgaatatacttttgttacaccattctacattgatgtgtgcttgatatttcttgagcaatgtcaagttatatggaacaatccatctgttatctagtttgatgttagacttcataacaaatctattattgtttgatctcttgtagaccgcaaatccatttgtatcaactacagtttcattaagaaaagagctcagacgctgccattaccattgatcaaatatcgaacggctggaaaattgatggctgacgtggacagcgtggtggaggccgtttccc

SEQ ID NO: 71285 - DNA, 328 bp, Zea Mays
ctttgtttaggaataatatatcaattgcatcacaaaaagataccaattgaatagatgacacaatacaacttatgactagtagaaacaatgcatgcctcaagatacataacattttaaaagcaacctaggcacgcttcacacatgatgatcattgcaatccatataccaattgaaaaacgacaagatcatgcatataaagcacaatgtctaagcacaacatgattaagaagtattttcttaggtacaccaaagaaaacaacattttaaggcgtaaggcgcctaagtcaagatactactagttgaaaggcaagaacatagctatgatcac

SEQ ID NO: 71286 - DNA, 623 bp, Zea Mays
aacaaccaatgccattgttttgtcctcgatgggtggtctaggacattcggcgaaccactcagaaccttcccatatccatgtgtgcgagggagatcaactggagttgacaaaatcgctcgccgaagctctgatcgttggtgtcgaccgcaccttgtcctggacaacggttactaatgcgtgatccctggtgagaaacccctcatctgattcacctgcgtcccagcttcatgtagcgcctaatggcatgagggaggggacacccaaacactggatggcgttgttcgctgtgggccgtgaccaccgctgctgggcatcgtgaggtaggttatggctactagccattgatcggtcagcggagggctctgattaaaaacagggagcgttccaattcggggttaggtctgatcagttcggggttaggcgtatgggctattccgcgcctggtgtgtttatggtaagttcccatgcctagtttcccaagaagctcttaggttcatttggttgaaaaagggtggaaaatattcgttgtttgataaacatcgacaatttctccctcctgaccatgcattctgactagatatcaagaactttacgaaaggtgttgtagtgaaagaccgcccgcc

SEQ ID NO: 71287 - DNA, 678 bp, Zea Mays
aatcaagcctcagggatatatcttgtcatctcttgtccctgtggtttacactttgagatggcaatgggtaccaggcacccaaaacctgacgggtttttgctctattagggtatgagtccatgctaatatctattacccgtgggttcttaatgggtaataatctgtatctagcgggcacacgggtacgggtgtgggatcataccacccgaacccgcaaacccacaagttttttaaacccggcataatataaaggcactcatcttgttatggcccaataactagcaccacaacccatcttgcaagcccacggttgtagcctttgctagtgttccatggtaatgtgcagcaacaactacagcaacactgcaaagccgaacatatgagatacatgctggcagctggtaggagtttcattagcttcttgtgctaattggctaatagtattttgctagtttattgtaaaaatggatgcatacacaccgccacttttcagtcgttgattgcaaaagtggatctgtggatgcatgcagcttgctgataatagttgatgttgggcacaggcaaccgacgagtaccagccacccatacgggtacgggttggaaaacaatacgtacccgttactccgttagcgggtatgggtttttagcggacatattttatcctaacgggtacgacta

SEQ ID NO: 71288 - DNA, 490 bp, Zea Mays
cagtaacctgccactgcaaaagcacaccgtggttgcctctgggccgagggaggctacaggcccagatacgttggtcgagtggacagatggagtagcgtcgaagcccggcaaggaggaggaccgagtgaactcccaaaaaaaacaaggaaagattacttggaggccggccggggagagcttggatggataatggctgtaggtggaccaaccaggcgatagggacacctgtactgccccccactccttcaacagacgcctctcaccaacccaatttaattattttctccacaatcctgggtgtgctgtgtgcacctcccatcggctggggcctcatcgcaagcaaaccaaagccatgctgaatgaactagctggtgaatgaaggaacctgcaagtataacagtctaacggaccaagtacagcatcaagcagttagttgccgtaccatattcgtgccacgtcccctgttctttcttgcctttttctttgcatt

SEQ ID NO: 71289 - DNA, 741 bp, Zea Mays
cttgcggcagtgcacctccttctctccgactgccaccacgcgagctcaaattcactggccactgctcaagggccctataaattgagcacacccttggctccgctaggtatttaagcacccaacacacccactcgtgcctccaattgttcacctgagcccccgaattgctcacttcccccaaatcgggtttccaccaccgtaaaaaggtcctcaccatggctagctcgtttcaggttcgatcatgtcctctgctctcttgtttcagcacccttacatgcccctaatgctcctcgactcgtttgattaagctagaatgccctagatcgtcgggaacacttcttctcatccgttgttcgcactgtctccatggatagggtgatttagagctcgaactatgcaattgatcaaggggaaacgtttgataggtgttgaattaggtctcagccaagttagagcaccagtcattaagtgtcgtggccggtacaggttcgctggagcttagttctttgccgctcgccatcgaggacctcacgttgtgaagaattagaacgtggggggggggggtttggtgtaaatgtcagtgagacaaaactatagtgtcgcggactctttcgggttgtttaaaaggctagggtcatctcttcaaagtcggcaccgcgggcgcgcgcgcgagcgccttccgccggtattgggctggctcggactgaaatgagcccagtactgttggtcttttcctttttc

SEQ ID NO: 71290 - DNA, 477 bp, Zea Mays
atttggtacttttgatgattcaatgtggactaggcagaaggaaagagaaccaaacatcaatcgatgttaaaggcgctattttctggtcatttctgtctctgcctatggccatagctctctcatgtatcttcccatcaccgatgttgtgatcatgtggcaaacatatttgacaggaagttgagagagacgaactaggcccacttctgagatgatcggagaggaaaagagaatgagggatttggcatggctcttggttggggtccttgtatgaaactcaaaaaaaaaaaaactacaattgttgtgtgtcatgctttgaacgacatgcatgttgttgcttagatgcgcaggggtatgaccatagaggtaactaaaccacttagagcttatagttagtttggcaacaccattttatcagggattttcattttccggggaaatagagttgtcaaactagaacttagagtctgattggttcac

SEQ ID NO: 71291 - DNA, 380 bp, Zea Mays
caaagagattcaacagggaattgccttcagagagagtgccgcagcaagagcagagattgagcttgcaagatatcgctatgctagtgccatggcagaactacatttagtaaaggatgagattgaacaacttcagaaggagtatcaatccttaaacactatgaggtacaatgctgaaacaaaagcatgtgaatctaatgttgcatctcagaagattgaggaaactgtggatgaccttaccctcgaaattattagattaaaagaggagctcacctcttcacaagctactcatattatagcagaggaacaaaaattgaatgttgctttagcaaatcaacaagaaaaggagaaatggcagaatgaactaaggcaagctgatgaag

SEQ ID NO: 71292 - DNA, 373 bp, Zea Mays
agagactcatgggactgaatatgtggtgtggatctcagctcgttgattcctacattaaatatcgtagataggagatgcataggtatgtggattcacaagattgtgattgcccgaggcatgttgagctgagaatattgaaggcggcacacaagaagagagcacatgagacaaggaaatggagatggctagaatgcagaaacagatgttgggaaatcttgttggtcaactgagtgcaagtgagtgagaaaaacacacgttgttttcgcttgcacattgtatttgctaacttatttgtctcaatatatttgcagagattggatgcaccgggaactatatcgtagacgaggctcgtgcaagatacgttgagcaaaaa

SEQ ID NO: 71293 - DNA, 542 bp, Zea Mays
acttagagatagagagaggagggaccaccatcggtagttatcgtccatgccgacgacctgagcgaggttggtgaccgagagtctgcaccgggtcgcgccaggcaaaggagaaccttcgttgttggagcagagagcatgcatttcgtcgctgaaggagggagctcatcgtggagttgcggctcgatgcgagcagcaccaccgtatccaccattgacagtatgaatgccctaagccaattcgtcgtgcctccataatatttagtgagtcgtcgggtcagaatagtgcatttgggcgaggtacgagtgacacgcaccatggtgccaccgtggtcctgaccgccgccgcctggttcatgaccggaggaggaacaaagcaacccaaccattgattggctagtgtacggtgatgattaggttcggtgaataccggttggatctctcaatccatgccattgttccgtgaccggagtgtcgtgggtcgggcggcagtattttaaatctgaactgtagatattggggcggaaggataggattggatcacat

SEQ ID NO: 71294 - DNA, 691 bp, Zea Mays
atgatgtgtaatcatatcaacatttgtgatttacatgttttattcatacgttccattacattttcattatttgcagttaatgaatgtgtgctttgttagtgaacctacatgatttgacttgaagacgtactaaatgtgattctcaacttctattcatcacgtgggactatgacatagagataagttggtacatgtgtcatggttcacaggtcatagtgatattggatatcacaccaacaatatatacatgtcttaggaatgtagtgttgaatcaaaccattatgagatgccaccaatgcggtgttatcggtttatctcgaaatgacacacatacttctatcgttagacttaagatcggcatggagtctaggattgcgtaagtcatattttgaagctaccaaatgctactctgtaactaggtagttataaaagtagtttttaggtatgttctaaaataagttgcagggtgcgccgtgtcaagatggaatctgtcattccttctttagggagagatacctctagaccatcttgatgtgttagaactgaaagtgcatggccatgatttgactaatggttagttgatgaaattagttctacaaagagcaagatatggccgagttgatgagggtagcacttgactcgtcttgtacttggctagatgttgtgtggcataaagacatagtattggcta

SEQ ID NO: 71295 - DNA, 499 bp, Zea Mays
acatatcttccaaaatctggtttaccctttctgtctgaccatctgtttggggatggtacgctgagcttcgtatgacatgggtcccaagtgattcttggagttgctcccaaaagcgtgccacaaacaaggctcctctgtcagatacaatggtctttggaataccatgtaaccgcactatttgatcaacataaatctccgcatacttctctgtcttgtgggtggtatgtactggcaagaaatgggcagtcttggtcagcctgtccacaataacccaaatggaatcatggtgcctagaggtagtgggcaatcctacaataaagtccatgcaaatgtcctcccatttccaagatggtatgggaagaggttgcaaagggcctgctgccctcaaatgactggctttgattctctggcaggtgtcacactcggatatatactcggcaatttccctcttcattctggtccaccaatataaagacctgagatcatggtacatcttgtt

SEQ ID NO: 71296 - DNA, 327 bp, Zea Mays
gtcggtgctcagtctatgctcgatgatagtgcgactgacgctgaagagatctagagcagaccactcgaatacatctttattgcggttcagatatgacatgagtctttcttcttctgcctcgatgaggtcctcgctgatcaagaccatttgattgggggtggctgtgtctagggggattttttcaccccttcgtttctctatagctaggcgttgatccttttttgtttgattgggcgaaggctactagggtcttcgtggtcagctgtgaggcaatgcacattgcgctggccggggatgaagtctctctctatgtttctggcgacctgc

SEQ ID NO: 71297 - DNA, 780 bp, Zea Mays
ccttggtggccgatcgatgtggtgctggccgtcgtggccgccgctgccggatggcgaggaggaaggccccttgtccttcttcaacgactcgacgtcattttggagggcagcgaccatgctcgtgagcttctcgatcatcgcagccagatcgtcgttggttttggtgctcataatggaggaggccgacgacggtgagggtggagggctgggtggtggttgggtgacgtcgagggactgatcggaggtgtgggatcgagaggacgaagatcgcctgactcgtgataccaggttgtcaagggcctgagcgtttagagcagggggccctcggctacgaaggtcgtagccgcggttcgtcgtcttctccggcatggttatcccccacagccgtaggcttagatggtagagagagaggtggagaggagataacttgtttgctgccctttattcctgtctccctgtgccgcatatatagccattggcctgctgtcctggagcctttattttaggcaagcctaaacatggtaacactaatcaatcagtaatcaatcaccaatcaatcactaatcaatctctcctttccttccctcaactttccattcttctattttccttcctggccactactttccataggttcctgctgatctcccagatctgcccccccagatcgcgctcctggcgatctgcacgctcctgtgcgcggcgcctgtcacgggcgcgacgctgcctggcgtacgagcgcccgtacatgacatgcccttggaagcgccttaatcagga

SEQ ID NO: 71298 - DNA, 526 bp, Zea Mays
atagcaggtgatggggaaaccgtcgaggctcccgcgcatgtcaaaatccagggcccggccgaagtaaggcaccttatcaccgttggcgatgacaacacgaatggaagagttgttagtgaagaagggggccgaccgtggtcgcgatgtcggtgttgatgaatttgtgcgtggagctagtatccatgagagagttaagctagtgcccatgaatggataccacgacctacatggtgtccgatgtgtgcaccctatccagggcatggagagacattgtgggctacacggtctctggtggagactcctctagcgccgattttgtttcgtccttgtcatccaccttgaggtagaacagttactgacagcgatgtatgtggatgaaaggttcatcccagttgtagcagagcccttggcaacaatgttctgccatcttctcattggtgagccgcttgaaaacatggcctgagttcaccagcgttgctggggcggccgatgttggatgcaacggcggagctatcgtggggcggcg

SEQ ID NO: 71299 - DNA, 372 bp, Zea Mays
aacgggctcaaaccagaccaagccggcccatgaatagggaaatgcacccgctcgcgcgcccgcgttggacaatttgcgcagagaccctcaaggatttgaataaccagtaaagaacccttagcactattcatttgtgtctttaacgtttgcaccgaggcccatcccttttcttttcttcgcaggatcaggtccctgaccacggacagcggagcagctgctccgacgagtttgtaccggccataatacccaataatccgcaatctactttggtctatacctaattctacccctggcgctccactgggaatccccaatttggtcggaatgccattctagatctcggttcactcacaccacggaacttgagacaac

SEQ ID NO: 71300 - DNA, 564 bp, Zea Mays
cggtgccctaacttggctgtcacctaattccacacctaataattgtttcccctcgctcaattgcacaatccgaacccgaaatcgccctgtccacggagacagtgcgaactacggatgaacagaagtgtttccggcgatctagcgcggtctagcttaattgaatgggtcgaggagcatcagtggcatgtaagagtgctgaaacaagagagcagagggcaagattggacctgaagtgcactgaccacggtgagagcttgttcacggtggcggaaaactgatttgggggaactcccaatttggggctctctggtgagcaattggaggaacgagcgggtggattggatgcttgaatacctaacggagccgagggtgtgctcaatttataggacccttgagcggtggccagtgaatttgagttcgcgcggtggcagttggagagaaggggatgcactggcgcaagcgattagtggctttcaccgtggcaagctcaccggcgatcaccggatgggctaaaatgagtcacgacggtgtggttaaagcatcgaggcacgtggcgaaaggttg

SEQ ID NO: 71301 - DNA, 907 bp, Zea Mays
aaactagatcaataggcgcgcgttgcgcgccctacaataatacgttgaaactacaaagaaacgaagaatagggggtttaaacttacatggcatgtatcaactataaaagaaccatttcgagctagattgttgctcaagtattcatctgctacttcatcaggacggccacacttgcatcctttgcttcttcttacagtttacatcaggtcttcatggagaccgtccaataaaaagacgagaagctcctgtgaatcatgctgattaaagccaccgaactgaggagcataacacacaattttttccttgaaatgataaggtggaacggtttcctgtcagtggtccatcagctcaacagttctccaaacgccaaagcaggttcaccctagcttagtaaagtcagtaaacaactttctgcacattagcccaatgcacaatagagggtaataggatattttttaatatctattttggtggtaaaacctttgcaaatttctattgcctaaaccaattggcagaatgcagtcaacagttgacattattggaggatggtatagcttcctctggaacatgtattatgatgtttgggcatcaacattttgagcttataaagattagtctgattaaaaattgaaacgacaagtaggtatacaaggttcctcttatggatttcaaaagcaaatgttagctagtttgcactggtattagtattcattattcagccttcaccttgtgattagctcctgctaaggaataacacaaaggctaacccaccttgcacaagctccaggtgcaaccagtctctaattggcatattaccacgttcaaggtaaagaaagatgcagtctaatgtatcagataagctataaagcatattttcttgttccccttatctgaaggtcaacttttc

SEQ ID NO: 71302 - DNA, 805 bp, Zea Mays
taaaagtgcaggggctctttagtgaaaccgacacgacgaaggggtatgagtaatcactggtcgtcagatcaaaagcccacgaccacgattagatctaattcccccgaaccgctggtcattagatcaaagagcgacgttggagatttaaataacggggatcgcttctcgcccgcccgattgaccatcaacggcccacaatcaaccctgaggtgacacacccaggagctgatctaagccgcatgttcaccatcccacggcccaccacgcttcatccgaagcagtaccctgacccctatcttggccccccctgagatcaacggtccgaaagatccttcttcaacctcccgtgcacaggcagtggtgtgggctggcaacgatggcgccatggccgcagccacccagacccgagcaggggaccgctgactatgcttctcgtcgagctaccaacggggaagacgaaggctagacagatacgagggctcttatcactttctgtcgtgcaggcgacctcggaccattatgagctgcggatccagggcgagggaaaactccgatgagaaattcccgtccacccacggcatcacgagttccgattcgacttcaattatcatcctcacatgctggtgacgctacttgaccagaatcctgaccccgaacgctatccaccattggattcgccgatggcggcaagctttctctctccctcgatctgtttccctgggttatggtgcttcctatccgatagagaggaaggggggcagcccgatatataagtgcagggatgaggttcctcccgggcggagtc

SEQ ID NO: 71303 - DNA, 472 bp, Zea Mays
tagagcggttttacacgggcctactctgacaacaacgcgctggtagtaacagtggctcctgagttccgtgcgcttggtattcggaagttagtgaggccttcaccattcctgaccgcgcaaggaaccggcagagccttcgcctgccttgaacgctccctccgccttaaggcctttgctccctccgtcttagggccttcacttccgctccgtcctgacttatccctcttgttataaatgtaccgagcgatggggcaatccgccttcgccccaacacttgccccccgaggggccagttcaagggtctctttctcctgctgcctgcagagtgataattctgctaaggcatctatatctggcttgtacccttgaaaatttaacaagaatttgtcgtggagtgttttctatgagtcgattgataatggtggcaatcttgtataccaagtcagggttgggccttcaagggctataatga

SEQ ID NO: 71304 - DNA, 1873 bp, Zea Mays
ctcgcctagagggcctccacaccgacttagaatccttgcaggttgcttcgtattaagcgtgttttgtgaaagcctcgtagtgaatccctagccattcacctcagaagtaaatacgggaggcacgaacctagactagaggagatacacgacttgtgagtaaagttgtacaacctctactggatgtaaaaaacggatatattagtcgtgctcacggttaagagaagcctggaccctcacatgataatcaaatttaaagatggagattaaatcgtgaatccttttgattcaagtggttcacttaagcgttttgcttaagtggcttcgtggtgatgaataatactattgattaattgggttttggtaaatacatacacttagtaaatagatgttgttaataaaagtttaaccaactaaaatgcaaaatgccaacctcttaaactctcagcctatccttgctaagctttgcatctttcctcctcttgctgagtacccaccgtactataaggaggagaaattcattttattcaggtaggtgaggaaaggtggcgtcaggttgaccctgttcatagaaagcaaagcaaggtctcacccgagtgacagattttttttggtttgcatgggggtgtggtcttgttctccagggagaatgggagatccatagatcttgatagtctttctcgcaaggtaacgcaacacgattcacataaaatatagaaaatatgagaataaaaatagaaaataacttttacccaaataactctccaaataaaaatttaaagcaaagtttaaaaaaactattgaaggtcctcttaaccacattccaatcgcacacaactattacctttcctccattttaacctcaattttttaaattagatcactcgctcttcccattatacatttcttggaaatattgatcattgttcatgtcttgtcacagaggaacaggatacagttcaagagtagtttatatagcagaatattttatcctgctgttacgatttgaacagcaacagaagatatagaactatctgtacaacaattccgaagaccaaaaagtaagatgaaattcacggaaccaattattgtcccgcgcgaagactgaaactgcagaaatctcagctgtaggtaaatacattctgaaataggttcgaaactgggatttggtcattttcatgccagattccgttcaaataagattttgaggtgcacgaattaagttataaaataaggtttactggtaccaaacgcattgataaattgtaaccaggaagacaatgttgaacttgtaaagcaaacaacacaatagtaacgagcagcaaaatgtgccaaagcaatcaaaatgcgtaccaaattacaagaggttctaggtgaaataacacctaacacgtttgtttaaaaaggcaacattaaaacatacccagcctcagaaggttacatgaattatttgctttactccacggtatattctattctactcacatgtcacaatttataattcgtttgactttttgaaccgagattgaccggttcatcttattcaatttttttgcaagaaaatggaaaattcaaagccatatttaaaatatattatatactaaacgatatcacagtaaaaattaataataattacgattttttttgaaaagccagtcaaacaaattataaaatggaacgaaggtagtagaattcttaggatccgttgtattttatttcacgagtaaataaaagataacaagaggctacaagcatgatcaacaaacaaatgagaaactaaaactaactgcccattaattacaagacaatgaatgaagcagcatccaatgtgatagccaacagcgcttcgattcgaacgtatcaaattttccctaat

SEQ ID NO: 71305 - DNA, 459 bp, Zea Mays
ctaagattgaatttacgagatcgaccccatatgaccggttcaagggataactcgatgtctcccctagcaacatcatcaagctggctacggataactcgtcggtcgaagaatgtcaaaggctggaagacgccaggaagaagatgcaggtagaactcaaggagctagtcttagctgttttcaatgtcgactgaaaccataagcttatctgatagagggaatacaacctggcgagtcttcgtcctgctacaatcgtacccgttgtaagtaaacccgaagacatccaagatcttcgatcttacgtagaggaacaacgggaatagatgcaccaaatcttaagggtgtacaagaggattataggaggttagcacctgcttttgatagatctgttattaccaattttccatcacatgatgcccaaactaaagaagacctacatgacccatcggttgccaatgggca

SEQ ID NO: 71306 - DNA, 808 bp, Zea Mays
atgctgtttcgactctctcgaggccaacctcgaacgggaggtgcaattctggctcacccaaggccatcctcgggcgggagacgcagtcacgcctcgccctcggggcatatggtcttgtcggacgggcttggtcccgtggcaccgagctgctcagttcctttggcacagtaggagagggtaccccatttcaaggcactgacatgcacgatatgctagacatagtctagatcctcttgttgggtgtgttggtcttaccatctccctgagggcttgttttgttatcccctcaatccacctctaaacgaacccctaaccggctaaccgaacaagctagccctttggatgagtggacatcataatcagagttattaaaacctgaagccctttggagctctccccgcatttcgccgtcgtggttttgcaaaaaggtcctctgtcttttcgtgatttaacccgtggtcctcgctcgaacaccaatcatgttcggttgggcgccccaacgcggtccctcgagcaccggtcttgccttgcccccaaccctagcttgtcactgcctcctcctcctattccgtcgtcgcccccctgggcgaacccaccgtcgctcggcccggccctacaactccctgctcctgctttgaatttcttgactcgcttcaccgccgcgacgggcccctccaccggtaatgcctatccgatcctcacgctctctcctacattgtcggtgtctatctctttctctctctctagggacgtacgcttgttctgtcggtagattttgtgtctgtcgtgtgagcggatcgcgccagct

SEQ ID NO: 71307 - DNA, 337 bp, Zea Mays
cacccgagtgagtagaagtggcaggcctcatcctggaggggaacatatcctatgcataatatcaccttcatacacatatgcacaaaatcaatttggacccttcgtgcaacaatcttcaagcatcatctctaatggactatatataggttgtccactttcaactagaattcattagggtaccagtttcatctcatactggccctagaaactcctttttacccaagaggagataaaaaaactattggctcaatgctaggggacaagccccaagtgaggatgggttcataggagccatcttcaagaaatgttgggacatcattcaacacggtcccacaac

SEQ ID NO: 71308 - DNA, 582 bp, Zea Mays
gagacagacataacgagatgctacagttctcacccaatgtcctgtcatgcacttgtgttccctttgtctctgagtgtatgggccaacctaaccacgtgtcaccaggtccaacatttggcgcccaccgttttgctacgaagtccaatcccacgatgcctcccaggaagaccacttgtgtcggttcactagcggatgatgacatagcgagggctgcccttgcctccaaaaagggcaaggttgccttcactgacgatgtgccaccagttgatccaagagccactaccgagccacaagacgcaggtcaagccgcaaaataaaaacagctagccaccaccactaaactcgacgatgaagtccacacctctagcttgaacaccccaccaaatgatcccccaatccaaaaagccaaccctaccaggccacaatttggccagacctaacaaaaacatgtcatatgtcccccagacttctacatagcgacaatccaccagcaccacctgctgggaatgccccaccaagatgtcgacgaagacttctaggattgtctagacctcgacataaacaccgagcaacaactttaac

SEQ ID NO: 71309 - DNA, 360 bp, Zea Mays
tgacaattcttgtccaactaaattttgaaacatgaaggcttcgtcctctgaagtttcgtcagcgatttccttttctttcccaaacactgcggccatggtctcttcggcggcagtagtagcttcttctgtggccatgtttaacagcattttgtagatgtgttcgattgtggtttccaagttcaaatcttcggttgaggtagcttcggtagccgcgatctccgaaggtgcgacttcaatatttgttatttcctcagccgctggtatcttttgagctgaagctctcggtggtgtcttgtcaatgacttctgtcactgcgatgattctttgtctccttgttttagttgttttcttcgttttttc

SEQ ID NO: 71310 - DNA, 1086 bp, Zea Mays
caccacttcaatcattttcatgatgaagggggcatgtagacatcccttgagaggaaagcaagatgcatggatgatctcttgtcaaatcatgtcaaaaacatttaagctctcagtgctatttggtttcatgaaggaaagcaggactttactttcttctaggttgttcatctgatttccccctttggggatgagagtcatcctgcagagagaattgatgtacctgtagtacttgtgtagatttgttgatttccagaattcatctgtttgagaaatgtgaagatccttggcttcatccctggtgggagcgcgaaagtcatggatcttgattttgtctccagagatatcctcatcagtaaatcccaaaatatgagcaaatcttctgtagctcactttataccagctcccttcaatgaagaaatttagataagtaaagttgtatggactttcctcatcagcatgtttaatccacaaagtagaataaaactgagcaatgatttcatcattccaatcatattggaatgccatgatagtcttcatcctcttttgctcacaggccctcaatgtctgtgtcatctcaggatccccaatagcttcgcacctactccagttaataaaacgctgatggaggataggctggtgcttctttggaaggataactgaattatagaaatcaacatgaaggagattccagaagcgattaccatcaatcctgacatcacgaacatggaatgtaggattttggaagcgcatatcttgaagaagggcagaccctccgctggcactgaaatcaataacatgttcgttggcggaacgacgggcctgcgctttgtgaagcactaacccctggataatgggggcatgagcaggagggagattaacatcatcatcctttcctcccttgtcatcacttgtagcctcctaggcctgtggattcgtcgcgggacgagaccgaccggaggggttccgagccgttcgtccgcgaggtccatgagacccagaggcctcaccacctggcatgacattgccagatccgcgcccacgcatggatctggaccgaggaggagtgtcttcacgaatttatggggc

SEQ ID NO: 71311 - DNA, 395 bp, Zea Mays
cactgacctgctgagattttatattttttcgtcgggtctaggtctttctttgcaaactttgtattcatctcagacctccagtttcggaaattgattgcaaactgcttcatcgtgtattttttcacgagttcttctgaatcccgaggcaaaacgaacctcgttattagcttattccacatttgattcttgacatcatctgatacatctctccactgtcggattgtgatgtcaagattatctctaactaagaacccaagtgcattccggaacttaggtagtgcctcttctggagctaggggctgaccattcgggctcacgtctgcgattttatatgtcttgtcaggaaacttgtttagccccctgtcacctctgtttcgatcactctgcttcctttt

SEQ ID NO: 71312 - DNA, 423 bp, Zea Mays
cggaggtgaaggtctcagtgatcatcgagtcacccaactataagactctcacaatggaaaagctttttagcaagctcaagtccatagagattgactatagacctaggccaagattaagaaccccggtgcacccactatggcctgatgtctcgaggtggctcttcttctaaacttcacctattatgttttctttgtcttctttgttgaccatcatagaggagcaggtggagagccttggggatgaggagctggcgcttgttgccagtcgattcacgcagttccacaacaaccgtctgaatgagctatgtggcaggtccaaggatggatgctataactatggcgagcctgaccacttcatcgccagtttccccaagataaatggcaagccggaggctggcaagctgtcacacccagttttagggg

SEQ ID NO: 71313 - DNA, 542 bp, Zea Mays
ccctagacgaacgagaggacaccgagacaagaggagacgcctagacagacacctaggcgcaaagacgacaaactgatgggaggaaggaggacgcaccgaccaggactggaggcaaaccaagacttatttgggacaacactctgtagctcttaactccacctcctccacaacaagagacttgggagcctctccttcttctctcgcccgcttgtaacccctactacgagcattgatcaacaaaagtgtcggtagagcaagccgacgaaggccggatgtatggacgttatgtccgaaccaatataaatcttgagcccatcgtgtataccatctgataccagaaacacaaacacaaacacaaatttacttgttggggttagatccgaaacacgacaattatatactaacagtctaactattatatacctaggactggaccctacaaatttggggactcgagggggcgcccctttgccccaccctcagctccgacactgcttgagggaagggcaagcaactaagggggtgtttgatttgagaaatca

SEQ ID NO: 71314 - DNA, 386 bp, Zea Mays
aattttaaccaaagcttcaggagtaagctgatgaaggaatatctcaaccctcttcaacacttcgactaacattctgtgcaggggaaagcgtagcccagctttcatgaaactttgaaaaccactacttcgtctgcctcgggaagaggaacaatgctctctcctctggctctcactctggatatatcatgaaaatatttgcccttcattgtctcaatttgtcctttcttgacagtacattttccgaagacaacatggcttggtctccatggccgatctttggcatcatctgcaccaatatcaacagcaaaatcatcaccgtcctcagaatattcagacagtctagcaagaatttcgctggttatcttctcaatgttggtcctttcctt

SEQ ID NO: 71315 - DNA, 627 bp, Zea Mays
tcaagcttcgcttggaatgttctctaggtcagctggagagatagtgaagttgggcttgttaacatctctcaaatgcttacacccagtttttgcaagtatagtacctgtccctcgggcgaccactagggcgcaaaaatctccatacccctccatcatttcgttaaattcattgatttatttctccacaaactcaagtgccttcggaatatcatcgacagaatatttctcttttcttgacattgctccgactgaactaaaaatctcgcgcagatgaagggagcattgagttgcgaagctagagcagctgtgtcccaaagcattttgagggcttcagataatttagaacttttctcagcctcgactttgactttatcctttaaacctttaacctcatgctcataacggatcccagcattgaatgtgcttcttcaagctgtttgttttgatcagaaatttgagtagcttgatccttaatccgaaggtgagcttcgaccatgtctgctccagcaatcttaatctttgaatctttttcttccagaagattttcaagttctttcactctttcttccaagttactgacaacaagctcattcttcctatcttcgtttttcggttgtagctttaaag

SEQ ID NO: 71316 - DNA, 613 bp, Zea Mays
ctaacaaattgaacattcagctatctggtggttgaactcagagaggcgagatgaactcagagagagatttttttgcggttaagccgcttttttctgatgctccgattgcttacagacacactgacgcgtgagaactggactcagccacactataaccgtgccatcccacgattaagctaagcacccgttccactgcaccactaatctcctatagaaacgcgctcgaccattgaccgagctcaacgaactcggctacatacgaggacttcactcagactgaacaaacaaaagagaaaactctgaaagtctgacgaaactgaatgagaacaaaacagcaacagaaataactctgaaacgctaacactgcaatgactgaatgacgactgaatcttgctatcaggaagcccttctcgagtagtgggcggctccccgctttcccaccgtggcctgctcatggcacactgacgagggaaaattttatcgctcggccccgatatttttacatatgggccaagaatttcgtccctttttgaaactgggcccaaataagacgcagcgcaggcccagttgtgagacgtgagctaggttttagtcgcagccgtccgcgttcacc

SEQ ID NO: 71317 - DNA, 616 bp, Zea Mays
actaagtctagcgaaggtgatttggtccggctgaagtatacattcaggtttggggataaattcgatgaaccaaacgacgactggctgaaatgtatcgaagctacaagtgatgaactgcttggagcatattccaaggcagaagataatgcactgtctgtagccttcagaggtcgggaaaaaaaagagaatgaacatagtttttgacgccatcggctttgcctaccctgattaccgctaccccctgcagggacaggggaagaagagaaacgctgctgcttcggccaccccagctgagcctgtgccgaagggcaaaaagttgaaggttcttacccaccggccgcgttacattgaaccggccgaggtgcctgagtttggcagggaggctacttcagctgctgaaacaagagtgacttttccgattgcgtagagcactgaagagccagttataatgccaaagttaccttcagttaagttggttgagacaaaggctgataaggataagggtgaagggtcgaaaattgaaaaaaaacaaaaataccagagattttgagcccgtcaacagagataacagtgtcgaaagcacaaaagggttctaccgcaactcctaagaggagaa

SEQ ID NO: 71318 - DNA, 699 bp, Zea Mays
ctgaagggagctctgactctgctgactgtagcgtgatggagtgggtccagattgtttattgaagcttggacccctgggtggaagcccaaagggtcgagctctctggtgacgttcttgctgttgcgctcggaggacttggaatttcctcttgatgtgccctttttcttcctcttttgccctttccacttggatagctttgttggagaggtgagagaagctgtggaagtcttggctggcgaggatggtcttaagctcgggtcttaaccctttcagaaaacgggccatttttctagcctcggtgctgacatcctcgggcgtgtagcgggccagctctgtgaacttgtgcacatactcactgactgtccttccaccttgagttaactcccggaattcatcctccttgagttgaactatcccctggggtacgtggtgttcacggaaagctacttcgaattctgcccaggtagcatctctgacggcttcactgaaagtgtcccaccatgctaaagccattcttgaaagctgatgagctgccagttgaacacgctgattcttgggacaagcgatggcttccaacttcctcttgatcgtgcaaagccagtcatctgcatcgaggggattgctggaccccgcgaacgtgggaggcttgagtctcaaaaattcccccatcctgtcatgtggccttccaccgcctgggcg

SEQ ID NO: 71319 - DNA, 421 bp, Zea Mays
ttgagatgaaggctgataaggataaggctgaagggtcaaaaaatgaagaaataacaaaaaagccagagattttgagcccttcaatagaggtaacagtgctgaaggcacaaaagggttctgccgcaactcctaagaggagaaggatggcaaatgtgctagatgttgtgttagaaacagcaaaaaccttgagtcctgctcctacaagaaaaattgctgaagcttccaaggcgcaacccgaagctgaaacgaagcaggcagaagttgaagctgcaacaattcaagctgaaaccgaagctgggccttgagtgcccactgagacagagcctgccgtagttgaagaaaagttgacaaagcaaattgcatctgaaaaggttgaaactcttgctcccgaagcttcaaaagaaagcactgagtacatcat

SEQ ID NO: 71320 - DNA, 494 bp, Zea Mays
tggtaaacccaagtcagggggagctatatcatggcttgacggaggaagattaatcagaacaatttgaagaacgttgtcaggggtgagctcagccccactagcggataccagacttctcgcaactagctcaccgacatccaaggcgacttgcttgtttgaagccgtagaagcatgcatcatcgtcgcctcatcgaatcgaggtggagatgacccaacatggacatccatgtaggtgtgggaaggagagctcacctggacaccctcgggggctaggttgcagcttgcgctacccaccagagctgaatcactaccggcgacaccctcgggggctgggttgcagcttgcgctacctaccagagccggatcactactggtgacatcctcgggggctgggtaactggcaacaccaccctggggggctgggttttctacagcagccacctctaaggctgaaggctcccctgtcacctccatgggagtcaggcaactcggac

SEQ ID NO: 71321 - DNA, 559 bp, Zea Mays
gctaaggcagtggaattcatacaagacataatattcaggtttgagataccgaatagtatcataaccgacctgggatccaatttcgcaagctcagagttcttcgatttctgcgaacaaaaaaacattcagatcaaatatgcctcggtagcgcacccaagagccaacgagcaagtagaaagagccaacgggatgatattggaagcgctcagaaagaaagtcttcgacaagaatgaaaagttcgcaggaaagtggatcagagagttgccatatgtcgtctggagcctgagaactcaacctagccgagctctgcatggaaacactcctttctttatggtctatggttcggaggcagtgctacccgctgatctcaagtttggggcaccgagattaatctttgaaaacatagcagaagctaaggctactagactggaggatgttgatatattagaagaaaaacgattgaatacggtgattcagtcagcccggtatcagcaaactctgaggcgctatcatgataaggccatacggcatcgatccttcatagtgggagatctcgtcc

SEQ ID NO: 71322 - DNA, 858 bp, Zea Mays
ccaccccgagcgcgaatcctggcgccggtgacacgaatcacagcgaggcttcatcggcggtgagatgactgagctggcattctgatccccccgatagcactgtaccatggaggagttcagttaaatgaacctgacagccaaatttgaagccaagttttctctcgatttctgatgataactcataccaagctctgcagcaaagttgtagagcaatatgccatctacaatattgccatatgatgttgccccaaaaagccactgcatctggtttaaaattgggcttgaagttcagggcatccacctgtcagtctgattttcagacctaatcagcctgacagcctgactttaggcttaattatctctggattttgcttaacaactgagctcacacccttaagcaaagttgttctcctatgattgagctacaaacttgatgtggtgacctagggcaaaaaccctagagtttgaaagttacaaggctccaaagttgagctcaccaatctgaaattcagacttaggctgaaatcacaactagggtcctttttgcaaatgagtccaaaacttaaggtttggcttgtaaatctttccaaatgtgaaccatgtgactttatatgctttatcatggtaatttttacactttggttcaaatgtgcatagtttttgcacataggcccctagggtttgggatttagggttttccagggttcaaaatgggatttttggtatctaggggtataaaagtgattcaagttcattttttggaacattttatgactattcccctaaagcttttaggttttctcaacttgggttaagttttacccctttgatccttatttagggttaagttccctaccc

SEQ ID NO: 71323 - DNA, 599 bp, Zea Mays
gctgatgatctttaccatggtacagtgacaaaagatctgcggtgccgtgcatatcaccgtcggtgactcgccgccgcgattcgtgtcgccgctggtggtcgatctcgtgctacgattcgtgcggaccgtgtggataacacttggagaccaccgccgtggataaaactttagccgctaaagaagtccagccaccgtaccatgttcaccgtggtggaaccgataagaacaccggtgaaccgccgcctcccggctttgtgccgcgtggctctgcccttccacctcgtcgtcgtgactcctcacggttgtctcatcgatgccggtgagcccgccacggcggtggacacgaaaccgcgaagccgatgaccttccttatctccggccgccgcgcgtcgtcgcttaaattcgcggccaccgcttgagggttctataaattgacctcgctcgtagctccgccatgtagtcaagcaactcctgtatctatctgtgccctgaattatctacccgaaagcttcaatttgagatttcccccgaatccacccaaaacatcgcaagaacctagctcatcgtggccagctcgttctggtaagtccctattcaat

SEQ ID NO: 71324 - DNA, 761 bp, Zea Mays
aataaaatctttttccagaattttgaaagatttttccttctctttgtagtcaaaccatagcccagatacttcgaacctaagttgaactatctcttttcgggcagattcaccctcaacatttcttttgttacttagttctttactcagaaacaaaacctgtgaaaagccaaagaaaaaaagagaggttagcaaagttttatatcagccttacacgaagtttaaaagtttaatcaacataaattacctccaaatatgtgtaagccaagcaatcagagaagttttcggaggacatggttcatagcatggcctctagcattgggaaaccaatattatacgtcatgtagcggaaaacttcagtctccatgttatccgggcagcagtacaagtaatcgtcccgccctccccgaagatgagaccctgaagggtatccaagttgttcagcaaaaccgatagcttcggccaattgctttgcacccataacttttcctatagcatgatgaaccatgtaaatccgtcacctaaattttggtcaaaaggcccttctccaagcagtgtatcatcttcaatagcctttttggcctcttcaatcttagcaggcctattacctttatcctccattggaacagctttggaggaatctttctcttcggctactacgatcaccaaaggcgtcaccactgtagccatctgtttaaactccagactacttggaatagtcacatctgcaggaggcggtgcagcacactgcgtcctcactcacg

SEQ ID NO: 71325 - DNA, 352 bp, Zea Mays
ggtgctatcatcgtagtagtaggataggaggagtacgcagtacgtggcatcaggtgttcctccattcactttatttgacaagggctcgtgtgttttgctgccgctgggatgccgcatatatgcaatggtacttgtgtggatcgatcgataaaatctgtaacgacatctacctctatcattggttcgatctcggcacattttaaggacacaaaccacccagaaattaaagcgattgcaacacgtacgggtgtaaattcttctctgcaagctgttagttagaatggtgcaaggtcaagccatacatttggtcgtgccttttttatttctttatggctatgaaggtatttcttca

SEQ ID NO: 71326 - DNA, 749 bp, Zea Mays
ctatttggttatattgatttttacaaaatactattcagcaaatggtgagcaccttgttcatcatattccaatgcccaactctaggcaagcaatcattctctctgccagttttattatacttgagcttcatcataagtaaaatataaaatactaaatatgttgcaagaaaatacgactggtgttagttatcaagcccacaaagagttgccccagtttataaaacaggagtatattaactatgacaaagaagggtaatatgaacaataaaaaatacttcaaaagccactactgcaataagagtggggcgacattggacctcttaccctttatattgttcttttctctataatttatcttcatactcgataggattttccccccactgttttcgctaaaagaaacatgagtgggtttcaacctacccgaggagcaggtaaaattcttgcctagattgaagccaaacactcactgatattaatgccaaactctttagaatatggatcttcatggtaagagttatgattcaccatttgtgggcacaaaaaaggttgtcatttgcataagcataatgaagtcacaaaggaaaggagaacccaaatagaactaaaacatatcacctgaataatgtcacactatcaatcatgtgggcgctagcatgtctcctctaaaagagctcttatctgactctggtttaatctctttacctatgtcccttcactattttgcaggcctaagcaaactcagatttt

SEQ ID NO: 71327 - DNA, 883 bp, Zea Mays
ctgtaacccaccatcgacataatgggagactcagtccgtcacctggtacaaacctgagcaaccggaggaaaggagttgaaatagactccaagctaggttggctaattctaacttggatgtaggcaagcattcaggtatggctgaaccacaggaaaaaagcatgtctttgtatcttgttctgattcttgttttctttgctatttgcacttctgctctcatcttggtgtcagctatttgtaaagtgcgggatattgtgagacagatactggcattccgttgcgatttacttgagctgatttccattccgcttacaatcagcgcttagggtagaataagaaagttcttgttttctatatatttttttgtctattcaccccctttaggtgacatccagatccatgttcccattgaagggaatttacacttatctaggccccagtcctagttcccccagtcgacaaggaacctctactgctctacatcgtggcaactgaccaagtggtctgcttcgtgctcatggtataacgataggatgattcatgagcgagatcctgattggtgctaagatccgctaccctcaaatacaaaaactcctttacgccatcctcataatcaagcgaaaactcatgaactattttgaatcgcaccttgtgactggtcacctcattccccttaggcgaggtcatccaaaacccagaggccaccaggagtatcgcaaagtgggcccttgagttgatgggacacaatgttgcatatgccccctagacgataatcaagtcataggccctcgtcgaggaaagctatgttgaaccgttagttctaaataagagcatgtgttgtttcattgcaggattatataatctagcctattttatatagatta

SEQ ID NO: 71328 - DNA, 409 bp, Zea Mays
attgaagttggtgtcaaaccttttctgtatgacattttctttaaaattgacaacattactgatgaaaggtggaatgatgattctattaatttgagtaagagggcttcggttgatagacaagggtttggtgacatctctcttggcaaatatgctaaaaaggccaaaagtggggatgaggattctggtaaggatgttaagggaaaatctcccttaaaattatcctccagtcatgccaatgttgcaggatccttgtctgaacaatctgaaagtatgaaaatggggaaaggttccgaaggaactaaaggttaccttgatagtcagggtaatgaggatgaagaattcaatgatagtgaagatgatttgttggattctcaggagttggatgaattcatcaaggatgatgaattta

SEQ ID NO: 71329 - DNA, 462 bp, Zea Mays
gtttattagccacgaattgttagctattcaatatataatacgccataaactcgtttctattcgcttcagtcgcgtcaactctatagcaacgtcgattttgtagtagtaatgttatctagtcatgtcgcaagtttaattgattaattaattatctatattttcggtattctatagttattcaaaaacaaccttctaattaaaactaggatgtagtttttaactcggacttttataaatataaatgttaattacttgattaataccggcttaaatacttttaattaattatttgttggttgttgttcgcgcacgacatcgtttgcgcgtcatcgtgttgttcgcgcgtagtcgcgttgactcacgcgtatcgcgcgctgtcgtgtgcattgtctcgcgtaccgtagtgctgtttcgcgcatgccgtcgcgtgtcgttcgcgagtgtcgcgcctgccgtttgcac

SEQ ID NO: 71330 - DNA, 978 bp, Zea Mays
gccataagaagtactttaagagcacatttcctgtttttcattgacttttacatctgtcttggctatgttagaggggggaatacatccattgcgtaccagccttttttctatggtgcacatgccttcgaggaaaaacacacagagggcttgtaggtcctgcaatgaccttgttagtgatcaattcccctttgacctccccagaacttgatcctgggcaaaaatcagcacgtgttacacctttcagcttatcagtagtgcgagtccataatctgtatcctgtttttcccacttgaatagtaggaaaacctggccctatgtctataaagtttgcactctgatgacctgcatcttgctgaccaacctctccatctttaacttggaaggtagggttccttcctccagtcacacttcaacttatcgacggaaaatgcttctattctgatccaagccatgttttccagccctcttatcactgtcatcagatatccttatgctgtcaggtttctgtagttaaaatttttccttgtagtctttagacagttccaggatctgtgctgctgacaccatggtctgtgctgcttcaatatataaagaacagcagacaaaatcaagaaaccatcgtaactaaaatacatctgatttgttaacttaacaattctcaaactaattgtttctgagtcagatcctcgcatacacttggtaaacatactttcaaatgcttgagacgtatttagtgagcctaaatgagattatgcattcttcagaatatgccagtaggaaaaacaatgttgcgtattagggaaaacctgtttgactgcctccataatagcttcatccggatcagtgaatattgattttggcgatcgccctcccattgactccaagaatgatttaaatacccatgcataggaagttacagtctcgtctaacaaaaacgcgcagccaaaaacaacattctaccaatggtggtcaacacca

SEQ ID NO: 71331 - DNA, 392 bp, Zea Mays
tacaaatgggttccgtcgtaactcctaagaggaggggaatagtaaatgtactggatatgctagaaacaactgaaaccttgaatcccgcttctacagggaaagttgccgaagttcccagggtgcaaaccgaagctgatactaagcagatagaagtcgaagctggaaccgatgctgggcctacagaatccgctgagaaaaagcctgccgaaattgtagaaaaggcaacagaagaaaaggccacaaagcaaatttcggctgaaaaggttgcatctcctgcttccgaagctttaaaagagagtattgattacatcattcgccatgcttcgggaacaggactttctcaggaaaaaacgagaagcacaacattatgcccaaaaattgaaatacccgaa

SEQ ID NO: 71332 - DNA, 1715 bp, Zea Mays
tcctaatcaagcgcaccgtcggcaacctgaacatcttcgcaacctccaacattgtccctgaggatggtgctctccgggccatcgccgaggaataaatgtggaggggccaacatcttgctccaagcatgacgaccaccgcagttgccttttcttcttctcctcgacaggtgcggctagatggttcactcggcgtgaacgcttgcgacgagcaccttctggtttttgaatctcctcgccttcaccaaagtcttgcccaatcgcaactgtcatcggctcagtgcgggcaaagtcagatgattctctggccagtaggataagaacatcattcatctcagcatcatctatactggatgacatctcaaagtaagtctgcttctcaacctcaggaagattttggaggggagcaatcaagacctcaatgtcctctgaagagggtcgtactctatggcccgggctatcgtctcgaaccggaggattggaaacaaaattggagaagggactctgtggaggcaggttccaggcagagtaagataagggggcgccaacattcgaaaccctgcccattagcatcagatcaagtcatcttagcaggtcctcattgggaatccgtctgtttgtaactcgagtagaattgttgaccccagtgtacaagtaagcaggatagactctatccttcaaaggttggatgttcttgaagacaaagtaagcgaccacggcttccgcagttaggcctctgtccttcagcgagcaaattttagcaagcaacaccttggcttcggctgcctctgaataagtgggggactctacccagctgggcatgcgaacgacgagttgcctctctgatcaaggggggacttgttgtgattctccatggtgaaccactcgaggcgccatcccttgatgctgtccttgagagggatatcaaggtattccactttcctcccctggcgaagctccaaactggcaccaccgacaagctgatgttgtcctccagccataccgggccgacagtggtaaagatacctccaaagcccaaagtggggaaggattccaagaaaggcctcgcacatgagcacgaaaatggcaacttgaagaatgaagttaggatttaaatgtgtaagatttaaatcgtagaaatcaaagagaccgcggaaaaatggagaaataggaagagcaagccctcggatgaggaacgacacaaaaacgacagcctcgtgggtgtcctctgtcggaacagtgaccccgcgccagatccgccaagaacacagttctttcggcggcaaaaccccagtctccacaatatgcaaaagatctgattcagaaattatggacatgtgattaccagcgaatggaagctggttgttgggatcaatgggcggaatgatcggaacagtggcgctctgtctcttccacttgggagccatcacaatctctcgggtggaacgagcgggctcgagaattcagaaaacagaaaagctgcagaggaaaaagtaagatttagggttcaaaactcaaaaaggcacgttggcacgagtataagttggctccttaagtcgggcattacctctaaagtgccagatcataactcggaaaaataaggatcgcaaccgtcaatcgggaattacctctaaaatgccaacaaactttcaagcacacgaacaaaaagcaagcaacagtggttaagtggagtaacttcatccttcattcgtaatggg

SEQ ID NO: 71333 - DNA, 356 bp, Zea Mays
catctttcttcttgttgtagaatttcttcttcttatcatctccatctttgcccttcttcttcttgttagggcaattcatggcgatgtgaccaggttccccatactcaaaacactttctatcaatgaaagcatttcttcttgatgtttggcctcttctaggttgaccgttcttcttcttcatgaatttgttgaatttctttacaaatagagccatatctccatcactctcactttcattttcttcatcatcactatcttctttttcaattgtcttagaagccttagctttgagagcgattgactcattcttcactttctttgccaaacttatagcatcggcttgagatttcttgaat

SEQ ID NO: 71334 - DNA, 322 bp, Zea Mays
gtagtgaagtggtgatccactaactaatgagggatgatgttcacccttactcttgggtcattcaagatatcttatggtggtatccttgatactcgaccaggaatgagactaggttatgtgtagaccttgatacccgattgatcactgttgaaagctaaagcatccacaattcttcctctaggaagatgaagcctgattgggaatcctgacaaagcatcggttgactctaagcaattgagaggagtcaccaaaggttatgaagaactcatcctcgaataagactggtagtgtcgatggaggaaatgtcacaacatgtttggcc

SEQ ID NO: 71335 - DNA, 486 bp, Zea Mays
ggagactagaggttatgtgacggctgggtggttgtataaaagggaacacgggaggaggatgccaaacttgtcatcaactgtgttgcaaccgagcgagagaggcgattgcgaatatgacgagggtaaacacgagcaacacgacgtttgcgaggaaatacattttaattatcccgcaaaaaggacacgagatctagaacaggctcgacgagaggaagaaatatatgttatcgtgttttcgaaatactaaatttaggcatttgaatattagaaaggctgaaattcatatttaatacccgaagaaagttccgaagattccaaaaactctcgggaacatcctcgagatattttaacatgtttcgataacattttgcactcataaacactatgcatcggcatgaatgcaacactcaagcacctctgaggttttattttactaagcttacacctagatataaaataaaataattctccactgttaggaaaaag

SEQ ID NO: 71336 - DNA, 357 bp, Zea Mays
gactgcacgtgtattagacagaaatgcaggggtctcggtgtgaaagattccaagacacagggcgcccctgtcacggacgacggtttggattcctgaaaacccgagggcttatctgcaaaatgcacaggccgaaggggtgtgagttgtttctggccgcacgatctgatttggacggtgctgattagacggcatcaacaccgaaccggtatgcgatcatggccccatgattccagatcaacggtcggatcgcaataatgaagggcgcggtattgttgtaatctggagcgttcatcattcaactaacggtccatgcctatcctaactgaaagggtacgcgagatcaatctgtgccgtcca

SEQ ID NO: 71337 - DNA, 829 bp, Zea Mays
gaactccgagctggtgaagttggatcctaggtcagtgatgatgctatttggtattccgaacctgaacattatttcctagataaattccacttcctttgctgaggtcaaggaagtaatgggcttgtattctatccccttcgtaattttttcaattgcaaccagtatgtgagtataacccccttgagcctttttgaaaggtccgattatgtccagcccccagcatgcaaacggccaggttacaggaatggtctgcagctgctgttttgacaagaattggcacgcctcgcacttctggactaactcgacaacatcactcttggtgattggccagtaaaacccggatctgaaagcttttcccactagagtccttgatgcagcatgcacaccacactgccctgcatcaatctcatctaacagttgtcttcccatagctgagtggatgcacttcatgaggacccctcctgcgcctcttctgtacagtaggcccctatgatggtatagtggactgactgtcttgcaatgtgttctgctgcagccttatcatccggctcttcttcattctttatgtctctaagattggctccctccagtcattgggatctgcctctggctgactcatggcattgcattcttccatctggtcgtgatgatgcttggttgttgtatttcctggatgaaaatcccaggtggagcttgggtctgactggatcccagttttgacaatgcatcagatgccgcattgcgatccctttccatgtggtggaactccaatcctttgaacttgtcttccaacttatgcacgactacacagtatttgcccattgagtcg

SEQ ID NO: 71338 - DNA, 621 bp, Zea Mays
acggaaatcgacacctgagccaggtgctctggcacgaactgcagcatcttccgcactaccaaggtggtgaaatcacgatggagttgttgcgtgttggcctaacacacccgttgaacctcaatgcggatctgcttaattgacgcccacgttgttgtcatcattctcctcttgtaaagaccaaccaacatatcgagcgacagaaagcgcaggagcccaacaaacgccaagcggtcgtggaagtagacgatcacctcgtctttctctggttcgacgatgtaacaccaccctgtcgcgtccaagttcacctgcatcaacattgtccactcctggtagttggtgcgcgtgagcatagggaactaaattcaggcggcggatgtctccacgatggtgcgttggatcatgacctcaaggcgctctctgcgtggcgttggcgagggcgagacgtggcgacctctcgtcctccatgacaatcgtttggtggtaattgaaggtccgacaattataaaccgatcaccatgaactctcaagaacacgataacacacttaaatttcttgtgttgtgtaaccacaactattttttccttatattagtcatctatttatatgcatctcgatcctaag

SEQ ID NO: 71339 - DNA, 574 bp, Zea Mays
cgccgccagtgagctgtgcgcctggattcacgccgccgttgtgattcgtgctcatcggtgaccggataacacttctgggtaaaagatcttcgccacagggtaacaccggaggctggccgtcgtacccctgttgctttgcggccggctcagataagttcaccggagttggccgcccgtcgatcggatgccacgtgccctgaagcttcaccatgtcgccgtaaatcgctccatatcactagctcgtcgctggtgagtccgccacggtgaaagccactaattgtttgcgccagtgcccttcctcctctccagccgccgcgcgtctccatcaaattcactagacaccgctcaagcacgctataaattgagcactccctcggctccgttaggtaatccaacatccaatccaaccgcttgtgtccttaattactcaccagagcccacgaattgctcttttcccccaaaccggtttccgccaccgtgaaagaaccctcgtcgtggctagcttgttccaggtctgttcatactctctgctcttccgttttagtgtccttaggttctcctaatgctactcgac

SEQ ID NO: 71340 - DNA, 956 bp, Zea Mays
ctagtataatctagcacaggaaatgtctttttgagacctttgagttgattattacttaagttagcttgaagctcggggactacatctgcatcacagaaaagaggggtctgttgactcggtagagggaacaaattatcagtgggtctcagacacgtagtcaagattttcaaaattgttctcaaaattgacttgagtctcgggggcttatgggtgatagatatcccctaggacttcataacccaaaatggtacatgggccattaaagggcctgagtgtgtcagacagttaatttcgtgggttacctgatgaactcaaacctagagacaacacatgcgagccaggaactctatctcgtggggtcaccagtggactcagacacatagacggtacaaggcttggactccaagacgtcaacgttcgtagcgatgttttctccgacatggccaacacatagccctgcgtcgcaagatagtcgtagcggttgtgtgtacatgcaggaagggtgtcagtgggtggtcttgatctcgtctctaggatgcagcgagtgggggtcccctacatagacgtcgagcagacggtagtcgatgcatttattgttctattcctcatacactatataacctcaataaaagagaaaaatcatccacgtagcatacatgactagggttacggctcccagcggcctgaacttgtctaaatccctatgttcagtcgtattgatcacgagctacgatcgatctcgccaccaccaaaaaacaatgtgtgatacacctagtaatgtgttgctggttctaaacaccgacactttcttaccaaaaaactatttttacatcttttgttattaaattatttactatatcagctaaatgcttaagtgctgactaaattttagttcatgtcacatcaaacatttaaatgttaattataagtattaaatatagactttaattagattt

SEQ ID NO: 71341 - DNA, 493 bp, Zea Mays
ccgcctgtgtagaggctaactggaccgcatgtatagaggtttactgtactagtgacttggcaagtcgcttcgacccctgccctgttcagtccttgcatgcggtggatttattgcacatgcaaaagggacttactacgactgtggacgaacatatcaacaaatcttgcgtttggtgcttctccccataccatctggtcagggactaccatgttgaggtcaggtgccgtttttgctttttcccaggacctattgaagccaattgttgtaaaaagcgtgtggctagacgttgtacttggaagccccactacctacgataaccggtcccactaaatcccccggtaaaagcgtcattttggcttctgacattggaaactattctctctctattgtggagaaaaccccttcatcttctagctctctcaccagcttttttttgctctcttgcagttccactttgcagttctcaccagtgcctctcatggctaacttcctg

SEQ ID NO: 71342 - DNA, 279 bp, Zea Mays
gttttggtccctacaggccgataagtatttttggccacccatgagctttagtccacgttttcatggctgaacaaccattttcatgtgtccactctgtgacctatgttttgctcccctagggacggtatgtcatttttggccacccgtgagctatagctcaaggttttatggttgaatagtcattttcatatgtttgtctgccacccacgttttcataccctaaggccggtgaggctatttttgtcctcctgtgacctatagcacacattttcatgaccg

SEQ ID NO: 71343 - DNA, 576 bp, Zea Mays
agaaaccggtaaatcccctcccatgtcattcaccaccatcctctatgtggttcgcatatctctgcctcgcgctaggagcaccagaacacgggggcgccgctctctggcaaagtaccgccgctggagccgtctccctggccaccgcgtgctggcttggggaggatgacggagtgactgccgttgattcaaattgaacggtcctgattagaagccgcagtaccccttcgcaagaatcgtctcaaccgttggatcgcgatcggttggtcagagggtgtcagggtattaggaaatatgggacgttggatttcgatccatcaaccggtattgaataccgattcggtcgagtatgcacctaatcctagcactcggctttagatcggacggctgctatcctcctgtaccccttcacccaggcctttttgcacatgagcccctgatttaagtaggaatcaacctgtcgtccagtggaactattctctgagtcttagaaatatttgcaccgtagcccctgcacttctcagtatttgaggcccagtccagagaagattaaaaatagataaataattatagaaatta

SEQ ID NO: 71344 - DNA, 589 bp, Zea Mays
cccggctgcattaaccacgcttggaaccgagccacgacatgagcgtcggtccgcttcccagtcatgacctacggacccctcaattcgcatagcactcatgacctacgagcccccagactgcagcacatttatggtccatgcgcccctcggcctatggtgcactcacgacatatcagactaggcctgaatatgtagaccactggcagggcgcaacacgacgagccgcgctaagcccaaggctacgaaggccaggggtcggtgtagcctaaatgatggcacatgggacccacgtggccccacaccatctgccacagtcaatatgagatagccaggtggccccggggcccacgagtttgcatggttttaccctgggtaagaatgcttggttttacccttggcttatggctccttcctaaggaatctaccgctggccgacccctctcccggccaataaaagggaggggttggtccctaggcaaggggttgcgcaaatttgagttcttgctgatacacacccaaaaggacaaaccccagacgaaccgacaaacaagagaggagcaccaacgaggaccaggaggctggagtcccg

SEQ ID NO: 71345 - DNA, 587 bp, Zea Mays
ttggctcctacataacaggagttggctaacacagcataaaacatagcaaaccattttagacattgcgactcaaaacatgggtgggagcggattaattagcttctcttaaccatttctcaacttaaattggttaacacacaagtcacctaaaatagtacatttttgggggtctaacatagaggcattaacacatggcataaaacttcataagactacatttgttactgaaagacctaaagcacttatgtgcatatcttatcggattgttcttcaattttaacaaggaccaacttatgaacgctactcgcctccaataattattgggctgcgatcacactcatataagacctctaatcaatcaacaagatatttatttatccaatgggactctttattaaatttaccacacctaacacactgctttatgaagtattttaacaaacaattaatacatccgcgaccaatccctacgacgcacaaatggaccactgcaggcacacatacacttgttggcattccaatcgcaaacacatctacacgtaccactttctcctccatgaatttcaattcgcatacaacatattcac

SEQ ID NO: 71346 - DNA, 713 bp, Zea Mays
cgagaccggaaagtccaccgtcatacaaagatcatctaattcctctgtggggaacatgatagaggaattcagagatcttgataaactaggacaggggtttacatcggccgatcctttggaggagattgacatatgagatggtaaactccaaggccgacttttgtaaaaaagaccctggagaccgatcctagagatgagatgatcggtctattgaaggaatattcagattgctttgcttggaattacactgagatgtctggattaagccgagagatcgtagagcatcggctgcctattaagtctggtttcagacctttcaagcaaagagctagaacatttcgtccagatcttctcccacgcatcaaggacgaaatccaccggctgctagaagctgattttatcagaccttgcagatacgcagagtgggtctccaatattgtgccggtggagaaggagtcaggtaagcttagagtatgcattgattttcgcaatttaaatagagcaactcctaaagacgaatatcccatgcccatagccgacacattaatcaataatgcatcagggaatagaattattagcttccttgatggtaatgccggatataatcagattttcatggccgaagaagatgcgtctaaaatggcctttatatgtccaggcttcattggtttatttgaatgggttgtcatgacatttggtctgaaaaatgctgg

SEQ ID NO: 71347 - DNA, 1505 bp, Zea Mays
gttgggccaaaactgacccaaccggcccaactctaagcggaatacgggggcgcgcccgcgaccgtgcggtgaactttacgcaaaagcccctatcggttcaaacatctgagaaggagtcctcggctggtttttaatgggtcactgacacttgcaaataaacccccgcgcttctattccttcacaccccgaggtccacaacggggagcggcgaagaaccgagctccggcgaactcataccggccacgatacttaatgaccggtgctctaatttggctgagaccggattcaacacttaacaagtgtttcccctcaatcaatttcactagcgaagctctaaatcgtccagtccatggagacagcacaaacaacggatgaacagaagtgttcccgatgatctagggcagtgtcgctcaattgaatgggtcgagcagcattaggagaacctaaggacactaaaacggaagatgagagagtatgaacagacctggaacaagctagccacggcgaggactctttcacggtggcggaaaccgatttggggaaaaagagcaattcgtgggctctggtgagtaattgagggcacaagcggttggattggatgctggattacctaacggagtcgagggtgtgctcaatttatagtgtgcttgagcggtggctagtgaatttgatggagacgcgcggtggctggagaggaggaggggcactagcgcaaacgattagtggctttctccgtggcggactcaccggcgacgagccagtgatatagagcggcttacaacgacgtggtgaagcttcaaggcacgtggcatccgatcaacgggcggccaactccggtgaacttatctgagccggccacaaagcaaaaggggtacgacggctagcctccggtgttatcctgtggtgaagatcttttacctagaagcgttatctggtcaccggtgagcacgaatcacaacgacagtgtgaatccgggcgcacggctcaccggcggcgaggttctctgaacctgaccctatccattcacggtaccattggaaacgtccaacatagcgcctgacagagcaacttgcaatgcctagatctcgaatttttgtgccagaacataccaatccatctgcagcaaacttgtagccctttatttcaactataattctgctatagaaactaccctcaatcgagcaatgaatctaactctaaatcgagctctaagttcatcctactttactgctggtgaggattcagacttagggttgcctgacagcccgactttggatctaattatctcaaaatttctcatgacaccaaggcttaatccctatagcaaagttgtactcctacaggagctttacaagttggatatgttgaccctaggcaaattctttgtatttttaaaactatagagctccaaagtcagccttgttcaactgttttcagtcttagccacatgagaggaattgagtggctttttgcaaataagccccttccacatcttttgacttgga

SEQ ID NO: 71348 - DNA, 496 bp, Zea Mays
tttgatcccaaacctctgcactcccttggtgggtgataccttcaaatatacgaaatctcccacctcgaattggagaggtttccttctcttatcgtggtaactcttctgcctggcctgagtagcttttagattcttcctgattagtttgaccttccttttggcttcagtcactaagtcaggtccgaaaacttctctttctccaggctgagaccatttgaggggtgtcctacaccttcttccatagagagcttcgaagggtgccatctttaggctggattgataactattgttataagcaaactctgtcaaggagaggttcttatcccagttcttgccacaatcgattgcacaagccctcaacatatcttcaagaatttgatttaccctctcggtctgaccatcagtctgtgggtggtaagctgaacttctgattagattggttcgcaaagactcttgcagttgttcccaaaatctggcaacaaatggggctcctcgg

SEQ ID NO: 71349 - DNA, 1385 bp, Zea Mays
ctaggatatactcctatatattttgctaaaacaatactataatgtccgtgtgtggtaagactattataatatccgtgcgttataatgacaccaaattattcggtaaatgttaggcacaacgattacataaaaacgaacaacatatacattattatcagcctcaatatctcacaaattcctaagcagcacgatgtcaatccccaaccaaacactagacacagtcacacacttatacatggcacccgctacagaaattactcagaccgccaagcgaagtagatagtctaagatgaatcggggaagaataacagacacatgatttcgggtgaagaaacctgcacctttagagtggccaatgaaccacatgctagtggcggcccagtcctcctcaatcccaagagacaacccccctccaccacgcaataactagacgtcaaatcagggacacccatcaatcaatcgcagatataccccaaggccaatccagggcaaaagcgacggcggtcggatctcccgcgggccattataccgagcgtcgatctatccagcttcctctctgccatcatggcctcgcgggatccaaaggagcgagcgagggagtgagctagggtttccggtggagggtagggagagaggcaaggcatcagtttccacgttgcgatcccagagaacgggcaagacggtggagggggagggaaactagagctagggttctatgagaaggagaggggaaccagagatagggttccgtgaaagagtgaggcggagccatggaggcagcgttgttgggatggagggacttgaaccgtggtttgattacaaagaaatatatgggtgtttttaagaatgttaggcacaacgacgatagaagccagtttccccacgttaaaatctaacagcaacaacattaattaatcgtgttcttgacgtcccttattaacgaaagcttctagtaccttgcatggcggtcatggcagcaggacgacgacgggttagcgtcagtcatgatgactactcgagttgattgctactgctagctagatagatagagtagtatatcaccgattcttgctctcttcctcccctgcggcgccgtggcaaatccaccacgacagggacggccactccatttgcacattcccccattccgatccactgcaggtacgtacggtcgccatccagcagctaatctagcgtcgtaaacaccacatgcacgccgccaccacccccattcacccatcatgcatctgacgatgctggatacagatagctatgcatactcgcgatggattggctagctgttcgtataggacggaatccatgcatattactccctccgttcgtttataaatatacgacatccttaatttttttaaaactttgat

SEQ ID NO: 71350 - DNA, 521 bp, Zea Mays
cactgcgctagtagctccttatttccacggccgccacgcgtcatcgttccaattcccggccaccgctcgcgggctctataaattgaccgcgccctcagctccatcaagtaatcaagcagctagtgcacccatctgcacctcaactcctccaccagagagctccaattttggattctccccaaattgttccagaactccgctcggtttagcctcaccgcggccagcctattccaggttagttcaagctcctcaatcagttgtcctagcatccttaagttttcctcaagctcctcgatccctctaattgaactataccgccatagatcgtcgggaacgcattgttcctttgattctccgcagtgtcaccgtggacagagtagggtagaccaccattcatgaaattgggttgggggaaatgcacgggcgaggtccaattcagtgtctgctgcacgagagtcccagccattgcccggtccggccagcctgagctcatcggagatcgaccgagagctgtccaccgt

SEQ ID NO: 71351 - DNA, 967 bp, Zea Mays
gcagcgaaaggtgagccactgccatatgaagtgttcttccacacaatcactacaccagctgtaagaaacctcgaaggcctgcatataacataagaccctgacggccgtagaatcgtacatctgataatgaccgaacactggcgtgcaccatcaccttataccttaaagggcactatcaccctctgaccaaagcgaagccaaaatattgaagcacaaaagtcgtgactctgttgtgataaatggacaactatataagaagagaataagccaaccgatgctcaaatgtatcacaatagtcgaaggcataaaactccttcgcgaggtccatagaggaacatgcgggtcatagtcgggacctagggccctcgccgctaaagtcatgcaacatggtttctactggccagccattgtgtgcatagctaacagagtggtccgctcgtgcgaagcgtgccgaaaattctcacctcgaatgggtgcccctcataatttacaatgctcatcgcccacacatggcactacaacgttggggcctcgatatcatcgaaccattgcccaccgtgcaaggcaacctcgaatttgcttttgttgcagtcgaatacttcactaagtggatcgaagctagagttgtgtcaacaataacagggaagacaacacagaagttcttctggcagaacattgtctgtcgcttcggagttccctccgagttgacagcagacaagggaaagtaattcgacaattaggactttagggaattttgtgactccatcagcatgaaggtagtgttcgcgtctgtctaccatccacaatccagcagggtagtagagcgcgccaacagaaaaattttcagcgccataaagaagagacttttagacgacaaaagggtaagtgggccgagaaaccacccgaagtcatttgagcactcaacacaacagaatcctgagccactggattcacccccttcagaaca

SEQ ID NO: 71352 - DNA, 428 bp, Zea Mays
attcagtgaaacagacaagcattccaacagaaaataacactgatgttgccaaacataaaaatgtgtaatctccactaagttatactacaagccagcaagctttttgcaaagagacatacaatgctagcaaaataagtaatcgctagtattaaatatatgggcgggggagaacacaggaacctctcaccgttgagctccatcgagtgtccacagcaaagcgcctctgccgctgcggaaacatatggatgcatgatttggcagaaggatccacaaggaagaacaacggaacatccacacccaagagcagccgtggaccgtggttctcaggcaagtccatgtcggcggcggcgagggcggcagttatcgccggattgaaatggccgaatggcggaatgagggactaataaggaaaatgtcggatccaatgt

SEQ ID NO: 71353 - DNA, 748 bp, Zea Mays
tttggttgcttcacttggcgaaatccccgacgacgagaaacaggttcatttcgaggtgcctttgaatccgagtaacgcagaaataagtgccatgctggacatgttggctgaagattcctctgatgcagcccctgctaaaacactggttgtagcacccatccccgagtctggcaaagctttggatactcagaggtctaatagtattcgcccgaagcgtcctcgccgaaccaatcctccaacttctcctgctgaggggaagaagaagaaaaagagacgtctttgtcgagtgtcatgcttgaatcaggatgccggcccttctgctcctgctgctgaggaagtgccagtgccagttttttttgaagctgatcccaatgggtgtgacccgactgatgctgaaaccaatgggtgtgaccttgatgatgttgatcccaatgggtgcaatctggccaaagttgaacacaatgggtgtaccgtccgcattattgatgaagatgaggaagaggaggaggaaattcccttgattcggaagaacagccgacgctacatagccagcggggagagtagtggtgttccttctctagctttgtctgctctcattgatctgcaagagttgtctctagcaaattttgatcagactctcgaagacatggtcccagaagatttgttgtcagagccggcagatggtggaatgatggaagtttgcgctgatgtgcctgatgccgggttagagttatcccgagcagcatct

SEQ ID NO: 71354 - DNA, 754 bp, Zea Mays
gagcaagaccaccaataagaaaaggaacgtaaatgacagattcatgggtatcctctgtcggaacggtgacgccgcgggaaatctgccaagagtagagctcttttggaagcaaaaccccaacgtcaacgagatgaaggaggtcggattccaaaatgatagacatatggttaccagcgaatggcagctagctgttggggtcgataagcgggatgatcgcagcaacggtgctctgcctcttccgcttcggcgccatcgcaatctttccggtggaacgagcaggatcgagatctcagggaagcagaggagtggttcgaggtgaaaaagtaaagttagggcttagaaatcaaaaaagcacgtcggcgcgagtataaatgggggttcctgggtcaggcactatttctaaaagtgcgagttcactactcgggaaagcaaagtttcaggcatcacttggtggttacctctaaaacgccaacaatgtcagacattactcggcagttacctctaaaacgccggcagtataagctatcactcggcggttacctctaaaaacgccggcatcattaggcatatgggtgaactatcaagcgtgtaaacagaaaaggcagcaaaagcaaaagtcacttgaagcatctaaagtttttcattaatattggagggggttacacaaactcaaaggctgactcattatgagtcggccttcttcccccttttttctactacattacattacattacttcactacttacactacac

SEQ ID NO: 71355 - DNA, 363 bp, Zea Mays
cgaaactcaaggttagtcttctgagtgggatagaactcacatgtgctaggagacatatgtggaccaaagtatcaagttgacgcctgacaatagacatccgactgtagaactcatcaactatagaatcaccctaacataaggactactgacgaataccatcaagataagtagagtgactcaagataagtagagtgaccagtacgctcctagcgattttaagaagggtccacatttgatgagaactgtcacactgaataacctctgcagcaaagcggtcctccatactagcagtgagaatagaaccagctcgagcatcctcatccagccatatccaatatgcactatactgagcctcatatgatg

SEQ ID NO: 71356 - DNA, 809 bp, Zea Mays
tctgcctccatgctgttggaactgattgcccgccatttcgcccaagaagtgcgtattatcagtagtggcattgaccagggcagcgatagcctcggccaaagtcggtggtacaggtggcgggttgggagtatcctccctaccacgggaagtcctcgcaccatcatgtgcgcgagtccgtgacgacatttgaggcaaagaaacgttagaaaaaatataacatgccaacatacaccatcatattacattaccaaaatgtaataattatacagactccaatatataactcgacttcagtacttatcttacataagtataatatctaaactatactattctagtcttcatcattcattgttgcttcatttcctgctgcaggagaccgttcgtcagcaaggttcatggaaggagggggcctaaaaaggtccaactccccatcaggtcctccatttgctgttcccgatggtccggctcccattgcagcaacatcggaaggcacgtccgggtgtagtagagcatacaatacatttacttcttcatgtaaagtattacaatacacttgcaggctttcgagggccgcactaagctctgccacatgagctagagcttttgctttgcggtcccaagcgatcaaacacgagttgatggcccaatcaatggctgaatcctgttctgaaatctcatattgcaagcggctgacgtcatctgacaattcagctatacgatggttgtcctgctcccgtgccctattccggtgacgtagctctgactgaagttgttccaccctggcttctaggtcttcaattggggca

SEQ ID NO: 71357 - DNA, 493 bp, Zea Mays
ctggataacagcactgaaaatgagcgtcagatcagattcttcctgcggccttgtgtggttcttggactccaaatcctagcaggctttacagggtgccctgtggaagcagataattgcttagaaaagcaataatgtgttgaacatgccgtcatcacttaccgcttgattggtacgctgcgcgcgcacaaccagcctcgcacgggcctgcccatcgggatacgcccatttttggcgtttgggtggatacagataaacaatctcaaaatgacttatttttgcatctttgtatacagtttgggcgtgattggtagctaggctctaggacgctgggctcgctgcagccaggatggatagagaatctcctttcccatgtctccacgcatgcaagcttaccgaccaaaaaaaagtctggactgcatccgctcgtgcagatcagggtccacaggtgcagcctaccaatcaccagacatgtacagtcaacggcatgtacagg

SEQ ID NO: 71358 - DNA, 725 bp, Zea Mays
aaatgatccccctcctcctctggtaggaagagcgagactgggatctgatgactacctagacatagtcctagagccgggagggactgttgattgcctggcggtaccccccggctcacgcggttatggtccctgagcctattgtaggaaaaaggttaacttttgacctctccatctaggttagggcgcaggttgagaggagagtggaaggggacaaacttgcaactccaaccccgataaccaccatcagtgacaacaacgacacaataaccagagttgtcgaagccttgctatctccgaaggatggcgatgctattatatttttcttggaaatgactttcctcgcgcctagtgtaaggacaggaaggaggggagcacttccaaggcaaaaagtgagaatcaccagaaagagtagagcaaaggtatcaggccataactcgtggacacgaaccacgtcaaccttcgcttcctggttgccacctcgctctgatcgcccctcatggtggacgaatgcccgctgctcaaatcagaagcggggatagggctcaccgcaaatgaggcatcaatagtcgtcgcaatccccaatgacgggttagatgaagcggacacttccccgctgaccgtctaggagacgacaaggacacctgtcaaaggtaggccaggcggtgtagtgaccaccgacgaaggcgtcgacctcacagataaagtcagattgatgtccatcacac

SEQ ID NO: 71359 - DNA, 606 bp, Zea Mays
tggggaggttctcttggctctgggaggctaagggtgaagcttgatcgggtggaaatggactagagcggtcggaccacggtggccgagctcgggcaccatgggcgggtcacggcgctctcggttcctgggtgatcacctgcgattgagctcaggcgagaatgaggggcatgtgggagaacaaggccgagggcttgggtcggtcttataggtgttggcacggacaaacaggggatgggtaaccgcggacgtggggacacgtgcgacgtgggttgggcacgctccggcatgctagccctcatcgaacacgtgacccggttgtatctgtccctcttctcgcgcgtgtagtcacttgttcaagcctgctcttgccttagccagtgctcaaaacctcttaacctcccctcaagctacctattatgtgtgttgttaagggattttgcttactggaacaagagatatggtgcactcgagtggggtttgtctaagagatcaatttcgaggaaaaatcaatgctaaatcatgtcaaatgattttggttttatctcaaactttactagggtatgcctagggttttttggtgccactttgtcaattggggcatgtggt

SEQ ID NO: 71360 - DNA, 442 bp, Zea Mays
cgatcttcttggcaacaacattgaaagctttgtagcaattctcagcagctttgcccatttcacattttgggctcttcagactaaagctaatttccagtggactcatcaccatatccttgaagtcctctcgatgttcagaatccacctcagcatagaaccactctatcgtccattcaccatgccattttgtttggtatgcaagtactggggaaacaatatcctttcggtaggcgaaggtatagcacccgaagttgttttgaagtccatctaaagctctgatagtgcaaatcatgcactctgcagaaggcatcaatcttagtacgaaccccttggcttcgtgcagcccaaatgaaaatgccaagcctaactatgacatttggtttcaactgatgcatataaactttatatttatgtaaaacctttgcaatcatctgatacatca

SEQ ID NO: 71361 - DNA, 400 bp, Zea Mays
gctgccttcaagtgactagctttgattctctggcaagtgtcacactcagatatgtacttggcaatttccctcttcattctggtccaccaatataaagatcggagatcatggtacatcttgttgctaccagggtgcatggaaatttttgaaagatgagcttcgtccagtatcttccttctgagttccgggtcctttggaacaaccaatcaatcttcaaaccatagaattcccttgctgtcctgacggaagcacttgtatttttctgccttttgcttgatcatttccttgatcatctgaacacccttatcttcaatctgtgctctgactatttgctcttgcaatgtgggttccaccgagatgtagcctaagtcacctgaagaaacaacttccaggttcagct

SEQ ID NO: 71362 - DNA, 497 bp, Zea Mays
cctaggtcctttttcaatttcatgtccaaccctcctgctggtgatagtggtctgggtcttagagtgtgaccctctcctgaagacattgaggctctggttgctactctttgtgatcttcccaatgatgagaggcaagttcattttgagatgccgacgagtccagatgatgaagaaatagatgttgtactcattatgttggctggagaatcttctgactcggcccatgctgaaccaatggctgttacggttgtacaagagcttaacaaaacaatggacacccaaaagcctgagggtattcgcccaaagcgtcgtcgccaagttagccgcccaactgcgcctgttgatgagaagaagaaaaagaggcggcttcggcgactgtcatgcttggaccaggatgctgacccttctgctcctgtttgtgaagaagtaccagcggaggtccttactgaggctgatcccaatggtggtgtatctgttgaaactgaccccaatgggtg

SEQ ID NO: 71363 - DNA, 642 bp, Zea Mays
ttcagttattcatatcttacgtggatatccagataagattaaaacaatataaaagattttaatttgtttagaatttaaactcattcaattcatatatccatgttcatatgggttgagaggaataagccctaaagtgagggcatcaacagagcaacaatggtggcgttgtagtgaaggcaaggatcaggatttgggagtagccgtgccggtgcggtggggaagctgtgagagcactgagtgcgtgaagaacttgacacttactattgaaaatttgtgcttaagttccgtcgatttctcgaagaacccggggtggcgacgcgtaccatgctagggcttgttagaatcggtagcaggagccaagtgttcggagttcttgagggcgctaaacctctgccagctcgtgttcttggtcgtagcgtcgcctgaagtatgccgtggccggggaagactctgcgtcgattgccagaggtcgtcattggaacagccgagggacgggcttgtcccggcggcaaggaacacaagctcgcacaacctgtacagtcgtcgtcttcctcggtgcatgcaacgcggaagctcacctgctgcccaccgacgcgggagccaactttccttctcagcatgcataccgctgaacgatgtgca

SEQ ID NO: 71364 - DNA, 606 bp, Zea Mays
gcggaaggtttgaactgacctcaattgcactggccacgacgagggtgttcttgtggtgggatgagccggtttgggggaagtaaggaattcgtggtctctagtgagcgatttgaagcaatagttggtgtgttggcttcgtgattacatggcgcaacagccccggccatcaatttataggattgttaagcggcggctgatgaatttgggtgagacgcgctgcggtcggaggaggtagaaagttactggcgtagtggattcgtgtcttccgtcgtggcgaactcaccggcgatgagctatcatcgcaagccgagctacggtgacgttgtaaagtgtgttagcatgtggcgcacgacggtaatcagccaacggcggcgaggtcttatctcgatccaccgatgagcaagggggtacggcgggcttagtcgtggccgagctcgagctgatcccccgcccagatcttttctttgccgtagttatccacccgccagcgaacacgaatcacggcggcggcgtgaatcacggtgtagagatcgttggcggcgaggttgctgcgctggcggtctgatccactcaaagcactgtaccatggcaattgttcttcagtcg

SEQ ID NO: 71365 - DNA, 489 bp, Zea Mays
ctcttcatatgtgcctcagtagaatggctttgttaaatgtgagaatcagacatttgttgagatggctagaacaatgctcgatgagcatatgactcctaggcatttttgggccgaagcgatcgacattgtgtgtcatgtgtccaatctcgtccttcttatgagttgtgatttggacgaccacggaaggtttgtcattgtagggtgtttggttctagatgctttttttgaagcaggtaattggaccagtttgagtcatggtctcttatgatgttttttctcgattatgctttacactcctgtgcttatcgtgttcttaaccttgagactaacggaatcatggagacttgtgaggtgacctttaatgagacttcgcctagtccatcctctgtcttgagcctgcaggtctaggtcagatgggtgagaccatctttgtggaggaggaacacgatgacgttgattgtggtgatcctgaaccatctccactagctg

SEQ ID NO: 71366 - DNA, 354 bp, Zea Mays
aagtatgtggatgttaactttagagaattgattaaataagaacagaaaaagtaaactaggttaggtaatattttatttttcttgtcacatacttaaccagatgaataaaaatattagttgcaacagacctcatcaaccaaataataaaattaatatctgcattattttaggtagaacctatattgtgaacatttgtagtttttgttagtagaggaaatgatagctaacaattcactacggaacctatatgttgagagtaggaactcctgcaaactcgctggatacaaaatcactggacattaacgatcctatgcaatactaataaaaacaaatcttgaacaatcaaccctaggc

SEQ ID NO: 71367 - DNA, 908 bp, Zea Mays
ccccactcccccacctttgatttcttttatcaaatctatgaacttcctgtgaatcaaagtgttggatgtgtgcccttgtgtcccattatatctccttgcaggtcttgagctccttagggagggtttcaccacctaaaatgggcatttctccaaaaccctagaactctgcacgtcacatgctcggtgaaatgcccaaaccagccaaaaatgctccaattaaacccaaaattttcaagcaccttcaccatacctccagtaacatattagccaaatttcacgccaatccaatataccaggcttcgattttatccaattccccgttttgagcgatcaattccgagccgagtgcccaaattcctttttcttcgcctaaaatcaaacccagcgcacacttcactcatatttacccatataaaactattcatgaagtatcggctcaattccacgtcatttcatgcctcaattcgaatttcaaaccttctatggcactatttctcgttcaaacgtcgttttcgcgtcgtttgacctctcgatcgccatatctctcgttttctatgccataacactctgtttatgtatttattcacatttcatatacttatgactatgtgaactaatacatgctcacctcttctatcatttcagtgacctcgcctgcccgtgagccgtcttctgtcgtgcctggattttcacctctcgtgtgagatttccatgtagacatcccttcttttgatatcctatcagctgttatcgacttgtgcttagcttctctctctcatttgcagtcgtcaggtcaggatgccacgcacgaagaatgtgtcggtgccagggggaggagatgacgaggatcctcctcgccccttcaagcaggtcaaggggaagactgtttatttggagcggcaggaagg

SEQ ID NO: 71368 - DNA, 519 bp, Zea Mays
tgacctctctattatctaataaataagttcatcatcattagttggtttgtcagagttcttattagtaactacttcctttacagtggggcgtttttctggtttctgttctgtctgcttgtatatatgaggttggctttcgtgtgtgttgttgcttcttataaaaccagcagtagagaaatctcgggttgatttatcatgtgaatttacaacagttactggctcagtgaataagttatatgccatccaacatagacattcaggcactcaggcacataaaaactgagctaagcaacattgcaacacacatgtcacagggccacgaccaggtccaactggccaacacgacaagtacacatgtgacacagcttgacagccaacacttggagtcttggacaacaacacacactttttggatagcaaacagcaaggcaacgcacaccaacagcggtatatgtacaacacatgattgccattcgccagtagcatacgtagtacttggagtcttggacagcaggtcag

SEQ ID NO: 71369 - DNA, 676 bp, Zea Mays
cgccaaggcggcctggtgtatctaaaatataccttcagatacaatgagcagtttgatgagccaaacgatgagtggctgaattgtattgaagcgactagttatgagttgcttggtgcttattcaagggccaaagatgatgccatgactgtagccttcggagagcgaggcaagaaaaggctaaacaaagtttttgatgttattggtttcgtctacccggattatagctatcccttgcgaaaacaaggaaagaaaaggaaagttgccacttcggccatctcagctatgccgaagggtaagaagattaaggttttaatgcactggcctagatacattgaaacgactacggtgctgaggcttgttaaaaggacttcttccaccactgagccagggcaccctgctcctgccggctcccagggagaatcggctgaaatgccaaaggttcctgcaatcaagtcggccgaagcgccgagacatgctgccgaagctgaaggaaaggcagccgaagaactagagcgagaggaaacggcagggccaccaaaaatcttgagtccgccatcggatctagaattgccgaagatatcgaaaactcctgcaataacccccaagaggaggaggatggcaagtgtgctggacaccgtcatggaatcgacaagggcatcaactcctacacctgcaa

SEQ ID NO: 71370 - DNA, 666 bp, Zea Mays
gttgaaaaccatatgtaaatcttcaatgaaattttccgaattttctgttttgattaccacatcgtccacataagcttccacacgcttgccccagtgatcggctaagcatgtttgaatagctctctgataagtcgctccagcgtttttgaggccgaacgacatggaggtgtagcagaaagcaccaaatggagtgatgaacgctgttttttcctcgtcttctttcgccaggctaatctgatgatacccagagtagcaatccaagaagcacagcatagaacatccagcggtggaatccaccacctaatctatcctagggagccctaagggatcctttggacagtgtttgttgagatccgtatagtcgacgcacatgcacctatccaccttattctttttgagtacaagaatagggttggccaaccactcgggatgtaacacctctctaataaatccagctacgaccaagcgagccagctcagcacgaatggtctctctcttgtcgggcgtgaaacgtcgtaatttttgtcgaattggcctcgcctgggggtagaccttcaatttgtgcttggctagttccctcgggactcctgggatatgcgcaggttgccacacgaatacatctcggttatcttgcaggaactggacgagcgcgccttcctatttgtc

SEQ ID NO: 71371 - DNA, 325 bp, Zea Mays
gaatttacaactttggaggtgtatgatctacttgagttaatcaaggttgactttacttatgtgagacctttgggtggtatacttggtaaattgggttaaacttagctaaggtaagtggcaggtttatttttggggttccactgaattcttttcaagccttagtgagagttgataagtactcaagttagacttattggggtggggtttatttcttcttcccttttcttttattctcttaaatgctttggagtgggtttgaactacaagttgctttaataaaattccaaaaattctgcaaaaattacagtggcttggtactggtgta

SEQ ID NO: 71372 - DNA, 478 bp, Zea Mays
ggcttcgaccgtggttgctgaagataattctgatgattccgtgtctaagttttttgagtctggtgattctaggagttcggttgtgtggacggaagagtcctcggatgaggacttggattattttgcggcattggatgtggctacggcggaggcttctccacgtgtgatgggtgctgaagttcttcctggtgcgagtgctaggcgtaggcggcgaatggcggtggcgaaacggagaattagtgaggtgtcacgaagtgataggcgtcattgtggtgaggtggagggtggtcgtcttcgtgtggatgggtctggcaaacgggaattgttgtcctcgccggctggggcgagtgtaggtgagggagagttgcgaagtctgtttgagggcgatgaattgaggataatgttgttcaactatagggagatgggtatcatcctgaaggttgagccgatgtaatgtgtgatgccctcgctgcattta

SEQ ID NO: 71373 - DNA, 585 bp, Zea Mays
catgaaaaccatccctaagcaaccatcctaattcaaatttaaaacgttggttgcagggacaagatgtgtcttcctccgagttcaataacaacagtgtatggtcagatatatcacgcttgagggcaacaaccgaagataatggaaatttctgaccccattccgttgtaacaaggacccgatctaatttctcttatgtgggattcagaaggttatttgcccaagtaaactggcgaccagacgtctctatctcttttaagttaagaccatcaattacaacattaaaaaggaaaggccaacgatggtaaatcaaaggtttatttttctcattttgattcctaagaatattaaaatcaccacctatggctagggggagagtcacatggctagtaaactgcaccaactcaaccaaagaaagctccttcttatccacttgtgcaggtccataaaccactgccaacacccatttaaaagcatcactcttattgcagagagtaaacttaacataaaactctccctcatcaatccctccaatatcaaacagattcaaatcaacacccaacaaaatgcctcctgatcgaccatccg

SEQ ID NO: 71374 - DNA, 304 bp, Zea Mays
ctcttaaggaattgatgaatgaattccaaacacgaaagaagcttctgtgctcaaatgcttgctagcggttaagaatgacacagttagtcaaatacaaacaactggttgcaactttgcgttcttcaagtgaaaataaggcatctgcttgttcagcaactcgaggcattggctaataacaattaaaaacagtgaaaagaaaagtatttgttcagtatgaaacctctcgctgttttatcgcattgcattgactgaaagcttctggaattgatttgaatctggccctcaacatgccaagggttcgtat

SEQ ID NO: 71375 - DNA, 276 bp, Zea Mays
aaacactgtgctactaaagtatctccattggagcttgtttatgggcaggaaacaatgttgcatgtagagctaagcctaaatgttgtcaggttcgccaggcaaaatgatttaactaccgatgattattataattcaatgatagacaatattgatgaagtgaccgacaagagagtgatagctctaggagaaatagagaaggacaagatcatggtcgccaaagcatacaacaagaaggtcaaggctaagtcattctaggtaggagacctggtatggaag

SEQ ID NO: 71376 - DNA, 1430 bp, Zea Mays
gtgaaatatattcaaaagcccaagctaagcaatcctggatcgatctatccttgataaaaccatattgattccgatggacgagctttgtgatcaccagctgcagacgattggctaagatttttgttaagactttgatactcgtgttaaggagggagatgggtctgtagtcaccaacagaatcaggagagccatttttgggaatgagggtcacatatgatccgttgatgctatgcatgcagagagatccttaaaaaaatttgttgaataggtcatagaaatcaggggcaattaccggccagcattttttaacaaagtctgtgttaaagccatccggacctggcgatttatttgaaggcagacgtgcaatgatttgatcgatctccaggctagagaaaggttgttcaagctcggatagattaccaattggctgaatcaaaagttgaagaccatagtagtttgctgagaagtccccaaacggttcttgaaggcattaaaaagcacaacttctttttcattatgagagagcgccatatttccattatcatcttttagagaggagataaggttatgtctgtgcttgatagtggcattggcgtgaaagaatttagtgccggcatctccaagggtggcccatttgatttgacctctttgcttccaataaatctgttgtttagctaaaagatcttgtaaatggagaagcaggatttctttgaagttccattcctgaatggttaagtctctgctctcctcaatgaagtctagcagttgcaccaccaacttgaccttatcaatcaattttgttaagttggggagagacttacaccagccatggatgtgcttgcgttcccttttaaactttgccatgagccttttagcagggtctggttgaaagataggctgattccaagggtcttgaaagatagagtggaaatcatcaagctgaagccaatagttttcaaatctaaagatgggtggcttgggcacattgatttggacattgaccatccaagggatatgatccgaggttcctctaggaagcgtgagtgcagaggtagctggaaagatgaccgaccaagcttgtgagacaaagcaccaatcaagtttttcgagaagcgggtgacgttgcatatttgaccaagtgtatgcttgtcctttgagtggaatttcctgcagtcccagttgactgattgccagattaaaacccatcattctgaggtgatccccacccggtttgttgcggttatcaggggatctgatcatattaaagtcaccgaggaagatccataatttgttgtcatcaatctcaatgctggaaaaccaagagagaaattcatctctcctatgaggagtataaggggcataaatgttggtgagccaccaggtttgattggtaagctttgtatggaatcagattgtgtgaccgaaagaat

SEQ ID NO: 71377 - DNA, 638 bp, Zea Mays
cgacgagcacacacacccagatgccctatgccatttactcactgtttgatgccaaaaccgagaggatgtcatggcaaaacaagaggggagtaccacatcgacgatgaagggtctaatacgatactagcctgccggtgagaaattccgcccatcgtgctcccccaccgaccgggattcttctgtgcatccatctcgtaggcaccggcgagcaccatgggcatgattccatgccccgaactccgactaggtcgaggaatcatgacggcggtccttccttttgctcttctctgcgcaagctcccgattcacccatggcgacaagcaataactcggctccattatatatggaggagcgcgcgaaatcgggacgtcagcaacaccggagcacggacttgggctatggtcgaaaccaatcccataaagtttgttgcgttcatttagatcgaaacggacttggggaggggataacgctgacgaaccgggcctacctgtcgacgacattctggcatggaggagaggagtgctcgcgctcgggtccatggttcagtgtgtgcaagggtatgcgcaagtaggtgctgagcggctgatggtgctggcccacacaagagggagcgagcgcgcgacgactaggataggaat

SEQ ID NO: 71378 - DNA, 427 bp, Zea Mays
catactcgcatataatgaaaatatcatggaacatgtcactaaaacatgtaaatcacaaacattgacataatgtcatcatcctatgataaccattattgtacacatcatcataagcctcccactcacattaaagttatttgtgccaacatttgatgcccattattcttgcgtgtgcctcatgctttgcttatggtagtgacttaggcaataaatctaccatgttcaagttagtgtgcaccttgcatatcttcacatctcctcgacaaataatctctcagattaggtgatatcaccatagtatatgctgggatttttggtgtgaccttggctcctttgcttgtgctctatagcactattattgtcagaaatagaggtctatcactcgagcagctagggatcatgaccgtattttgcttggaactcttcg

SEQ ID NO: 71379 - DNA, 1490 bp, Zea Mays
cacccttactgtttccatttcacttatttcttgtttcgccttcgcaactttgaaatcttcattcatttcagcaagttttttctttaaaccttcaacctcggctttgtgagctttggcttgtgcgttaagctgggttttgctggttttcagcctatctagtaaggagagtagtattttgtctttttcaagagcttcattccttagtgtaataacttctgatcgaagatttccaagcgctagatgccagcttttatcgcctgctttcttctgggcctttagagccttgctcagaattaaaccatacaaaaataaaggatgagcacatactgaaaaggaaataaactacaaaaaataatctactttctaataagttaaagtgttcccaccttcagactgttataggcaaggctatctgcgagttggtccttcgtcattgcagacaaacctaactcaagcttcggatatcctacattgtctgccatctcccgacagacatgaatctctttattgtcaggcagacaataaagcaagtcatcttcagcatccccaccatacaccaaggaccctcgagggtactgcagatcactggcgtaatgttgcgcttcggccatttgctcttttggtaattttttccctgaagcatgacacactataaactccaattcctcagtagatgctccaggagcagggcattcagattcctcggtagcccttctctttttctaatagtaacggtgctttcgcggcatccgaaggtcttgtttcagcacccttttcaacaacctccgaaggacttgcttcagcgggagccaagggcccagcctcagctgcaacctgcatcatgccagcttcgacagatttctttgtattctcgccttccacgctaggtgcttcggtagaagcaggagttaacgcctttgtggattccataacagcgtctagtacgctagccattcttcttctcttcggagttactggagcagtttttgctatctttggtacctccgtctcttgaaacggacttgaaacctctaattgttccaccactatcttcggttttggctttttggccgattccattctagcttcggcaggagcggggtgacttgactcaaaagtagaggacccttcagcaggcctcgactcttccgctgttttagcgcacttgggcgatgtgtcaaaaccttaactttctttggcttcggcgtattagagatcgccgaagcagcatctcttcttttcttcccgtgctttcgtgaagggtagcagtaatctgggtatacaaaaccaatgacatcaaaaaccctattcagcctcttcttgccttgacctccgaaggccgcagtcatagcatcatcttcggcccttgaataagcaccaagtaattcatcgttggttgcttcgaaggcatctagccagtcctcgtttggctcatcaaattggctcctatttttgaatgtatacttcaaatagactaggccacctttgct

SEQ ID NO: 71380 - DNA, 319 bp, Zea Mays
gtgcatggagaactttgaaaggtgagcttcatccaatatcttctttttgagctcggggtccttggggacaaccaatcgatctccaaaccatagaattcccttgctgtcctgacggaagcacttgtatttctctgccttctgcttgatcattcccttgataacctgaacacccttgtcttcaatctgtgccctgactatttgctcttgcagtgtgggctccaccgagatataatttaaatcacccgaggaaacaacttccaggttcaatttgcacaactcatcccacagggtggtaactcttgcatccatgctcatacaa

SEQ ID NO: 71381 - DNA, 547 bp, Zea Mays
tttacagcaggaataaatggtagtagttcatactccaaactcaataccatcagactttaaacccacagaaattaactgtaatttcactctagcaattccacccaaaccatacaaatttgtattcgaaacaaaaccatctgaagattgaaaaggatgccgattcccccaaaacaattcacagaatacacaactgaagcagatttcgtggtgtaccatttgaagtttaaaactcaagtaaaacagaacctgtcctgtagcaaacacgatgggggggcaaagcccaaggcatcaatttgttagtggaggctgtcgatttgtactgtgtatgcgtgtgctgcccaagaaaggccgtactcgccaccacacatatggctccaaacaaggaatcaaagtggctccttgggcactgcataatcttttgtttaagagaggtgcgctctggtgccaaggctagagatttgagctttcagtcataagttaaaaagttggcacaagggttgggaaacactagaaacagcatccacgttcgcctcacctcccctttctc

SEQ ID NO: 71382 - DNA, 792 bp, Zea Mays
gtgaagggggttgtcgagctgccaacgggttatccaagtgagatctaaccactctctggtagggtgtggccttggtgagtgatcccactgggggcatctcattgagtccttccttattcgaccttatgtcgtccttttagcaggcttggctgaccaaataggggctagtggtcaccccatcactctggttacagtaggggaatgtgaggtacgaccttggacatgactatgagcaaatggcctatgagctggccacatgacttgtagctcattgggtgcttgctcgagttgccccttgctctgcatgggaaaggggatatcattgtttaaccagttgggtttaagcggtcgcgtctgttgtggtggtatgaagaaagataaagccataatgacaccgcttggcatgggtgactgacgagataggcgatgtcctgttttgtgtaggcgtgcgaggctgggttgacgtgatagataacatctcacttggtgcagacattttctccgtgcgatgcaacttcccagcgctctgcctaaggcgggagccgtttgccgaaccgacaggatctccgctcagggcccgaggcggccaggagttggagctgcggatcctcccacaccatggttgtggtgggcccatctaccaggcaccgctctacctcctagtgtttgtgtatataaatagaggaagggtcccttgggtcggtaacacttaacatcttcttgcacccttgcctccatttttgccctaaagccttcctgccctcgcgctctctgcctgttcgagtgctctgc

SEQ ID NO: 71383 - DNA, 853 bp, Zea Mays
gagactttgcagaagagccctcaggtttttggctaactggagatgggttcggtcactgttgtattgagtcactgatagtttgcagaaaagccctccggtttctatttcttcacatgggaaggtccacgacgatggcagcgcggaggatgaactctggtgaggttgtgccggtggatttatgcaacgaccggtgctcccgagcggcgtacaccgaattaaaccctccccgaacgattcccctaacttaatttcacgattggtaagctatcaagctctatccacgtgaaccgcgaacgatgaggacaatggtacgcgttcccggtgatccctggcggtccggttcaattaaaggggtcgaggggtttgcggggtacctaaggatgctagaacaagcagcagagggacttgagctaacctgaatcttgctggccacgacgagctgatcttcacggcggtggagatcagtttggggagaatttgaaattcgcgagcgctggtgaatgatcgagggtgcgagcaggtgctatggcttcgggatgatctagcgcagttgcccaggccatcaatttatagcgctcgcaagcggtggctggtgagtcgagcgagacgcgcggcggccgggaaggaaaaaggcactggcgcaagcgctaggtggcttctaccgtggcggtctctccggcgatcaccggacgcccctagcgtgactatctgcgacgtggtaaagcgcccagacacgcggtgcaagaccgagcgatggcggttcaccggcaaagttatccgcagtgggcgtggcaacttggtatggtggtcggacttgtttacggccggagttatccacgacggtgaagatctt

SEQ ID NO: 71384 - DNA, 611 bp, Zea Mays
gctagctgctgctaatagctaatatattggagggaagaggaaattagggtcgacagctagctgcgcttcagaacgaagaaacatcaatattatgacgcagaggcggcagcagagctagttgcatgagcttatgatgttaaaattatccaggaataatgttgaaacagctcgcaagtacttttctcatctcttccggtatctgcaaaacaaaaaggagaaaatttcaagaggtttggctactgaagaccctcgccttatcaagaatcgcaccgacaatgtgaaaaccaacacaaaacttcacgataggtcttctactctcagagattccttttcaatatcatgaaccacatatatcttctcgaacatgacaaatattcgatataatggcaacatcattcaaatcattgttggggcgaaggcgaacacgctacccttcgctctatgacttcgcctgctacacatccacaacacgtccgaatatgccgaaggcgccaaccagacggagacctgcgcggtccccttcgtggacgggttgcaagacgaaggctttgtcgaagtctacaggtctcccacgtcgtcaccgccacgagaggcccatgtgggattcggcc

SEQ ID NO: 71385 - DNA, 584 bp, Zea Mays
atttttcgcctatttcaagcccatgttgaacgccttcttaatacaaaaataaaagtgtccaatctcactggggtggggaatataaaaaattgcacacccaatttttcacttccttagggatttctcattgtgtttcatgtcctcacacccatcagcaaaatggcagtgatgaacgcaaacatcgccatattgtagaaaccggtctagctctcctagcacattctagcatgcctcttcgtttttgggatgaagcctttttaacatctgcctatcttgtcaatcggcttcctacccgtgttattgacaacttgtcacctcttgaacgtctttttaacgtgcctcccaactatttgtagcatcccaaaaatcctaacccaggtttgaaaccctaatctaccctttcccctcctttcatcctctaattccaaaaactcccctagattttctttcatcatatgcatacactttgtttgatcacaagcacctcacttagactctattttctaacacctagactatctacaaaataaattgttcaaaagaaaaagatgcaaaaagggaaatgggaattagaaagtaaaaag

SEQ ID NO: 71386 - DNA, 498 bp, Zea Mays
ccaaatacattgaatgattcgttcacatttcacatatatctttaccaaaacattcccacatcacttgcaacttaacctaagcttccctacacaattacatgacatctacttaaatcacgaatagcattatcacacgccttgcattacaaatctacttgtccactagaaaacatctattcgaagtcatgaacacaaccatacactatgtgtgatgtgaaattttatgaacgcctaatatgcattgacgcgacttataaacataggggaagcgatgactactttggcatgtcaccacctcacctcacacgcaaaatcattcttaattggactgaccaatttgaacgattgttcttacaattattattattattattattatcatttaaccacacacctagataagcatgatttcaaatcaaattgcccatattttaaattccggcatatgcttggccattggctaacgtcgtgactattttctaattaccaacatacacc

SEQ ID NO: 71387 - DNA, 461 bp, Zea Mays
atttagcctccctctacctagaatctctacccctctttgactctacatcgactagagacatcttgagtggtatgccgacgccaagacacaccctaaaatctctcctcctcgacagggtccctcccgggagacgagatctatgtatgttgtgaagaaaacgaccctctgtgccatcgcggaccgtccggacgtaagcagagaagaagttgctcccacactaggtcccggaacgtccaaccctgcgtcgcgaaccgtttgcgcctcccagatagcaccgccagatagttcgtttcagtgtttagcgcctagatcgacgccaacacatactatgtaagaatatctcgtaagattattaatggtacgagctattttgctaaaagttaatattattgaataaatattacttattccattttaaaatgtaattctttttaactttttgtctccatttgaataataat

SEQ ID NO: 71388 - DNA, 319 bp, Zea Mays
cacggagagtatgcttatctttcctaggtgtgcggtaatattaggctatcaacttgtcaatacttcaattgtctgaacgtcctttcaggtagctcacatttggatattatcgcccattgcagactggataggatggttggatctcataattgatagtagaatgacaatgtcagagtcatcaccaattattaattagctctagaactgaaccattatataagaatatgtattagacaacaacagtacaattgtcttatggaggggattgaagaaattaaagagatggttagtttgtgttcccctcaatattcgcctcttt

SEQ ID NO: 71389 - DNA, 416 bp, Zea Mays
aggtgatcgagcaccatctgaagatccaccctgatgccaaaccagtgagtcagaagcctcggagacagtccgttgagcggcaggacttcatccgaaaggaggtccagaagctgctagacgccgacttcatcgaagaggttcatcatccagtatggctggccaatccagtcatcgttccaaaggcaaactggaagcttcgaatgtgcatcgactacaccagccttaataaagcttgtcccaaggacccgtatccacttccacgtatagatcaaatcgtggattctacctctggatgcgacctcttgtccttcttagatgcttactctggtttccatcaaatccagatgtctagggaagataggaagcatatcactttagcgtcgtggatccaaacaagtccttagactacctccagc

SEQ ID NO: 71390 - DNA, 514 bp, Zea Mays
tttcagggcatccaatggcttctaacttcctcttcattgtgcacagccaatcatcagcaacgagcgggttgctagatgcagcgaacgtgggaggcttgagccttaggaactctcccattctgtcctgaggtcttcctccaatcgggcgctagttctcggggcttctagagaggacctcaatgagtcgagtctagttggccagaacttgggctaggtctagtggtatctccggaggtgcggggaggtgggtctcactcccttctccaccgtcctctccttcgatacctaggggagtccttgctccaatccctgaggcggtaggcgtcgttctatccgagaccatctgccagacgggagaaaggattactactatgcatatgtcatttttttgcaaacatgttattttattcagcacaccagttcattacaagcaaccatcgtggattgcactacgcacgagcgtttcctactaatgtgtccccaaattccctgagaagatcatcaaggctagcca

SEQ ID NO: 71391 - DNA, 487 bp, Zea Mays
atgaaatgcaagaacatagctatgatcacaatcaatggaacttcaagatatttaatgaaattgcatagttccattttccatacctttgccttttaccagtatggccatgagagcaccagttattaccacaaaccaattgaaagttccctattatttatgcacttcatagctcgagaggatgcattagaggcataacacatagtgccaaaatagggtaatcatgtgaacatggactaaacaagatgtcatgcttgcacacataggttactcattacacacgtataacatgatttacagaaagatacaggtttatccatgaacacataaaggattaatcatggtaaatatctcaaatgataagctacccaatgaatgattcaaaagatatgacttatagagcacccaatcatgattaagcaaacatgaatgtcatctttgaaatcatgaatcaattattaactaggttcaacacgagtaatcttaaaag

SEQ ID NO: 71392 - DNA, 564 bp, Zea Mays
ctttatttcttatttgcacttctcatttatatttgttataagtgtttgtgaagtgcaagttgaccttggacaaggcattatttcgatgcaatcgactttttaagtcaagtaagaaagttcaatggagttaaagtttttattaatgcatatcccccctctaggagacacccaaggtcctaagtacatcaaaaggtacttccaccgggtgagggtcagatatgagaacaccattgcacaatactacataaaaacaagaaactaggatatacacaaccacaactaccattagtactcaagattcttagatctagacgaagagctcggggaagagatagcactcaagaatcttaggcctagacaaagagctcgtgtctacggggagagggcaagagagtgtcaaacctccttacccatgatgatccctagaaggaccaatcctcaacagctagaggaggggagggtgtgagagcttgagggagagcacgagggcgagaggagatgggagagggagacctcggcagctgcaaatgagaaaccctatcgcgcgctgatgtagcctcggag

SEQ ID NO: 71393 - DNA, 487 bp, Zea Mays
gtcggccgctgagcacaaaaaattagaatatgacatgaagaagctggatgaggagatccaacaacaacaagatcacgtgctcaaggtggcaaagaagtggtacctctcgcacttcaggatagatcgccaccagaagatcgtccaggagagggaaataaacatcgattacatgttagtcgtgcagcagctgctccccacggtatgtgatgctaggtcagccgatgatattcaatctattaaaatttcttttgatagtcagattaaaagtatcacgaatgatatcaagaagatggcgcatgcattaggaaaaactaacatacctatttttaccacattaattgggcaccgaaacaattatgccaaacacatcggtaacaaatggatttccccagccaaattctggtatgtcggtggactcgtatccaggacgatcgtcactgccatctttgctaaacggtggatcaactctgagcacggtcgggccgtc

SEQ ID NO: 71394 - DNA, 448 bp, Zea Mays
cgcctctgttgtggctcggttccaggcatagttagtgcgactggtcaccttatggcagatcagtctcggccaggtgagggatccatttgagtgatttcccttcgcacccccccccttgtgtggttcctccatgttcgaccccaagctcggtgccacggggttcgtccgagggcgggtgcttcgagggtagacgtttcctcccccaactgacagacggatcctagttgccagagccttttccttaacactcttgttgaccaatggtcctcaaggacaagggaccttatccctaacagtagcccccgagggggagtatctcttctcaggggctaatgaagggtcgggtggcgtttgacctcagcgactgtggtacttatttccttggggctcttggcattgtgctgctatactttggtggtaatcttcgcaatgccatcgatccgcctga

SEQ ID NO: 71395 - DNA, 578 bp, Zea Mays
ttctgtttctcattcgcgggcttgctcttcccatctccccctttttccgtggcctccttgatttctatgagttgaatctgatgcatttgaaccctaattcaattatgcaagtcaccattttcgtacatctgtgcgaggcttttcttgggattctcccccacttcggactttggaagtatctttatcactgtcggcccgggatggctgcggacaacaccagcttgttggcagtgcaagtttagagcttcgccggggaaggaaagtggagtatctcgatattcctctcaaggacagtatcaaaggatgacgtcttgagtggttcatcgtggaaaaccactacaactctccccctcggtcggggaggcaaccagatgttcgcacacctagctgggtagaatctcctaccttttcggagataacagaggccaaagtattacttgctgagatctacttgttgaaggataggggtctgactgctgaagctgtagttgctgacttcattttcaaaaatatccaacccttgaaggacagaatttaccccacttacttatatagcggtgtcaatgattccacccggg

SEQ ID NO: 71396 - DNA, 647 bp, Zea Mays
tggctttattcttttcattccctttgatcatcttcgggtcttattatttattctccttctggttttcttccgtaagcttcttcttaacaaccttcggcactgccaatgacttgctctcttcatatgatatgtttccctttataggcacgatcttcttcgtacgctttgaaatcacgttccccccttcacctacctagcaacctctcgctcaagtatgctaacctctctttttctttccaatcaagcttcgatctctttggccaggtttggatagtctagatacttgaacttatatgcatccattacttggttaaaccttttatttttctcgacctccaaaggatgttgtcatcaaatgatcttcttttgtagtgtaattgcccaagattgcattactaagtttgatagtctcaaactattctaggcatggcgtttcaaatagagcgtgatccttgaactgatatggaaacttaatcagaacaccaggctttgcttcctccttctttggctctagcatagaccggccagatctcataggcaaaaccttgtatgataggaattcttgccaagtcttaggtgttgatgttgtcaacaacagtattaaaggcaatgtatgtcatttgtgcttcgccactcatgttacatat

SEQ ID NO: 71397 - DNA, 481 bp, Zea Mays
aacttatgagcctgagctaggtctatgtctaagttagctttttcgagcctgtctcgtaacattgcgtgcctccccttttatagctgaaggggggcacatacaagggtgctgagccccgacatgcgggcccagggacataacgaatgtaatacttggagcaactaatgctggtcgccagtgcaatctccttgcgcccagatatccgtagcctgcgtagtatcgacgtgcagcggaagtttcactggcaacgtacgagtgatgatgggcatagtgtatgccgcagcacgggcatactgcctgccaacggaatggacaagcacgccgcctgtaggatggcctggtcgccgcccgtcagcggagtggacagggcacatttaatgctgaggcggcacatcgcctgctagtggagtggcagggctcattaaatgctgaggcggcacatcacctgccaatggaataaacacgcggcgcgccttatccg

SEQ ID NO: 71398 - DNA, 651 bp, Zea Mays
gtagaagtgacatgaaatgatgtacctttgtgttttaccttttcaagggggtgttccaaacttgtgttgggtttaaaattcatttgcaagctcttgttggtatagttgtgacaaaggtccaagatattaaatgaagattgtcatactaaatcgaaggtgaagcttgatacctggagtctagatgtcacctagcatcttcttatcacagcagaggcaacatgaaaattgcacaagtatggattctacaactagtgatcatgtacgaaaaataacaattgaaaaacaccaattgatacaatttgttagataagcagatcactaattgcatattacactaagttctcctcaagttttagtgcgcacatatatatgaattcaattgatacatgttgagagtacttatttgcaacttaatgtaccattggcataaaaggagtatcaattgaacataatcatgcaacacaaggaatatgtgcactatttaatcaattaagttctagaaaggagaattcataagctatgctactttagacatttgcaaaccaaaagaatatgatacatgtttaccaattttagatgacgttggagtagcatatacatttattggagcaaagaatcttgtatacccatcaaatttgtagtggaagcgat

SEQ ID NO: 71399 - DNA, 470 bp, Zea Mays
caatattatgaatgtttctacaacaatagctattcttcttttaaaactgcttctgcagcttcgtttagtagttgagtcacagcttcgtccataatagcttcggccatctttgtaatttcatattccttttttgcttcggggtcggccaatgactcgaaaggctctgggggtggagatagttcagctgcgatacaaaacataaataagtttgaagtcacagaaataaaacataaagtcaaaagcaatcaggtaatacctatccgtctttcaagttctgctgttttttcagctgcatttgctgcttctctagcatcgtgaatatctttttcacttttctttataatttcgtgagctatccctcggccaccattttcccagatgtcggtgaaaaactttccgccaactaagattgcctcggccgaggggtcttttgtatcttcaatagagaacgcggcttcggcttgggccag

SEQ ID NO: 71400 - DNA, 605 bp, Zea Mays
atgccgtcttcggaatgtctgaaggttgaatcctgagctgatgataacctgacctcagatctatcttggagaacacgctggctcctctcaactggtcgaacagatcttctattctgggcaatgggtacttgttcttgatggtgacctcattcagagctcgataatcgatacatatccttctggtgccatatttcttctccacaaataggacaggggtggcccaaggcgaggtgcttggccggatgtaacctttctctgacagctcatcaatctgcttcttaagctcaaccaactccggtccagatactctgtaagctctcttaaagatgggggcagtgccaggaagaagctctatagcaaattcaactttccgctctggtggcatacctggtaggtcctttggaaacacatctgggaactcggacacaaccttgataatctcaattgggtttgtttcactgctatcgacagccatctgataacaactttctttcttcggctcaggcgggactaactcggtcaccactttctctcctagtggggataccaacttgattgtcctcttatcacaactaataactgcctgatacttgtctagaaaattc

SEQ ID NO: 71401 - DNA, 436 bp, Zea Mays
ctggtacaaagaataaggccatgctcctaaatcacttaagcctaaattggtgacttatgtaaacccggctacacccaacaaacttgacctgcataacaggttacataacctatccaacccatctagaagcaaacaaccaaaccagattttgactaatctcatttaactcataaccacctactaaactaactgctctacctacatttcacctacaaatttgtctcaaccacatgttcctaactcagatggagacacaagataatcaacctcatcaagaaaggataagcaccaactcaagtcttcaaggaccaggctggatcgccagatcaatcaagatccactatctatgatggagtctttccttaccgtactttttcttacccaaacccctctatgctttaaagacatcttttaccatacacagtaaagtggatat

SEQ ID NO: 71402 - DNA, 294 bp, Zea Mays
caaaactcttcatagtagtcttcatcttgtgtccttgttctgggtagtgatgtggttcatgtattctgtgcatagatacgtgattcataaatgaaagcatagatacatgattcatcatcccacttttgtgatgtggttcatgtattctgtgcattatatccctacaatatactactctttaaatatctctcactatttcattacagcattcactcccaccgaaatactcttatatgcatgatattatatacatggtagttcatgttttttcccacccactggaatactcagtct

SEQ ID NO: 71403 - DNA, 605 bp, Zea Mays
aaaatgctcgggcgaagggttatcggttaatatgagccgctcagatctagatcaatggccctgatttaacgcgtgaaggggtttgcagatatctaactcaattagaccgtttcgatctcgacgatctaggtttaatgaagacacaatctaatcttagccatccgcaaatagatcaacggtccagacctatccccgaactggtacttgaatgatctaatcttgtgcgttcaataaggatccgatggtcatagtgcaccaccacactcctctcacctttttgccgagtcagagcggtgttgtgacccatacccggcgacgccatggccggggtaacccatccgtggtactggtgccccgttccttcccctcgaatcgctcaatacatgtagaagaagatcacaaactcgaagaggctacttaccggtgacgaattacgatggctcgagctagccacggtagacgacggcttggtggctccggtgagaaatcatcggtgacctggtggtactcccctctcgtgaaggctacggacacgttaccgaagacgtggcaaagcttcctgtcctggccctaagaactcgacgccggcgcacgcatgaatcaac

SEQ ID NO: 71404 - DNA, 394 bp, Zea Mays
ctcctacttaacatgagttggctaatgacgtgactatttcccaattaccaacatacaccacctttcgccatttttggataacctgcacgacacacagctattgtaatacatctcaagttcattcaaccccatcagtatagcactagcacatttcagaaattttcttgagactacgatatcatgcacctaaaagcatcacaagcatatttacggaacctatcggttaacttgatcgacacactacacatgttcttcgcccttcaaaatttatcacacaaccgaaatcatcccacttgctaatgacaccaacaatacctactgatttattattcacaacaacacagttacacgccgcatactcgtttctaacataatcctcacataactcgtaatt

SEQ ID NO: 71405 - DNA, 296 bp, Zea Mays
tagtgacattcctctgagctagggcttaagggtgactgggtgcttactgttgtggtggatttatcacccatctcccttgttgttcctgagccccctgctctagatgttagacaagattatgaaacgttgaggctatgtggagggtcctgccatgggtgccttccacttcttttctgctatgtggtacatgatgcaatcttcgtgtgacatggccaagttgaccagctcgttataactgttggcccagactgtgttgaggcgttcccggagcttggtgctaagacccctcctaaatc

SEQ ID NO: 71406 - DNA, 593 bp, Zea Mays
caacgaccatgcactggctccacattcgtgcctcatacgggaggtgcaaaatcaaatgctgcattgaattgaagaagccagatggaaagatcttctccaacttccacagcaacatcggtgccattctttccaagcctgcaatcactgtctgagataactccttggcacaaagctagcaaaagaaatagctcaactctgtactcactagctagacatgctcagggatatagcctcgaaccatcaccggtagaagttgctcaatccatatgtggtagttgtgactcttcatttctaagactcgcacagtagataacttcacccctactcaggttagttgtgtacccattaggatcaactctagtaattccctcctttggggcttgctcaagaagaactcaaccttaggccttctccatgtctttccactactatggggcttcatctcttggtttggtctatcgtataatgttgctagatccactctagccttaacgttatcctttgacttacatcaatattgtctggaaggagaaggtcatcaaaatagaggagcaaagtcaagcccatcttatgagtccacatatgatgctcac

SEQ ID NO: 71407 - DNA, 347 bp, Zea Mays
ggagaccaaaccagggttgtggcttgctgattaccggctggcctatcagctcgggggaatgagtgattacaacctcataattcgcaatctaccccttttcctatcggattctgcccgtgcatggctagaacatctcccccttgcccagagccatgactgggaagacatggtcagggtctttggggggaatttttaggacacatacatgcgctcggaaattcttgggatgtcctgagttgtcgatagaagcaagacgagatcctgtgcgaatacatttgctggctctccaagcagcacaccgagctccccaacatcactgactccgacatcattagggtgttcctcac

SEQ ID NO: 71408 - DNA, 558 bp, Zea Mays
gcgatttcgtggaagaggctgaggccatacgccaggatttcggggtggaatttctcaccgacgggcgagtttcaccttgcggccgtagctcctcgtcgggaattcacagcaccgcacaatccttggaaataaactcctccccgtgctcagtatatcatctgcaatgcgtagctaggccgaattagaaattggacgttcgagtgcgcagattggatctccggtcacgggcgcgcgccgcacgaggtttctctctgccgtagctatgcggcgaggtagacggcaaggcgtgggccgttgatcgtgagatatgcggcccggattagagaaaggataacgtttcggccctccaatatgcactgctgaccggcaattggacggatcaacgcagtttatagtaagatgtaatcggcaccatcggttcccaatccattggttactattgcgtaccggttcgggttgatccggatctaatctcgtccgtccagactcgatcggatggcccgtgttggccgataccccttcgccgatcgcttttgcataagagaccttaggttttta

SEQ ID NO: 71409 - DNA, 1319 bp, Zea Mays
caattgcaaccgtcgaaccttcgagctgagtgatcacgacagttgttggccatgttctcgtggtcttgagagtggcatgggcctcctccccattttcttccaactgatctaggtctagacctaggtcgataaggtggataatagggaccaccgtgtcaaaactactatagcagtcggccgaggaggaggcactgacatggccacacatctagtcagcatggtggtggcctgacgttgcgcacgggtgaactagggacctagagcctatggacgttccagcacgggttgagccacgaccaactagggtttagtcgtggttgtcactggggtcgtcctagattttgacgagggcctcttctccgttgaagtgatgatgtgaggcctcggggcatatttccccacatccgctaagtggtgcagggcattttttggtccacgacacaggagagggatccaaagtggaagacctccccggcggtgaagttgaagacggtgttgacgatgatggccttggatctatcgtggatcgatgttgcacccctacctcgcgcgctagctatcagtgtttggtaccaatgacacactaaagggtataccacgttgtgcttttgagatgttggcaaagtcgctcgctgctcgatggttcgtgcaaagcacgacaaaacacaatggattatacaagtttgggccgctcaagcaagtaataccctacatcttgtgtgctctggtatgtctattgctaggtgattgaggattatagagtgtttctggaggcggaatatgactacgctatggaggattctcctatttttgtaggggttcctccaagccttattgtcaactaagaagggatcatcccacacaacttgggtcatgatctctatctatctgcttctactagagctaagccatgtttatcggtggttagctagtctttgggtggtctatacgtactctgcatgcacatgacatgatcctggaagccttcacacccacacatttgtctacttcgatcatcttcggcagcatccaactgaggcccactatgcgcctttcgggcggcccactgggggccttgcagacggcccatgtatcataaccgagccatggtgacctaggggatatttatccccacaactaccacaacataaatataagagcagcatcaccgtccttcataatatggaggacttgaaacaaatgacctagcactattggtcagcaagattgtagcatttgaaatgtcacagaagatgggtcaagaaggacctacttcattaaggctatatgctttcacatgtgaagagaatagaaatatg

SEQ ID NO: 71410 - DNA, 481 bp, Zea Mays
cagccctgggcctctctacacgcttcacctacctgcttcccctacattgacctctgccccgcctgttcttgcagcggccgcctcctctgtgacttggcatcgtcgtctcggccaccccgggcgtgatgtgatgtccaagctctccagtagtacccctatttctggttatcggggatcttttgagcacctctgtcatgcttgttagttaggtcgccatgttaggctcccattccatacgtcctcttctagggcagcaggcatttttgatctgatacactatgatgtacggacatcccctgtaatcaacatttctggctataagtactatttactcattctcgatgaccactcgtactacttgtggacttttcctttacgttagaagtcggacacttatcccaccctgtctcacttcttctcttgggtatccactcagttcagtcgcaccatccggagtgtccagtgtgacaacagacgcgag

SEQ ID NO: 71411 - DNA, 437 bp, Zea Mays
tctaacttaaacgatccttgtcgttgtatgcgtagggaactcgagcttcattcctctatgagagctttgattcttttgtccgtcaccttgtcgatattatccatcatcggcatatcattttcttagcaagttgatatgcacccaaattcacttcgatgggcagcatgacctcttgcccatgtaccaactcaaaaggagtaacttttgtaccaccatgtctagatatgtgatgtgtccatagagctccaaaaataccacataccacctttttggcgtaagaaaaatagatcttgactcatttgtttagtgattttggtgttttgatgatcaccataacaattcgtactaatgtgttcgctagtgtttatgtttataattcaaaggatgcagcgtatacttggactgaggcaatgaggatatgaatacctcaagaaaac

SEQ ID NO: 71412 - DNA, 1010 bp, Zea Mays
tctatgtcggccaattctcctaattgtgctaaaaactggcctatgtgttcacgtgtgctctttccttggtcacccgaaaattttgcgaattcgggtatcctagttccctatgggcatgagtggtggtcaaatcgtctatcataaggcctccgatatgactgcccccagggaccatgcttactccgagcttatctcggaacgcccaggctatttcttcccttactatatcaatagcattcggtgggagaccaccggctctttgtcctaacataggtgaggttgtttggacatcagtttgttgtcttccccccaattggtttgagttctgtggtgcattactatttgccctatatggttcataggactgaccattcctttccggccttttaggcggagccagcaagtactcgcccccatgggcttgggattctgtattaatgggccggtgcattgtatagtgtgatgggaggtgttgctgggacgggcgaggatttaggcaataatcctcctcaaacaaccgtgtgccagaccgtctagtcggatacgcgaaccgtctgtgatcgtatgtggaccgtctgtcgctctatgtggatggcctgattgggtagtttagggcttgtgtagcatgtggcggctcgaacgcatatatcggtaactcattaaaaattagaccggtcgttgctggcccaaacagtccgcgctcacgtgcggatggtccggacatgtgcagatcggctaatttattgccgatgtgtgtaggaggttatggttgctaagggtatgtggccatcgacatcccatcaaggggttgtcactggtcgtgacaacctgtagccaatgaattatgcatgttttcccccaattcaacctcgtgcgaaggaaaatttgcaacagtggatttatcaaacgcacgtactagccgtttataatccttttgtataccccctacgatatgttgcattttctctcactgttcatctatgtaagctttaagagattggagctcgttg

SEQ ID NO: 71413 - DNA, 579 bp, Zea Mays
gtgttaaacataaaacaagaatgagtgttatttttatcactatgctacatagtaaaataaatctactaactagtagacgatattaatatgagtccaaagcaactagaatgaatcaatttggggttaaatcaagcaagttatgaatttactaactgtggtgaataagttttatactaaaatcactttatttatttgttttactaattccattaactggatggactgcacacttatatcccaaagattaggggctcttttataaatgtccagggcacgaatgcaattaatttgtattggctacggacggcgggttgattaccacagagttgaggggctcttacgcaaaaagggctggccgaaggggtataaatagatctcggccgcccgataaaaggtggacggcgcatattaaattggatccttctcgaaccggtatgcgataccgcgcgctggatcggagatcaacggcgtggattttaaataccagagatctactcctactcgtttgatttggatcaaacgactctaccaaacgcgacgaaggggtacacgtcttataatcacagccgcccgagccac

SEQ ID NO: 71414 - DNA, 832 bp, Zea Mays
ctactatagtagtacaagtttgattaagtggctaagccttggaactgtatggaaattagagaaaaatggacttaaagatgggctatcagtcgagcatctatgtgaaattcagactcacagtgacattggatcaattttaagaccagatagcgcccaatctagtggatgtttgatcaagatccttataacaaaatcaaagctggtacattaggcaacaactttgttgtagttggattagtgggttgtcacatgaaaattggagaacaaggcccttcaagttgttctgtcagaacgaccgatgagggtcgcatggtacagtaactgaactagatcagattcagtgaatctcgccgccggtgaacccgcgtcacgatccacgccgatcgctgtgattcatgctcagctcggggaggatattaccgcgggacataaaaagatcagagggggagtggatcgagccggcctcactgtaccgacttgcctggcgacgtggtcatgcgaccgtcgtcgtggttgtcaccgttcacttcggttgtgccacgccataagccgggtatcaccttgccgtaggtcgtgtgagacatcctcttaccctctcaggctttatcctcattgagtgccatgtctggtgaactccggtgactcaccacggcgccaccgtaaactccctctcgtccaaaattcggagccaccacttctggtcactataaattgacgcccttgcttgctctgttagctcgttatgaagccagaacaccacttttcgcccccgattagccaccgtagcccgagaaattggaatttccccccaaatcggccaagatcgccgccg

SEQ ID NO: 71415 - DNA, 1204 bp, Zea Mays
gtaaattacagggcctgatactaatggttttaggcaaatgaggatggcgggttgttttatatatactgtgagggctcttttgtgaaaaacgcacggcgaaggggtaccagaggatctcaaccgtccgttcgatcaccaaccgcccagattagatgctactttcattgaacaggtatgcgctatcagcccttggatctgggatccacggtcagagcatcacgagaccccaaaactgtccaatcactggtttacatcaatgatttaatgcatcgaatgggtatgggccaactaatcccagtcgttcattttctgatgagcgggtaccaggtcatctcccacatttgactattgaatacaatggtgagagagaccgcagcagaggctaccattgccgaagcacccaccccgcgttgaatacgtatctcctaaccgtagactggcgtaaaagagggcggaggcaagcgcgaactcaagagagggcgatactgtagatttgggtgaccacaacgctgcacacggtcagcaccgctgcgcagacggaacagctccgaggcgacgcttaatactccgccaatgttgtggcggcacgcccagtgttgtcgagttgtggttcgaaggtcacggatggatgcgtatttatggagacgtctgatttgttatggagtcgcggtaattgggaaaaatcccaacagcgcggatccgagttgccaaggctaggtttgccgcgagcacgcttcgcacggggacaatgacttctgacaaaatggccctgcacgacagaggagggaagatgccccgcccaacgctagagtggctgaccgatgggccaggtgtgtcagtgatagggcgatgaggatgtgcgcatgaggtcgggctggttcctcagggaagtgggtcgcgcggttagtttgtcctgggcccaaacggtggcccacgcatggttggagccggaccgaggtggcaaggggcgcgaatgggccgagaaagatctttccacttttaatttagtctctttgatcactttatttatttattttatatattttttccttataccaattttgggctttacatgtgctgatccagctgcacccttaggcgacttttgctaggataataatatgtgtctctaggacgacttcgcagctgtttcgcagttgtattgattcagctacactcttgggtgacttttgcttggactgtg

SEQ ID NO: 71416 - DNA, 478 bp, Zea Mays
ggttcttgtcgttctactcctccaactgggtgctgctccattcagtccggtgctcgcgcgggttggtggtaatggtgctgaatccgagcagttgagctgattgtgacggagagattggtgaattgatgtcgacttgtggtggaagtggttgctgttccaggcagttgaactgctattggcttgtgtgcttctctgttctcacagtgtggctcagcagaatcgtgaagctctggattcaagctttgcggaggcttgttagaaaatcaaggcctttcagttagtagtagttaccctgtcacttctttgttgggctttgtcaatgctccagggtgtagattccatggaagcatatggctgtgtgtgctgagcctcccctgagcaatttttttatgacgaactggggcagttgggtgtgttaaacacagccaaatggagcattcggttctggtggattggactggatattgagtttgcggga

SEQ ID NO: 71417 - DNA, 1707 bp, Zea Mays
gtagaataatgtagtggtatttagtagtgtagtgtagtgtaagtagtaaggtagtgtaatgtaatgtagtaagcagggtggaaaaaggtcgactcataatgagtcgactttgagtttgtgtaaccccttccaatatgaatcaaggaattagttgcctcaaatgatcactgttttgccgcttttctgtttgcgcgtttgaaagtttgcccatatgcctgatactgctagcattttagaggtaactaccaagtgatgcctgcggcttttgctttttcgagtagtgacatggcactttagagatagtgcccgacccaagaaaccccatttatactcgcgccgacgtgccttttttatttccgagccctaacttcactttttcccttcggccattcctctgcttccctgaaattccgagcctgctcgtcccgccggaaagatcacgatggcccccaagcggaagaggcagagcaccgctgctgcaatcatcccgcccatcgaccctaatagctagcttccgttcactggtaaccaatgtctgtcatctctgaattcgacattcttcatctcgttgaaattggggttttgcttccgaaggagctctgttcttggcggatctaccactgtgtcactgttccaacagaggacactcatgaattcgtcgtttacgttccatttctcatccgcgggcttgctcttcccatcatccccctttttccgcgacctccttgatttctatgagttgaatctgacgcatttgaaccctaactcaattctacaagttgtcattttcgtacatttgtgcgaggcttttcttgggattctcccccacttcggactctagaagtatctttatcactgtcggcccgggatggctggggggccgcatcagcttgttggcggcgcaagtttagagcttcaccgtggaaggaaagtggagtacctcgatattcctctcaaggacagtattaaaggatggcgtcttgagtggttcatcgtggaaaaccactgcaaatctctccccctgggtcagggaacaaccagatgttcgcacacctagctgggtagaatctcctaccttttcagagataactgaggccaaagtattacttgctgagatctgcttgctgaagaatgggggtttcactgctgaagttgtggttgctgacttcgtcttcaaaaacattcaacccctgaaggacagaatttaccccgcttacttagatataggcgtcaatgattccacctgggttacaaataggaggattcccaatgaagatttgctgagccgattggacatgattctgaggggcagagtctcgaatgttggtcctcctgtagcctattatgcgtggaacctaccgccaaataggccattctttgaatttgtctccaaccctcctgctcgtgacagtagcccgggtcatagagtgcgaccctctcctgaggacattgaggccttgattgctccactttggagtcttcccgaggctgagaggcaaactcactttgagatgccagccagcactgatgatgccgagatggatgtcgtgcttagcctactagctagggaatcgtccgactctacccgcacctagctgatggctatcacgactgggaaataatttggcgaagaggtggaaattcggaaatttgaaggtccccacccaaagcgttcacgccgagtgaaccgcccgaccgcacctgtcg

SEQ ID NO: 71418 - DNA, 678 bp, Zea Mays
caaaaaaacatccccatcctaattacagcttcgggagtaatctgatgaagaaagatctggaatatcttcagcacttcaaccacaaatttgctcaacgggaatcaaaggcatgccttcaaaaagcttcggtaaacaacaacttcattttcctcaggagcaggggcggtgctgtctccttcaactctcacaatagacatgtcgtgaaagtatcttcctctcatggtgtcaatatgacttcgtttgatggtcgattttccaagatggtgtggcttggtcgtcagggccggtcctcataatcttcatctccactttccacatcataatcatcactgtcatcagaatcttcagacaaatcctccattatctccttggtaattttctctgtattcgtttttgccatagattcataaaatccagcaataaaagaatctacaactttcttctcctcatacaatttcttttcctcattcatcttcttctcctcagtcatcttcttctcctcagacatggagcaagcacttgtctttaaaccgaagctcgaaaattaggcgagggctggtgggcaaaagttaaaattttgagaaaataacgcaaacagcagaaaaggcgtatcaaatgctgccgatgtgggttcctatttatacgcctagcgctttgcaacttggcggaccccatttt

SEQ ID NO: 71419 - DNA, 368 bp, Zea Mays
gtgaggggcatcattcaacatcccatatggtcacgtttcggcattaggaggccatcaatcgcaattgggaatgaagtgcaagcgtgcttaatggctttcaacatcatatgtatctacattggtaccagagatttagttcaagatcacatcgctttcaaagtatggcctcttgcaaatgaatgggaaatgccgaaggaagctgccgctggctctagtcagggtggcttggtttatcttaagtacaccttccggtacagaagtcaatttgacgagctaaatgatgattggctagacgctatagaggcaacgagtgatgagctacttggagcctactcgaggacagaagacgaagccatgacagttgcctt

SEQ ID NO: 71420 - DNA, 1084 bp, Zea Mays
ctaggggtaaaacttcctgagatgttctatgttccatgagttcccaatttctgttccgtccatctgagtgaggcgatatgatcccggccgagtgacttctgttactatgaatggtccttcccatagaggtgacaatttatgccgcccctcccccgttagaattcggtggaggacgagatctcccacttcaaaggatcgatgtcgtatggccttatcatgatagcgcctcagagtttgctggtatcgtgctgattgaatcactgtattcagtcgttcttcttcgagtacgtcaacgtcttctagcctagtagcttcagcttctgctatgttgtcaaagattagccttggtgccccaaacttgagatcggcaggtaacactacctctgaaccatagaccataaagaagggggtatttccatgcagagctcggctgggttgggttctcaggctccaaactacatatggcaactctctgatccattttcctgcgaacttttcattcttgtcgaagactttttttatgagtgcttctaatatcatcccgttggttctttctacttgcccgttggctcttgggtgcgccaccgaggcatatttgatctgaatgctcttttgctcgcagaaatcgaagaattctgaactggtgaagttggatcctaggtcagttatgatgctattcggtatcccgaacctgaatattatatcttgtatgaattccactgccttagctgaagttaaagaagcaatgggtttgaactctatccatttagtgaatttgtcgatagccaccagtacatgagtgtatcctccttgagctttcttgaaaggtccaatcatatccaatccccagcacgcgagcggccaagttatgggtatagtctgcacctgttgtgctggtagatgctgctgttttgacaggtattggtaggcttcgcacctctgtactaactcagctgcgtcactcttcgtcgttggccagtagaaacctgacctgaaaaccttcccaactagggtcctggatgctgcgtgtactccacattgcccagcatggacctcatccagaagttgctttccagtagctgag

SEQ ID NO: 71421 - DNA, 458 bp, Zea Mays
gatacaagagactggggttcagacacaggagaatgcagttcatgagacatggctagcggcttcttctagatggcttccttccctgtagatatgcacagaaaattggcatcaaattaatgaaaaatgaagatcaatcaataaaataagataacatgccacaactctgactctgcgaaattaactcaccctacaaggtgaaggcgacagctggatctagaggaggatgaagtgagacacggagacagggagcggacgagacgaggcgagacggggtgctgcgtcggcggtgggtgaagcggctgctggatctgaagggggacgagctgagaccctgcgtcggcggtgggtgaaggcggcggcgggatccggaggaggacgaggcgagacagggaggcggagagcggacgagacgaggcaagacggtggttgcgtgcccgaccttctgacgcgtgtttttc

SEQ ID NO: 71422 - DNA, 1014 bp, Zea Mays
tgaaactcggagaacttgaagatcaaattgtgaggaattgagtgagtatatgagtaagatattcataacaaacttgtagctggttctttggatgacaatattgatgcagacaagtgatcgagttgttacatgaaaagtagagaatgaagctctccaaaacgcgctgtcagagtgtctgatgaagatcgccatggtatagtgaccataaagatctccggtgccgtgagctcgacgccggtgatttgccaccacaatttgtgcccgcttgggagattcgtgctgttgggagagtagataacgtcgggggctcagggcagggtgaaaatatctagtgtggggtgaatccggttgctggccggacaggccgtcgtgtcccaccgcggtcaatcacgctggcatcactggagttcaccgttatccgaccaggatacgtgcctcaaagccttaccatgtcgtagtagcccgccttaggtagcttgttcatcgccagagacactgccctggtcaaagctacggtagcgcttgcgccagtgacttcccctctctctggccgccagctcgtcttctcgaaattagatgccaccaccgtaggactctataaattgctgccctagtgagttccgctaggtatttacgcatccaacgcaccagcccttgcctcggatcatccagcagagtctcgcaatttcgtgtttcccccaaatacgttttccgcgccaccgtgaatgcttcgtcgtggccagccctctgcaggtcagttcatgcttccttaattggtgttctagcctccctcaagcatgttgttgctcgtagacccattcgattaaactagaccgcaccaaatcatcgtgaacaccttagattatctcggattttcgccgtcgttgtgggcagagagattttggtcgggattcatgcaatttgttgagggattagggtcgccaggggtagaatttggtgccgaccgagtaagaagcttagcctttgcgtatcccggccggtacaagctcaccg

SEQ ID NO: 71423 - DNA, 671 bp, Zea Mays
caaggaggttgtaattaacatctgtgccggggagctctctctagttgtatatatatgaccaggaggcacccctaccattttcatctcatccacagccccccattctcgtaatcatagcttgtaaactcaccattatacagaaaaccaccacaggaagtaaggtattatgcctctcaaagcggcccaaacctgctcaagcctgcatgtttccctcatcgtgcaacagcacgaaccatcgagtcacaatctatgacgttgtcatacccaaaagcatcacgagggtaaccccgggtgtgcggtcaggacaacaaacaccgacagaagtaatatgattggtgtgaggagaggtttagaacaaaagagggagaacacaaattgcaaattaaaacacataaaagacacgagaaatttggtttactgaggttcggttctaaagaaactatgtccttgttgaggtatcctaaaggatggggtctctttcaaccgtcttgaatgatttcaaagatcaaactcgagccctcttctcttttatcaaatgatcaagagacctaagtctccagcaaggtactccacaatggaagtcaaatctctaagcttaggagcacataaagctacaacacactctcctcttgattactctcacacaggacactatctcaattcactaatcc

SEQ ID NO: 71424 - DNA, 410 bp, Zea Mays
cttcttcagatagcttctttctcgaagcatgtcgaataataaagttagaatcttcggacggtgctttgggggtaggagatctagctttttcaggcgcattttccttctccagagccatgccggtacctggatatttttgcttagctctctcagttacaataggccctgcctccgtcgacgctgagggctcagcttcggtttcagcacaagccaccgcagcttcggcaacctttcttgtaggagcaggagttaatgcccttgttgtttccacgacagcgtctagtacgctagccattcttctcctcttgggagttattgcgggagcctttgcaaccttcggcaattctgcttctgccggtgggctcaagatttctggcaacactattgttatttctagccctggctttttg

SEQ ID NO: 71425 - DNA, 498 bp, Zea Mays
taaggcatttctagacaatgaggaaccacatccccgatgtcgtgaaggcagacgtgatcgaggacttctaccgcgagtccaacgactcagtcttcgtccgcgctatcctctagatggcacccgccacctcagaacaaatgttccgggaggtagacatctacatcactgccaacgaatgagcccaggacctcatcggccacacgaagcctgcacccccgacaccaaagaaggacgtgaaccagcagcaggacaaatgctgggaccaaaggcccagggaagaagtccatgctatcgggccgccagtgactcggcctcacggtgcgccacacaacaatgtatggatgctggacgagatccttgactcccagtgtccatagcacaaggagatgcaccacacccggtaaaactatagggacttcaagaattccatcggccacgaccgactgaataaaccaagagggctaaccttggtttctccgatgagcacaaggcaacaat

SEQ ID NO: 71426 - DNA, 860 bp, Zea Mays
ctttactagaagacaaatccgagcaaaagccgcccaagggtgtagccggacatggacaataagtgtgcaacatcacccaagggcgcgaagtctttactataagacaaatccaagcaaaagccgcccaagggtgcaaccggacatgtacaaaaagtgcgcaacatcaccctaagggtgcaaagtctttactataaaacaaatccgagcaaaagccgcccaagggtgcagccggacatgcacaataagtgtgcgacatcaccctaagggtgcaaagtctttactacaagacatgtccgagcaaaagccgcctaagggtgcagccaaacatgcataataagcgcgaggaatcaccctaagagtgcgaagtctctactatctgaaacagccgaacaaaagctgcctaagggcgcagccgggtacgcgccagaagcgttcggtatcaccctgggaagcgaggtccccatcccatccaagtaccataccaacacgattacaaatcgagacaatcttacaataaacgtagcacacgttataccatcgtagtttacatacagaaagcaaaaggcccgtcggccacatcgcataaataatacaaatcatattatcgtcgtccctctctattgcgaagcgggggagggcagtgttttcactcactatcgcaacacgagagcgaggccaacaaacatgctacatcggctcagccttcggaataagacccgcctcccgataattaaacaacaacatctttaacgctttgccttcagacaaatttcgtaaatccccctccccgatacacgccccggacgttgaggatagtaaaccgcgttggccgccccgatctagtcaaagacgggatcgtt

SEQ ID NO: 71427 - DNA, 574 bp, Zea Mays
atctctgaacttacctaaggaagagttggactgcacaattagaaagctcagtgggagtggaggtggggaggtggggagcaacagaaaggagatactgttgcattgcatctgcccgtggattgtgggtccgcgtactgctacagcctactggactcatagtatcggccttgattatgcagtgtaccggcacagttgtgcagcgccaggccgagccagccaccagaaaggagcaacacatgtatcaaatggggaaaataaaatgaaatattaatcctagcgtaaactaagatgcgactggcagcaccaaatggaaaaaatgaaagaatccaattccgtcggacgccattcattcatatccatgtgagcacttggttgttgtgcgcatgcaacaggaaagcaaggcatgtagtatagtccaaagcttacttacctacctttgtcacaaagctaacaaaatgacataggatgcatgctaaatatttctgtagtgaaaccgcgatcaacctcagtgcataaaacgtgaaaccgcgatcaacctcagtgcgtaaaacggtcttctctttaccaaattgag

SEQ ID NO: 71428 - DNA, 362 bp, Zea Mays
aacaaaaggtgggcatggcctatagagaaacatgggaatggaacctggaagcaaatcccggaccttagcctatggttgcgaaccactagcttccattccagtatgagcagaaagaagcaggagggacaaaatagctaggatgtgaacatgacgaggaagaaggatctgtgtacaccaatgttgttgcgagctatgtactagagcatcagtgaggcggccgagcaaggtgatgagcatggacggtgaagcttcatagtcttctttgagtgagcggacacaacgaagcggcgaggagcgctgcttcatgccatcactactcactatgtcatcgagatcactcaaatctctgggcgctagctaat

SEQ ID NO: 71429 - DNA, 689 bp, Zea Mays
atcaagttgagcattcaaggaagagttcatggtttgggcaccatccaagaatgcagaaacctagtttagatcggcttgactctgagcacacctctcctcagcgtcggaacactgtcgagtcagagctaggagagtaataggaaaaggtacatggggtaagacgaaggagcaacaaacaccaaaaaagttatcaacccgctaaccgatgtttgaggctttcaggttatctatctgtttcggaagcaggagaggattccactgcagcatggattgaacctgattggggataagggcaccgcatgacctcagttgagctgacacaaagctcagggtattttgcaaatacaagaattaacaaaggagtcctttgtcgatgaaggtaaagcatggtaaggatccgctcacctaaaggttaggaaggaacaaaggaaatcccaaagctggaggtgccatcgaacgacgggacactagtagaagcaatattgagagtagactcgagtcctagaggaggattagaactcacgcccaagccaatagcatgtagcggatcctcaacgctcgggtcactgacctctaaagtggctgggccaacaagagtagtaggaagatcaaggcttgtcaacgttggctcctcagactgaactggtagcgatctgacatgaacgtccatagaaacaaccaaagaggag

SEQ ID NO: 71430 - DNA, 609 bp, Zea Mays
ttgggacgcttcaggtggtatcggagctgttaggttggccgcaggacgtaacccttagcctgatcaaaagtttttgagtcaaaactattttcttaaaaaaattcttgctctcatcccttcatttcaaaaatgttttctccctttccttctctcagaagtcagatggaggttcagtgccaaaccagcttctgccagaatgaagatggtttccccaagttgctgagagcatgcacagttcgcctcggaatcaggagtcagccagagtatgatggtcgtgagttcgtcgagcatggcacagagaagtgtgtcgtgactgtatacattggatccagtccacaccatgtggaatggagtgtcactgctgctgggcacagattcaaagacacctgccaagttgtcgcccgcaaggcattgaggaccctgtgtcagatctatgaagaagaagtggccgacacaccgctcagattctttccgtcctttcagagagaccgtcctgtttggatggtcaggatgcgtgcattggaaggtcagcagctgcttgaggacgaccccacagtcgtgtacctcactgcatacctgctcaccctggatgcacaatatgatttcttg

SEQ ID NO: 71431 - DNA, 488 bp, Zea Mays
ggacaatcggggcgagcgtcgggtggccagtaatggcatgagtggtgggtacggtggtcggctaggccggtgtcaaggggttgaagacaccaggatagccctggatcataggatggatggctagattaggtctggtacatctgtttggctgggatgcgatccgttccgtcaatctaggcgcttgatgcaatctgatccatagatcgtattctcctgggtgatgcattcaatctggggccgtgggctggcagccgtggattcgggatcagacgtacaccagcaaaccccagtacacttagcaaggatttaatcggaaccgtttatcggatcgggcgatccagatcccgcgatacccattcgcgggcctgttttacacttaagcccttggggagaaggaaaaccaacccgtcatccagttctaagttagtcttacgaaaatttatgtagtggcccctgtactattctgtttttatgcgcgtgaactagag

SEQ ID NO: 71432 - DNA, 381 bp, Zea Mays
aaaaaaagacatgctaccaccacaaaacgaacacgccaacagccaggatgcttacctttttctgtttcacggccgcccttgccatgtaaggacctctatcctctcttccagctttcaccaacgccaacctttcttccttggacatctttctcctgacgtgagcctgcccccacgaaatttattcagtgtcaagcgtgtgcattgcatgtgtgtcactgtgtgagtgagtgagtgcgcgacaaaggtacaaggagagcacctcaagctcaagtggatcgacacgcttcctgctgagctggtcagatgatggcatcttaaaggttacagaccttgtgtcgacacccttgattagtccatgctgagccaaagccagcttcgctt

SEQ ID NO: 71433 - DNA, 582 bp, Zea Mays
cttgaatgtaagtgtggaaataagggggatagagttttccgctaacttcatagtaatgggtactcaggtaatagatgtcatcctaggaatgaattggctagatgagtaccagacagttattagctgtgataagaggacaattaagttggtgtccccactaggagaagaagtggtgactgagttagtctcacccgagccaaggaaaggaggttgtcaccagatggctattgaaagcacggatgcagatccactcgagactatcaaggttgtatcagagtttctggacgtgttcccgaaagatttaccaggtatgccacctgagcgaaaagttgagtttgccaaagaccttcttcctggaaccacccccatttctaaaagaggatacagggtatctggaccagagttggttcagttcaagaagcaaatagatgagctgtcagagaaaggttacatcagaccaagtacctcaccttgggccgcccctgtcctattcgtggagaagaaggatggcactaggaggatgtgcattgattaccgagctctgaatgaagtcacaatcaagaacaagtaccccttgcccag

SEQ ID NO: 71434 - DNA, 288 bp, Zea Mays
ttcaggccagcgtgtgcgcttggttcccactcttcactcgggaggggtctagtgccgccacgtggcgtgtaggcgcgtggcggaagccttcggctagaagtaagctcatcgctcgtattcaatgcaagcggccgaggcatgcccagctgcgcacataacaaggacaggcatttgccagaccatgaaagcgcaaatgaccactctgcacattaccgatgcgtacagttgtgtgtaagtgcgccggccttgtacagtgcatcgcgtgatgtcgagggagacgttgtgtct

SEQ ID NO: 71435 - DNA, 524 bp, Zea Mays
gttgaagacgaccctccaacacatgcaccggagtccaggatgaataatgtgcaccttctattgatgatttttttaggggtaccttctattgacgagatgtatcttttgagcattttcttcgatcattgtcaccccaaggatattcgctgctccccttcctccatctccacgtctcgctccctgcctgctacacattacctcttgccatttatacatgttttgtaacttcaaaagttttaaacttgtatatgatttatctcccattattacactgcaaaggcatacttgccagacatataatcttacaaaacgcaaacgcagcttggctgtacgaaacaatcaaaggctacattaccaccggccgtctcttaattaggttgcgctggatataaaatctagtggatgctatagattaatatgagcaatcaatcatatgatcataccatagcctgtatctagacagatgacaaaaaactatacaattagagtgaaagcatagtttgatcgatgatactgaatgatag

SEQ ID NO: 71436 - DNA, 977 bp, Zea Mays
attttgaatacccagattatgacaggattgatgaaggggtcgaagggggtaaaaggaaaaggattgtaagtattttgggtagacaagctgcccgatctgtcaaggaggaccataaagcttcaaaaaaatagaagactcttccggaaccgaatgattcagctcctgagaagagaaaactcgacaagatatcttctgctgattcaaaggtacatgatgtgccagagaagattatgagtactccttcaccctctgctgctaaagtgttggagattttgaaggtaatgactgaatccctaccatttgcactgctaagtccactaaggttagatctgacaagccttttacaatcaaaggaaaccgcttctactgcggacaaggtcggggggggggggagaagagacaacagattgtgaatgtgatgtaggcgattgagcagacaccgccctcagcttcggtggcaaaagcagcaatgcctgtcaataccgaagatgctgccggagccgaagctgaagaactcacaaccacaatgtcagaaatcgacaaactcatatcagatgtggttgcctaggagaacattgccacagcgcctgataaggggaaaataattgaagatgcctctttggaagataaagattttgaccttcggcacctgggtgtccaagaacttttcgaagaggataaatcagagtaaaaagagtttgctatatcctgcggttaccagcccggatccatacccttcggtggggtcgacgaagagattttgggatgcattcgcgaccgcgcaggggtgaaaattataagcaccttatccaagagtgttggattttcgaagctaaaaacagacattagctgctacaggcaacaacacattatcgacaatttgttccactctaatttcaaagtaaggtttctctatagctctctattattaccttcatggtgatttgggtattctaactttgatttgcttttcagag

SEQ ID NO: 71437 - DNA, 314 bp, Zea Mays
ttgcagcacacactcgcgatcgcttgcgcacagcccgtcgtcgggactccgacgacgtctgtctaccctcgcacgcgtttgtctaccccccctcctctacaccctatacagtgtcatatacaccgccttttgcgtatgcatagcctcaccactgcgtcgttctcagtgtcgcatcgtcatcctaaggtgagactgtctaccacatcgtcgtctacccctagacatctatccctcgtctaagccatatgcaaaactccatcgccattggccgcacccttgctgtcgcgtttgctcgcgtcgttcgcaagcgtcgc

SEQ ID NO: 71438 - DNA, 377 bp, Zea Mays
caggctcagattgagggttggcgtcccgaggtcgacaaacgcctcgacaacatcgcgctggagcttaatcgcgccaacaagttcatggagagaaactctggcggccgcctgccaaccacaccttcgccgatgggccaatcggccaccgcctcccagaataccactgggaacgtgagtttgcgagaatccctctccaaacccacggtacgtgtccagatccattctctcatagctatgccaattttggtgatactgcacgggatctggatggggtcgtcgcgagggaagtcaagggggttgcggaaaattaccacgtctgaatttttcatcgttcgacggggacaatccgtagttgtggaagacgctttacgtgaatt

SEQ ID NO: 71439 - DNA, 375 bp, Zea Mays
aaccatgaagatctgacactgttatttccaaatatgtactatggtcaataattttttctacttctttagaactgagtattctgtcttgtggatttatttcagggttattgtatattaacagccaacagtagtgtccatttcatgcacaagatgaggtgtgaacatagtagaactgtcatttatggtaagataatttcctgaagctaataatgtaatggcctgatgctatttggatggttcttatgcactaagcatgacttattgctattattattttaattgaacacatagaagaaccataaatttaaccatttgcttcaagaactaatacacctttacagagagacgattggtaggcaatcgagtaatttagac

SEQ ID NO: 71440 - DNA, 501 bp, Zea Mays
ttcgttgataggaggagtcgcatatacaggctctttgtttccagttcgttgaagatcccagcgatctttgcgatcgttgcaacaacccgccgagatccatggcgggcgctccctgtcgctgctccgaagcacgtgctccaccacggactcggactccgccgctatgctataaaactcgaggccaacctctcctatccaaacagacacgatgacaaacgagattgcctgagcaccggcgcctgagaagatgtgagagaccgagggagagagaataagaacgccctgtgcggatctccctcaaacgcgagacgccgggatggatgacctcggggccgcgccacctgagccatcgctctgcaccggtcgggcttcttcatcaagggatcttgaagctattggcgtcgtgaccggttcgtactaggtgccagcaccggtgagaccctctcctaatgactcgatctctccatcaccatagccgcgcataatggaagtagatgaagc

SEQ ID NO: 71441 - DNA, 357 bp, Zea Mays
atggggaatcgaagacctgccttcataaagcttctgtaaacgacaacttcatcttcttcgagtgcggtggcggcgctgtctcccccaaccctcacaatagacatgtcacgaaagtatcttcccttcatggcattaatctaactctgtttaatggacgacttcccaaagatggtatgacttggtcgccagggctggtcttcggcatcttcattcccactttccacatcaaagtcatcactgtcgtcagaatcttcagataaatcagctagtatttcgtttgtaatcttctctgtgtttgttttttccatggcctcgtaaaaaccagccagggcaggatcagcaaccttcttctcgtca

SEQ ID NO: 71442 - DNA, 561 bp, Zea Mays
gaagagtgcaacgccctgagtcagccaaaggtagaccctaatgactgaagagagtcgatcatgaggtacataaagaacgaagaggaatcgaatgacaaggttgcagcagaacgcattgcaagacagtcagtccactataccatcatagggggcttgctgtacagaagaggcgtaggaggggtcctcatgaagtgcatccactcagctaccgggaggcaactgttagatgaaattcatgcagggaagtgtggtgtgcatgctgcatcaagaactctagtgggaaaatctttcagatccgggttttactggccaaccaccaagagtgatgctgccgagttagtccagaagtgcaaggcgtgccagttcttgtcaaaacaacagcatttacctgcgcagcagctgcaaactattcctgtgacctgggcgattgcatgctggggactggacatgatcaggcctttcaaaaaagctcaaggagggtatactcacatactagtcgccattgacaaatttatgaagtggatagaatacaagcccatcgcttccttgacctcagcaaag

SEQ ID NO: 71443 - DNA, 853 bp, Zea Mays
tgcaacttgagggtgaagttgacaagacgaaggcaactacgttggatagacgagcagatgtttatgctgctcatgaggtgttggttaggctatcttctgaactagacgaactgaagacgaagtcgatagagggtgaggctgaagtgcgcgataaaatgagcagagcacacacactcctatgcgatgtctatcatgaatttggatcaactatagcttcatttgatggtgaggtagctctgtttggtaaggagaaggcagtcttaccatggtgtttaggggcctgatggggtattttgtgttggttacctacgaaggcacctcaaacgttcttgcgcgtaggggttgctgacactttgagccgcttggatatatcgataaggatttcgatcacagtgtgtataatgttggggtaatcgcacggtggagttgactgctgatgtgttgtttgactgcatgtggggaccgcatggtgtatccatggtgaagcagaggtccggtcgaggcatcgaacaagtgattaatatcgattttcgcttttcattgatttacttttagggacacacttgtgtaggctaaagttgtgtttgtttgacaggcacatttatgaggcggaggctggtgggtctgatgactcggacatggaggttgacctgctactgtcgatattaggtgcggggctggtgcgaaggcgtcaagattgaaggcaccttcgcgtcatgatgatgatgtatcaaaagatatggagcgggtttaggcaacttggggctaggggtttcttttgaggacatttgttgtgaggttcagggaaatgatactgacaaacttcctggatgcctacaggtttcgaagtctg

SEQ ID NO: 71444 - DNA, 1126 bp, Zea Mays
tgaaagaatgtcaatagcgtgtatatcaaaaaaaaatagccgaacgacataaaatgacattccttttaataaagcggggagggaatctggcacgcagaggtgtccacgtctgcaaaatttgtctcaatcgttcgattcggcgtgtacgtccaagatgcaacacgtgagtatgaaaatccccacaccacgggatgcttccacacaagactgctaggttccgagtcaaaagcaaaacagtgatccgctggccacaccacgggacgcttccagataaagctgccaggttccagtccaaaggaaaaaacggtggcccgctagcttctccgtggacgcttgggcaaagatctagatagcgctgcacgccgctgcttctccttccccgcgagtgtccgctccgtacgccggcgactacgatcctgtttctggtgcgtaccttacagtccatccttcttcacgtgtctacgctcttcactgcgccatgcgattcctccagtaatagatcgcgccctcgacaggtgaaagggagtgtcgcattccccatcagcactgttactgacggctgccgcgtggtgttcccgacgtgtgctaccatctccagtacacccaatcctcaacgtgccgacgatccacgcaggtacgaagacttctctggctatgtgttcttcgtgctaggttttgtcttttgcatctcattctgattccattgaacacggctagatattagggcttcgattttaggtttttggttgtaactttctcctccgtgcacgggtgattagggcttacctccagcttcgctcacttcgactccattttttattcatcgattttttatttcctaatgtttaccaaatgttgaattgctatcattcgttcaatgatccttaacctgcatcatgcattcttataataaatacataagtacataaacaaatgtacatgtacacagaatacatatagtgactaagtacatatgtatataatatacatatgcatataatatataatatagacgcgcttacatatatgcgctcagatctatacatatccaaaacaagattacatttcttaactctaagcttcttaagtcctacaaatccagatatatatacattcatacatacat

SEQ ID NO: 71445 - DNA, 505 bp, Zea Mays
aaaatggcgagaatgaaaagaacaaagtaggtatgctcgaaaatgatgatcggctacaaagagacttactgcaggggtccctgccaaagggataccctcggtagaatctaggtggaggtcatgagtgccacaatcatttgtaggctcacttaatgggatcatattgggggtagattgagcatcaggcacggttggcacgacctcaacaccacgatcatagttttcgtcttcagggcgagtggcaactaacaaacatcgtaccactacatccatgacttgcttttgtgtcttcatagctgatttaacataattatcccactctcactgacactcaattgggaagataagtctttgcacgttgggtagaggacctatgtttagcaccccatcaacgacgatgtcgtcagcatcatgacaacaaatcttctccttagccttagcaaccacctcactaaaggagggtctatcgtcgaatatcacagccacacgttgcatgtcaacgaac

SEQ ID NO: 71446 - DNA, 997 bp, Zea Mays
gaaaacacagaaaaaagagtaaacttcaatatctcttctttttttgcaaattgggtatcacactccaccccccttaaaaagaattcgacctcgaattctgacgcttctatcggggcgacaaaagaaaaaaattaatgaatcaacggaactcacccaaaacaaaaagttccagatatttctgccgcatcagctcctcaagttcccatgttgcctcgcgctcagactgattagtccataagaccttgacatacttaattgatctcttcctcaaaacacgctccaaggattccaagatacgcaccggacgacactccaaagtcagatcctgctgcacaacaattggttccatctcaatctgatggtccggatcccacaagaacttcctcaacatagagatatgaaacaccgggtgtacccctgccatggaatccggcaattgcaagcgataagccaggctgcccactcgagccaagatagtgaacggtccaatatatctcggaccgagttttctggagacaccgaaccgaacaactcctttagtaggtgataccctgaggaggacttggtcacccactgcaaattccaagtcccgcctcctcacatcagcataactcttctgacggctatgagcggccaaaatattctgacgaatttcccgaaccttctcagaagtctgctgaacccaatcaggaccaaccagggatctctctcccaaagtctcccagcacagaggggagatacactgcctgccatataaagcctcaaatggtgccatcttgatgctagcctggtagctgttgttataagcaaactctaccaatgcaagatgatcctcccagctacccttccatgacagaacacaagcatgcaacatatcttccaaggtttggatcgttcgctctgactgaccatcagcctaagggtggaaagcgacactaagtgaaagcttggtacccaatgaactgtgaagactctcccagaatttggatacaaattt

SEQ ID NO: 71447 - DNA, 725 bp, Zea Mays
cccagccgagccggatcattaccagcaacaccccccaggggctaggcaatggccagcaccacccttgaggactgggttctctgcaatagccacctctaaggctgaaggattctcagtcacctccataggaattgagagaccatgaccgacctcttggctccgaagaccgctttccaaggtcgacgacgcacgagatactacccgggagacttctaatcccaaatctggagtgtcagagcagacgcccatcatatcaccatcagtcggctctgacagcatatcctcaggaataacatcctcgagagcctgatcaaaattcgttatggataattcttgcagaccaacaagagcagacagagctggagaaggaatgtcgctatccccccccccactgactctgtaacgccgctgttcttctgaatcaatgggacttcctctttctcttcttcgtcctcgtcaaccatacaaaccataaacagcgctgggtcacacccattgggaacagctctggtagggtcacacccattgggatcagcatcagcagggtcacacccattgggatcagcatcagctctagtaaagatttccaccggtatttcttcagcatcaggagcagaagggccagcaccctggtctagacacgatacacgccgaagccgtctcttcttctttttcttcccctcggcaggtgcagttggatgactgacctggcgaagacgtttcgg

SEQ ID NO: 71448 - DNA, 1276 bp, Zea Mays
cggacgttgcaaaaaactataggcgggttcgcagtactattcatcggagtcactgacagcttatgaaccccccccccccccccgaatttctattctttcacgaatcgagtccctgacggcgggtggtgtggcgcagagctccgacgagctcgtgtaccggccaattcactcaaagactggcgccctaccttagctgagaccaaattcaagagctaatgagtgtttcccctcactcaatttcacaaacggctacccaatttgttctggccacggcgacagcgggcatcgcagacagacaaccgcgttcccggtgatctaagggattctaattcaatcaagttggtcagggagcatcaggggtacacaagaatactaaaacgagagggcagagggcatgagaagacctgaatcgagctggccgcggtgaggatactttcatggtggcagaaacttagtttgggggaagtgagcaattcgtggtctctagtggataattggaggcaagcgtgggtgcgttggcttcgtgataacatggcgcaatagacccggccatcaatttataggatcgctaagcggtggccaaggatttggatgaagacgcgcgacggtcgggggaataggaggttactggtgctcgggttagtggctttcaccgtggcagtacaccagcgatcaccatgcatgcgagacgcgacttacagcgacgtggtctaacgctttagcatgtggcaggcgatcgacggacagccaacgccggtgaactgatctgcgctggcggcaaggcatgggggtacgggggccagctgccggagttatccccaggcgaagatcttttgccccgaagcactatacggtcaccagtgagcatgaatcttaacgacggcgacaacaacggctcggattcatcggcggcgagggggggtgaacctggattcatgttcaggttactgtaccatggcgcagtctacttagttgacctgatagaccaacattgagctcgatttactctcaaatttcgtatgacaacataatcacttacgtgtatcaaagctgtggagctataccccaattgcaattcgactataggaactaaactcaatcgagcactatatcctttataatcttgatcccaaagtttggtcaataacactggcgaccacttctactttttagattcaaattcagttcttcaatacaagtctgtcagagcaactttgggcagcaatttctttaatttttgcataacaactcaagagaatgtttgcatcaaagttat

SEQ ID NO: 71449 - DNA, 395 bp, Zea Mays
cccctaaccaaactcctcaaaaaagacagttttgcagggtcagcagaagcagccacaacctttacagcactcaaggaggcaccgtctacaacaccggttttgcaccttccggagttcaccaaatcattcatcgtggattgtgacacatccggtttagggtttggggcagtgctacatcaagacaatggcccaattgccttcttcagtagaccgttcgccacacgacacttgaagctcgctgcttatgaacgtgagctcatcggtctggtgcaggcagtacgtcattggaggtcgtacttatggggccgtcgttttctggttcgaacagaccatttcgccctcaagttcatgctggaccaacacctctcaactgttccgcaacaccactggattag

SEQ ID NO: 71450 - DNA, 675 bp, Zea Mays
tctctagtgtgaaatccacttgaaacacccatatggagaaccattattaactagacatacaaatacactatattaccatatgatatcaacactaaaagaaaatgcctctaattactacctgacaacaaaaacaccaaagacaaagctcttcaaaccacttaaaaccaactagagtcaagtcacaataaagcttatgtgtagaacacaccacacacaagcaatttatacatctcgaaataaaactcaagtgcaaacaaacatatgtagtgcacatcacaaatgtaactattgcaaggtttatgagcttgctcctactacttatgtgctactaaaaagaattatccccttcaattgtttaatcttgtccttccgatgaccaatacatatcttttgtatcctaattcttcccctttgtcatcaacttccacaaaagacgacaccacttaagatgaatgcttgtacacttggggtggaccacacttcaattgagaatgctcacttctagaccaaatttgatccttttcaatcacatttgactttttggtaatacttttgttgtctggtcatatttgttgtcatcaatatcttatattagtatttacatgtagattgaagaaaaaatgtttatttttataatggttgaggtggataatttagatgcaaattgaaatatgc

SEQ ID NO: 71451 - DNA, 997 bp, Zea Mays
agccaccgtgccatagttgtggacgaagtggcggtagtacccggcgaggccgaggaaccctcgaatggcccggaccgagcgcggcggcggccagtcgtgaatggcagccaccttggccgggtccatggccacccctgcggccgagatgatgtggccaaggtaggcgacagatggtgcgccgaaagaacacttcgagcgctttgatgaacagctgatggcgttgtagctcatcgaggacgacccgtagatggcggaggtgatcggcccacgtgctgctgtaaattaggatgtcatcaaagaataccaggacgaaccgtcggaggaatggtcggagcacgtcattcatcagggcctggaacatggcgggggcgttgcagagcccgaacgccatcacgaggaactcgtacaagccgtcgtgtgtgcggaacgcggtcttgtgcacgtcctctggccgcatccggacctggtgatagcccgaccgtagatccagtttggtgaagaatttggcgccgtggagctcgtcgagaagctcctccacgaccgggatggggaacacgtctttgatggtgagggcgttcagggcccggtagtcgacgcagaagcgccacgagccatcgggcttctttaccaggagcacgggcgacgagaatggggagtcgttgcgtcgcacgatcccctggtcaatcatggcggtgcactgccgcttcagctcgtccttgtgtgcagccgggtagcggtacgattggacagccaccggcgacgcatcgggcttgaggaggatgcgatgatcatgggcgcgcttggggggcaaacccatcggagctgcgaagagccccccgaacgaggcgaggagggcctctagtagggcgtccgtcctgttggtggcgcgcaacgctggctccttggggctgggcatgcccgtccaggagatggagcgcccctggcgctggaacgtcatgcggcgattggcgaggttccacacgattggccccaacgc

SEQ ID NO: 71452 - DNA, 1246 bp, Zea Mays
atcattgctaagctctcagataaataataaagaaaaacaatttaaacatgggccgacttcggcccacacggtccatctctgggtagagtcggcccatggctggggagcccatgcgcccgtgcttttgcacaaaagaccccgtgctctggctaaaccaatccatgctccccccactgttcaccaaagttactgactatcgcacttaaaccccttggtcttgttctattcacaaggtctcggccacgactccactccggtggttagcacaggtcgaacacctgattgcgctcacatgatctcaccatcggtgagttctccggcgaggaccaacaccctaacaccaaccctgaggtatactggtcaaatatacttcgagaatcgaaccactactgcactggacctacgccgcccacggctacggtagcgagctaagtctggcgagcccgtacctgagccaccactgcaatagagtttaaccaaacaccatgggtagcatcagtgacatacctagattcctatgctcatggaaaaccggccggggacgaagcaagttggtcgggcgatgggggagctgttcacggtgtcagtctgcgacgatgcgctcttgttccagccaaaacatgatagtatcgttagggataacagctaagtgagcttcactaatctaagggggacatggaacaagcacagcacagaccaatacttgcctgagttagcctggccacggcgaggtgacaaattggtaggcgtggtcacaactcataggagtttggcacgtgcagctctggacaaagcacactgatggctggggaaaggagaagctacacgaacctgaaggcacatggaccatctgctgcaaggaacctaggaaagaagttcactgaaccatgtcttttagggcagcttaagtgtggcaggtgtccctagacttgcacaaattcagtgcaaatgtattcccagggtgccagcagtacatgggcatcccatacgtggctttcatgcccaagttcctcacagatgcacagacacacccataacactgaacctagtcagtactttcagcccaaaatatcaacttatccaattactaaaataggaaatagagcagataaggttcactgcccacaaatattcactgtccagtaatacagacagaggaaggacagataaaaaaactccactacggcaggctcaaacacatccaaaggtttgatattttctgcaggaaaaaagatcttcttcaaat

SEQ ID NO: 71453 - DNA, 299 bp, Zea Mays
aaaaaatatcgatctcaacatgcatgtggccacaccgtttcatcactcaccaggctagctccagatggcacctgtctatagcagccagcccagacccagatccagagtagtagtataaaatatgcagatcgatgcagcagcatcagcaggggagatcttgtcttgtccaagctgcttgcaaagtcatcctgatgcatgcacgcaacacatcctgctaagtggtggcttgacagcggccacatagcctatgatgtcgcaccacgtgcatgcatatatacacagctcccgaccggtccctg

SEQ ID NO: 71454 - DNA, 506 bp, Zea Mays
cttcttgtccgcatcgcgtaggtagtcgcaatttgtggtttgggcactggagatcgggtttggggcattgccggtgagcttcgtcgtcgtttggcggggcggcgccgccgggttggccgcctggttagaggagagtgctggggtcgttgatctcgggttgtacggttacgattagatccgaagcataccgtttcgagatttcgatttgggtcgtggatcagtgatccggcggtcgtgggcgggtgagagatcgtgcgccgtccgatcatgatccagtggtagtcagggtgcgccctttttaaataaccgtgatctaatctcggcctctggatcaggatcctacggctgaaattagagaataccccttcggttgcgcaattgcataagagcccctctagaattatagattagaacccgcagtccaactagtagtgtttcctgtgtcttggacatcttcccccgagacccctggactttccaggaaatgaggcccagtccaaaacctg

SEQ ID NO: 71455 - DNA, 531 bp, Zea Mays
ctgatgtcggcctcaagctttgggaaaccaatactcttcgacagagtactgataaccttcgctccagtatggtctctgaggcatcctaagctttcgtcgtcaacaccgccgaagagcaatgctcctggttgatagccgcacgatattgcataatcccttagctcttccttctcatccttagacagcttttgaccaattatgttttgaaaattacaatccttttcctccaaagtatctttggcaatctacttctctttcccgggcactgaggccagggtctcttcggcaactgtagcagcttcttccgcggccatgttcaaaagcatcttgtcaatatcagaaaaagtgccctctagatttgtatcttcggttgattcagcttcggcagttgcagcttcggcgagggcagcttcggtagctgcagcgtcttaggcagctggtgtttttgacattgaggtcggcggtggtgtttcttcaatggcttcaataatagtaataattctccgcctttttgggccagcagacttcttc

SEQ ID NO: 71456 - DNA, 819 bp, Zea Mays
ctctcatacttggattgaaactatttcctctcacgagaagcaagcctaagcaacttctcctaattcgtcaaagcagtgtttagctcttctaccttagtggtgagatcattgactgaatgagatacctcagaagcagagtcgtcgctgatgtccttgccgtcgtcgcccaccacatcatcatggagggcattggtgcaaaggcttcctatggtgtcagcgatgaagcacaacacgttgagattgtcctcaacgcacctctcgggctcctcatcgcttgaggacgaggctaactcaatagagtcattgtcgaggtcacctagggaggcaagtatggcacactccttgatcttttccttgtagatgtacttcttcttgagcgcctccttgtcaaacctccccctagacttatgctttttagaggtgtgctcctgctttcccttgcactgaccagagtggtcgcgctggccaaccttctacttgcccttcttgggacatatggcgatgaagtggttagggtcaccgtaattgaagcgtctgtccttgaacccgccacaccactgattcaggaggttgttgtggaaccgcgtgaatcgactggccacaagcgctagttcatcatccccgaggctctctacctactcctctatgatagacagcaaagaagaaagagcaaacaaagcgggtaagtggttagaggaagaaccacctctagagaccagagccatggtgggtgcatcagggttctcaatcttggctcaggtctggtgatcaatcttggtggacttaagcttattgaataactcatccactatgagattc

SEQ ID NO: 71457 - DNA, 284 bp, Zea Mays
ttgaacctaaaatctggttacgtaagtgtgttgattacttcactctcttccatgtccctgaagctgtgtgggttactagtgcatccttgaaaatggaaggcaatgcttcccactggtttgaggtgtataagcttcagcatgggctcggggaatggccagaatttgctcaagctgtgttgcagaagtttggggtggatgagtatccgcaggccatgcgagttttgatggatttgtatcagcgaggaactgtggaggagtatttgaaggagtttgatgagatctgt

SEQ ID NO: 71458 - DNA, 808 bp, Zea Mays
ctggaagtaggagcaacgggtccccatccagaggatactgtatggagacggatcggcgatcctggctttttatgggtgcagatctaaagatgcagagaattaaaatccatgaaggcacaacaaggtgcacgcacgcatcaatcggcacaaaatgtacgaaagatgtggtggcactcactttccttgcaataattctcctgcatcttttattgttcattcatttcccctctttcacatgttgcgaattagacatgtgaaccatgaatgagtaattctctgcagaggaacctgaaagaaaaaataaaaaataaaaataggctacaccacacatcccagtaattctcgagtccgtcaaagatttgtgcttgagtgcagatcgtctagctaatggctcggtgggtgattgcagtttctgaaggtgcggctgcatgcatgtgcgtgaggaatgaatgattgggcagctgagagcaaccttgctttgaacaggaaggcaggcagccattgttttcagataagcatcaaggcgacatcaggcgtgcatgcgtgttaggtttcggtggtaggggacgaaacgaaaggcatgcctgccgcactgggctcaataactcgcctcgtccaatggccatgtgtgggctgaaggtcactgttctggctttctgcagacctggtggtctaggttctgctgccggtgcccaatcatttgtggcgatgagctactacagcaaggaactgcatgttctggaggttttcatttgtcgcaaaaaaagttgcgaggaattaatttattcagtttgttgctggattgttt

SEQ ID NO: 71459 - DNA, 1026 bp, Zea Mays
gttttctgtgagaaatgttatcttatcggtttgcagaactgcaggttttgttttcagctcttggtgatgggcgagcaaccttgactttgagagataggtctagtcgtcctagagcagtccagttgtgatataggcgtgtgtccactgctcttttttttatgtgaatttgagtccgtggctgaatgtacggtgttttactggtggtcactgtatacagtacagtgactgtttaccagcagtttttatgacaagaacggcagcaatgagcaatgtgttattgacagaaagaaggtattgcaaccactggatatgtccatctaggggctatctgacgaacatgttccctccatttttttttgaacaaaagtcaggatgtctgccaaaatttattgataagaagaataacaagagggtttaagtctgaccgaagcaccaggcaggtctgtgatgttcagactatttttgtgctgaccagcaattggcagtccaatcgtactggatgctgaagcctggagtgtacccttgtaggttggatattctgcaggtccactttaggttctgtcgttatgcgcgtgcgcaatatgtattcgcgcgcaagggagtgcagcccagaaggcagaagcgatgaggtgtgagatgcactgggcgtccacctctgtctggttgcagaagcttttgggaactgaatggcttaaggctctccttccgtcttccataacatgaagctggtccggatcatataggcccaacaaggtgggcttacatatctgcaatctccttatctcccttccagttccagaacacaagtctccagcctacatgctccgggatcctgctttcgtgtgcgccagccagctagctagctagcttctctgttgatgcgccacctgtggtggtgagtgttagtacatttgtgcagtccacctctcgtttcagataaactctggttgctagttgttcagcgtaacaagctattgtgccgtctttaacatgttgcttttaactttaagtactgctctttttttt

SEQ ID NO: 71460 - DNA, 326 bp, Zea Mays
ccgctctgtatgtgctagttgagcgcgtaatgtggtctcggatcccgtcgcgcgtgccgtcgcccgctcggttttccgctttcggtcggtgttcgaacgattttttctgttgctatgcttaccttttgacgaggaatgctatggccagcctaatttgatgcgatccgatgcgatgtgatgtgttttgctcttctctaaacattattttcccgatgcgtctgcgcggctctgtatactctgaaaagcgtgcgagaatttggtcacttctgctacttctctagtttgacgcgaagcagtagaacatggatttggtttggttaaggttt

SEQ ID NO: 71461 - DNA, 289 bp, Zea Mays
aaattttcttcagaggaataagcacccactttggaaaaactagtttttaatttattcacgcaatccaaggatttttcaaaacatctttccttggattcgcgaagctcctcaatattttctctagcttggtcttccaccattcactaatttcttggctagcctttgcgaccgcacaattttcattggcttcggcaagttttttacgaagatcttcaacttcggctttataagcttcggattgagtattaaattttgcttcatcttcttttgctttatccaccaatgaaat

SEQ ID NO: 71462 - DNA, 611 bp, Zea Mays
agtgaattggcgagtcactgacgtctgtgcagcagcagcatcgaagtcgcagggcagttgtagacggcgaaaagacgtgcctctgctcatctgctgcctccctcgtgactgtgactgtggagcgcacgcatggcgattggcatagcaccccctctcgtacacgcctcgtgcaggagtaactctccctgggtccgcctgtagaaacggcgaaggttcggtgtgcagtcctgctcctaacctggacgtacaggtacagacagggttgggcgtccgtgcaatctcttttgctctccgtctcttcttcttcttcttctattcaagtgctcggtcgtgctcccttttctcccgtaggccatacttgcacgggaaaaaaaagagaccgtgcgccacgccccaaaaataaatgcacgcgctcctgtctgtgtcgggtatttccatccgcaaaaaagagacagagcgagacgagatacgcctcctgcacacatactgccgcgccgtgatcaccgatcggacatgagcagtgcattacttggtactgcccacacagccgaggagacggcacgggggagagatgtaaaacaacagagcccaaaatcattgtcgccccggcc

SEQ ID NO: 71463 - DNA, 374 bp, Zea Mays
gggaactcttggggtgtgtcgccgttgggatttatagctatggcaaggggcaatcgggtctgagagcagagagaggcgagatgctagagcgggactccatggcgttgctcggtcgagtttgacgcccacagtcggagttgatggtggcggcgggtctatatgctccaggaaggcagagtccacggaggttgcaaatcccgaccttagcgcgatttggggaaaaatccgttgcggtcagcagaggcgagaagaaaacgcggcggcaggtgcggcctccatggatttggttgaatggactcgggatagggatgggacttaccaacgggtcccacacagccgaagcacagcaggagtgtggcgcatccgtggtcaag

SEQ ID NO: 71464 - DNA, 555 bp, Zea Mays
cctactgacgaagcaatcggcttaagtcggcaatgacttaagatggtgcaacatgctcacgcttactcgacttagggtgaccactataccctactgacggagcaatcggcttaagtcggcaatgacttaagacggtgcaacatgttcacgcttactcgacttagggtgaccactataccctactaacggagcaatcggcttaagtcggcaatgacttaagacggtgcaacatgctcacgcttactcaacttagggtgaccactataccctactaacggagcaatcagcttaagtcgttagggacttaagacagtgcagcatgcttattcttactcaacttagtgtaacatgctcgcgtttactcatattggggcgatctctatgccctaccagctgatcaattagcataaattaagaaaagattccaaaaccagcacaccgcacttacttctacaatcattcgtaacaactgttgaattctagcaacagaaacaaaacgccatagttttcagcaccaagaacacattctaatatcctaccgagtattcaagcgcg

SEQ ID NO: 71465 - DNA, 618 bp, Zea Mays
ttcagaactgaaactaaaaaggtaaaaccaagcacaattgtcacaattcttttagacataaaagctatggcgcataacctataaactgattattcatgcacatacataaattaggctagaaatggggaacagtgggacaggcgaagggatagggttcggggacttgcctagaccctggagagaggaagctgctgatgggacgtcgagctcggcacgcgagttgtgaagcatctgttggaccttctcgtcgaggacggcggatggatagggttcgcgtactggcatttttcttcgtccactatctcgacaaaactatcaactgaaggcgccttcaaatctccaaaaaaagaagagccagatcagcagactacacaagtaacaaaccacatctcggctatgggggactagcgatactcacgcgcgcggatctggcagtagagcgaagcattcttgtgcgtgacgacgagtggcgcctcggccgcggaggcattggcggcgaggacgacgagggtgatgcgcgcttattcagctccttcccttagtccagatgttgcgattttgggatggatacgctacctcctcgctggatctttgacggcagtcttcaaatctgccctg

SEQ ID NO: 71466 - DNA, 520 bp, Zea Mays
acactacatagagcagaaaaaagatatagttaaatagcaagtcgtatgtgcaaactaagtacacaaaggaaaattataaagagataattacatgctcgtggaaccattcaacgaaacatggacctccgtttatccctttcatacgtagattatccagttcctttggtgtaggtttgtgaccagctaaatatatggaatcaaacgtttcaaagtatggatcaagttcctccatgttggtgtacaagtagagcatggtgaaattatgctctcttatgtcaacataatgtgcagtagaagcgccgacccctttccccttctagagaaaaacactaaggtcggtcgaaggaccttcttcttcagtatgataccgtgttgactgagcattcacattgttagtgtgtgataaatactgacttgagaaaattgtgatctctttagctgcaaaggcctctgcaatacacccctcaacccttgctttgttccgcacagtagctctaagttttttcaattctctttcttg

SEQ ID NO: 71467 - DNA, 1091 bp, Zea Mays
tgcacatctttaatggtgatgccaaactgtgttttcacataggcgaaaaactgagtgagggtcgggaaagtatccgatttcaggcgtaaaggaaaagtccataagtaatgggagtaattatcaagaatgactaaataatatttgtagcccgagacacttaaaataggggacgtccacgaatcacagcgaatgagatcgaaattgttaaccgcacgagaagtagacgtacggaacggaagatgaacacgacgactcaactgacaggcatggcataaagtggatctagcatccttattacacatagcaatgactgatgcgagcttggatagggtctcgtgaccaggatggccaagacgacgatgccaaagtggagtggagctggcgacgaagctgtgtgcagcagggaggcacatgggttatagcggcccggagctattgcacctgacgatcacgtttcgagacaacatatccttcacagagcaaccagagggatcaaattcaatggaacaattattatcagtggtaaaccggcgaacagaaatcatgtaaagtggtggagccagtggaaatgactggaagaagggagccgtcaccgacaatcacggaggaaggtgtagtaagagagggagttgaagtgtttgatagggtaccggcgtttgaggtcatgtgggaggttgcacctgtgttgaagtaccagccgatctgctggggcggagtcagggacacggtgctgaagggactgggcacccaatatggagtggccgactatcccaggatgccatagggaacctgggaaatacctccctgcagagcgtcggtctgcaggttgtgctgcagtggggcaccttcctgtccttgtagagtgccatgaacatactgttgggtctggtgggccagcagtgcatggtgtggggcgatggaggccggagcagcgtagatgacctgttactgctgggccggcggagccagcagggcctggtgctacgccaggagagcctgctattgttatggagtcggcgctcgtggaccggaccacatttgaatggccctagtccaggggttttggagggagggccataggccggaggtgc

SEQ ID NO: 71468 - DNA, 755 bp, Zea Mays
gtcgagaaacttctgcacttcgaccttacaggtcggaggtcccacattccaaatagacttgattcggtcagggtctatctctataccatgttcatggatgacaaatcctaaaaactttccagtcgacactccaaaagcacatttacgtgggttcattttcaaaccatactaatgcattttatcaaaggctttgcgcaaatcagctacatgagaattaaactcaaccgatttgacaacaatatcatcaatgtagacttccatagtgtttcccaacaactcatggaagatcaaattcatagccctctgataagtagcaccagcatttttcagaccaaatgtaatgaccacccattcaaataaaccaatgaagcctggacatataaaggccattttagacgcatcttcttcggccatgaaaatctgattatatccgacattaccatcaagaaagctaataattctattccctgatgcattattgattaatgtgtcggttatgggcatgggatactcatctttaggagttgctctatttaaaattgcaaaaaatcaatgcatacgctaaacttacctgactccttctccaccggcacaatattagagacccattctgcgtatctgcaaggtctaataaaatcagcttctagcagccgttggatttcgtccttgattcatgggagaagatctagacgaaatgttctagctctctgcttgaaaggtatgaaaccggacttaatgggcagtcgatgctctac

SEQ ID NO: 71469 - DNA, 604 bp, Zea Mays
cgaagttgttgtggtattgttctttgccgatagccttcgtctcgtataaaagctcgtgcatgttgcagaagcatttcgcgctcggctccagcccctggctccttagaacctagacaaatatccccatcctgattatagcctcgggggtaatctgatgaagaatgatttggaatatctttaatacctcgaccacaaatttactcagcgggaactgaaggcctgccttcaagaagcttcggtaaataacaacttcgttttcctccggagtaggggcggtactgtctcctccaactctgacaatagacatgtcgcgaaaatatctccccctcatggcgtcaatatgactttgcttgatagtcgattttctgaagatagtgtggcttggccgccacgaccgatcctcagaatcttcatccccacattccacgtcataactatcactgtcatcagaagcttcggacaaaccttccatgatctccttagtaatttctctgtattcatttttgccatagactcataaaacccagcgatgaaaggatctgcaactttcttttcttcatacagcttcttcttctcggtcattttcttctcttcagtcatcttc

SEQ ID NO: 71470 - DNA, 1097 bp, Zea Mays
ttttgactgctttcgtttcagttgtgtatcggtatatacagacgctggtatcaaggcaacacacagcaattattactaccgccatcaatataggcgttctcagctcgccacggccagctttgtactccttccttggtttttggcgcacaaagaccctagattactctaggtagaagagacataaataaaaagctactgctagtactgctacagtactaggagtatgtaataccataggatcaacggccccctctgcagcttaagatcctaaaagtaaaaagtatagtaactgcgcgcctatactgtgcagaaacttatcctctcactgcacgccaattaacgcggagttttacctcaccattactacttgggtttgggggaagaaaaaggcgctgaaaaggcaccacatgcgcaaccagaagggaaggctacgtatgctgctgctgcgtactccgtgtgcatggactccgatccctcccagattttaagcgaggtgctagctacaagtgcagattgattggcgctgaccatgcacggcggtttcaaaattctccagaccgagcagtttttttgcaagcgttttcgaaattggctagctcagctgataaatatagatactataatgatggattggttagcttagctaggactataggagcccggaggcagcgagatgttattattggtccctcgaccgaacaggacaggatccacgacgacagatcaggtcagggtcaacacacgagagaaattaaaaagcagtgtgagtggaacaatcatgcatgcatggatgcctagctttggcgtggcctcatctgctgctgctgctgctagattcagatgcatcccgctcccattatcctgtccaggccaggggtgccgtgacagtgacaggaagaggttgttgctttgctttgctttcctttcctcctcgtttaacttccccttttgcccggaccaaacggcactataggctagctagcgcccacctgaccccgccgctgcataatttgcacacccccgcgctccggccccttcatcagccctcttttttccccctctcttatgcacgctaggttccgaaattttatctattt

SEQ ID NO: 71471 - DNA, 577 bp, Zea Mays
cgaaggaataacaaccaaagttgttgtgatattgttacttccccgttgccttcgtctggtaagataattcatggatattgtagaagcagtcaacgtctgattccagccattggctcttcattgcccaaattaaaaccctaattctaatcagagctttgggggtaagctgatgaaggtatatctcaaaccttttaagcacttcgttcaacatcttatgcaaaggaaatcgaagcccagccatcataaaacccttgaaaactaccacttcgccagccttaggaagaggaacagtgttctctcctctggtccttactatagtcgtatcacggaaatattttcccttcattgcctcaatctgtcctttcttaatagtggattttcttaacacaacatgacttggcctccatggtcgatcttcggcatcatcgttgtccctctcaaaatcaaaatcctcactgtcactagaatctccagacagcccagctaaaatttcatcagtaatcttttcaacattggtcctttccatagcttcgtaaaaaccaactagtgcggggtcctcaattctcttgtcttcggc

SEQ ID NO: 71472 - DNA, 602 bp, Zea Mays
tttacctcccaatcgacacactcggaggatatttatacaaccctagccacaaccagcagagatggaccctccaccaccgcctccaccagcaggagttgacccactggttgcagctcagatgaggatgatgcaatcaatggcggacaatatggcagatatgtgtgctcagatgcagcaagaacgccaggagatgcaccaggaacgagaagagatacgccaggagttgcgccaagaacgagaaaagatacgctaggaaaggagggcgcagcagtaacagcagcaacagcaacaagtaccactgcctccaccaccaccaccagttccaccccgagataagcaccgggagttcatgagccataagccaccgacatttgctagttctcctgatccactggacgaagatgattggctgaagtccatagagaagatgttgaacattgctcagtgcactaaccgggagaaggttttatatgcttttcgacgtctgacaggtcctgctgctgattggtgggattcatatactactgcccacgatgttgcggacactatcacatgggtggagttcacgattcagttcaggaaccatcatataccagctggac

SEQ ID NO: 71473 - DNA, 378 bp, Zea Mays
gcgaaattgagctgcggtgactaattctctggtccaaatgaagctatgcatagtggggaccgaggggaacttaacgaaggtgcttaccaccattagaagatgaagtgggggctcggccacagggaggtgcggactatggagttacgacgagcaattgtcgcagcaccgagccatcaccgcgcttgaagaggctccacgaaggtctaccgtacgcatgcgaagtgctgtgctccaattcttgacgctaatccttagtttaggcggcggcggccccatcccaatctctctctttcccgcctgctcgatggtgctgtgctccttccgatggctttgatgctcaatatatagatcacagggcaaggggcgagtccgagcttg

SEQ ID NO: 71474 - DNA, 749 bp, Zea Mays
ttattgcatgactagttatatgttaaataccataaacaaaatataaaataatttatatttataataatctactatgtatctcgttaggacatcaagatgaaaatgtgatcctcaagaataccttgcactattgtatttttgatacatataacatcaatacagtacaaataacaccaattgcaccttgtaattgttggccttaaccattggccacccatagttttctgagatcattatactccgtatgagtatctaatgtagatactaggcttatggccatacttataacatccacttgtccaattgcaaagtttgaggactttttagtaaattgacaaccatttcccctcctataaatagtgccctaaggcttagagctacaaagtggcccttaaatgactcttgctatgtcagtctctttttattttaacatccttctctccgtccttctctttataaatctaaccctctaatgtctcacttttttacgttaacctcctaccataaccttatgttaacctcctatcctctctttataaatctaaccctctaaccctttaagagtctttataaacctaaccctataacctttcttttttacccctccatctaagaagactacccctttctttttttttctttataacaattccaactcaactttataaacctaaccatctaacatttattttttacccctccctctaaaaagactattcctttctctttaagttacgactcaaatttta

SEQ ID NO: 71475 - DNA, 947 bp, Zea Mays
atttgcttctcatattcaaggatttgcaagttaaaaggtgggatttggacttaattgcaaaaagtactttttgaactccatacgcttaagtcagaaattcagtgcatttggagcaactttggaaccctacctctctcagttcatgaggaatctgcctagggtcaacacatcaaacttgtagagccatgtatggagaacaaatttgcttgagtaatcaaacactagtgttacacaaaaatgggagatatatgaggttgaaaaggcaccgtgagtcggcctgataggtatttattcactgcatctgatttgggtcacggttcagtgttgttgcaccaacttgagcgccctggcttgatcaatccgtgagtatttttgacatagtcattatatcaaaatgaaagaacattgatcaaggtacaattttgatacagattcgtctgcgagcaaccacatgaaattaggagcagtagccacttgaattcgagctggtaggcgcagtgttcaccatggttcagtgaacctcgctggggataagaacgccaccacggctgaggatcggacttgtggccgcagtaaaaatcttccgcgacgtggcgtataaaccatgaggtggcactgtccagttaatcggtgttcactggacgctcgctgcggccctgcccgcgtgggtgagctcaccagcgcaatggaagatctttgaatctcgtccacctccggccatccccatataaattaagcccgagcgctgcttcttcatcgcatcacacacacgagtgcttgcgcaaaccacccaatttcaccgagggactcagttaggccataatctcctcaccgttcttagcaccgcagtgaaggaccccttcatgggcagccctcctcgggtcagtactcacccaattgtctcttgttttagcttgtatttagcctcctattgctctcggtgccgg

SEQ ID NO: 71476 - DNA, 592 bp, Zea Mays
gcaggcatgaagtggtcgaagttgtcgccgtggagcgagtcaagaatgactcgaccgactacgatgccgatgaagggctctgtgatcctggcactggggttggaaccagggaagcagaaacccaagaagcggcaccgccatgcgtgtacagaggggaggcgtggcttgtcggtgaagcagtagtgggctcctcccactcttcaaccacgaacatgccctagtcttcatcgtcgcaggagccttcctggtcgtgtttgacggacgagttccaatcctaggttgcgccttcttcaaacaccgcgtcatgggtaacatgcacccgattcgcgacagggtcatacaccctgtaggactttgaaccagcctagtaccggaccatcaccatcttcgtgcttcgatcatcaagtttcccggcatttgtcttggtgatcttcacatgagctacgcagccgaatacccgtaggaagtgcacggctggcttctcaccatgccacacttcatacaacgtgcgccccaccaagcttctcgtcgggacgcagttgaggaggaacacaaccgtcatcacggcctccccccacagccttgcatggac

SEQ ID NO: 71477 - DNA, 684 bp, Zea Mays
aattattcttacacaaccagatgtgtatctcttattcagttgctacactccacggtttgcaaggtgcaacatgtgcatgcgataaatcgagagactgataagcattcaggaccatgtattacaggtttagtcacattgtttattctggatggacttctttggaggtcttgatttgtgcttgcgtgcatgatcattggcttacaggcacggttgttcctagggtcactactatgatacacactatagattaaatctaggatgttcctatgaattgtttacgatttatctagccctatatttggttgaaagtgtgtgtaataatggtggctttttggtccattcctgtgcttttgtctatgcacgtagcatacgtcgctctcggataaacaatcggctcaaacaaactttaggcagatttattgcccctgtcggccacttttaatgcacgattacttttatttatttgcttattaccaacccgaaaaaatagcaatcgactcaagggagccaatcagtgcaaccatcacaagccaatctctatgtgatttagccaaaatttgaagtttaatatactgttgtgcatttacaaagtgatttacttacaatagcacactctccttgcacgtttggaaccctcaattgaagtcacaagagatgatcggagcagcagcagcgaacctcctg

SEQ ID NO: 71478 - DNA, 356 bp, Zea Mays
gtttttgttggagtagtctttgcgcccttgagtgcggtcttgaaggctggacgcctcaatttgcaccaccttgtcagggagcgcctccttgatgtttgttgctttgagagcaacgagtttcagttcatagtgatgagggaggggctcgttggtgatgtcgatgtacctcacctcctcggccatcatacgtctgctcataaattttccaaagatctctcctcaggcgtcatcttagtgtacctcgggttctcacagattaagttcataaggttaggatcaacaacggtaaatgaccttagcattagttgcacgacgtcatgctccgtccatcttgtgctcccgtaattgcggatttg

SEQ ID NO: 71479 - DNA, 849 bp, Zea Mays
ctggaaacgagtcacgatgctatttccatgactcactaacatgttacaaaaacatccctcgagttctatttcttcatcgctcgaaatccacgacggcgaatagcgcggggccgagctccggtgagcttgtaccggccagattacttgatgacaggtgctctactttagttgaaaccaaattcaaggcctccccagcgatcaccggataggcttaacacgatcgactgcgacgtggtaagatgaccgggcacgtggcgcaaggccgcgaagtggctatctccagcgaacccatccaaagcaaccgtgacaagctcgggtacggtggccggagtaaattagtggccgaagtatatccacgacgtgatatttacttacccccagcgctatccaactgacccaagcgtgaatcatcaacggcgagcacgaatccgagtgcacagctcgtcggcggcgaggggatctgaacctaagcctatccggttactgtacaatcggattgttcttcagtcagcctgacagacagatttgtgactccaaaatcttgaattttcgcgtaagaacttactaatccgtttgtagcaaacctgtagccctatgatccagctataaaccgactgtggtaaccatgctcaaacatccacgagatcatcttcaaaatggtccccaaagttcatcctatgccactgaataccataattcaggttttaggcagactgacagcccaactttgggcacatatttctccaaatttttcatgtgaccatggtttaatccctatagcaaagttgtcctccttttataactctacaaacttgatgtgttgacctagggcaaaatcttcataattta

SEQ ID NO: 71480 - DNA, 429 bp, Zea Mays
aactggaaaggcgtttggatggatagtaaaaacgggagggggtttatcgggattgtaactggcagcgtggatgcatgatgaggctactgtggtacacgggtgtacgatctgcatgtgtgcgtgtttgtggactactagtctgtgtggtatcatacgatacaaacatacgtacaaaataggctggtgatgtgtactagctgctggtgtaaaggacgaatcagatatctattagcgatagtacacatatctattagctctattaatagtaaatacttcttacgttagagtattatcaaatttctcgtgtcgtggctttggtgcttgtttcagattatacacaaactttaataactcacacacctttccttcttgtccaggtattacgaatccatctggatgattcatatagattttctcacccaactctcc

SEQ ID NO: 71481 - DNA, 601 bp, Zea Mays
ccttctcctcttgggagttgcggcagaagccttttgcaccttcggcagtgttgcctctattggagggctcaaaatttctggcattttcattatttcttcaatctttggctcttcattcctatcaatcttcatcccaactggctcgactgtaagcaccttcggcactacagtcggctcttcagtgctctgcgcaatcggaacagtttcttttgcttcggcagctaaagaggtccctttgccaaattcaggtatcacggccggttcaatatagcgtggccggtgagtcagaaccttcatattcttgcccttcggctcagctgtaatgaccggagcggcaatatttctcttttttacttgtcctcgcagtgggtagcgataatcaggatatacgaagccaatagcatcaaataccctgttcaatcttttcttcttccgacccccaaaagctacggacaatgcattatcctcggccttggagtatgccccaagtagctcgtcgctagtagcttcaatacacttcagccagtcatcgtttggctcatcaaacttctccccaaatctgaaggtatatttcaattggactaaaccaccctcactggaa

SEQ ID NO: 71482 - DNA, 571 bp, Zea Mays
gcttccacacatcaaggctatgggtcgcacccactgggagagaccaattacttttcactaagttgtgaaagtccagtctaagcttccagcacagctcgtatctaaagtccttacgcgcaatggagatagcatcagtttgaagacaaaggggagcatgatccgagaaggatctattcaaaccacgaacactgatattgttataagcaagatcccagtcaggactggccaaaaatctatctaacttttcaaacgtaggatcactacggttgttagaccacatatacaatctatttttcaattcaaattccactagaccatgatggtctatgatactattaaacaaggagctccacttactgaggctgcccggtttatttttttcctcagcttttctgaggatgttaaagtcaccaccaataagcagggggacctgacttctcgagcagaccgcagacagttcactgagaaatcggcttttatgttccttttgagcagccccatacacattgacaaaattccaaataagatttttttctctgtggagaacaagagtgcgagtcaaaaattctcc

SEQ ID NO: 71483 - DNA, 1451 bp, Zea Mays
cggaaatgggatagcgtgacgacgaggtggtgataggagagcgagttgaggagagagttccatgaggcgaagtcgtgcaaggcgtcgggatgtccacgaagacgatgaaggatgcgtggagtaggggctatgggagggagcaacagaaagtgatgagattgcaataatccacctcttgaagttatttgataatctagcattaattgggcactcaccgaccacgatctactggacacccaatggagatgtcgcgtagcataggtgcgccacgtgaagcctccatgtgcgcccacacaatgccttgcccgcgccgctcgccgctcacgcaccctccctcgcagtcgtgctagccaccgactacccgcaaagcaagaagcttgtgccttccccctgttgggatagaggttgaccctgacctcgatccctcttaacaactacgaagactatttgatagcacaagaattggtgcaacacttgggcgagggatcacatgatcggtgaaggcaaggggggctaggacgtgtcgagggcctagggagcaccgaacgaaggctgaggcgccaccagtcaccaccaagcgtgcaaggtcctccctctctcagcaagtcttcgcaaggcaacccttctgaggaagctccacttgaagaccgcaagacgaagagcgctagacactgccaagcggctacacagtcatgggcgtggacccatctgacccacctgtcagtccccaaggtgggtgtaattaatggtgtaacaaagaatagagccaacgtgatctgtaattaccatgttggatggtatattcgaggcatgtagtaggtaaccaagggcatagcagtattttagtcttcaccccctctgttaccctataaatacccatgtcctgtagtaggatgggccacccttgacaagacatttgtgctctcatccatccgtgttgtcgtgctactcacttagtcacttgccacctatcacattgttcccaagtgcttgggcccattgtttctagtcccaacatttggcccccaccatgcttgcttcgaagaccaacccacaatgcctcccaagaaagaaaccaccagatctaactcctcggatgaggccacgaaggcaaccctcgctgctaaaaatggtaaggtcactttcattgacaacatcccacccccacaatcaacaatgccaccaacatgacgaagagagaaaacaaccaagtccccgagccaaagaccatccacctccgaaggcagcattcacactcgtagctctgaaagcctagccaaagacgccccaaacccgaggagtcacccctacaggccaccgtatagccagacctcacaagaaacatgagacccccaacccacttgtgtctacatctctccaccagaccgagtgagacaaatacttcctacaggatggtgagggcctaggaatcaacatagaggaccaactgc

SEQ ID NO: 71484 - DNA, 684 bp, Zea Mays
acgaagctgtagaagccaaaacttttgtggtattgtactttcccagtcgccttcgtctgatatgataattcgcgaatattgtagaaacacctggcgtctagctctaacccttggctcctcatggcccatataaaaacccctactttgataaaagcttcaggggtaagttgatgaagaaaaatttcaaaagtttttagaacttcaaccaacatcttgtccaggggaaccgaagtccagctttcatgaagcttctgaaaattaccacttcatcagctttgggaagaggaacagtactctcccctccagccctcacgatggaaatatcacgaaagtatctccctttcatcgcttcgatctgcccttgcttgatagtcgactttccaaaaacaacatggcttggcctccatggccggtcttcggtatcttcatttccactttgtacatcaaaactctcgctatcgctggagttttcagataacccagctagcatttcattggtgattttctttgtgttggtcctctccatagattcgtaaaatcgaccaatgcgtggtcagtaatcttcttctcctcagccattcaaacgatggtcgcatagatgccaaaactcaaaaagttaatcaagcttcagaaagcaaagaaagctaaatggcaaacacaatgcaagcagctagatagcacgaa

SEQ ID NO: 71485 - DNA, 603 bp, Zea Mays
attttgttgcgttagatttggccacgtcggagtctccgctgcgatctgctcctcgcgaagcgctggctacatcggccgaggcgagggctgaagactcgcggaggcgaagggtggttgtgtcgaaatagagcaccagtgagacgtcacggagtggaagacatcgccgaatgggtatggaaaggtctcgtcttcgactggatcggggtgatcagcgcgagctactttcctcgacgtccggaacgtgcatcagagagggggacttgcgggacctatttgagggggaagagttaaggatgatgttgtttaatttctgagaggcgggtcttattccgaaggtggagcctatgtgacattttcgttgccctcactgctcttgttgcgattgtgagtgaaaacgctgccctccccctcttcgcaatagagttgtgagggtaacagtcgtgatttgtattattgcgcaatggtgtcgttgagaccttcgtttgttgtttgtttgtgattgcgagttgtatgttgtgctattgagagttggcttggatttgtaaccgcgtttgtgccgtagggatgacttcgcggcactttaattatcggttgcgcccctag

SEQ ID NO: 71486 - DNA, 860 bp, Zea Mays
aaattcaacacatctatctggtgtatgtagtggatccaagaccatttgtcgaacgtgcgtcttttcataattcttttttttaattattaaacggacatgccaagtacttaggttaggttgctacagaaaaaaaatcatggatctaaccttggtttcctatacacacacaccagtttatagtataggtcattttcagcggtgagtttcatgcaatgtttctaatactgacacatcagatttaaactatataattaaccttgtataccgagtttcacggccatgtatgaaactctatactttcccgtcaaactctctctatatatctctcctcatgattacactttcatgtcaccaagcgtagtggtatttcaccgtatttatttaatgggtatgaaaaactagatctcattgagaatataatggccgtgtaccatcttgtttttgtctcgatggtgtttggatttttagaggggggacaacaaaaagtgcatgcatatggtgcgcattggccggggcgggcctcattgaatccatgcattcgagacaacggcaaacacatttgcattgagcacacgtcataagagattaagcgcacacgtacacgtacgagccttaatgcccaagttgatgctgatagagacgtactccctcctagagctttactacttcgaagcaggcactctagtcgaattatatatgacacgtggttacggattacttgcacgtactgcagctcggccactacgacagaatcaattaagaatgttccttccagcatcactgcacacctaacaacgtgccacaaattaaagtagcagctaagtactagctagtatggtctacaaagcattactccctcc

SEQ ID NO: 71487 - DNA, 326 bp, Zea Mays
cttgttgtagaggtaagttagattctatcacagaaggatcaccaggagaagcacactccatagatgggcactcatgctccaaaacaggtccttcttcaatagtaagatcaccctcgtgctctacacgtaaaaaataacatgaatgctctatgaaatgttatgagaatgcaagttgcatagaggataacaaatttagtttattgaatacaactttccttcacgttgtaatttcaaaccaacaaaccaactagtttttcattcttttcaaagctgctataagccattttaacttaccataaactactatgtgctaataactcaataat

SEQ ID NO: 71488 - DNA, 285 bp, Zea Mays
ctcccgagtatcgcgttgttgttatgcctggcgatgcccttctggctgctggttatgaaccaaagtaggcacaagtggtggtggtggtaactgagcccatgcagcttgtgaatgaattgctgaagcaactgatgtcgtgggttgctagttgcccacatattcagggatatatggcaaatagcatgaagcaatgtgcaagacctgcttcagctgattctgccgtgcttcggcctctgtgatttccttctacttttggatcatgacttggcacatccttgttgtgtg

SEQ ID NO: 71489 - DNA, 311 bp, Zea Mays
gtgctacatcgcgggaatcacggtacgaactgctcccacatattcgaatacgtccctattgcgcgtagcatctgtcgagtcggagtttagggcactggagcacttgattgggttttcaccggcgaggttcgccgtgaattgagggcggtgccgccgtgtttctttctgtgaagggggaagacacgctaggaccgttggatgtgtcagtgacgatccggattagatcgggcgtaccgtttcgacacgttagatccaaaccgtagagctataatctaacgggtgagaatcaacctcggctatttagaatttgg

SEQ ID NO: 71490 - DNA, 428 bp, Zea Mays
gtcgtcgtcgtcggcgtcgtcaatgctccgcccgccattatcatatggctcatttttgtcttaatctattatctacttaattgtgagtgttacgttggcacctgacgagtgcatccggccttacgtttgcatcatcctccaattaataattcctccaacacatatatgcatcacagcacgtgacacaactttgtccattgcagtacgtagtctatactccttccatatatacgtaattaatgcagttaattatgagagagagaaaacaagtcgccatcatcatcgctcgctcgctcgctcgctgctgcttctttactacaagtcgccatttcattacatccccaacctctggtcagagtcagacaagatttgttaaacctctgttacgtgtaacacgttttggtcaggttgcaatcttacttgtgtgt

SEQ ID NO: 71491 - DNA, 926 bp, Zea Mays
caaatatgagacactcaatttttaattatgaacaacacaaaattaaattgcattaaaataattgtaccaggtggaggatgagggaaaatagtgccatacttgcgcaaagcatcattgaatactctcatatcatgcaccgatccgggccatcctgcaacaacaaaggtgaacctcatatcaaaatcacatatgtctaaaacattttgagttggatatccatgacgacccacatgttgaacaacctttgatgcgggtacaacaactggaatgtgagtaccgtctattgcccctatacaattattaaaatgaggcacataccgatcacttagcaagttttgatgcgttgttatgaagtttggatctttaggcttcacaatctctttggccatttgatatacacaatccaacacttcattgaatttcctactaatggtttcttttgacctttgaaatcgattcttcacttcaacaaatgattgaggtgcaccaatagtcatagaaacattgccaaggcttcaatagatgtcattttaccactagatgccaagccataagatgacactaacaagtcatgtaatctatcaaataatggtctactcatcctaaacatctcataacattcggtaggatcgcttagtgttctcataacccaatcaaagccacacataataggttgtcttctaatggtcttgttcaagtaattttcagtatagaacatacctattcctgcaacaactgcttcaaaattcctcaaagtctcaactcagttgagagcaacagtcatggacatatcatcatcatcatcatcatcatcacttgaacaaacatccatctacaaggaaaccattgtatactataaatgacattatctgtaatatggttcaattcaacataaaggacatcctaatcaagaaataaaaagttca

SEQ ID NO: 71492 - DNA, 745 bp, Zea Mays
catatttccattacatgcaaacgtccatttaactgaacacacacttggacagcaaacatctaacatagttgcaaaagttaaacctcaaacatctaacacacttgaacagcaacacacttggacacacttggcttagctgtgataggaactacactagctcagtagcagcatacatctatcatagttgcaaaagttaaacaccaaaagtgtgttgcttcaaacttgcaggaaacacctaaaatagcagcaaaatgtgtaacatagtgactaatatatacatcaaaagtgtgttgcttcaaaatcccatacacatcagcacgatcaaagagagccaataccaatagcagcaccgtacttgcgatctataaactcaatgacccaagcttcaaaagttatatcacttgcagctctaagatagcaacgaacggtttcttgactaggatgtgacagataggacgcaaattaagtttgtccttggttgtaattgtgagatcttctatcctcctctaaagtgtagcattagggtctgttggctcctcacttttcacaatattctgggaaggttcagcaggcttgctactagcgagtgcatcgcgaagccgcacaatactagctgaaatctcatcattcaagctaccacggcctgcctttcccttccatattgcactcttcgatgggacaagcttgagcttcttactagagatagttgcttcggtagttggactatctggagcaatggtgttct

SEQ ID NO: 71493 - DNA, 439 bp, Zea Mays
tcaaagcagtggattaatttttaaagctaactctatgttaaaaccactgcaaacattcctatatattaaaggcgagcaaaaagctgcacgctcagacgtccacatcattgttattgattgcagccgcatgatccccatccaatgatcaggtatatatcaagcaaagagcaagccaggtggtccacgtctcccttaatcctctcagccgttcgatttgaaacacacaaccacatatcctccggagaccgctgtccagccgatgtgctggagttttctagaaacatatctaagcgtcgcctcttcctccgttggtatctcacctcacctgtactctgtgcctcccacgtgccctgatcgcaccatgcctccttcctctcatgcccatgtggcgggccccaggttccctctattgccatctccttcccctgtcccactttct

SEQ ID NO: 71494 - DNA, 395 bp, Zea Mays
ggtacattgcagggtgtttgtcttgtgttcctgcatgtcctgcacttgtccctggtgtaaagcatgcttataacagctttaagtcaagatcaactttgcaagagctgggaagggaaactgctgactgctggaacatgtggtcactttcttacgttgaactccgtctcgttgctatgataggcatggtgcgtccgtgacctttttgttggttcttggttaagggctactattgggctggatacccagacttgctctttggcccattgagcagtgcgttctgtaccaagctagcagtacgtgtgtaaatgttacgaatattatttttgtctgtaatcgagtctaatctgtttagatgagtttagatccgtctttatctgatttcggatctttaatat

SEQ ID NO: 71495 - DNA, 841 bp, Zea Mays
gccgctgcgacttcacctcaacattgtgggagctcggagtcgaccaactgtgcaggaaggttcactggaaggtgaagatcgcgggcgtgagggatttggacctcgggaggtctcggtggctcagtgattgctcgccagaaatattctccaccacggattcgccccccatcgcggtcagagaccatcgtttcgttacctccggtgcgtagtctttgaccgtactcatcatagtctccacatcgtgtaccaccgtttgattccatggttgggacaagaactagctgggcggatgcttcgccagtggcaccgtcgtgctcgtgccccggcgttgtgtgccggcggtcgaaggagcaagatgagagagagatgcgagggctgtccatggccgttgatctggccggggccggctgagatcaagtcgagggataatgattcagcgttcggaatctcgaccgtccgatcgtggtggggtgtgtgagattagatcgtgaagtaatgaacccgagtcgttggatattgatgggtggtccagattaaatccagccatacccttcacctcgtcgcttactaaccattgatcctagaataggcggtggagattagtgtgaggataacgtttcgactcgattgcaatatgaccgttagatctagatctgagggatgttatcgcgtacccgttcatatttgtggcgttatgatctgggccattggttcagatctgacgatcaatatccaccgataccccttcggtggggcggttgtctaaagaagcccctgggcttaatgggaatcaacccgccgtccaccgtagtttaattaatattgcagattgacccttttc

SEQ ID NO: 71496 - DNA, 553 bp, Zea Mays
ctagcatataacccatgctaacactatgatcttgaagaggaaagaggatgagaggggtcaacgacagcgacaacatgggtgaggggagggcgcagtagtgtcgtgagggagggggatgataggtggcagggttagggggagcatgggagggaggaatgagagagggatgatcctaataatattgtgcattgggttttagtaagggagaggggttgtcgagcgatctgaatcactgattttgatggtgggttaagtttgggtgcaatttgtttagtggttttagtggaggttatgggtgtgggagtgatttggttgggtgggttttgcaaagtttaaactggtggagtatgtaatggtatatatgccaaattaaatgttagttcaataactagaatacaggtagacatttcataaatgtgataattatttaaacatgatctagatcgatagattagctgagtgcgaatggtggggtatgtggtatgaggtcacacaagataaagtttctctcttgtttttttcacactcgtgagatcaggcggaggtaagggag

SEQ ID NO: 71497 - DNA, 538 bp, Zea Mays
ctgcaacatccatcaatttgaggtttatgtttgagctagagatcaatccagacctgcaggatctgtttagctgggtgcattcctgcttccgtacttgtccagatttcatcaagccatgtatcttctacctatcattttttccaagagaccacaacattcgacgaaggcgtctagtaaggcgttggatcgctgagggttactgcagggacagtgatgataaatctgcagaggagaatggggagttcttcttctccaaactcctcggtatgagcataatccaaccggagtccagtgacgcgaggatggtctcgtgtcaaatcaatggatttttccgtgagtgcatcctctcacggtcaggggaaatggaagaccttgtcattgaactggccgacagatgcaacctaaccacccaacgcagtgggcgtcatcttgtcatatcggaaagctgggacagagataagattttattcgagagcatcgacttctcacggctacggtcaatgacagtgtttggaatgtggaaatcattcttcatctc

SEQ ID NO: 71498 - DNA, 378 bp, Zea Mays
gcttgaaacaaggtttgcaaaggcatgactttgtataacctgctgacatttttcagtttgagctgtttggggctttcctgagttgaaacctttgcttgtaagtctcagcagactgttattatttttattcaattcttctaatccatcttttatacatcttgctgatacagagtaacatcatatagtgttaacttttttgccctgatgcttcattatgaaattccattgctgtattttagccattttgatttttctcacaagtgttgggcactgtttcttgatcctagtcgaaggacaacaaaagcatctaaaaaatggcagtcctgaatacatatgcaaattaagtgccatatgaagacatgctaatacatttgtttt

SEQ ID NO: 71499 - DNA, 429 bp, Zea Mays
ttacaaaattgtgaggaggtgaatcctgtactgcaagatgtagctcaaaccgtttcaggtctgcactataaagctggtatatgaaagcatagagattgagtcaattggagaccttggctttagtggggattgttggaattaggcccactagtgtgtggcccaattcaataaggaagcgaaggtggtgtgtagagatggcatgaggctttagtcccatattgccatctaggtaggagagaaccaacttatatgtggggagtgttccctactcttcacatgaaacaaataaagggctatggaggctgccacacacgcgtgcgctcgctcgtgtttcacttttcgcgttatttatcgcgtgacttgtgacttgcgacgatgcgcgatcgcgtcgggatgtgttctgaattgtaattaaatttttgcctttta

SEQ ID NO: 71500 - DNA, 329 bp, Zea Mays
gtccagtgccagaggcatcacagtacacatcaaatggcttgccgctgtcgggttgcgctaacaccggcgctgtggtcagatgttgcctcaatgtgtggaagacatcttcgcacttctgaccccaaacaaacttggctcccttcttcaacaattcagtcatgggcttcgcaattcgagagaaatccggaatgaatcttcgataataaccagccaatcctagaaaacttctaatctaacggacagtcggcggcgtcttctagttcatcacctcttgcaccttatcaggatcaacagttatgcctgcctgagagatagtgtgacccaagaat

SEQ ID NO: 71501 - DNA, 889 bp, Zea Mays
ccctattgggagcctaggtaggtggcccatagaccaagagtctacaatctctacatgactccctacgtgtattttgttttgactgcatttatgatacatgaggttagagttgtataatgcaatcccttagctgtctcttatacttggaaaatcgatccaaaggcttagggttatacatgccccaacaagcgcaacagtaacacaagcttaataacacaagggaactgatgtaaggacaacttttgttccccctactgactttgatgtgtacatacttgatgaccaacactagtaacaacttgcctctcgagcttactcaaaactatccaatcacctaatctgatgtggtttggaatttcccgaactgatgattccatttctagatggacgtatcgatcaatcggtcaacctccaataatagatggatcgatataagtaggcatatgatttgccacccgaccatggagctagctagcaccgatgccatgcatgactggctcccaagtcttggcctatctagctggtcgccgtacgtaataccagcgacttgctgggatgcatagattggcacaggtagcattaaattcactttggcaatctgttcgtgtgaagctgaagaattggaccgtgcgtggctacacctaaattcaaaaacacaatctaacaactacggtgatggtttagactattttactccatgtttttcggcttcgtcgctctatgtttttccagtaacacaggtgcaactttaaacaatccagaaacaaaatatgtgaagctcgatctcgctcgtcgcgacgatgcgacccatccgcgacaagcgacgagcttagcaaaccagcgagcgttgactctctgtcgaaaaagttgcctaaccccgcctcctttc

SEQ ID NO: 71502 - DNA, 1265 bp, Zea Mays
gttggtcgtatgcgtcttggttgcccggtcatatatgatcgtgcttatttatgatgggtggcgtgggggtgaagagtctttggttccatcattgtcgtcctagcgttgtatcgacccctagctaccatagcctgggtctcagcatagctcgtcgtgttgcggagtctgtaggcggtcagcactgaggcgtaggcttgatcggctatgagtgggtcgcgatcctaggagcctgtaggttatgagtggaacatggactgattcgccctctatggctcagcgctaggtgcagttaatgtggcacagtgggttagtcctattaggcgcagtcgcgcagaatccacttgtcacagggcaacccctgccccctttgatcgtgaggcattgccctctatggattcatcgtgttcgggcctgatggcccctcttcccctcccctaggaataccgggagtgccacgatgcctttcatgcggcgtaagaggatgtcaaggccgaggccaatgtctgacggtcgtgtggctggtaggttgctgtcctattgcctttccattcctcgttgcgcttttcactcctttcctgtcttcccctccttcatctctggaaactaagctagtgaagttgtcccactgggtgggtcaagttgtggaatacgtcggggcccatggttcctccctggtggagcatttggacaatgtcccgtgttgcatctaggatattgtcgacttcagcgtacaccagggggttgccgtggcgttactcatgggggaacttcggtcgagctacactcctcaggacatcgtgctaggggctaaatgacctcttggtgggctatggcgaggatgctagccgcgttgtggaccgtctgtctaccgatgacgatgtacgcagtgcttcctaagttgtggggtcgctatcgaataaaattagtctttatttccccatgctgccttttttgatgtgtccaagatttatcttcgtcggactcttggtgctccttccgtcgatttgttctcctagtctgcacccgtaggctttccgtagcacgacgcttaccctctttttaaagagtcacgagttccaggcttatttgctcctacgggtaaacgatgcatgctagtgtgctccgtgggttatcctcgcgggcccgactcttgcctcatccttcttcgtcatggatcggggcggatctaaaggcaattatctacggtagtggtatgggcacttctttcccatctcacaaagctttctctccctttcaatcttcgt

SEQ ID NO: 71503 - DNA, 350 bp, Zea Mays
gccgagggccggccactctatcccccaacgcccttgacaacctggtatcatgatccaagcgatccagtttgtcccgtgcctcgccaaccccgccattatccgttgtgccgtcgttcccaaacccctccgacaccatgagggacaacaatgctgccctgcaagcaaccctggacaccctagtcgcgtccatcaagtccctgcagacgtccatggaggccaatgcccatgctatcaagcgtctagaaaccgcgtgcacgccgtcagcgtcctcgtcgacctcctcccacacggggaccggggaacatcatcaagatcaaccgccgcgttttcagaaactcgactttccacgc

SEQ ID NO: 71504 - DNA, 406 bp, Zea Mays
cgaccgagcgtcgtcttctcacggccgggcgtcgtccttggcagtgggagtgtcgatttgggatggagtttggagagtggggaatagctcacgaaggggaaaggtaccggtcccacttgtaagctgccactgtcaggaacgagcggtcccacttgtaaggtgagctgtcccacttgtaaggacggtaatggacggaataggtccgtaaggtcaatgctaagcactgtgtataggtgggagggtaaaactaagtagagaaatgagggaggggtagatctgagcaaagtgtacagactaatgggagaagtgtaaaaatcccataatctaacgcttttctggctaacctttcctttttttacaagtgggagatcgaacgaaaagtttccgtttttatcttgttagattc

SEQ ID NO: 71505 - DNA, 1051 bp, Zea Mays
tgaagcaacaatatcttcatacggaggccatacacttgtcatggccaaatgcttcgtcatgtcggtaaggagtgttgctcaaacatggtaggtattcttctcttcgactaggaacaataacctcttggtagaaattaaaggacatgttaatcacaagttttcaaggattctagacgaagcagtcaccgcccaggcccttttccaatgcacacaagaccacgatgaatacttgcaagcctatgcccggagattcctttggcttcaggctcaagcaacaacagtaccaaatgagatagttactgaggccatgatgaagggggcttcctctaggaccactggcacaatacttcgctagaaaacccctcataccctagaaaaaattctccagaagatggatgaatatatcggagcagataatgattttcggcaagggaagaggaggccttcaggtattccaagatgaccaggggcttcgacggacgtttcaacccaaggcatgtcaggaccatacataatccaaatcagaataaagacaaaaacaatcacacctagggacaacaaagtcactcccaatccacaggaacctagcaaacaccttcaaaccactggccccaagaggtggggaggggaggtaggagttttggaggaagattcaacctaaaccaaggaaactattctaccttttttgtggagaggacatggggcatacaacaagaacctgttaagtcacgatccaaaaagcagaaggaaatcgctaaagtcgaagcacaacagaatcagtcaaagcaggtcctccacaccgcatcatactattctccatacattctagagtatgttcgcaaccaacaaccttcagcttcagttgcttcgacaagtcactcttctgctcaatggatcccacctcagccgtttacacaagcaccaccttcgccatatgagcagcaacatccaggacaactcaaggtctaaccgttgttttctgcacaagacgtaccacagtgggacacaagggaacaatccgaagccaaaacagtaaacaacattgtaccag

SEQ ID NO: 71506 - DNA, 404 bp, Zea Mays
cacccattgggatcagctccagtaaagagttccactggtacttcttcagcagcaggaacagaagggccgacatcacaatccaagcacgacactcgtcgaagccatctcttttttttcttcccctcggcaggagcagctggatgactgacttggcgaagacgtttcgagcgagtaccctcaggccttcgagtatccacggttctctcaggctctgggatagttgcaacagccattgtttcagcagggaccgagtcagaagaatccctagccaacatgtccagcatagcgcttatctctgcatcacccggactcataggcatctcaaagtgaacttgcctctcatcattgggaagatctccaagtgaagcaaccagaacctcaacttcttcaagagagggtcgcac

SEQ ID NO: 71507 - DNA, 464 bp, Zea Mays
cctaagggtgcagccggaatagcacaccaagtgcgttaagcgaagtctctcattaaaaagacactccacgcaaagtcgcccacgggcacagccggaaccaacacaggcgtacgaatacggccaacaggccacattaccatacaaattacagttacatacaaacagcgagggcatcacatattacatcagctcaaccttcgggatgatacgcatctccctgtaattgaacaacattatcctcaattcctcaccctcaaaaagatttcgaagatccccctcgcctatgctcgccccaatcggcgaggacaacaattcttgtttaccaacctggtctactcggagacggccacgctccatccccatacgacggtgcctaccacttcgcgaaaatccacccacactatgtttccccgccacccttcgctgcctatacccagtactcgcactaggaagatccccgacac

SEQ ID NO: 71508 - DNA, 626 bp, Zea Mays
aatgtgtatttgaccgatttcctttgatcacttcatctgcaaaaatctcacaaactatcctagtatattcgtccccccatgtcgccgtattgtacacgccaatgtggacaaacaatgcataacaattcaagttgcagcaagcataacaatgagtaataaaggattaggaatcaaataatcacctagcatcagtaatttccacatcagtgtccatagaggttgcagcatgagaagggcgtcgagtttcagtactaggagaagggtgtcgcacatcaccagtaggaggacgtcgcacatcagcgggagacggtgctcggtgcatctcagcggaaggtgattgaaggatgtctgtggcagtgccaagaatgccggcaagccacccatcgtcttgtacagctgatgtgtcgacgtgagtagcccaattcgcatccaaagacccggcacttgttggtaccacaccctcgcccacagcaccagtggaaccacgacctactccggcattggatggttggcctcggccagacggcggcaacagctggcgacgtagcggattcatggcgacctacagggaggagaatgatggtcagctgtagggagagagatctggacaccaagggatggcgatg

SEQ ID NO: 71509 - DNA, 431 bp, Zea Mays
gatacattggcataccattggaccaaaccctttcgaccactaaaaacactatcggtctggtgcacaccaaactggtccaattcacctctactattgaagtccaaattcttccctctctaggtgccgagtctagtggctggtatgatggaacacggggctagtctgatgggccctacttcatctgtcccaaaacatgctctctgagtgccaagtttggtgccccactctggtgcacaccagaccagtctagcgcactgagagcatcatgaccttgtcctttttgggcatatcttccttggcttcatgtggatagtctcttagccacttctatgactcatctattgatttcatccaaccactctaagtcatagaccttcctcgttttataccttcgctcataatgtctcagacttagctatttttgaccctta

SEQ ID NO: 71510 - DNA, 517 bp, Zea Mays
caggcattaggcgtggagatgcaacatcagtacaccatggaatctcagaagtcttcgggtgttgatcagtctcgtggctaggacgcgaggagggccaacactgggggtccagcccacaagaggggaaagtcgcaacaccagcgccaccacccctatcgtggaagatcctctgaatcgggtacttcaggagggagtacttagaggtatcgggctgttccgaagcccgggctagggttggtgtgtttccgttgtggtgaagcgcatcgccgtgccgagtgtcagtggagtggcaggtgctctatctgcagccaggatcacaaggatgtggtgtgtaggaaaatcccaatgggaagctcaaatgggagccagtgacttcttcctcttcgcagggcactgtcaacgtgatgtctatcgctgagaagcaattttctgtaccaccccctcagtagcagttctatatgcccgggactcctcagttcgtgcctatgccaggttttcctcagtacctggccacgcc

SEQ ID NO: 71511 - DNA, 740 bp, Zea Mays
tagggtgactactataccctactaatggagcaatcggcttaagtcgaaaatgccttaagtcggtgcgacatgctcacgcttacatgacttagggtgactactataccctactaacagagcaatcggcttaaagttggaaatgccttaagtcggtgcgacatcctcacgcttacatgacttagggtgactactataccctactaacgcatcaatcggcttaagttggaaacgccttaagtcggtgcgacatgctcacgcttacatgacttagggtgactactataccctactaacagagtaatcggcttaaagtcggaaacgccttaagtcgatgcgacatgctcacgcttacatgacttagggtgactactataccctactaatggagtagccaacttaagtctgaaacgccttaagtcagtgcggcatgctcatacttacatgacttagggtgactactataccctactaacggagcaatcggcttaagtcggaaacgccttaagtcggtacgacatgctcacgcttacatgacttaggatgactactataccctactaacggagcaatcgacttaagtcagaaatgccttaagtcggcgtgacatgctcacgctttcataggatgattactataccctactaacaaaacaatcagcttaagccgagaatgccttaagtcaatacggcatgctcacactcgcatatccaaagggtgatctcaacaccctactaatggaa

SEQ ID NO: 71512 - DNA, 364 bp, Zea Mays
taaagcctacggcaatttgaattgcattcagaatgaggagtggcatcctatttttcatacgcgaaatgctctcctgattgattcttatgtaaaactgttattaattgataaagaaactcgatggagaggaagccaggttagcagattactttgatgtcattgctggaacaagcacaggggggcttgtgacctcaatgctggttgcaccaaacaacacaaacaggccactttttgcagccaaggatattcaagcattttatatgaaccatgctcccaagattttcccacagcagaggtgaatactaaatacatttcttattgttcttgttaattggattgcaaacctttctggtcaacatttttt

SEQ ID NO: 71513 - DNA, 312 bp, Zea Mays
cggggtgttagctgtttgtctccctgttgcatcacagaatctccactccaacgaaggtgatgttcacataaaattattttccccttcttgtcattaacatgttgtgtatgttaagcagtaattgttcatatgttcacgttttttggttactccattcaaagtgtgtttgtactgtcaaaagtacagacgttaatagtaaatgtttggtatagcctcctttgttagcagcctaggcactggaaaagtaagccaaatttgtgtacatagtccccatgtctggtatactaacgacctaataaatccacatcagat

SEQ ID NO: 71514 - DNA, 589 bp, Zea Mays
gccaacagatcgcttgagaacggcgacatgggtggtgtattttatactggcattgccacccccaggccccagctagtgggcagggtcgtcgatcgacagggtagaaaaggaggcgaggagcctgtcagcctcgtgttccccctctcgttccttctgcctgcctgccatagcacggcggctccacaacccctggcggcctggccttgtgcttcgtgcgtgcctacccccctataagtacgcggcaccgtctcgcagacaccttgcagaaccatcactagtgagtagtagtgagtgacctgcaaagacacgcgaggcacgcagagctggagcagctgatctgagaaccaggaattaggatggcgatggagaaaggctggaaggcgagagacgctgctggtgctttcatgatggacttggagctggtggccgaggaaaccgacgacgcggtgccgtcgataccgccaccgcagacgccgctggagcccatggagtacctctcccggtcgtggagcgtgtcggcgtcggagatttccaagattctcctcggtggaggcaagaagagcagcgttgcggcggcgagccggcttcc

SEQ ID NO: 71515 - DNA, 622 bp, Zea Mays
ctagcaactgctagtttgggttgttgacatagatggtgcaagagagtggaaagttactagtagtgattagtttgagaatatgattatatgtaggatgggtgagaaggtaatgcatgtaacagtgatgttgagaaagatgtagttgtacttaatgatgtggttgaaggaacatcatatagtttgtgtgggctagaagtggattcaaagaagagatggagtgtgattacacaaatgacaacttggcagaatgttagaatgcatggatctaagaccacaaacacctactagtggacatgttgtttgatgcaatcaggaaaaatataatgatactatttgagaagaggagaaagatattcaaggctttgttagggttcatacttctagccatagtgcaccagatcaatgtagtttcaaaggggttggcccatctaaaggctactaagggaatgccaaaccacacagaggtcactatcatatacaatgatgacaacatgttgtgtacctagaccagcacattttgttaagaatatatacagagggtatgccaagacgattcaataaagatgatgctaaactagggtgatgggctcgatctcggtccagggactcggactcggtttct

SEQ ID NO: 71516 - DNA, 974 bp, Zea Mays
tggatttgtcacgggttgggaccgacctgagggattccgggccgtccgaccgcgagctccttgagacccggaggcctcaccaccttgcatgacattgccagatcctcgcccacgtttggatctggaacgtggggggagtatctccatgaatctcttgttcgtcagaggagtcagattcaacaacagaaggattcctccgacgcaccatccttaaaaagagaagatagaacctatgatgagcaaggatcttaacaaacacgtagagacgcatatgatattgagcatgcacttcaaccgttcatgcgagcggttcaactacaacgaacaatatcaaaccgctaaactctaacaatgttcatgacaaatgaagataatctaagtgttgcaaacacctaaactaaaatgtacccaacaaatgatacactagataatcaagaacgggtgagatcgagtaaaaagaaatgaaatagggcaatacctcaatccgaagtttgaatcacagaaatcccaacaagatcgagggagatgatggagaaagccaagatgaacggatctccaacaaaacttccaaagattggatggcacaagtgggttttggagtggtgaaagtgtgaaggagagagagaggaaaatgtgtaggcggtgttggctgggaaaaaagaactgagaagaagagaagggaggaaggggagagaaataggggaggcgtcggctggtcaacagactgaaaaccggttcaaccgattataaaaccggttcaaccggtttccggcagactgcgcagtaaaagcgtgcagaaaaagggattgactgcacggattttctggcaaactgacagcgcagtctgcgagactgacggcgcagactgcggcgctgactgacagcacggacgcggagcggtcaaaaccggttcaaccggtttccaccaggggaaaaccggttgagtgacctacttagccgattcactcaaccta

SEQ ID NO: 71517 - DNA, 769 bp, Zea Mays
gttttgtccatgagagcttcagtagaaacatgagttgacacctttgtagatttcaaaatggcatcctaatcactggccattctccttttcctaggagtcgttgttgcagcggttgttagcttcggcaactccgtcatggttgggggactctgcagatttggatgctcttctgccgttgagctctttgtttccgtctcttctatcggatcgacactagcttctattgtcacaacaggaattgtctccgaagccaaggggatagcttcggcctatttagcaatctctatcttctctgtaccaagcactgcagctgtcctctctaaagaatgtggcctcggcctgcgatttaaaatcttagccctcttcgacttaggcgcggtggaagaagattaagttgccatttttcttttcaacccttgtttttgggcaggaaagtagtaatcaggataaaaaatctaatcacatcaaagaccctattcagtctcctcttgccgtgagcgccgaaggcagtggtcatagctttgtcctttaccttcgtataagctcccaacagttcgtcactggtagtctcaatagcctgaagccagtcatcattcgtctcgtcaaattgactcctatagcggtaggtgtatcttaaatagaacagaccaccttcgctggagcaagcaacagtctccttcagcatctcccagtcattaaaaagcggccacaccttctaggcaatatgctcttgaactaaatccctagtgccaatgtatgtacataccgt

SEQ ID NO: 71518 - DNA, 478 bp, Zea Mays
ctagctctcactgggaaataccccaactcctccatctcttggacccttcgcttcgatgtcttcagccgccctacatcatagttctccctatccgacgccataggggccccaccctctcggggtcagggcgatcatcgttgcagcgacgatttcaccaggcaacggtggcgacgacgtagatcgattaccgccgttcgaaggagacatagcgtatcagttggtaacaaacataccagaggcaaaaaacatacgttttggtggataacaccttacgtgacctctttttaccggactagcatttaaggcgtggatctttaaaccgtttttaggaccatatctttgaacgttattgttgcacacgaagtgtaaataactccatattcatgttctattacaattaaatatacataatacttgtttagtctaaaacgaattatattttaggactctttttttcatcaacatttacatacataca

SEQ ID NO: 71519 - DNA, 1009 bp, Zea Mays
cctcctatcggtcaaaggtggtctcggtttaagcccatggcatcgagcgtagcagagtaaaggatgttgagcccgcttcctccgtccatcaataccttcgtaagtcgtactgaccccatgatgggactaacaatgagcaggtatcgtccggtcgagggttatgatctgggtggtcggtgcgatcataggtgatggcttggtcggactaatcgaggaaaactggagacgcttgccgagcatagagtatttcgcgtcgtcctgccttcagatgtcttcttggcgtgtagtaatctgacccccccccacccgaagatcgttaggcattcagtctcgtccgagaatgtggctcttgccttctttcgcttggcgccctgcctaggcttcgctcccgtttcggccggtgttcctccacccagaaaacttctcagtagcccgtggtccttgtaggcgtgtcgaattggatagcgatggttcagacacgaggcttcgagcagtttctcgaaatggtcattggcttcctcggttggcggttgctttcccttctgacccaccaccgccattagcgtttcatcgtgcatttgtctttctttcttttatcaggtcgccctcggagacctccattaggccccttgtcgcgcttggccttctacccgcgatgatgaaagatcgctctcaacgcgtcttctcctgatgcgtgagtggttgcgatgtccaggagctcctttgtggttcgcgggctcttgcatcccaacttatgcaccagagtttcgctcgtggtaaccaaaacaaacgcgcgaatgacatcggcgtcggcaaggtttgttagtttgttgcattgtcgcgagaagcgtcgaatgtagtccctcaaggtcttatcaggtttttttggcagttcttgaggtcccacgggttactaggacgaacgtacgtgtcttggaagttccccacaaaaatctctttgaggtcgacccagttttgaatgcagtcgggcctcaagttttctaaccag

SEQ ID NO: 71520 - DNA, 629 bp, Zea Mays
agaaaagtgaagaaaggaaagggtaacacctaaagagtacagagcaaagaaatttttataccccaaaattcagggtgttacactgagcttctcaagccatggtctttaagactggctgcgcatgggcggcgaggtgctccaacgtcatcattactcttctccaccatgtcgacccttggccttcgtatcctaggtctcggcgtagctcgtcgtgttgtgggtcctatagatgaccagtgcactcaagtctaggcttgataggtcatgagtgggccgcaagcctagagacttgtaggtcataagtggaaggaggatcgactctcttgctgtggctcagcgtcggacacagttcatagggttagtcatttatgtcagcttagtcctgggctaggcgcggaatccactcaagtggcttactcttgattcacccgaccccccttctagctccacctcacccgatccaaggtttggtgcctcgggactatccaggggcaggtccttccggggcagactcaaccatcatcctcctgctgactcgtgggccttaggggcccaggaatctttttcgcagcaataggttatatgttaaagattggagatgctacactattatttagatgtctataatg

SEQ ID NO: 71521 - DNA, 560 bp, Zea Mays
atgaaatataggtgatgaattgtagagaacgttgctggagacgataaagatataggagctgtttagttcagccattttagacccgtaaccattccctgtgacagctgatgtcgttccttggagtttggttagggcacttcgtaattgatagcagcgttaccggatacaagcatgtagaatctcattcccactccccacctatcgtcattcaataccgtaaaaacagaaaatgctgcccggttgctgatcccactgccgttaccacttctttcgcccaaccaaacaacattatagaggacaaaagcttttagagtgttctataaaagacagaatattttttgtatgatgaaaattaggcgacgctgctgaaacggttttaatggtatgtcgcaagaattaattcacgggagtacaacaagcgggcagggacaatcagacacgcgcgtcgctggaaacaagcgggcatctgaggcatggtcgattggtcgtcttatgatcttatccgtacgaggctccctagagaccgaactgtgtcaagtatttggaatgataaatatatg

SEQ ID NO: 71522 - DNA, 435 bp, Zea Mays
aaaagttcgaaaatttagaaactaaagaggtccaaaattgagaagaacctgctgctttctaaattctttagtgaactgaatcaaacttcagattctaaactgaattcgacaccagactgaacccacatcttccactccttgcatcacatgattccaaatgataccaaagaaatgacctaaatacaaattgctctccaatataccctttaactctttgctatacagctcgaatctccatggactaggtataggggagcttaaaaacccaatgaaaaacactgaatttcagattcagtttactgaacctattgctgaaatcctagtctgacagcacagctacaagcaatctttctcccagttcttagtaacaacaagccaaccttggttcacaaaacatgttcacaacaccaaactctacaagttttctgtagaagc

SEQ ID NO: 71523 - DNA, 485 bp, Zea Mays
agggtaagaatagcctaaggtaagatagtttatggtgagaacaactctgtgttggatgaatggatggtaatgcatctaaagatcaagtttgacttctctgctttcttgacgaggttgatctttgccttttctggtcttggtctcattgattcgaggtcagtgtataccattagagttggggaaatgtggttaagatagttatggatgagatagagtacatgatgtaggtcaaaagcttgtctgttgtcaggtgagggtagagagattatgcaatccgtcatgactctactggttgagttagatctattaggatgacataaaatcttttcaagataagatgaatctactaaggtaatagggtatattttaggataagatgaatctattaggcttgatatattctagtggtggtattcttaattggtctagtttatcttataaacgattttttatatgtatatgcagatgtaattgtggacattact

SEQ ID NO: 71524 - DNA, 423 bp, Zea Mays
catgtctagaaacatgtggacgactagctcaattagtcaatctggtcgacgactaatcatgactagtcgactagtcggtagctatacgactaggtttgactagacgacttgaaaacattgaagtatgtctcttaaggacttattcaccgtccgagtctctgttagatcctaacggattcctatggcccacacgtcagtcatcgtggtctgttggacccgtggcacggctcaaagcgtgtgttgctcgtacgtcgtcattagtattgcgagctatatcgacagcacccaccattgcgtgtctcagacctcgacggcacccgccactttcatcgagttgtatgtcggcacccgccattgcgtgtctcagacctcgacgacggctgccgcctgacacccgactgccttagcgcaccctgatgcccc

SEQ ID NO: 71525 - DNA, 555 bp, Zea Mays
tgcaaaatgaccaaattgtattacttctataatgaaagggtcactatgtaatagaaaggatataattgtaatttcatatgaagttgtataccaacttgttcatatgaaagggctactatgtaaaaggaagtcgatacaacaccagtcagagcaccgaacacgaccaacaccaggcaccaaacctatctggtgcatcaccagatgacacatcgaataatgaaaggggaatgggctttgggtcatttctattttggttttgatgttttatgaccatcacaacatattgtactagctagtttgctaagtgtttggtcacatgatcaagcgaaatacttagatacatcacagacgttgtgaaaaagggtatatgtagaaggaaatggacttcgggtcatttcaacacttggataagttataatttaccttaacaatgtatcaaaactatttagactaactggagagcttatatttagaatatggagttttgagggtcagttgaagcaaaatcttggtagaaatgcgatttagaagatcaaatgagcaaagggatatgac

SEQ ID NO: 71526 - DNA, 551 bp, Zea Mays
ccgtctcgtatctgttttgcatgtctctttcttgtgaaacggaagcgcacaggcacatcacatagctagggtagcctccctccttgtccttggcacagcgttgaagctatgttatatgactgaccatgctaatgctactgtatcgattgacgcatcctttcactactagtttttcgtttgattccgtttccatttttgcgcatgtgaagatcgaccttgtccgtagagcgtctgcctggggagggctgcttagtttcgtgcctcgaatgtttcacaagttaaagcgaagaccaacgctcactttctctttggaaaatggattattatctttaccttttgctttttaggcagtctttactttcggcgacgacagagaagtagatttgacgatgaaaccacaggcacgctttccatgttggcatctaaagaactgtgccttctttagctagtagtgttcaaagtttccaaggatggctacgaggacgaaattgttttcagaccaatcttttgtctaatgggctcaactcctgtggcggtctggccaatgcgac

SEQ ID NO: 71527 - DNA, 436 bp, Zea Mays
gtgccaccttcagttgttctacctaggactggagctatatagaaagtttgaaggcttatggctgcctcctacagttgttccacctggtgctggggggctatataaaaagtttgattcttgccgagcacttggagaataagttaaattgaaagaaaataaatataatcaaatcttcagtggttccacctaggagatgtgctatataaaaaggtttggttcttgcaaagcatctggaatctacttagagagaaatgcattggttgaaagttagcttacttgtacgtgtgttgtgcatccagagattttgcgcttttctgagttttatgctgtctgccttagggctggttttgggaccagataatttaggagggtcggaggggattcaaatgaactaatttctcgctcaatctcctccaacctctctcaattccctaga

SEQ ID NO: 71528 - DNA, 1086 bp, Zea Mays
tcgaaggtttcataatagcgtccagaatgttggccattctcctccctttcctaggagttgccgctggaacggttgctgcctttgacaaccccgtcagtgctagaggactctgtagctttggttgctgctttgtccttgaactctctggttctgatttttctagctgagcagcggcagcttcggcagtcccagcaggtattatctccaaagctgagggggtagcttcggtagattcaatagctttcatcctttctatagcaggcagcgcaacaaccctccctaaggaatgcgactttggccgatgagttaaaactttagtcctttttggcttcggcgcggcagaagaggttgtagttgtgatttcctcttcgttccttgttttcgtgcaggaaaacagtagtcaggatagacaaatctaattacatcaaaaactctgttcaaccttctcttcccatgagcaccaaaggcagtactcatggcttcatcctctgccttcgaataaaaccccagcaattcatcaatggctcgccgaattgacttctataacgataggtgtatttcaggtaaaccaggccactttcactggaaccggcagcgatttccttcggcatctcccaatcgttaacaaggggccataccttgaaagcaatgtgctcctggaccaaatctctagtgccaatgtagctgcacactgtgttgaagaccaatagacatgcttgagctttgttaccacccgcgttcaaaggtctcctaatgctgaagcgcgatcctatggggcggtggattacacccttcacatcctccctctcactcaaatcatttctaacataaaaccattgcttcatccatgagctcggccattttttccgaaacgatggcataggacacctcatgtcagaccgatacacgaagttataacatccgaagttgtgatggtactactccttctagtggccttcgtttgataagacaactcgtgaatgttgcaaaaataattagcgtccggttccaacccctggcgtctcatcgcccaaataaaaattccgaccttaaataaagcttcgggaataagttgatgaaggtaaa

SEQ ID NO: 71529 - DNA, 945 bp, Zea Mays
gtcaactatccagccttcacttgagctcgtacctcattgcagactatgcgatgatggctctccagtgcgggcgtaacaccatggggtcgctgggtacctacgcttgggaccttcgcttcacgattggaggtaatcctggatcatgtacttctccgctacgagtagggcaatctagatcgatggttgggggcgggggtcgcagagtcaggggaacgacgatggcgccgccgtgttgacagccaggggaggaagaagatggtcctgtagccgttagatgggggtggacggctgagattagaagctggatacctcttcgtcgtattaaatccatgccgcagaactttgatcgggcggataggattaagacaaacacgtggacttattacgtccgtggatctctgatcctgcggccatcattgaataccgattcacttaattgttagatctaatcctagcccttgatttccaatccagcggcctcgattcaccgataccccttccttggcttatttgcttaagaatccctggttaatgcctgaactaacccgcggtccagtccaggattcgctgtgtcttgcgaagttttgcaccgagacccctagctttctctgtaatagtgcgcccactccagagacccaggaaactcaataattaaatgtagaaattgatttttatgtataaataattgctagaaacttgatttaatcatagaagatccattctagctccaaattagtatattccagttcctaaaattttgtaataatgttgtttattacatagcacctctgttttaacatgaaaatggtattaaaatttatttcttaactaatctcgtatcaaatacataaaaccttaggaaattcgtatctccttcgttttaaatccgatttgactcgttccagttgcgttagtctcgtagcaacgcgtagattattattactc

SEQ ID NO: 71530 - DNA, 1297 bp, Zea Mays
tcgcgattaaccgccccgcttttgccgcttatttcagcttgtccttttcccccagtggggaaggttagcatccagcacaagcaaccgccggttcttgccgcagtttctgcgcgctcgctttttgtccgcaagaccgaggagagcgagagcggagaggttcctgtgtggaattcttcagcgatgaggcccggcgcccgtctggactcggtggtcttccagctcactcccacccggaccaggtgagatcatcctgtagatctgctcatgaagcggccttgattcgggggatcgatcgttccttgggtttcggtttctggaatggtagcaagaacagatttttaagaatgaatattttcgcggttagataatttggtctttgcgacggttcatgtgccgtgcattttgcagttgcagtgtcctaagatgcttttgtccatgtcaggactggagttgcataatctcggtgcagtttgcccaatcaaatgatttcatctttgttattattgttttgttgggattggtggtcttctgttagctgtaaacttataataagagaaccggcgattattgcatactgttaaaaaaactataactattagacggagtagactagttctctttcaggttgtcatggaatctactgttttgtcgaaggtcactgacggaagctgtcctggtcctgttttcgcttttcaggttcgacttggtcctcatagcgaatggccggaaggagaagtttgcatctggtttgttgaaacccttcctggctcacctgaaggccgcccaggatcagattgcgaagggagggtactcgatcacacttgaaccaatctcagagttcgacgtgtcattgttcacgagaggcgccgtggagaggtccgcttctagatttcgatactactctagtacagttatttctggcattgcctatttgcctcttgggtcaattcttgtgtcagttctttgcaggtttgtgcgtttcgtgagtactacggaggtccttgagcgagtcacaacactggagtctgagatcctgcagctcgaggatgccattgctatccagaggaacgatagtcttagattaaaatgtgtaagcgcggaagatttctctaccttatggctaggttgctttgtgtttttgtagagagatcacatattcttgctttgccatttaaaaggtcggagaccatggaagaaagttgactgaaagcaatgaaagtagtatgacgctgcaccaacctgattgctttctgagagcatgttgtatagaatagtgcatgcctttgaggattgtctg

SEQ ID NO: 71531 - DNA, 303 bp, Zea Mays
gccttactcacccatcaccacgctggttcaaagggacaactgggcagtaaaccaggtccggtaatgggtaaggattttatcacggataactctgaattccacccatgtgcagatattttcgttagtgaaacccatcagacactagaagctccccagccactctctgtaatactcatccataactcagtcttgacaaaccagtggagcacagtagggatacacagatcttttcaaggttggaaaccaacactgaattctattgagtccaacactccactgtccacctgaaccccttaggtttac

SEQ ID NO: 71532 - DNA, 586 bp, Zea Mays
gggggggtctaactcttaaaattcctaagactcagaattaaactgggtggacgtcgggttgattctaaaagactttaaggacctaggcgtaaaactacccgacagaagaggtaccaatggttcctgaccgtcaggtcaaacacgtgcgtcccggattagaccaactcccccgcgaatcttacgcgatcgagaaccataggattttgaatcgatggctcagatttaaaatactttttacggttccagattcgcccgcacgagatccgacagtgcggatcaacccgggtgaaggggtacatgatctctaatcctaaccgcgaacggcgcatccgactgtcacaattcgccctcccaactttcaccgtgacccggcgtcgcacgagtaccgttgacggcgccatcgccggcgaccaacccacacgtgattcgcgtgctaaaacatctatactaatgcagtggcgggcagcaggaatgatgagatacactctggaaaagtgctcaccggggattaaagaccgtgtagaggcgtccacggtatgtatcggaattcattctccgacgagaaattatgggtcacccagtggtt

SEQ ID NO: 71533 - DNA, 631 bp, Zea Mays
gcagagagaggaggaggaaggcagcaagcgcgaggagacagttctcttcgagaaatgatccgatatacgcggcgcttcaaaggaagtctggaagtgtgcgatggacgacggtgacggttgatggatgatcgaacggctatgaagttttccgacgacgtggatggcctagccggcgccgtttcggtcctgctttcataataaggaaattactgatatgaattttattcaatagtatcttcttgatgtattaaataaccaaattattaaacctttcttgatatattatgaacctcaaataattctccatcaacttcaactttggaaagcttttttaaactggaaaaagtttaccaccccaaccatcccaggtagcccataaataagcccaacactctagctaacccattaaaattaagttaccactccccacacctctcaacaacttattcctccccttctctccatagtccctagctgctaggctccttttctcatcaccgtcaccactcagctcgcctcgtggccactctgctccctgcaagctactatcggtgccaatcctccctcacctctttcctccccctgatcgtcttaccctccctagcgcgggctccaacaggtagagccctct

SEQ ID NO: 71534 - DNA, 904 bp, Zea Mays
cccgcccgcccgtaaccctaaccctagtttcctatcgcgccgcgcacccgctcagtcgctcctctccgctgcgactgcgaccgccgtctcgcctctcgtccatctcctccatctccggtctccgctctcggcctctccatctccgctccggcgcctccgtggacgtgtcctcctcgtccctctcagtctcggactctcgcactcgcacggtaacgctggatctcgccatctcggtgcttgtgctccggctcgtcgtgtgctccactcctccgtcctccccctctccactccttatgtcctccactcctcctgacctcaacggtgccagtgacgtgaaccagggctccggatctgctcgtcttcggtaaccgtgaggaaccagtgcgcgtcggctcgatctccactttgagtcggcgacggaaccgggcttcggaccggatctaccgactaccgctaacggcggcctcagctctgcgtccggctgtgaatcatctaggcccctttggtgatgttttggtaattaatgacaactgcttgtggactaacgattcttcgagaaataagaatgcagggttggaccacataaaacaggaaatgttggagaatcataaacattggttgtggatcagataaaggcaaaggtataatataggttttgtttttgccggtcttgaggagtttagagaagatacatgaccggattagtaggctagatagccgtactattaagaggggtcaataactttgatctgtgtgaaactcagtgcctcatagagcatcaagtagttgcatttgcatgaggactaacagcgcttcaaatctcgtgagttaaaagttctttcaaaaacaagtttgaaagttgcaaagtcttggatgcgcggaccatccgggccttgagggcgga

SEQ ID NO: 71535 - DNA, 306 bp, Zea Mays
tgggtctggttttggtagtgtcttgccatctgttgggtctgtggcaaaccgtgtctccccacaaagttgtcaccaacccggcgagaatagtttcatccttgtcttatgtgaagcatgtattgggcaggagatgagatgtgaatagaagactgtttttctccttgatgggaagcaaaacaaaggcagtgttcgatatgtgatatctgaactgacaccaggaaaccgtgatatggaagttcagttacaagctgacatcaaaagaaaattcaggagtaaggtaatgggcttccagttcagaatggtgca

SEQ ID NO: 71536 - DNA, 447 bp, Zea Mays
cctggctccgcctcattaaaaacctcacccccgggaggaaaagagtgcgggccggaataataatgtttggtgaattacaagggcgtggtggccctgaggattcaaacaaaaaatttgcggggattatctatattccaggaatgttccaggtcttcgccagattgcgttgttagtctatacacgctgggagacgactttgtcttgacgataaatggtccttcccactttggctccagcttaccccgtgactctgtccgggttgtgcggacaagtacgaggtccccttcgttgaattctcttgggacgactgtgtggtcgtgccagaccttcgtttgggcttggtatttgttgagggcttgcagggcgaagacacagtctccgtcgatgagatctttggaggttagttcatcgacgtcgggtactgctgaagcgcttgtccgcgaggac

SEQ ID NO: 71537 - DNA, 577 bp, Zea Mays
atgatgctgttggcactattacttgggcggaattcaccacacagttcagaaactaccacattcctgctggactgatgaagattaaaaagaaggaatttctatcattgaagcaaggcaacatgtctttcagcgagtaccgtgacagattcattcagctatcaagatatgctcctgatgaggtggctgatgatgagagaaagcaagagcactgcacagaatgactcaatgggccactgcagtatgcattggttgctcataccttcccatcatttcagaggctacttgataaagctctagctattgaacacaagcgtgttcaactaggagacatgaagaggaaggccattacccaggggcagggtagcagcagtattcgtcctcgctacgtgccgccccagggtacactagctcgtccagtagtaggaccgcgtccaactcagtacgctccacaggggactcagacacatcacactcgtcaggctgcccccactggcaccccggcgatgcctacaggacagaagacaggccctacatgcttcaagtgcagtcacattgggcactatgctaatgcttatcc

SEQ ID NO: 71538 - DNA, 486 bp, Zea Mays
ggagaattttttaacactgtttggagagtgaaatttaaaatacggatgtaatagcggatgagatagagatagcctaagcatgcacgactacaattctcttggtgtgatatcaaaacagcaaaggtacttgtgttaagcatgcatggggacctaacatatagcatctcgtgttgctccttccattttggagagtgaaccatgcatgcgcatatcaggctggctggtgcttgctctgcatggtgtgtgtccactgccactgtgcatgcatgttatggcagtacctgctatcaatgcactattagaatcatgtgccacatggctggcgcgtgcagtaccgctttttatgccctgtgttgtagcgtaggctcaattaattatgtctaatttgttttttgcttgttcatgttactattgtcactattatatatcggtaagacaatgtcttctaagttcttactgagcttttgtcgttagtggtgatagtgc

SEQ ID NO: 71539 - DNA, 720 bp, Zea Mays
gtggagtttaggagagataaaaataagggggggttaggagattagggttccaaaccttgggttgaaattttgggatgttacaaacctaccccacttaaaggaatctcgccctcgagattagactggatttgagaaaaggtaagggtattctctcctcaaagagtcctcactctcccaggtagcttcctcttctccttctctgctccactgaactttacagagtctcacttctgagttgcgggtcttccggactgctgagtcaagaatctttattggcttctcatggtactgaagatctttctgaatctgtattgcctcttcttcgatgtgactttctggtacttgcaggcatttgcggagatgggacacgtgaaacacattgtggatatcagacatggattttggtaattcaagacggtacgctgcgggtcccactctgccaatgatgggatagaggccgacgaatcgcggtgctagctttcctttcacttggaaccttctgacaccatgcatcggggagaccttgaggtagacgaagtctccttcctcaaatctgagttctctccacctgttgtctgcataactcttctaccgactctgagcttcaagtaatcttctgcggatcagggcaactttctcctcagcctccttaacaaaggcaggcccttccagtgccatttcccctacgttggaccacatgagaggggtctggcattttcg

SEQ ID NO: 71540 - DNA, 984 bp, Zea Mays
cggcctgcagaagggggaaagcacgcgcgcgcccgcgctgccatctttgcaaaaaggcccccgatgttttaaataacttggaaagcgttcccgggactattcctagagtcactgacatcttacaaaaatacccctctagttccatttcttctccaaatagatccaagtccacggcgcgctcaccatcgactacactgctgctcggaccggccaaaattggcgatggttgcccaaattaactactgggcaagtattaccgactcgaggtgaacctagaacaagctttaattgggttaatccagccctgaatttgcctgcccacgatgatggcgatcaccgagaccaaatcaaggcgttcccgacgagtggatgccgtcaagctcatttagttgagtcaacaagtatcacaagtatatgagggtgctaaaacacgaagacggagggtgagtgcggacctgggagcagctagccgcgatggggtgattgacggcggtgcagtcgaccagtttgggggaaaacccaaattcaatggctgtagtggctaatcgagggaagggatggatgctctggcttggtgataacatagcatagcagaccgtgccatcaatttataagggcgctaagcgatggtgccgaattttgaaaggggaagaccgacggtcgaagggagaggtgagtcaccagcgtgaactatcgtggcgttccccggggtaatgccttaagtgacgaacagacctcatatggatttctagtgcgacgtggtagttcttctaagctcgtggcacggctacgatcgacggcgaactctggcgaggacacctctgtccaattgtgcggcaagtgtcatagtgataaggctctactcctttcctgagttgagagctttcatttcccatggttatttgcaagccatgacgcacgaatcgcgatgatcgatgtcaatcgcggagtagggtcatcagcggcgagattcactgaatccgc

SEQ ID NO: 71541 - DNA, 431 bp, Zea Mays
gattaaagaatgaagagatgaaagtacatgaagaaagacacaaaggatgttaataatgaattatacataatacaaagataaagtacataattcaacctcatgagttttacttccttcatttttattattcaacacaaaagattaggtgcatcatgagtatgtttggaaataaatatctgggaagttttctacttggatattttcagtgattaggtttttgaagttccattcagggactgagagatctctgaaaaatcacaattgtgtctattaacttagattttcatgcctttaacatgtttcttatgttcttgaacttttgctgtgagggctttgttacatcatctatatcaattgaaaatgtcctggtaatggggctggtactatgttctagacagatggcttggtaaatgggaattctatttctgata

SEQ ID NO: 71542 - DNA, 447 bp, Zea Mays
attcgcgcagcccatattggtgcctctaatagtataaatactagtgcgtgtattctatagaacagtttggatgattagcaatacaaactccagccgctgaccgccgttctggcgatctgtttcggctagccgccggtgacctaagggtgctgacagataggcggagtaaatatatgatatcgtataattaatgttgtactgtggggtaaatatttataagaagctagcgcaactggaacggactaaaatggagttaaaataaacgagttatgaattttctaagattcaagaattattcttatacttgaaaatcaatttccaaggttattttattgtttctgcactgtatggactgtgggcattatttcttaagtctttagggtttgttttataaacgtcaggacctatttgctgttatctttatgagagggtaggtggtgggttgat

SEQ ID NO: 71543 - DNA, 645 bp, Zea Mays
gtcacggagaagccgttcgtgggcgcaatcggtcggcggtgaccggggtattgctcgccgtcgattgcagtcgctaggcgccgctcttcgtcgaatctggcccatctgattcctcgccattggtacggcactgcatcccttagttcctaccagacttgacttcgatttgggcttgaccgatttgggtttggggcgtcgggccccctcgggcgactggccggagatggctccgccgtggctctgcgcaggcatggtcggaggtggaagagtttgcgcgtgccgttgatctgggagttgacggccacgattagatctgggaattgggagatttcgcgccgttgatcctcctatgggcgatccagatcactggtattcataccctttcgcgcatacaatctcagttgtagatctcacatccaacgcttgtcgtagcgtaccgtttcgcgtatgatttgatttaatctgggcgctccgtttgagatctgacgactgtgagcgcacggtacccctttggccgcactttttgttaaagagcccccgaggaaatcactaatcaacctgccatcctgagaacactattctctgtgtctcggaaatcttacgccagagccccctgacctatccagaaattgaggcccagtccag

SEQ ID NO: 71544 - DNA, 845 bp, Zea Mays
ctctcaatcctaaaaacttaggtgttattcccataatctcaagtctggtatggaaccagcatacacagccaacgtctggtacagaaccaacatacacaattattgacaaccagaagctttcctgaatttgtgataacgatcaaattcgagagttagctttggctttgccacaacaaggatatgtatggatttgcatgaacttgtaaaaattattccaaccaattcgaattagcgcagtgataaatggttgtatcattgcaaacgaggtacgtacggttttggcacacaccctcatcatctacatttacttgcatgaatgaattcagtagggcgattttaaacctcaggaaaacaaaatgcaagctttagctgaaagtcatcctgtccggattcaggggacagttgcagactacgtggaacagtagaatggaaaaaaatgtacattatttctgcaatggcgtgataccacaattgacctggactaaagttcgctgcatgccttccgttttcaagtttatttatttggtgcacgaaagttgaacgagtaggcctatggacaaactttttgtgacggccacaactaatacgtggcgcttttttttaaacatcaagtacgttgacatatctcgacctctgatatttactcttaaacaattcggccttgacatccatgctccccaatcttataacgaaatatctcttcccttacttaatattgccgtctccaagttctaatctctgttctccattacttaatatattgtcgtctcagactctcatctttgttgtgcctatgctgattggattaactgaaaattctttgccccgtatgtcaacaattttat

SEQ ID NO: 71545 - DNA, 498 bp, Zea Mays
gggaggcataaccgatcaaggataatctaggaacatcctttaatttgacataaacttcactgggaactgtctacccacgatcatggcggaaaccgggatcacgagcacgtgttcccgccaaatcatggtcgaattgagcaaacgagtgccacgataagcttcactagcatgcagagccacaaaaacaacattcgagatggacagagccttacccgaatgggctggccacggtcgagctgttcacggtggcgcgacgacccaatttgggggaaaagggagactctctggctatggtgtctaatcgagggtgggagcgggtgctttggcttcgcaatttagagacgaagagctgtgctcggttgatttgaacggaggggtgaggatgcggtgaatttataggcgcagtgagccactgccatggccatggtgataaccatcgccggccttagctggcgatcaacggcggcgtcgagcgctatcctttcctacgagcttgcc

SEQ ID NO: 71546 - DNA, 968 bp, Zea Mays
ggaagtcatgactcttcatccctaagactagcagagtagataagttcaccccctactcagggaacattaacatcttgatccacactagtacttcctttctttgggcccttcttaggatgaaatcagccttaggccttctccatgtatttccaccactaggcggcttcatctcttggtttggtctatcacataacactgccagatccactcttgcctttacgttgccctttgacttattatgaatgcccataatggttgcccaaagtgcctcgtcaacattcttttcagtgtgtgtcacgtcaatgttgtatggaaggagcaggtcgtcataataggggaggcaagtcaagcccgacttatgtgtccacatatgctgctcaccatgtcccacaaaaccaccttctgggttggccacgagaccatctatctgttgacgaacttcaacactagtcatcattgcaggtgggcggtctatcactacgacacctttcataaagttattgatgtctagtcaaaatgcatggtcaggagggagaaatttacgatgtttatcaaacgatgaatatttactacccttcttcaaccaattgaccctaaagagcttccttgcaaactgggcatgggaacttaccgtgaacacaccaggcgtagaatagcccatacgctggtaagtcatgcatggagtactggtaccaaacatgcattttgatgtttgtcttcgtagctcggtcgtacgtctataccccttcctcccaagcacgaaccaattcatcaatcaaagactccatgtacatgcccatttcattccccgggtgtctaggaattatcaacgacatgaatatgttctgtctttgaaagcatacaccgagggattgatgggataacgagcacgggccaacatgtgtatggggcagcggtcattccatggggattgaacccatttgtggccagcgcaacacgtacattac

SEQ ID NO: 71547 - DNA, 495 bp, Zea Mays
ctctatgtcggcctattctcataattgtgctaagaactggcctatgtgctcacgtgtgctcttaccttggtcaaccaaaaactttgcgaattcgggtatcctagttctctgtgggtatgggtgatagtaaaatcggctatcataaggtctctgatatgactgtcccccagggatcatgctaactccgagcttatctcagaacgtcccggctatcttttccctcactatatcaatggcgatcgatgggagtccaccggctctctggtccaacatgggtgtggttatttggatatttgtgtgttgtcttcctcctcgttggcttgggttttgtggcacattaatacttgccctatgcggctcataggactggtcattcttttctggccttctaggagggggccggaaagtactcacccccacggttttgggatgttatattacggtgttggtgcgctataggatgtgacgggaggtttagctgagatgcatgtgtat

SEQ ID NO: 71548 - DNA, 1017 bp, Zea Mays
ggatgaccaaattgaggctggggaagggttcacgggttcaccaggagttatgcacacactttggtttgggcagaataagagccaaagagcaggtcgacggtgagggtggcccgacggcgttcttcagaagcaggcgcgtgttctggtgaaaggcttcggccaaatttcgattggttggcactgagagcaataggaggctaacaacaagcaagaacatgaagcaattgggtaagtactaacccgaggaatgctggccacagagcggggaagacttagacttgtcggtgacagagaaaggggagaattggtgttgtggcggctctggttgaaattggggatggggattgaggctactcggccgtgaaaagctatagcttcaccgtgcagactcaatttgagaggaggggtcagagacagcgtgaatttggggctctgattcaacgctctgtgtgtgatggtcgcaccttcgccgtggaccacatggctatttatagccacggcggaccggcgatcatcacatggtcacggacagcatcgcgagcgcatgccgaccatgtcggtaggaggcacagtgagggaaatcacggcatgcgtgacagcgcggcgagagctcactgagtcacggtggttgccggtgaacaactccggctaggctcggggtatggtgccacgtacgcgttatctaactccggcgttatacgttccctaccgcccacgaacccggacggcgccggcacgaattttggcgcagagaggtcgccggtggtgagtttgccgcactggcggtctgatccacattagttactgtaccatggcgtttgttcttcagtcatctgaaccagctaccttcttccatcttgatctctggatttttgtcaagaacagaacaatctctcctaatagaatttgtttaccatacatcaagctacaaacttactataggattcttgggttgaaaccgaatgaatccaaagataaggctcaccagatttagcctcatctcactgcgaccacttc

SEQ ID NO: 71549 - DNA, 532 bp, Zea Mays
tcgtcagtcggtccacaataacccaaatcgaaacatgatgacgagaggtgctgggcagacccacgatgaaatccatgctgatgtcatcccatttccacgaaggtatagatagggggttgcaaagctctagctgatttcaagtggcttgcctttatcctctgacaggtgtcacattccgatacatactgggctatctccctcttcattctggtccaccaaaacaaaggcttcagatcatggtacattttggtgcttcccggatgcatagagaatttggagagatgagcctcgtccaagattttcctcttgaggtccttgtttttaggaatcaccaatctgcttttgaaccataatgcacccttttcatcttggcggaaacatttatacttttcaaccttctgatggagattcttcttgataatctgcactcccttgtcactgagctgggccatgatgatctggtcttgcaaagctggctcgacagaaatgtgagacagagcaccagaaggaatcacttctatttgcatcttgc

SEQ ID NO: 71550 - DNA, 604 bp, Zea Mays
gaggcccaacaaattagggtaacccggagcccaccaattcattaagcacacccaactcaaggaaagacccaatcgccccaaagactagttcaatgagggaagggggactctcccttttaaagtgacttcctcctcccaagttaagtgaggtgggataattctgaggctcacacggtcgtcgtccgactacaattgggccaactaggacaattgtgtatttgtcaatgggtaatagttgatgatgggatgatacacccagcctaggtggtgttagccgaggcccaacaaattagggcaacccggagcccaacagttcattaagcacacccaacttagggaaaagtccaatcgtcccaaaagactagtccaatgggggaagagtggctctcccttttaaagtggcttcctcctcccaagttaagcgaggtgggatcattataaggctcacatggtcgccgtctgactacaattgggccaactaggccaattgtgtatttgtcaacgagtaatagtggaaggctagcataacgatacccggtcacctaaagcccccattcccaaggttagtggattgtcactggatattttagaaaagattagggaa

SEQ ID NO: 71551 - DNA, 1231 bp, Zea Mays
gcatcacccgaatgaggaaaaagaacaaaaagaataacctccacttctcctctttgcaaaccgggtatcacactctacctccttaaaaagaattcgacctcgaattctgacgcttctatcggaacgacaaaagggaaaaattaatgaatcaacaacacttacccacaacaaaaagttctggatatttctgccgcatcagctcctcaagttcctatgtagcctcgcgctcagactgattagtccataagaccttgacatacttaattgatctcttcctcaaaacacgctccgaggattccaagatacacaccggacgacacaccaaggtcagatcctgctgcaccgcaattggttccatctcaatctgatggtctggatcccacaagaacttcctctccatagagacatgaaaaactgggtgtacccctgccatggaatccggcaattgcaagcgataagccaagctgcccacccgggccaagatagtgaacgatccaatatatctcaggctaagctttccggagacaacaaactgaacaactccttaagtgggtgataccctgagaaggacttggtcacccactgcaaattccaaatcccgcctcctcacatcagcataactcttctgacggctctgagcggccaaaatattctgacgaatttcccgaaccttttcagaagtctgttgtacccaatcaggaccaaccagggatctctctcccaaggtctcccagcacagaggggagacacaccgcctgccatacaaagcctcaaatggtgccatcttgatgctagcctagtagctattgttataagcaaactctgccaatgcaagatgaacttcccagctacccttccaagacagaacacaagcacgcaacatatcttccaaggtttggatcattcgctccgactgaccatcagtctgaggatgaaaagcgacactaagagaaagcttggtgcctaatgcactgtgaagactctcccagaatttggatacaaatttggagtcttgatcagaaacaatggacttatgtaccccatgaagcctgattacttccttcatatacaaggggaccaaatctgaagctgaatttgtggtcctcatgggaataaaatgcgtagacttagtcatgcgatccactaccacccatatagcatctctgccccgagaagaacgaggtaaacccaccacaaaatccatggtgatatgctcccatttccactccgg

SEQ ID NO: 71552 - DNA, 669 bp, Zea Mays
ttacaaagctaacaacactacaatcaaattatttaaattgtaaatattgttgtagggactagccactctattatgcatatacactgagggattggtggaaaaacgactttcttctaccttaggaccgagcagcaggacaaggcagaggagctggcggagggatggtctttggcgaaggcttcggcgagcagtagacggcgagctccggcgacgtctaacaagcagaactacagcgtcgtcgtgacatagggagaacggggtgtagagaaatcatcggtgagcaagaaatggcgacggtcaccagagcatgatggggaagaagcagggggtgcttagctcacctatggaggaagaaagggagaggcgattgtgccatttatagggagaggagagggagaaagatatttgggcgaatcgatgtgatctgcagcttccattcaaggaggatcggagaaggaaataaatcacatgatcgaagaaatggagcaggggaaaatcgagaaagtatcgtggccaggagggaagggaatcacggttggggggcttgtcatgaacaccactagtgagagacgggctacagacgcatgcaactgatcgcacacgctgtgtgagcacgtgcactccccgcgctatgaagtttccctagcggctcggctaggcagaagcgaa

SEQ ID NO: 71553 - DNA, 512 bp, Zea Mays
gcctgatgcctcgagtcacccttcttcctcaattgcccctgcgaatgacattgccaaatagagatgtttcgccgtagtgacgtgtttagaagatactgaatgtatttgtgaattatatgtgtgtatgatcattgtgctcggatattcggtggatagagaactagaatgtgcccctggtgctgacaactataagatttgtttctattgtcagggtgtatcagtcatcttgaacgattacagaagtaaatgcagcatgcgggttttggagttttttcctgacttatgccaatcgcttggctgataaggcatagtggttgctctaagatgagtagacatgagcacgttgtaccgtcctaagtcattgctgacttaagccgattgctctgttagtagggtatagtggtcaccctaagtcgagtaagcgcgagcatgttgcaccgtcttaagccatcgccgacttaaggcgattgctccgttagtagggtatagtggtcaccctaagtcgagtaagc

SEQ ID NO: 71554 - DNA, 549 bp, Zea Mays
caccaggctacccaagccttcttctaaccccactgtccagtcggtgtagtgcgcaatcagacccttactttagatggtccggtgcgccgagacaggctgcagtgagttcattccttctccatttcttttccatccgacttgaactatttggaggacttttctgtgacttagacacacgtgattagtgtataacccaattgactaagtcaaaaattcttacctctttctcatcctctcatcaatttcttcgttttttctcaatcaaggccctaaacaacactttctctacaaaccaagttagagagtaaaccaaagtaccaaatacatcgtaaaagatatatgcaacatattcgaacactcaaaccttgcatacttaaccttgttcattgttttgctccttttggtctgtttgatgttggggttggactccaaaactctaagtctccatgatttgatcgttatagccatctatgagctccaacaccctaaaatggtcaacaagaacatctccaacacacaggaacaacctaaactacaagtcaacgtgta

SEQ ID NO: 71555 - DNA, 708 bp, Zea Mays
ctctgttgtgggcatggggcattctggctgcgccgcagaagtctctaatgcgcccacttcgagatttgatcttgaggatggtgctctcgaccttcgtcgggttgcaccgaacaccttcgtcgccttgcttcccaacgtggagatagctgatcggatgcttagtgggggtcagtcattctatattcctcctcttcggatgcacatcaagaggtggtcccgttaattcatggtttccagtggagggactctacatcattggctggatattgagctccgcggccttctgtttcatctttggggtttgcatacgactgagcaacttctcgtcggacattgccttgttcatgagctgcaccttgattctattggcagttctgatatgtctacgttcaaactgagtgtttggtgtgataatcctggtgatctgccttcgttattggatctccacatggaggagcctccagttcagatggccgccgtcgccagacagtcggaatgaagaaagtgaccaggattctaggagtcagcagaagcatcgtttcaattcccagtcttcatcagaccgtgcacctgttcacactcacatggggccgcacgtccatttaagctcagcgactggcagaccagttaatgacccagttctcctagctgatgcggttaatgctctggtggcgcgtgcaaactcctcggtttctttcttaatggcag

SEQ ID NO: 71556 - DNA, 442 bp, Zea Mays
gcgaaaggttgtatggaacagcaaagatgggccagcatgagtaggacagtgtagttagattgaaaggcgagaaaccatatgttaccaaaccaaagcagacattccgcacttcatcagcaaagctagaatcaaagacatctagtgccttccatgcatatgtatcagctgggtgtgccatgacatctggattctcacgtaccccttctttgtgccacctcatgtgtctggttgtattcttggagatgaacaaatgtttcaaccgaggtataagaggaatgtaacgaagctgtttacgtgcaatctccgtcgtcacggtcaaaccatcatcgttttcaacctctacgaatctacgctcaccacatattgtacacttcttctcactcgcggtctccttccataaaagcatacagttattgtcacagacatcgatttttcatagtcc

SEQ ID NO: 71557 - DNA, 608 bp, Zea Mays
gcctttgtagtctccagcacagcgtccagcacgctggccattctcctcctcttgggagttatgacagaagttttttgcaccttcggcatttttgcctctgttgaagggctcagaatttttggcattttctttgtttcttccgcctgtggctcttcggccttatcatctttagatatggttggcccgactgtaggcaccttcggcactacagtcagctcttcagcgctctgcatcatcggagcagtttgttttgctttggctgctgaagagggctctaagccaaattcaggcaccatggctagttcaatataacacggccggtgcgtcagaaccttcacctttttgctcttcggctcaactagggtgaccgaagcgacatgttttctctttttctcttgccctcacagcgagtagcggtaatcagggtatacgaagccaatagcatcaaataccctgttcaatcttttcttgccacgtcccccgaaagctgcggacaaggcattgtcttcggccttggagtatgccctaagtagctcatcactggtagcttcgatacacttcaaccagtcatcgtttggctcatcaaacatctccctaaacctgaaggt

SEQ ID NO: 71558 - DNA, 480 bp, Zea Mays
ccaattagtagtggctcatcggattcgccgcgatggtctctctatcaccgcatggacgcattggattttgggttcgggtgcgtgatttgggggttcccggcgagaccgccgccgcgcggtgtgcgcacgccgccgccctgggaaaacagaggtaggtgatggcccctggtccgttggatcgggcgtatacggtcaggattagaagcggacgtaattggctcgggtaccattgatctcgaatctaacggtggtggttagatcaggtttcataaactctgggccatcggattccgatccagcggctggtattgcataccggttcagggataatcgatctaatctggggcgtccagatctaatcctgcggccgaggattgtggataccccttcgccatacacatttcacagaaaagaccctctattactttagaataaacccgccatcctcattcactatttactgagtctagggaatcctct

SEQ ID NO: 71559 - DNA, 764 bp, Zea Mays
gtacaatttctggcactgttaaaaaagagctgacttatatgtcactggtggttgccatctcaaatccttcttcgttctttcgtgctatgtttcttgacctgtctaatggtcattagaacatagaatcagtaggatgagttgcaccaacacacaccaaattcaaaaactaaaacaatgttcatagctgagctaatctctggatttcgccaaatctatgtcaaaacttcagaattctggtagttctggccttgtgggcagcattatctgagagtattagacaggtcaagaaatccaggcataactatctatatgtcaaaacttcagaattctggtagttctggccttttgaaatctatgtccatttggttgcctctgaggagtggcataactaccatggtagccaaaaaggaatgtgtcaacatctgaacctttgcacaggcatttaacaacgcacagttcagttacttccaggggaacatggctacatgagatgttcctccagtgctaagtaattccaaagccaccatgtggattatactgttgagtagatgttcataaccttgatttttgtgcttgtggtagcattttatggtgattggtacttggtacatccttttcagtaattcagtcctacaaacactatcatctatctgaaaaaatggctattcgtgttagacaacttcaggtgcttactaatctgacattttcagtgccagagccaaacagattacaaatatattttgcacatgcattcatagattagt

SEQ ID NO: 71560 - DNA, 736 bp, Zea Mays
gtcataatattcaggcatgttagaaccttctgggtatggactcattccatatatatatatgcttgtatggttatcaaataaaattagcttgatagtatgaatggcaaacaaatatttaatgatgaagcaaaagtagcacacctataaggatgtagaagcatatggatccaagtttataacaccataaaatggttgttcatgtgttggattgggtgctagatgcgagtatgcatatgcgggtggaggtggtgataatacatacccttacatgactgatggtggtgcccatgcatacgaggtcaagttttagtcacatcgaggtggatagttataactagagctaactaagttgtggctaccatcatcaataggaaggcaaaccgaatgatgtcggtcgcttctcgtctcgtgttgcgaatgaggtgctccatgatctggatcttggaagcatgggtgaactgactctctctggtgaatcgccaatcctccataccactctctcctgcatgactaccctagcaccatatgttctagcatcacctccatatccccatggctgccaccaccatcatctccatcgtccccatggctacaatcatcatcgtcaccactatcaccttcactagggccagttgtgctttcatcagtcccaacctcttcttactattcgctttcaccagcgaattttaccttttttcctttgcgttttggagaatcaacttttgttttcctcttt

SEQ ID NO: 71561 - DNA, 1342 bp, Zea Mays
ctcatggttgtatcatgcagttccttagttgtctcttatgctttgaaaatcgattcatggtctcatggttagggcatatactttacaactctgagcctcggaacggttttcaaatataagagacaattaggagtctatatagtacaattctaataagtctctagataataaatacagttaaggcacaatatgtataaagagtcgtgtagaaacaagctcttcacgaagagcccgtctcttgattttttttcacttagcctactcgaatcccctcatttaattgggttgtacatgacctaaggtaatccaggttttaagaaatatcgtacggtgatttaaattctactcagactataacttaatagaggtgtgctattagaacttctagttttattaaaacttgagtataaaattctactatgtgtatgactcctatttacatgtacgagttttagcaaagactgtataaaaagatatataggctataggcagtaaccaagaatttaagccaattcagaatttattctttgtttctccacttctttcttttacctcccaaaccttgtgaaagtatcaaactgaagttagatagtttgagccagatactaccatagtggcttcgtagaatggttctaacaagatacataacttctttgacatctcccaatcattaggcgaaggctcatgtgtggatttgtgggtcatttcgccttaaagcttcatatgctcttctatacttcaaagatgtcttaagaatatgataggtcgaatttcaccgggtgaggacaccgaatgtagggtgtttctcaacatcgagtacaacaactgtgtggtcaacttgaggaggaggtgccaccaatgaagatattattggcggagcaggagaaatgtcgagcacgaccgatggaaaggcagtagtgacacttcacaccagggactttccccttagatgtgataaggttgtccttccctctctggtctgcatagatcaatagacgatattattaagtcaataacagtatcaagtgcctgtgctaattattggaagaggagagagggcgatagtgacgacagcgcgagtgagggagagggcgcggcgaggatgcgagggagggggggactagacgcaacgaggtcgcatgggaggagaggggtcgatgacgacgacaatgcgagtggggggagagggtggcagggacgtggggagggggaggcttttgtcaatggagtcgcaaggtgatgatgagggtgagagatgatccaaataatattgtccattatacttgaatgagtaagtgataggttatccagcgatcttaaccattgactaggtgtatgcccg

SEQ ID NO: 71562 - DNA, 326 bp, Zea Mays
gactgatccccttcttgaaaagctgaccttcgataagtgtgaagtcccggcttcgatgtttgaggcgcttggcttcattgacatcggttggatgatagtacccctgtaggaacaaggttattggtgcccaccaatcttcggtcatgattaggttaactatgcggtggccctcgctgtcattggttatttggagcccttctgggctgcggacagctggcgtgccgatgacatggtagaatacgtcggaggggagggcctcgcctctggcggctgccttggccaatgcgtcggcctcttcgttcttggcatggtccacatgctgcagg

SEQ ID NO: 71563 - DNA, 650 bp, Zea Mays
cttcggtctcgatgccaaatcgaggaatcatctctcgtcactctcctccgtcaatgaagctcgtatgacacagctggaatccaccacagcgtccctcgatgattggtgacctggtgtggagggtacaatgcacgatctccacctacacgtctccaagatgtcaaagatttatgaacacgtcgccacaccatggcgacatgtcgagggttctcatgccttcaccatcgtcggtcgtcgtgcgcccatctgctgctagcatggcctaatgggcattaagaagaatctatactccgaaaagatggttttggagttatcacaactctagatcatctcctggtcaagggtgcatcctctcctccatatcatcgttttagttctactcttccctttcagttttagggattgggtagtcagggtccacaagattggggtaactcttgcaacaccggtcgcttgcccaagatcccatttccttcgttctctggcgatcagcctaaacttggatcacacattgcgaggactattttgagttgtatagtgtggctccttctatgtgggtgcgagtttcttccatgcatttttcagcagccgcctctcgctggtcgcaaatagtggaatcacgtctgaaaaccttttcgtggcctgaattt

SEQ ID NO: 71564 - DNA, 673 bp, Zea Mays
ggcgcaaataacagagagacacatgggttattatgcaaaaattcctgagactcagggtctcttttagaaagtgcacgcagcgaaggggtatcttattatttgggtcgtgcgatctgttttcaacgcaccagattagattctacccttatgtgaactggttcccaatgatgaccgcacgatttaatagctaaggcccagatttcatcaaggcaaaatctaatctaagccgcccaaccccccatacacggttcagatcctacattcaaaggggtatgccaaggatctgatcacatccattaaatgggagatcaacggtgtagatcttacacccgaagcggtacacccttattctaatatggaccgtcagtacacagatcaacgatcccgatgtgcacccccttccctctggtttggcacgacggtgcacagcgtaagctcggcggcgccattgccggtgtggggcgcaatggaccgaagacacccaaaccccaaccttaatagttctaagtagtgtggggatcagggtgaatctgtgggggaggcttaccagttgctgaggcgatgaagagttccaacccatgtgcaccgcggatctgcggcaatggatgaagttgatgagcaatcgcggtgatcccagtggataatcgccaccggagaggccacacatacaacc

SEQ ID NO: 71565 - DNA, 687 bp, Zea Mays
aagtgtctactgaagagttagactttatcatacggcatgcttcgggtaaaaagttgtcgggagaggaaattgccgaagctaagcactatgccagagaattaaagtacccaaaaggatctttggtgtatgtggcactgatgaagatgactttctatacttccttccggacaacaaggagatatctatttaccgggagatggcaagaaatatagggtttctgaagctcgaggttggcctctctgcaatgtccaaggataaccctacagacaacctcgcttataacagtctcaaggtaacgatgttttgacataatcagattattttttgtatcttttaccgttgtgttgatccccctattttgtagggcttaatcctgagcaatgccttaagggcacaaaagaacactgaggacgaaagctgccagatagcccttgggaaccttcgtttggaggttatcagattgaggaatgaagtcatagaaaaggacaaaattatgctttccttagtagacagagtgaggattagcgaagccaatcttgctacaaagtccgaagctcatagagccgaatctgaaaacttaaagaaaaagcttacgaaaaagaacgaagattctgaagttgctaaagcaaaacaagaaataagtgaatggactagcgcaagactgcaaaagaacgtagatgagcttcg

SEQ ID NO: 71566 - DNA, 602 bp, Zea Mays
gagccccaataagtgggccaagggatacaaagagatcatacagtaatgctagtggaccgaggttttctcaatccggtcttgttctctgcccggtgttgttggcatgtgggcaaaggctacgacatagcttgcgacataggtgagcatagggataatacagacagtgtcatcctgtcccctccgcctattctctcatacctcggtaacgcgcgagaaaagtggtggtcataatgaagggaacccaagcgacgcattgagtcaatggtcttgccttggtaacacgtgggtttttgatgcagtgcaggccttgcagggtgtgtgccacctatcactgacgtgagaacagtcgtgcactctgcctcaccttaaatgtaggtgcccctgcttggggcttacgttaggttcttcccgacgacttacgtcacacgccataagacacgtggcagcaccaggtcttcaccccaaaagggatcgactaaccatgagtgtatgtatacatggcctagctagactcgtaggccactttcatcttctaccttcaacaatcgcctgtaatcctcaaactcagagcaatacaaccactagaaactcacaggacgtag

SEQ ID NO: 71567 - DNA, 445 bp, Zea Mays
gttgatggaggacgccggcatggaaatggcatctgtttccttctcttttctctgcctcgattttcttgtttcccgctaaattagctcggtgtagctgccagtttaacctcctttgcagacgtgtgtaaaaagcgtactgtaatgtaacagcagaccagggacaggtcaaaaactcgaggtcagcgtgcgtgctcaactagtgccgacgaaggtgatgcgatcccatgctgtccagtccagtccttagctcgcatcccgggagtcgttggtgatcatcgcacgaccaaccccgcgttgtacattccttcctgggaaaaggtgacgacggacggagtgctgatgctctgcctctgcgcgcagatggagctcacggcattggcttcgcagcgctagaagcctgcccactgcccagcacgaatgagagagagaatgtgtgtgctctgag

SEQ ID NO: 71568 - DNA, 2458 bp, Zea Mays
ctgtgaagatgagcaatcacccactattacagcagcgagctcaccattggctggtaagttgtactgtgcgtcatgccgtgtgttacagcctaacaatcgcaacgtcaccttttggtcgccttcttcgtctaaacgttctttagcaaagcgaaatgccgcgaccagcttgttatgctcatctagcatgttaagtaataaacgggccacctctggatccggacgatcatggacatcagcctcattctcaaacatgcccaacctattttgtacctcatgttcagtgtcatatatgtaaagttgtgcaaactgtgggcgcaatccattattgggtagtagcgagccaatgccattgattttgaaaacataaggtgcagtaccgttatttatcgatcgatcaacgacagcacctagtgaggtaaacgcgaaaagggaattgtacgagcggatttgcctaaggaaccgtcgtgcacgactatcaccatcgaatcgcagtaggtaacataagggtgctggtggacatttgtaaggctctaaaacaatcttacctcctctacaacaaagattgtacacaagcctgcgctgcgaaacagcagacaaacttttgacccgttcctgaaaccagaaaacggcgccacaatgtgggcactcgtctgatgggccaccatagtatgagcgatctttgtaggtctctacaggcaaagatgtgtaaatgttgcatgggttactttagaaatatgtagagaaaataatccaggtggtacacaagcacctttaagcagctcgacgtatgatctttcaagagacggtgaggctgcatccgtgctaactataagcagaaagtcgagcataaattcataggattttttacgcgcaccacacatgaaacctaaagattattttgaaaagacatacggtagggaaaaatcgttgttggcacatgctcgttcagcagacgcaagcgtacgacgcattctctgtctgcgatggtgtctgttagcggtggcaaccgttgtaggaaagtcgagtaaggacttgttgcctacaaacggcatgtacacgcatcttagtatgcgtatagagctgtagtagatacaagcagcatgaaaagcctgacagtcactaacctggccacttttgacgaaccagctgagagtgcaacgaaatcgcataacgcgacgcatgtgccggcgtcgaagcggatggctgatcaagtgtgttcatgtgttcgatagtagctgttgaaagacataatgaatgtgtggttgtttatgcgaaagggaaagagacatattgccttaaataaaggctatattgaacccaaagagcgcataatattagtgcagactccgcgaaattgccaaacgttgggcactagggcttcgacggcaacacgccatgtgctcacatgtacccccatccattagcgacaacgcacacaacaacagggacgccaaactaacagggtcgtttggaagggaagatgccacaggcatgtctctgcgaggaagtaggcagttggcgggaagaggaggaggtcccgtgaaacgctaggaaggcagctgatgtgctgcacagtagctcttcgaagacgaaacagatctatggttgtgtaggcgaaagggaaagaggtagactggcataaccaagggccatattgaacctaaagaacgtagctataccagtacatacctcacaaaattgcagaacgctgagcactggggctttgacggcagtaggccatgcttccacgtgtgcccccatccatcattggcagcgcacacaaaaacacggatgcaaaactaacagggtggtatggaagggaaggtaatgcagctatgtatctaagagaaagaaggcagcaagagcgtcaatagaaccgatgagaaagttgcaagcacactgactctgaagtgtctacagaccttgagaacagaagtatgcaccaatgtcttgtaatatgagttcctaggtgtcgcatgttactcaatctgatcctccaaacattttggagtgtagaattcagtttatggtccatcatttgttcacgacattggtgatacagttaagaaagacatctttgaaaagtcatataagttaatttgtactctaatatgttggctgagccatattttatgtgatgaacctaatcttaggcctggggatagcctagataaatctgttttccccaaaaaagtatagttccaagaaattgatgttggtgatacagtggaggaagacatatttgaaaagtcatataagttaatttgtattctaatatgttggctgaaccacattttctgtgatgaacctaatcttaggcctggagatagcctagataaatctgtttctccccaaaaaagtatagttcaaagaaattgatgttggtgatacagttgagaaagagatatttgaaaagtcatataggttaatttgtattctaatatgttggctgagccat

SEQ ID NO: 71569 - DNA, 345 bp, Zea Mays
gtagttgatagcctccaccatggctccgtcgtggagctcgggcgcgcaactgcgctccagtgtggagtgcgctggcctgggttattcactgtcggtttgggaatgaacgggtgcgattgagtctggcacatcacttgggcagtttgatctcgaccgtgggttgtagatccatcggtttcctaggagatctactttctatcatcgatctggggattgacggtcttggttcaagcacgacagtcattctagtgtgttaatcgggaccctaggtttctaatcgggcggaccagagccactcgtaccccttcgttgcgcatgttttgcagaagaacccttatgatttta

SEQ ID NO: 71570 - DNA, 593 bp, Zea Mays
tccaaccactcgatgcaaagaccattgaaagtatcctgaaacttcaatcagtaaggtaatcttacaaattcaaaattattcacatcacctttgaacttcggcattcccgagtcgcttaatgttgggaagaccccattggaaagatactcttgaaccaagtatcgtgtaccaattttctcagcaacaaccctaaaatggacatcggctatttgagacagagatccaatcttcatgtagtagagaggtctcgttaggccaaagtttaatctcattgggctcattactatgtttttaacattctctcttcgcatttagtgtcaactgatgaagaaatatctcaaacttcttcagtacctcagcaatgatttcatatatcaggaaccaaagtcgagcgcgtaagaagcttctgaacaccacaacttcatcatccttcagctccagaatgatttcatcgccagcaaatctaattaaatcatcatcatttttgccaatatacccaagttttttcatcatgtccaaatcttcaccttcataatagatttcccaaactcaatgtgaataggtttactcagccaaaggatattggggtcttc

SEQ ID NO: 71571 - DNA, 302 bp, Zea Mays
ttcattatcaccccgagaaggccaacgtggtagcagacgccctcagtcgaaaaccattcggaataaagggaaccaactttttagaagattggaagaaagaatcagctcaactgaatacatgtctaggaaacagcggcagtctcgaagtcaaaccaatgctggaagacctcatatacaaagctcaacgcctagacccagagacaacaagacttgtggaaaaagcccgcaaggaacaactcccggacctcagggcagatgaacaaggagccctttggttcaaaaatcgtctttgtgtaccaaaa

SEQ ID NO: 71572 - DNA, 1011 bp, Zea Mays
cccccaacttaatttcaagaatggcgacctagtttgctctggccacggtgaccgcgcatcccgggaacaattcaaagtgttcccgatgatctacttcggtttagtacaattggttgggccgatgagttataggaacacacaaggatgctggaacaagatcaaagacaacatgatcggacctgtggagagctgcccacggcgagcttggttttgcggcgttcttcgaccgatttggaggtaatcccaaattagggagctgtgggaaacgatcggagctgagagttggtttactggatgcacaattacctagcggaacatgctgaggctccaatttataggatgctcaagcagtggtgatcaatttgaccgaatcgcgttggcggccggaggggaaaaggggctctggcgattgaaacaggtggctttcaccgtggcaagtactccagtgatcaccggacatgcatagcacggttagccgcaacatggtaaagtgtatggacacgcggcggacggcagtggtggattgacggtggtgaaggttatccgatcgacgatgaggaagagggaaagtacggcggctagccggattggtgtccagcccaacggcggtgatgatcttttgaccccgcgacgttatcgagactaagatgggcacgaatcacctcaccggcacgaatttacgtgtgaggtcgtcggcgacggggtgagcggtggatttgatcttcgtcaggttactgtacaatggcaaaccccattcagttggactaacagcctgatttgcagagcaaaaatctccctttcccatgtaatgacttgacaatctgtctttaaagaagttgtagttctattattcagctttaatcttgttatagtaatcataaccagataatgactggatcatgatcaaatttaagatcaaagatggcttcattacactgtcataccagaattcagtcccagatagcctgacagcccaactttgagtgcatttttctccaatttcttcataac

SEQ ID NO: 71573 - DNA, 725 bp, Zea Mays
tgtgactgagggaccacagagtttgcctagcagcatcgctgaccgaagcagcgtaggtggatagcggcgtcagagacccatgagctgacagagtcctgaaccctccatcatctgcatccatcaccctgacatgaatgcgagtgatgtagtagcaagcccgaggaggctcgtacacttgccttgtctcgtagaggggtcggacgtaggttcccaatgcatgcagaacatcctgcagcaggttagggaagtgccctgtctcgaacattgaagtataatgttcagtgacaggccataaccccatgtagtggtcctgctgttcttcgttggcttcatcgttaaggttttcctcatcatcatcatcatcttcttcttcttcttcgtcttcgtctccatcatcgtcaccagagtcgtccaggtcgtcgcctttgggagcaagggcttggattgatggtgctggcggtgctgaagctgacgatccaactgcgaaggctagtgattctgccaatggggtgggcgtaggccgaaactcctccaagctgtcttccagaatgacttcgttctccacacgaatgcgagggagatccacagggatttcctcgactaccactgggtagacaggaacttgccatggcagagggatgtagttggtgttgatccgagtggtttggatagtacgaaccatctacaagagaaattgtcaacccagttgaattttaaagaggtaa

SEQ ID NO: 71574 - DNA, 304 bp, Zea Mays
cttgaatggatatgaaggtgggcaaggcgaagaacgattttgattaaaaggtcggatcaccaacctggttctcttctcaggcccttgatttgacttttcacctccaaacccctttgattttccatgtcctgcagttttagcttccactgccagtgctgtactgacagccctactgtaggtaaggtccaagcatgttgccattttccgctgaagcctgtcactgagtcccctcataaaacaattctttttcttcagatctgtattcacttggtcaatggcatactgggagagatggttgaatttg

SEQ ID NO: 71575 - DNA, 716 bp, Zea Mays
ctaatctgagccctcaatccagagatcgacggtgcccctgattctcccttccccgcaagggtagtgtacggaggtgcaggacgcccttggtggcgctatcaccgacgcagggccatccagccaagctgacgagccgtcacaaatcaaagcaatgctacacattgtgcagccaactgcaaacgcgcgagtgggtttcttaccaatggtgaagatgacggcgaggctggccacgcagatggcggtacggagacggagaacccgctccgacgagcaattcccgggactatagcgactctcctctcgattaaccccttctacagcttcgctagggcctggactacccccgaatagcttcgttggcgaccgattatcgttgtcagcatgtttttgtagcggcgacccttcctaccccgtgcacccacactctggttcgtctcccctggcgaccagggtggtttgggatgggttctgatgaatcagatcagtgagccacgacttttatggggggagggaagatccgagttggtcagggtggcaactgtggtgtgaggataccgcagcggcgacctcggccaggttgttgaggtgcctgagcactggccccaccaggcagtgactaagcaggggagcacgaagtcgggcgaggctgatggggtgaccccacacggcggtgacataggacaagcctggcacgaatgaagaggccgacaggtggg

SEQ ID NO: 71576 - DNA, 629 bp, Zea Mays
actgctccggtattagctcaaccggacatcactaagccttttgatgtatattgtgatgcgtcaggcagtggactcggctgtgtattaatgcaagagggccaagtaattgcgtatgcttcacggcagttgcgccgatatgaagagcattacccaactcatgatctggagctagctgctgtggttcatgccctgaaaatttggcgtcactatctgctgggaaatatctgtcacatatatacagatcataaaagtttgaagtacatcttcacccagtcagaattaaatatgaggcaaagacgatggcttgagcttattaaggactatgaactggagatccattatcacccaggaaaggccaatgtggcggcagatgcactaagccgtaaggcttcctgccactgtcttatggtgaagacctctgacaacactttgtgtcaagagatggaaaagttaagcctggggataatccaacaagggactctaaatcagctaaagcttgagtcaatcattttgcaaaggataattgatgcccaaaaggattatgagggcatgagacatattcgtgagaagataagggctggagtagccaaatgtttcaaggaagacgatcaaggtgtgatatggtttaa

SEQ ID NO: 71577 - DNA, 780 bp, Zea Mays
gctccagagtgaggtgaatacactaggaaccagctgcagctaactgaataagagactgaacacacatgtctgacagatagaatttcggcacgttttactccaacttttgtgcagcaccacgtcacactggcttaaagaaacttgttcactattagatgatcttcaactttgatatagaaaatacagtctaaaaccacatacattaatcacaacagagctctaaactgagcactattcactaaaattcagatttttgttctgaacaaaaactcagtccaagtaacctgacagtccatatttaggcaaccttttctcctagttccaagtagatttaggggtatgatccttaaccaaacgtatacaccaacacatgatcgtccacctttgtatagctttcttagcctataactgcatgaatcagctgcaaatgggctccaaactcagcaactttcactgaaattcagttttcaataactgaatataattcagtttcagccacaacacagtcccaatttaagcagttcttactccaattcttgtatgggatcatgtccatcaccctttaaggaagttgttcaccaatatatggtatttaattcctctacaagcaccatagtataaaaccttacaaaacagccacaaaagggctccaaacttggcaccatacaacaaatttcagatttcagaactgaaccaaatgcagttaaagcactatctgtcagtccaactttgagcaagctttctctccaacttttgtgtaggatcaaaccaaagtcactt

SEQ ID NO: 71578 - DNA, 739 bp, Zea Mays
tcctgcaacatctccagctcctcaaccttggcctccttgggctggatcttgggatcagcgagctctcgccatcaccttcagtacaatgacacttcagccaccagccaccgttactgattggattccggaccaaccataccacagctcatgctggtaacatctctctctttcgacctcctggcctcgctactccttctatcattgttggaaatggtgccactctccctgtcacctcagtaggcgacacggttttgccaggacctttatatcttaaaaatattctccacactccccacattattcaaaaccttctctttgttcgtcgttttactactgataattgttgctctatggaatttgatccttttggtgtttctgtgaaggatctccgctccaatagcgtgattattaggtccaatagtgttggtccgcactacaccatgcgcctgtgcagttcatccccttcgacaacttgtgccctagctgcaatttcttctcccacatggcaccgtcgcctcggccaccccggcaccgatgttttgtcccaacttgatagttccttagccattcgatgttctcgtagttcccttgagttgtgtcatgcttgtcaattaggtcgtcacactagattacctttttctagctcatctacctgtactaagcaaccctttgatatcattcattgtgatctatggacatcttcaattgcaagtgtgtcgggttataaatactatcttgt

SEQ ID NO: 71579 - DNA, 444 bp, Zea Mays
cgagcccagcacggattgaagcgggctcgggctcagcaaccatttgagcccgttgggctggcccgggcacagcctggtatcggccgggcctttaaaccggcccgttcgaatcccagcgttcaatttaccatcagtctatcaccatccaacttggattgcctaacggcccaacttcggcacacccgtaacccgttccaggccgcatgcgtataagtctgtgtcgtgcgcgtccatctcagtgtctctaaccctaaccctaatgcccactctccctccctctcactcatgcctgtctgtgcggcgacgcgacgcatggcgcacctctcggggtccctggctcctgtgatcttgtccctgctccgaactccagtgctcctgtcgggcggcacaacccgacatggttaatggttcgggcttatccgtaccggacttaaatgggccgga

SEQ ID NO: 71580 - DNA, 441 bp, Zea Mays
aaaataaataatatccatatgtaaattttaaataatagtacagacagtcaccaaatagataaaaaaaagcaccggacaaaggaagagaactcattctgagcaccatcataagaaaacaacacaaattaaagtgtagctggagagcagcaccgagtggaatccaatcctggtttatttcgtgacgaatccgggttatctagtgatcaattgttgtttagcagcagtgtgttaatgttagtaatgatgactgatcaaagggttaatggtgagatgaacaataagcagatacgacaggtgacgaacacgattgcgtacactatattgctgaaccaatgtctggctgtgtatataaaaagaggatggaatttgtactactcacacctaggaacctacactacaccgtccattctgagatcgggtccatggcaagtgtcacgagca

SEQ ID NO: 71581 - DNA, 369 bp, Zea Mays
aaaaaatgtgttgctaaactccttggccctaggtttaactcttgtacaaagctgaaaagtacacacaatttggttgataactgaaaaatcgtgattggcggtattagtaagttctataataaagctgttgatgagattgattcatatcctcactgcttcaaggcagatattggaatggggaaaccacttgcagcaatcggcaagttctaatgctttgtacaggtggaccagtcaacggtggacatcaaagagagatttgggaagtttaaggatgtacttgatcctggatgccgttttgtgccgtggatcattggaaaccgcgtcgaaggtcagctcacgcattggaaaccgttgtgagacgaagacaaa

SEQ ID NO: 71582 - DNA, 983 bp, Zea Mays
cttgtgtgccgccgctagccctaaccaccaaccactctagccccaaccggccacccccccaagcaggaccatgacacttggtatccggagacctgatcggatccataggcaacaccaacaccaccatggtgctgcagcagctgcttcgcgttcatcaataacctcacaagcgcttcactgagataaaggaataccttatcaagatcaacacacgcttgaccaccatagaataaacacacgccaaggatgacaccaagtcatcaacgtgtcatagcaacaacagagttgtcgctgtggtattcgtgtcgatcaaagtttctcaagtttgactggacttgtagaaactattagcaacatatgtatctccaaataagtttattaggaaaacagatacaaagatctatctcataatagtaattatgtactataaatattaatattttgttgtatatatttggtcaaagataaaaatggttgactcgtagagaatgacaaatattttggaacggaggagtatgtgtggatgtgtgctatgtaagctcaaaatattgaccaggtaagtaagcttaattaaccacataagtgaaatttatggttgcctcacaattttgtagcatctttggttctattgtgaaccttgaaaggaatccagcactctcaatttaaccagagtaggatcaagcgatttctcaacctaaagcgttctatcatactggaacaatttctcagtagcccatgtcatgctgaaattattcgggaaaaaggggaaaatcaattcatagaaaattcttaacagtttttcatcagccaataccaatctgagaggtaaaatccaaactatgcagttttcagcatccatcgagcagtccgcagagtagcagatttcagtgcccacttgtaataagcatttaaaggcatgagatcaatctcaccagtttaaatttgtgcaacttctctaagaatcactgtaccaaactcagaag

SEQ ID NO: 71583 - DNA, 681 bp, Zea Mays
ggcttctttaggaaggagtcgtaaggcaagggtaaaaccagtgttctacccagggtaaagccacgtgtactcgtggggcccggggttgcctggatgtctagtatttaccatggcggatggtgcagggatgtgagggtcccaggcgccatcatctaggctatagcaaccactggcctaagtaaactagggctcggcacggctcgtcgcattgcgctctgcaagagatctatgcactcaagcctagctcgatatgtcatgagtgtgtcgtagactgaggggcacgcggaccataaacgcaccatagtacctgggactcataggtcatgagtgctatgtgggccgaggggttcataggtcatgagtgggaagagtaccggcacccacgttgtggctctgtagcagccgtggttaatgtggtcggattatttacggtgggtcagtctagggccaagcgtaggatccactcaagtcgtctccttccgacatacctggccccctgtcatgttccgcgacacccgaccctaggctcggtgctggttggttcgacagggggcgggtttattcagggttgacgcatctgcctcctccagctgaccaatgggccccaacgactagggtcactttccccagcgcactctctgactggcgggccccatagaccgggatcatatcccgaacaat

SEQ ID NO: 71584 - DNA, 436 bp, Zea Mays
agagtatcaaggttgtgtccgagttcccagatgtgtttccaaaggacttaccaggtatgccaccagagcggaaagttgaattttccatagagcttcttcctggaaccgcccccatctttaagagagcttacagaatatctggaccagagttggttgaactcaaaaagcaaattgatgagctgtcagagaaaggttacatccggccaagctcctcgccttgggccgcccctgtcctatttgtggagaagaaagatggcaccagaaggatgtgtatcgattatcgagctctaaatgaggtcaccatcaagaacaagtaccccttgcccagaatagaagacttgttcgaccagttgagaggagccaacatgttctcaaagatagatctgaggtcaggttatcatcagcttaggatccgaccttcagatattccgaagac

SEQ ID NO: 71585 - DNA, 413 bp, Zea Mays
catgcttgtccgaagggctgcgtgctatttaggaaagaatacgcggaggcaaagtactgtcccaagtgtacatcatctaggttcatggaggtagactctggtgatggacagaagaggcagcttgacatccccttgacaatcctacggcaccttccattcataccgaggatccagcgtctgtacatgacagaggaatccacgaaacagatgacatggcacaaaaatggaaaacgatacaatcctgacaagatggtgcacgcattcgatggtgaagcatggaaacactttgatgccattcattgtgagaaagccgaagaggctcgtaatgtacgtgttgcgttggccacatatgggttcaatccctatggaatgagcgctgccccgtacacatgttggcccgtgtttgttatccc

SEQ ID NO: 71586 - DNA, 490 bp, Zea Mays
cctcactcacataaattacataatcatcaggaatcgttggtttcttcttccttttagatcttttgatatttttttgaataggttcattactttccatgaagttgttctagctccttagggcagtgacctagggcaccattactagggactcaaggatactaaattacataattctcatgcgtgttcaaggaagccgacatgttgtcgttgcttgcatgttgttgaaagggagcaacaataaaaaaattgaagttgatgaaccttgtccatcccctcttggttaaggatccacatgctcgacggtgactctaatgcgatggtagcggccatggcattgcattgtactagagggatggggcaactatggttggttggaagtggtgataggagggagagcagccattggcaagtgtgattgaatgtgcaaagtagtggaggaaaataagatggaaccgtgatgcgtccttctctccctctcccataactacta

SEQ ID NO: 71587 - DNA, 433 bp, Zea Mays
gcctggagcaacaagtcagggaacttacaagggaaaaggcgtcccttcaagagagcctcgagatagcggaaggcgaggaaaccaacacccgtgaggcctaccgaactctgaagatggattacgacaaaaagctaaagaagctcacccccgtaagaaaaatctgcaagaagaccagaagccaaggatgccagactgagcagaaggaagaagcccctccagccctacctcctaccaggatagggaactcgtccgacaccgaggaaatatccctagctagccttgatgaccttctcaaggaatttggggacactttagaggagtttggaagtaccctagatagcactcgcgtgtaatgaacttatggtagttgtattctgtaatgaacttgtgtaatgaataaagtaatgtgttgaaaaaaaatttagcatgtgca

SEQ ID NO: 71588 - DNA, 574 bp, Zea Mays
taacagtgagatatgatatgtctagtttaggagtatcatcaatccgatgttctacaataaaatctgctacgacctgatctttcatagatttcaatggttcataggccaagtcatattttataagtgcataagcccatttaccaattctaccactcatgatcgggttttgcaacatgtatttgattacatcgttttgaccagaaacaatacaatgactagacaataaataacacctacatttggtgcattcataaaataggcatagacataacttctcaatgaaagtgtaccttgttctagcgtccaccagcctctgacttaggtaggtcaccatgtgctccttttcttcagtctcttgtgtcagaacagctccaataactttatctttggctgcaatatataatctgaacgacactcctacttgtggcgcttttaatacgagagttgaagacaaatatcttctcataaggtcaaatgcttcttgctgctctgcccctaggtgaattcggcatcatttttaagctgaaggataggagtgaatgcatcgatctttctagctagattagaaataaac

SEQ ID NO: 71589 - DNA, 873 bp, Zea Mays
ttccgatttttcattactattagggctagtttaggactccatttttctattggatttatatttttcccaaggaaaaataaactaatttcccttgaaaaaaaataatttttttgaaaaaatgtgcttcccaaactaacccttggtgagaaaaaatgttgggctaaaaaataaagtctagaatagcatctagaatcaatgaacattcattgaaaataatgtctaaaatagaatctaaaagaggacaaagcctattttttatgttgttatggtaaatgatttgatcagtatggtaattggcctccactctttttttatctgggtccgccactgcacacgcataccatacgaacgaaacgttagacacggtagccgagagctgtcgatactagtccaagagtcagtgatgtctaacattgcgcgccttcgtggagacagcagcgacgtgaacctggattctggcgcggaaacgagaaagatggaatattaggaggtagggatgacaattttttatctgggtccgccactgcacacgcataccatacgaacgaaacgttagacacggtagccgagagctgtcgatactagtccaagagtcagtgatgtctaacattgcgcgccttcgtggagacagcagcgacgtgaacctggattctggcgcggaaacgagaaagatggaatattaggaggtagggatgacaatggggagttcatgtcaggaaatagttctccatacctgttttcgcgacacaaaaaaaatccgtgaggatctccaagagcgcttatgggggatatttctttctcatccccgttctccgcgggaataaatccctgacaagtcgtatttctatccccgttaaattataattaggaaat

SEQ ID NO: 71590 - DNA, 432 bp, Zea Mays
ggagcgggagcagccaaggacgcagataactagagtagtatagtagtaggttgtttccttaggtagtctaaataaggaaaaaatgagttgtataagttgagtatgtataattagaaccagtttggaataatgtaacaaaggttatgtactcgtggcatgtaataatcaagtatgttttcttctttagatgtcgtccagaactcgtgctcaagatggggcgggaacttcccgtggtggggaggaaactccgaacctgccgcctatacctcccacgctggcataggctatcgctgccttaatcaatgccactgctgataacactcgcttcctttgagaaatggttgggaatcagtttcatcagcagggaggcagaggtcaaccttaaggccccagagacaccacatacctagaattttcagaaactcgtccacc

SEQ ID NO: 71591 - DNA, 397 bp, Zea Mays
gtcaaaactttggaggtcggttcaaccaaaacacatagccatgaagtttgtactttatattctgtggtgaaaacaaaagccacaccatcaagacttgtcaaattacaatacaaaacaaaaagaacttatagacgtagcaaaaactagccaacccatagaggtgtaccacatgtcatcatactactcaccctatgtcctctagcatgtctagtattaggagtcgaagcctcaacattcagtctccactgcttcggctaaccaacaatccagtcattggcgagcttctcaaccttatatcctagtgcctccaccatatgatcaagtgcttttaggtaatccatagtatccagtataggaaatgcattagtaggacaaaagagagctctctgaagctcgc

SEQ ID NO: 71592 - DNA, 533 bp, Zea Mays
cattgacgaaggtacttctggtgccgaagctgagctggctgatattgaggaagaagaaaatgctgatgaagaagaagattataacattttgatcccatcaaaacccagccacctggattttgagaaatctactgtgtctgaagccgatgtgcctatgatgatgaaattgggctacttcggagaagctgaaaagaagcttattcgttttgccggggaagagaccattccaacaccgaaggatgacgaagtagtagttttcaaaagctttttcagagcaggattacggtttcccctgaatgagatggtaggagaagtttcgaataattttgaaatttatctccatcagctgactcctaatgctatcgttaggctcaacatcttcatctgggccctttgaagccaagggacggatccaaatgccgaagcattatgccgagtgcatgagttgcattattaaacgaaggctagagtagacgggctgcatgaaaattttggctgctataacttcgcgtatcacaaagaaacaaaggctc

SEQ ID NO: 71593 - DNA, 532 bp, Zea Mays
gcacaattgcggctacgatgcaacgggcagacatggctgcagggaggcgtataggtacgactgcgccaggatggttggtgcgacgagtaggtgcgagcacgtggacatggagtagataggcaagcagtcaggtgcgtcgagtaggccaacatgctccttttggttctttgctcctattgtcgaaaagagctagcttttggtatctatcttcttgcatttgcttgctcgcatgatgtccaagagctagcttttggttctttgctcttgttgtcttgattcttggataatttgggtttgttcttgtcttgcctgaatttggatattgttgtgcttgttttggtgaagggaggagatagagaagatcgacaactagtcaaacctagaaacaagggccaccaaaagggaaaaggttcccttattcttagcctaggaacaaatctggaggcacattcaattcatcaatttaacataattctattaggtttcaggaagtctttctatgaaaacaatccaaacaattgatgaattggcc

SEQ ID NO: 71594 - DNA, 388 bp, Zea Mays
gtgtgctgcaatatatttatgtattgacgatccaacatatgcacatgtggctttacttgtagtaggatggtatcttgctctggcataggctcaataagtaattgcgctcgggcgattggggaggattcggcgacaccaatatatgcgggagagagacggacggattcgggatacgaatgttttggggagaggatgaagatactgttggatggctcaataaggtgtttttcaccaataaatgttttagtgttattttaaggtttctcttggagttgcttttaggagggttaaattaagtaatatattttctctcttaaattaagataaaattaaaaagagttggactaagttgaagcaaatattccctattatctaatatcagaccagt

SEQ ID NO: 71595 - DNA, 332 bp, Zea Mays
gccagcgcaacacgtacattacgagcctcttcggctttctcacggtgaatggcatcaaagtgtttccatgcttcaccatcggatgtgtgcaccatcttgtcaggattgtatcgttttccatttttgtgtcatgtcatctgtttcacagattcctctgtcatgtacagacgctggatcctcggtatgaacggaaggtgtcgtaggattgtcaaggggatgtcgagctgcctctgctgtccatcaccagagtctacctccatgaacctagacgatttacacttgggacaatattttgtctccgcgtattctttcctaaatagcacgcagccctt

SEQ ID NO: 71596 - DNA, 648 bp, Zea Mays
ggatcacttgcccaagtggcatcagaatacgcatgtagccgaagtgggctatcagaagcatagagtaaacatctggatcgtgtcccacgtaaataccgaagcacacgaagcaaatgaccataatgaactgaagttggtgtggatacaaattggctcaacatatgaacaacatgagcaatatcaggtctggtgatggtgagataaacaagactacccacaatatgacgatatcgagtggggtctgctagtggtgtcccatccttcggatgaagttttaaatgaatatccattggtgttgcagctgtgcgagtatcagtaattccagagcgatcaagaagatcttgtatatacttggactgagacaggtaaaaaccttttggagtctattgaacttcaatgcccaagaaatagctaagtggtcccaaatcagacatctgaaattccttactaagatgctgcttgacatgagaaatatgttctgagttatcacctgtaatcagcatatcgtccacatataacagaagtaaagtgcgaccttttggagaaacatgaacaaacaatgcaggatcatgttcactcgaagaaaaaccagcagctgtgatgacagagatgaatctctcaaaccaagcacgaggagcttgtttcagc

SEQ ID NO: 71597 - DNA, 423 bp, Zea Mays
ttgctgacttgtaccgtaggagcggcggacactccaggtccaggtcgcgcgttcatgaaccgatgatgcgaaccaactgcgccgggcggtccggatgggtttgaggctttgagcctagagatgggggacgccgcttttcagtgagagcgacagctcgtgcacaggtttgtccgcttcgctactggcgcgttgctgcagcatgtgcatgtgacactggataggggggaaaagaaggaaaagttggcgaatcgtgatagctagcctgccgaccagccggccatcacgtgacaggcacaggttttaccgaaagcgaaaatgtactgtgcgtggcatcgaaacaggtgcaacgatgtgcggcggcggtgatccactcacgggagatcagagatgtgaaccaggggcgcacggtagacgatgtcaaac

SEQ ID NO: 71598 - DNA, 1009 bp, Zea Mays
ctgtagctggattataatctgcatcatctgcacgacgacgctttgacttaaaacgacctgcaagcatcttcttaagaccactcagaccactgcaatatatatgagaaatatccactggttaatagttgatgatgtcacaacatagagaataggaagtgtaagtttctgtcagggactggactgtccgcgctagggggtcggactgtccgcgccatcctggcggacggtccgcgaccgtcaaggggcgatttctagaaccctagccgccccatccgtccaatcatcgattcgacagaaaataaccattcaaatctattcaaatttttgcaccatattcacaatgagtaacacgagcaattccaccaatcaaaattgtaattccactgcccaattctagatcagagagaaaatcctatgaatccccaaatttgaataaatcaaacaaattccatgagattttgaaataccgagatgaagacatggttgatgaactccaaacaatctcccggacagtccgtgcgcaacttcggttcaccgtccgctcataaacgacaagaatcacttttggcgtgtggagtgtgagagagaagtgttgaaagtgacaatctgactgcctttgcccgatttatctgcctatcgcggacggtctgcgtggggtctgcggacggtccgcgccctgtcacttcagacagtctgctctgctgactcggactgtccagaacctgatacgtcggacggtccgcggtcattacccggacagtccgcgacctgatactcaaacatccaaactttgtccactttttgattttgaaattcaaatttggttcatggctcaaatatggacattttgaccaatccaagggttagtatgcatgcatatacacattatgtacttaagtaacacaaattttcatataaaactatttagattaaacaagaataaaaaaatcatcaaaaatatccaataaatagcttagagagcacatttggaatctaaatgcaatactac

SEQ ID NO: 71599 - DNA, 679 bp, Zea Mays
cgaaagtgcgaaaggtcgtcgggggagcagaagggcaccatgactccggcaattgctcgtcggaagtacagcgccgccacggatcgccttctgtcatggccggacaccaccaccagataatagccggtaacctactccccatctagttcgcgaggttattctcttcatttagcactagtaaaattagggattggtgctcggaatgaccgggcagggtgtgctcgccggcgtgatttcgaccgccggggcggcgccgacgtcggacaccgtctggcgagagagataacactggagccgtccaattcctttcggatggctcagattagatactgtgtaccagttgggttagggcaatctgaggcgtacatttccgatcgaatggccctaataggatctgaggttgtttaaaatcttcgtcgtagatctatgaaccaacggcctgcgtcgcgtacctgttcaatcaaggcaagtctaatcggggccctcgattatggatcgagtggctgaaataagtcgataccccttcgttgtgttgcttttgctaaacagtccctgagattccagaaaaccaacccgccgtccgcattcattattcacttagtctagtataacttaccatctagcccctgtactttacagaaattggcgtgcagtccagagaatagaaaaacagagaatt

SEQ ID NO: 71600 - DNA, 473 bp, Zea Mays
tgctttgagaacctttttcagattacgaccgaagaagtagccctccaagactcagcgaaggttgccgcaattccacaaatacatagcatgcaacctcttggtcatcgtcgccgtcataaacacagacatctcaattccccgctccatcaatttagaaatgagcaagcaagtagccgatcgctcacccccatacgcaccaatctgactcccaagctccgtttgcatcagtaccgccagcactccacctgcagctaccaatcgagaccttctcggcctaagcagatcgattgatctttagagtagagagttggtggtacaggtaccttaactaccttggaacgatggggcgcgatgtagagaagatagcgcctccctatgtggaacgacacccgcaacacgccgctcaactacagcctccttgtcaccggtgccacggcgagggggcccgtggccgcagccaccgaccagcatgt

SEQ ID NO: 71601 - DNA, 601 bp, Zea Mays
ttaactgtgcgagcttcggattgctcccgaaggtcacgttgttgttgatgccgaagatgcccttctggctgctgatcatgacctggggtaggcgccagtggtggtggtggtaactgagcctaggaagcttgagagtggcttgctaaagcagcagaagccatggtctgttaattgcctacgtactctgggatatacggagagtagcacgaagcagtatgcaagacctgcttcgactgattctgctgtgctttggcttcagcaatttatttctgcttttggatcgtgacttggcacgtcctcgttgtgtgtcccttgtccttgccacagaacaggcagaacaatttcctgggctgattaccgtaccttcctccgcaaaagcttctcccccctctgcctctcggggctggtggtctgtaagaagtttgctgcatgcccgaagactgtgagctatgctgactgctttgagcattattggccatgtcatcgttggcattgggattgtggattgtcctaacatgcctgggatggagtcttcctctgaagccctgtcggagagtagatctccggccgggtggcgaagtgcacctgccctaagtcctga

SEQ ID NO: 71602 - DNA, 277 bp, Zea Mays
ttggcattgagtacatctgagctgcattgtgagtttgtgacagctttgggtggaggagctgttgtgccgtggttttgactagaggtgggctgaagcacagaggcttcctgtgcatgcgggttggggtgcggcagtgtgcaccagagatgcatacatgctacagatcgaaatatgtcaaacactgcaatggggaagaccattattgggtagaaagtgtcacagaatattatgtttctaatcggcatgatcttttgatgtccccttgttttatcactta

SEQ ID NO: 71603 - DNA, 432 bp, Zea Mays
gcggctaggtacaggtggatcagaatggtatagttgggaataggagtggaggagctgcagggctaagactgccactgattgagccagtctgagattgaattgtcgtatttccccttgctctatgaataaccagaagtagtcctttgtgaattcatttttgcattgttgaattgttgggttttggttttcaaatatccatgcatttcgacatttctagatactccatgtcatgaggatgattatttccatgaagaaaggaacgttaagttgttgcttgaggttagcagacgattcttctggttgagcaattctacgggggttcatgccaatgaaattccaacatgcttttgcaaagttacacctaagaaaaaggtagtagagagtttcctcctttgccaaatgtagtttcacatgtgtatgactctagttcta

SEQ ID NO: 71604 - DNA, 783 bp, Zea Mays
gataatgacttctgccaaagaagggaagaagcccaaaggtatgtagagatgattatgggcttcgagggaaggtttcacccaaggcatgtcagaagcatccacaacccaagccagaatgaagacaaaacaaaccagacccaagggcgacaaaatcaaccacaagactctgggactcaacaacagtcctctcagaataatttccacccaccagctctaagaggaggaaggggaggtggaagattcaaaggaagatacaactcataaccaagaaagctattatgtttcttctgtggagaaaacaagggccataccacaaggacttgttaagtaagaatataaaagcagaaggaaaccatcgaagcataacaaaatcaaccaaaacaggttctccacacatcctcgtactactcccactatatcccagaacatgtccatcgtcatcaatcaaacccacaacctttagggtctatcgctacaacaagtccatcaccaacttgttggataataccacaacattttgtaccagcaccttcgccatatgagcaatagcttgcaggtccatcacaaatccagccacgattctttgcacagaatgtgccacaacgcgatagaagggaacaatttgaggctagaacaattaacaatgccatccctgagttgaagcatatctactaaacgcctgaggggctgaagcaagaagtcgaagccacaaaaggaaattcaaaaatctattgtaattttaattcatgctttcccttacttaatttttgtcgcaagaaacac

SEQ ID NO: 71605 - DNA, 725 bp, Zea Mays
gctcgattctttatgagacttgagaagacatcagagaaatatcttgtcagctagctgcaaaagtgagtcatgtcttttttagtcatttctctgaagcacctacaggatgcagctatcctggagaaactgattgacacaaaaaatagagaactaaaggtcacagcaaacaataaccaatgagccacaaaagtccgaatcaaattaaggccctgggatggagacataacagagcacaagctggtccaccagaccaccactgcgtactgcagcaccggttctactaccaccaaccaaacagacctgattttgaagaaagcagtgagcaagtgacagagaatgcatatacaagtccccttcaactgtaccttccggcacagaccaaatgacaggatccagagggtctaccgtcacatggcacagcagatcctccggaaagcttcccgtctgttaacaaactgtacctccgacagcagtccgcccatccggtgcacagctgtgatcgggctgtggaacggcgtattttaacaaagacagacagcccccaaagctaccgataccgccacagagaacaaatcacagggacacgccaaccgagccttctccccactctaaaaatatgatgagcagagcatgcttggagttggaatgcacacccctgtggatccagcttatggacttaccctcgaagaccccaactctacatagttatactaccattgcagttg

SEQ ID NO: 71606 - DNA, 271 bp, Zea Mays
ccaatgccgaagggttctttcgggtgcacgagcttcattatcagacgaaggcaagagctgatggtctgcacaagaactttgggtgctataactttgcataccgaaaggatgccaaggcccccgtgataggctaccgcaccaaatggccgaccgggtggacaaacgagtggttttacgtgaaggccgatgagaagaagagggagaaactcatgagatgagtcctttgagactgaacttcggcatgacccgacccttgtgcaatatgcagcta

SEQ ID NO: 71607 - DNA, 640 bp, Zea Mays
tccgagtcatctctatgacgatgaccttgatgatgctttctatcttcgtgatcagcacgccgccgacgatcacgacgccgcccatacaacccatcatctccaaaaagattttcattatcatcaaatcctccagattctgcctgtgattttcctcatgatgacgatgtggtcctcgaccacccgctgcgggaagacgttcatttaacatcctttccatggcccccacgagtgagtcgaccatttgatgcaattcagcccgagagacaggggctctctgtctccatggtttccactgtgaacacttgaattggatcctaccatgttagagggaaacaagagaaagtagaatatgaaagtatttatggaacactcgatctcacctcttacttacccgagctctttcctgatctctaggactgtgatggtgccggtgtgacaacttcgacagaggtggtagagcggtcgaaaggatcacaagtcgaatgtcccggttcaggtttttagtggagctataggaggctgatcaaggtgggctatggtactgttaaccaagtgtgttgacgtgctaagagatatgaaattattgctgggaagattctcaccaaatcaatgtaaactgaaattttcagcaacacactgc

SEQ ID NO: 71608 - DNA, 590 bp, Zea Mays
gcatggccgacatagtgccgtcctctgggtgtgtactttcttccccttaaatatttccttcccctctccttggagcccgctcgcattatttagtccttatatatatactgattctcgaatctgtcgtcctcattgtttcgctcttttgttttgcaaaccttcgtcctcatgggagcgtttggtgtgttcctgctgcctgccgtgccctagccattgtcgccgcctccgtaggcctaggtttgctctgctatatctttttggttcatgtccatgtgtcgctgctggaatcggttccagatccgtgcattcatgagggcatgttgtctatgcgtgcttggccttggttaacttacagatctgtgcatttgatagggacgtgttatctatgcatgttggatatttggttggtgcattttggttccaggcttgggtgtcgtgtgcgcatagatagcttttgtagtttgctattgtttttttcctggtcaatcgaatgacacatatcggttctgctattgttcacaagaggttttctgtggtgtagtcttgctgatgtttggattaaggacagtagttgttccaaaaaaatgttt

SEQ ID NO: 71609 - DNA, 359 bp, Zea Mays
ggatcatgcatgtctgagacagacctgctagacaacatacatgatgtcgaatatggtaaaggtgagatactgaagagcgtcgacaagactgtggtaggtagtggggtcgttgataggggcaccaccagcggagagcttggcctgcatgtccaccggagtcacacaagacttggaatccaacatgccaacacgctcgaggatccatggtgtactgtcgcttctagagaaagaggccatctggataacgctcaatagcaatccctagaaaatggtgaaaaggaaccaaatccttcatgtcaaactcatgctgaagagcgatgatgatccggtgcaggaggctcgaagaacagacagtgagc

SEQ ID NO: 71610 - DNA, 360 bp, Zea Mays
ttccactcgaggacttgttcggttaattttcaatccatacagatacagatatgaggggattaatatgaattaagatagattttaatttactagagattgaacatctttaatctatcttaatttatatgaattaaggtagaatcgaacaagcttgacgaccgggcatcaaaatctggtcagtttgggagccatgagcaaccctttggatcctgtgtggtctgttgtttgtgctgggattagggagaagaatgacatgcatggttgtactactagggagggaagacagcacggagtaattagcgtttgtcccaactcttgtctgcttgcgtttgggaaacgaattcaccgccccccttcgca

SEQ ID NO: 71611 - DNA, 403 bp, Zea Mays
tgatattgttccataattacccattgtatagtgtaatcttggaatgtagctggtcattaggggtatgaatgtatttcagctccagtccccttgttattctataaataccgctcatccaaccccccgatgagacacgcttgacaagacatcttgataggtaccgagttatattagctactagggtggcccgatcttcaaggcagtaggttgataaataggatggttggctataaaggtaacgaaataataaggtaaatttgctgaagaaaagtgggtaactgactttatacctaatcaaggtcggagagaccaagcgacggggagagagaaacctaaactgtgtagactttgactcaatctccgaacgggcgcaaaaccacaactggacctaatccacacaatg

SEQ ID NO: 71612 - DNA, 568 bp, Zea Mays
ctggaactgtattgaaattagtgattgactaagactggaatagaatgacagaaattgtaacggtaacagaataactaaaattataacagataacttaaactataacgaaatgatcgaaactataataaaatagctaaacgagtgaatgaatgagactgtaatgaaacgactaaaactttaacgaaatgactgaaactgtaatagaacaactgagtgaatgaatgagaccgagaatgactgaaactataacgataactgaaactgctaatggaatgattggaaccgtcgctccaacagaattgatgcacacagacccaataaaaacgaattaatcagatccgttttgcgctttggttccaccggtccggtcgactactggctggttaattagtttgattgaagtgtaggtcgtccaagtaatgcgctgattgatttatcatcttagattaagaatagagtgtgtctatatagagaggaacacacacattgttcgtcatcctagatgatgatcatccatcctaaaataatttatgtattaattatatatgattattttgcaagatatcaa

SEQ ID NO: 71613 - DNA, 815 bp, Zea Mays
gtaggactggcctctacgactatgcgagaaaagaaaccacaactgtaacaccccaggtgttacccaaggccctggccaaaggaacacatttatgtcctatttatcctatatgctaaattggaaagtgaaggcactaaaagctttagaatcatggctaagctaagtatttatcataataagagagataccctagccttcatacattctccctcatgaaaaagcttctaaaaccctaatttccctcttaagccattaaaccctaaacatgggataaaaggggaaaagattatacaaatagccaaatcatgaaatgaaacctttatcaaagatgaagtatattagtaaatctacaagatttagtaaggaaaatgttgcaaaaaggccccacaaaaaccccaaatcaattcactaagtggagaacacactagagccatcaagaatttccctatgtcccaaatcaaccctagactaaagatcagatgtgttcacccttgtgctggcaccaaaaccacttggtccaaataacaaaaagtggccaaactacccaaggcacacccctgaaaaatttgaacccaaaccagggtcgtttgacacggttggcatcctttttgtcgctggtgaacagtgcagacatacaagacttggcgccaccatatcttctaagctagggcagatcttcccttggaactcacatgaactagctagccctaggtgccaggaagaaatcttgcacaagacttttggcaagattcgcacgtttgtgagctctgcaggcgcaagaacttgggcagatgaacacgaccacgtgttcgacg

SEQ ID NO: 71614 - DNA, 578 bp, Zea Mays
ttagacactgtttaaaaatagtaggaaccccagcattggaaaatatgatgtagttattcatttaaaactattctgcccaaaacttaggaaaaaccagaaaggcattagaaattggtgaacagtgagtaaaattatttttcctagtttgcttatgtagcagagaacctaggaaaaatacagagactattagttcagaccagttttaaattaaaatgttttatttagcctcatttggactgaaaatcaattattagagtagcaaaattataaccaaaatgagtaataaaaatccagtggacttacaaccaccagagccccactacaaaaataaagaacacctcagcccaactttttaagtaaggaagataaatataaagtgataataaggcattttccaaataaatcttgaacaacccctaatgatgtgataatgggcaaccaaatattagctaaatccatagtaaggtaaaccaccagagaaaaatgcaaacccatgaaaaagaagcaaacccatacctattgctagtattttatgagaagggccatttaattcaaataatgcataccaccccttccct

SEQ ID NO: 71615 - DNA, 1377 bp, Zea Mays
ctcagaagaaaactagtcttgctgcatttgcctcttaaaagtgttaggaaaacaccaaacatcccctatcccatagggggtagcaatcaccacaagaaagaaaacatggttcgctagagatgtgggaaccaaagcctctgtcatggagtctttggccatatgccacatgaccaacaccccactaggcatgaccaccacgtggtctcactgcctaaggcttataaatttgaggaaaagcacctctaggcttgacagtgtgtgtctgagtaggaggatcacgcacaccatgagaggggtgttgtatgtcccttttgctcacctcagaaccccactactcttctctcttcctcctaaagaaaaaaagtagccaagtgactatccctctcacaatattcacaatggtacctcatctctcccttatgtggagtctttttgtgggtgtgggtcatcttgggtggctatggtgctttaagaaggggatcacttgagatgttgggcaaggtatcaagtgtattcctcagatggttcggtttgggaaaccacactttcttctaaggtggggctctcacaccctctacaagcacaccatttcccacaactggggtgtcagatttggatggagtgattttgacaagatttgtggaggttggatgtttctatgatgaagtcaagccactgcactcagacaccttaccaaagcgagcatcactcccatccatagcagcaaagcctaaccctggtccaccagttcccctcttgaactgactaagcatcatgcccaactgggcctcactgctagacacctatctcaatactgatcaaaagtatgtgttttcctcctcgttcatagtcttgtcgtgtctacatgactcaagcatggattacaatccctcacatagtgcaaactaactaggtacaggtgcactcactgagctagccttctcaagcaaggctatcctagcattcttctctgctagcttagtctgcaagccaagacaagtctgacatgcacccaacaggctagacctagattgaagctcatcgcgctcatctagagcacattcatcacatttagtctcgtaagacaacaccataggatctctagtagactcaagctccctaagtgtgctctcatacttgcttttgtactatatcctctcacgagcagcaagcctaatcaacttttccagactagccaaagcagtcatcagtttagctacctcaatggtgagatcatcagcagaaagagatacctcgaaagtggagtcatcactgatgtccttgttgtcgccgctcaccacgtcctcactaagcgccatggcgtagaggccttcaacggcgttagcgaagaagcagagtccatttagcttgtcctca

SEQ ID NO: 71616 - DNA, 443 bp, Zea Mays
gtggaatatggttaggcagctcattgaagaactgactttcattaggatggccacccatcttgtaaacaacatacatcagcgaaccgagtggatgcgtctctagggcggtgactgaatatggcattggcggcctagtctggaatggaatttcccctttgtgacttcctagagttgggcctattggagagtattgatgtttcatgctctcttgaacgacgtagatggccacacgttcaaacacattcattagggtctcagaatgtcgatgcagcgaatgagtcaccatatagttgatttcctagcatagagccctggtgcgctcttccgagggcaccgagaggtccatgtcgtcgagggcgcttttaggcgagaactccttccaccggatgccacagttactagtcctctcaaaagggtcaatgagtgttggggcgaaggcgaag

SEQ ID NO: 71617 - DNA, 640 bp, Zea Mays
accggattgtgatttgaagctggaccgttgttccagaggcccatgaggaaaataggccagttaatccggctcgaatagttccttccttcgtgccagaaagaaatgcagggcgatggcaccgtgtccgagtgcaatagtctagcgtttaaacaagttgatcgaccgggggagtgatcagagatcctcctggtccgtccatcatgtgctgccagctacgaccgtggctgtcacctcacctggatcagcagcagctcatgtggctgccactggatcgaattctagaactgcctgctctcgctcgcatcgcacgcacgcacgctcacctcccggccccgtcaccatcatgtgctttcctccttctaatcacacatgcacatgcggcatgcatgcgcacagtagctttatttgtgccaatgcaagcaggtagagacgtagagtgcatgcatggccgccaaacctccatgagagaaacgaactaaacgatggggggcagcaggaggactggaggagaaagataaacagacagacacaccgaccgaccgaccgaccgacagacagggtaggtaagcttaagctaagcaggacgaccgacgacccacagtcgtcgcacaccagcagctagcaggcactaactaaccag

SEQ ID NO: 71618 - DNA, 421 bp, Zea Mays
gccgtgagagagcatcgccagtgggtacccggggtggagttgaggtgctccgcctagtcacctggaacgctttcatggcagaatcaaggtgggggagcgatctgggcgcccccaattcgtcgccgtcgctgcaaatctgcggcacttcgtggacaggatctccacgacttcgatcagcggtgagcctcccgtagtaattccccgtcattaccgtcgtcagttgctactattggatcggagtttagatgcggggatcgggggtttgggggctccagccatggcaccgctgtctcgggttggttggagtgcaggaagtgaggggtaatcgtgggggccgttgatctggcggccaacgactgagattagacggtgcgtaccgattggggagggctgtcctagagcgttagatcgtgatccggtg

SEQ ID NO: 71619 - DNA, 1116 bp, Zea Mays
caccaagctccgtaccatacaacgtacacttcgatgttgcgaaccagccaaaaaggagggagcgagtcagatgacggtgagagttgtcgatgattgatcggctttcgcttgcgagctagcagccagcgaaggtagagctcgctatcagccaccagggtagcctcacatccctcgaacatcccccgaccttgaggcctgggtggcggtggcggggccaagagatccatgtcgtcggccacgacaattgagatcgatgtgtcgccttcgatcgacacggcgagatggagaagcatgtgcaaaggtttgccaccttctagggatggtgagactgaagaggccaaggagagagcaactactatcgccatataggggacctcttcatctagggggtgagtgagtcctccccttcgatagaggcgatcaaagggggcaacgatgcactgtttagtggtgaattgttgcccctaaatcatgaacaatggttgaggccaggtgtaacctttgaacacggtctaataacgagggtgatcggttgagccggttgaccgagacgggagcatgtgctggtgccaatgggggcgatactgtcccctacataatgtggtaagatgagagtgggtcgggagcggggcaagagagggttgtcgggcgatggctctagcgcgctgagagtcatctagagggaggtgaatagatgatgcctataaaacacaactttaaacacaaacttggtccaaattaaaagttagtgcaaaatgaaaccaagtcggagtgagaagagagaagttctattcactaaactgctctttcaagatatgtaataaactaagagcaatatagcaagtgaaagatagaacttaaatagaggaagaacaatcacaataagaagtcacacaagagagacaacgatttttctgtggttcggtcaaacctgaaatgcgtgtctactccaagttgtggtgtctcaatggacaagggttgctctcaacccctctcaatcgatcttatgatcaacttgagtgacacaatcttccttatatcaattataatcccctctcaaggaatctccacaatttggagtctcttgcagccatacacaaaaatctgagttacaac

SEQ ID NO: 71620 - DNA, 291 bp, Zea Mays
attgaacatgctaccgaaccttcagcctccccttccacctcttagagcatgtggatgaaacgtgttatgcgaaggttgctgctgggagcttgcatgctgcaggcccgactgaccctgagactaggctatcttttcctcacccttcgtcgggttggaaccttccctcgaagcccctagctactttggtatatctgtgtaactcttcccttctttggcgaaaatcattgccagcccttagtattcgtccattttttgcaacaatttctcacgagagtgtggaggttttcttgc

SEQ ID NO: 71621 - DNA, 491 bp, Zea Mays
agggattgtatgtgtaaacttttgtctgtgtgatactgaacctcggttgctgcgtaggttccgacgtttgggcctgcgcaagcaaccactactgacaatactgattttgcggcggagacttcaattgtagtgcctgccgatgatagtgtgactggttctatgtctgaatgttttgagtccgatggtgagtctgggagtttgtttccttggacggaggagtccttggatgaaggcttggattattttgtttcgttggatgtggctgcggcggagacttcgccgcgtgtggagggtgttgaggatattcctggtgcgagtactgggtgtaggcggcgaagggtggtgggaaaacatagtgtgggtgaattttcgcggagcggcagacgccatcgcatggggatggagcgtggccgacttcgagtagacggggttggtaaacgagaattgttgtcctcgccgattggagcgggcataggcgagggggatcttcg

SEQ ID NO: 71622 - DNA, 1484 bp, Zea Mays
cgtgtttggtagagcacggcgtgcgttgcagagcctaaactaaacactaggcgacaaaagaaccgcgtcagtgtcagagacttttgtatagtcttggctatgcgagctgcctctattcaactccaacagggaacaggcttaccaaactcgcttacaacaagtactcatcagaagcaaggggcaacgccctagctagttggctctttagatgtactctctcactcactcatgcaattttactataaaccatgtgtcagtgaaacaaaaatctgaaaataagccagcagctgattgcttaatataatccactgaaagcaacgatgtataggcgtacgtgtagccctgcgagccacgcatgttgccaccagaccacacagattgctgtcatgattccgcaaacattaggagggggggccccgatcgctgctgcctccactccactcgccgctccaaccctacaaagatttcggcctctttgccgtgcgcttccctatgattacacacatgactggacgatctgatctcgcccttttcctctcgggggtcgtgctcgcttcgtgccaaaacgtcgccttgtcctgcgcgtctagtttgactgtttgagtggctcatcagtgctgcacaggcacagcacacagcacagcgccacgccgccactcccacggtttcagcaggtatggacaagccgcagtcaggctcaggcaccgcggccagttatcttcgaaaaaactccgaggggacggggtgatccacgcacgcacgaagccatgaaaatgtgttctagttaggacgtagctgatgcgggcccattcatggttactgcacgagagcagagtctcttttgtgattattatgcggtgaagcagtagcagcaccagctagctcgacaatctatagtgcactctctgccaaaacctgatgagctgagctagctgcgggtcggccatgagagaactctcatcagagctcagtgtttatgcatcagtggacctgaccattcattcttatcgctctgatgctcttctgcaaacaaaaaaaaataatgggcgcgcgcagcaagatcgatatgtctgagacgctgacacggccattagcctcaagcaccgcggttgtttatgcttggggagtactagtcagtcatgcacagatcgcactttcgagacgcagaaatcgatcgccgtgctcttttaatataacgcatttccccggccggcctgcaggaagctgatcggcgcgcggttcttcaacaaggggtacctggcgacggtggggcggcggcagcagcagcaggaggtgaacccggcgagcacgcgggacacggacgggcacggcacgcacacgctgtccacggcggcggggcggctcgtcccgggggccaacctcttcggctacggcaacggcacggccaagggcggggccccagcggcgcacgccgccgcgtacaaggtgtgctggcgccccgtgaacggcagcgagtgcttcga

SEQ ID NO: 71623 - DNA, 391 bp, Zea Mays
tgaggttactataacaacattatagccagatcttagggctataactttgctaaagagtggcaatcgagttactacacaaaactggaagttattggttctgcaaatcactctgtcaggctgtctgacgaacactggccatggtacagtgtcccgagatgatcaaaccgccagcgctaaaaagatctcaccgccggtgactcgccgccgcgattcgtgtcgccggcgtgtggattcgtgcactaggattggggataacgcttcggtcgtcaccccgtgcgctggacgccactccggtgactcaccgtcgtacccccccgtgctttgcggctagtgctgataagctcaccggcgacagccgtcgtccgaccttgcgccgcgtgtccaaacctcg

SEQ ID NO: 71624 - DNA, 299 bp, Zea Mays
ttacttctcggttttggtagaagttgcacgagtgcttggacacacagttgaatttcagtttggcctaccatcctcaaactgatggccagaccgagaggaccaaccaagtactggaggatatattaagagcttgtgctcttaaacatggtggcagttgggataagattttaccatatgcggagtctcttacaataatagttaccaggctagtttgaagatgtccccgtttgaggctctatatggcagaaaatgtaggactcctttatattgggatcaaactggtgaaaggcagttctttg

SEQ ID NO: 71625 - DNA, 365 bp, Zea Mays
cccacattaaaacagctcacatcaggtatgtgtgcttagcagttgaagaagcatctcattaagagcagaggctccagccatgcaccacagagcactctcgttagccacaggttgtagaaccaattggacattcggaggagctccttcgaacacacaagcattgcgaatttaagtccatatttcccgagtgaccaagatgattaaagaattcagcccttttctcatatttttatcaaacccctagattggttggcatcaccaattggaaaagcgagactctccagccgaggagcaatagttagtgaacccaatctacacaagatgagagtccttgacctaccaagagaagacacgagatacaaaga

SEQ ID NO: 71626 - DNA, 327 bp, Zea Mays
cctcatcataccttccattttcctttttcaggtcatcgcaactacaaccttccccttcgaggagccttcgtctgcccgggtcttcaccttcttccctcggtcatccccaacatcggtagaacccccctcagggtatggaccataccgcagaccattcaactcaaaaactcagttcaatctgacattcgagcctcgtatctcccaactccttgttagttccgtcttcactgaatatttactgacaattttcactgcctccgcttccacctccctcacgaacgctgccgcattccgccctcgcagctccatggcaaaggcggggctctg

SEQ ID NO: 71627 - DNA, 706 bp, Zea Mays
taaactatgaagaacgaggtatttccatgcagagcttgactgggttgagttcgcaggctccagaccacatatggcagttctctgatccattttcctgcaagcttttcgctcttgttgaataccttttttctgagtgcttctagtatcattctgttggccctttccacctggccattggctcttggatgtgccactgatgcgtatttgatctggatgctcctttgcttgcagaaatcaaagaactcagagctggtgaagttggatcccaggtcagtgatgatgctattcggtatctcgaacctgaaaattatatcctggataaactccactgcttttgctgaggttaaggaggcaattgacttgtactctatccattttgtgaatttgtcatggcaactagtttatgagtatagcctccctgagccttcttaaaaggtccaatcatgtctagccccccgcatgcaaacgaccaggttacatgaatggtttgcagctactacgtgggcaagtgctattgctttgacaagaattggcacgcttcgcacttctggactaactcggcagcgtcactcttcgcagtgggctagaagaaaccggatctaaaagcctttcccaccagagtccttgatgcagcatgcaccccacaccgcccggtatggatttcatctaacaattgtctcccaatggccaagtggatgcatttcat

SEQ ID NO: 71628 - DNA, 574 bp, Zea Mays
cccccatgttcctggtgcccagacatctgctggcacaccccttccgcatgggcacaaccgtccctaggagggacaccaacagcagcggcatcaaccgtagcgcgaggcatagccttcgagcttccaacgacggtgtaatattcaaatgttggggtaaagacgttttcttctgctttcgttttttctttagagaggttgatgtgtggatgacccaatttatgtttgtcgggatcacaccctcgtctgactcctctcttgcttctaccggtaccatcccggcagattagcatgactcctagcaaccaaaaccagacggagacatcgttggggtgtcaagctcagctagcgctagtgcagtgcctaaggccaccagtgctttgccaatggacccattgagcgagaccttagcaaaagcgaaggggagatcatggcggcgacaggcgcatcggtgacaaatgcgacgactttgttcgcacatttaaacaaaggtggttcgagcaccatagacgtgcctagaattcctaggggtattcaacctaggacctagcactaaccgccgacgcacctagctctg

SEQ ID NO: 71629 - DNA, 363 bp, Zea Mays
gatatgggcggctgtgaatagaagcgttataccctttcatccagatcgtccgcggaccgtttatctccgatcccgcggttgatattacatacccgttcggattactgcagatctaatcgtagccactgattgacgatcggacggttcaggatgcttggtaccccttcgccgtgcacttctttcgaaagaacccctcggttttcttcaaaataacccgccgtccactacgggattagcttgagtctagagaattttatacgctagcccctgtaaaactacagaatatggtgcacagtcctgagagcagaaaaataggaaaaagaatatagaaaatgagtttctagagtaaaaataattccagaa

SEQ ID NO: 71630 - DNA, 324 bp, Zea Mays
caatttccaaaagcaaaccctcatgttcaaggtggtagggttccaaggtacgtaccatgctgtgctcgggcgtccatgttacaccaagttcatggttgttacaaactatacgtacctgaagctgaaaatgcatgggcccgcgggcatcatcacagtcggtcgcatgtactatcacgcctacgagtgcgacgtcgactgcgttgaatatgccgaggcgcaagccaactatgaggccctcatcgcagatctagaaaaccttgcaggagaggtacccaacaccaagaagcacgctggcaacttcgagccgaccgaagacacgaagac

SEQ ID NO: 71631 - DNA, 429 bp, Zea Mays
gtctcctccaaccctcacaatagacatgccacgaaagtatcttcccttcatggcgtcaatctgactttgtttaatggttgactttccgaagatggtatggcttggccgccagagccaatctttggaatcttcatctccactttccacatcaaagtcatcactgtcattagagtcttcagataaatccgtcattatcacctttgtgatcttctctgtattcgttttgccatagattcataaaacccagcaataaaagggtccacaaccttcttctcctcggccacctatgtcacctcagactccttcttctcctcagacatttcttcaaaacttcagtatttcacgaagctcgaaaatcaagcaagagctgaccgcaggagaattaaaatttgagaaaacagtgcaagcaacagaaatggcgtagcaaat

SEQ ID NO: 71632 - DNA, 1005 bp, Zea Mays
cctacatccaatgtgtgttgtattgcatgaggaacgagagtttctatgtgtttgagggtctccgaaggagttcgtcccttaacgttacatgccctcccttttatagcctaaggaagctgagccccgatagacgagcctaggaatatagtaataataacattctatatggaacaagtaatgttgtcagcgaacatagatcatctcttggtcgtcgtgcagatttcctgaacagcttctcctacgtagatcttctcttggttactgtgcagatttcttgaccagcctctccttcgccctgccttgatagcgtgtgagtgaaggctctagtatgggttatagcgtagactagcacgctcacgtgcgtaggtgtgtgcacagtcgtctgtgttgtcatgtccggccgatcgctataacagactcaatatctgatcgaacgacgcttcatgatggtgtcttccacgcgcgtgtggcacaacgacctcgataacgtgcggagctctgagcgggcatttaatgcatgcaacaacgccatgctacatgcgcctcggtaacgcgtggggcggttacagagacctatcacaagccgaccaatgccatgctcttggacgcttggctgccttgtgtttaatgtgggttgaggttttgcttctatacaaaggtttgcaccatgcgcccatcggccacgtggcatcaccggacccctgcctgggtctaaagtagggcctgggggcatgttctgtcctagagcaccgtgagcccttgttggtgacctagaccccatacgagggggagggatccctactcaggggggcaatttgtatacgtggaggtcctgtaccttccatgggatccggattgggtacatgggggtccgagacccacccatggggggtctagatccattggtgaagtctttgagcatatcgcctccctgaacacgtggcagcacgagacctaaccataagacggggacatgcaccatagttggccaaggcggtcagctct

SEQ ID NO: 71633 - DNA, 727 bp, Zea Mays
gcctgtctgatggaggtgctgtcagagtcgtagttgttgaaacagtgagaagtatggcgaaaaagcatggtaatcctctccgtatggtgtaaaatagacttgacatcggtcctgtagccaccccgttgttagcggccttcgtggaggagttgatgatgtcctttagtcgatgttatctaggctgaggtctggcttgggcgagacggaggttcctcccgagactttggtcaagcctgtctcggggcatgcatttgtacaggaaggggttagtgcacttgtcggagtggcttcctgagggattcacggggagttgttgccggggcagttggacgaagccgagttcgagcgaggcggagttttctcccgaggctgaggctagcttcgggcgaggcggagtttcttcatgagggtgagaccatgctcagacgcgtgcgcgtcccatccaaagtttgtttgagcacaatagtcgacgtaggtgagcaatggcctttattccgagacgtgcgtcatcgtatttggtgaaagtggatgagaccacggtctcattgctccctgtttgactgcagtgtcacgtggggttggtattccaatcatcgcatgaaatgcgcatgtttccacggttctcgcgacctttgattgaggctggggtcggagctgtcctcctgtctgagacgagctcgggcgaggcggaaaccgccattccatgaagaggggacctcggacgaga

SEQ ID NO: 71634 - DNA, 737 bp, Zea Mays
ggagacaccacttcaatggtgaccaagatgttcgaaaaatttcctcctagattatatcaaaaacattgatccagtcagtgctggtgggagtcagaagcaaaagaagaacacgactctccccaaggacattcatctagttcccgcacttaggaaggatcgtcatcctggatagagagttgaggtaccgatagtacctgtgcatgttggacgtaatcaagaactcactttcattggaaatgtgcacaatctcctgatcttccctccgtggcagacgaatgtcatgaactgtgaggttcctactccttatatcaacatctgagaatcccagaatgttagcgaagcgacgatagctgaccttatgtcaaatcccttggacaaagaaatacataaccgggttatcatatccatcagtttattcatcaactttcttaatccaaagcgtggcatagaattgagcaatcacttcatcattccagggatattccatggtcatgatattctttatccctttttgctcacaaatcctcagagcctgagtcatatcctcatcgttaatcctctcgcagcctgcccagtcaatcaccctatgatgaacaactgggtgcttcttggttaggatgacaaagttataaaaatttgtctgaaatagaatccaaaatctaggataatgaacccctagagtgtctgggaacgacaatgggattagtgaacctgatctcctgaagaatatcaactcc

SEQ ID NO: 71635 - DNA, 856 bp, Zea Mays
ccgagcccgaggccaggcagtcttttctcaaccgagcgctctctgttctttggcgattctccacctcacctctcaccttcgacgaccatcgtctccagccgtgctctggtgatctcctccagcttaggctcagcctccttctcccctggtgagcctcactgcctttccccctttctcttatctctgtgcagccaatggagaactccctcaaaccacctctttgaatccaaatccaatctttctgcaattctttgtggatctagtgcatggatgtgtcctatgtgttccttaaattcccctgcaggtattgagctccctagggagggtttcacccactaaaataaccatttcaccgcttctccaaaatctcgtacaccacgtgttcggtgaaatgcccaaactagtcaaatttgctcaaatcgatcccagttttttcctgcaccttcatgacacctcaagtaacatatttgccaaattgcacgcgaatcctatatcccaggcaccaattctctccaaattcccatttatagcaatcaattctgagccaagtgccacaaatccattttcttagactaaattcaaaccaagcgcacacttcactcatatttactcatataaacctactcgtgaagtatcagctcaattccaagtcattttatgcctcaattccaatttcaaacctcctatggcactattcctcgctcaaacgtcgttttcgcgtcgtttgacctctgtatctccaaatcacttagtttgtgtgtcataactctctgtgtatgtatttattcacatttcatatacttatgactatgtgactaatacgtgctcacctcttctgtcatttcagtgatctcgc

SEQ ID NO: 71636 - DNA, 413 bp, Zea Mays
ggccgagtatgccactggagcaccagcatttgacactttgcccctaaggatcatctcaagtcggcttaccaagtctgtagaggaaattcttctgttggtaacccgagttgagtcggctagccctcgatacagataagctgggtatgccctgtctttcaatggatgaatattcttgaaaacaaaatcagtaaccacggcttcagctgtcagacccctctctttcagcagtccaacttaagctagcaacacacctgcctcagctacctcctgatctgtgggagactcagtccagcttggggtgcgaacgtccggctgtcttcccgaccgggaggggagggaattcccataattctcaactacgaaccactccaagcaccatcccttgatactgtccttgagaggggtctcgagat

SEQ ID NO: 71637 - DNA, 587 bp, Zea Mays
gggggagatgatggtgccggcgtgatcacctatgcaccggtcagtggagccagtcgtgggcctacgtgccatgggggcataagttcgccgacacgctggtggtgagaagtcaaccgtaggtcgcgatgagagggaacacctacacaagtagcgaaggttgtgcttcggtgggggagggaggccggtgggtggcggcccccatgacgccggtggcggggcaaggtctggtgggggaggtcactgatgttgggagggagggcggcatgtggctacaacataacgtgacgtttgggcaggggttgacgtctagggggcgtgtgggaggagaaagagaaagtgggttgataccgtattggaaataaaacctaaccctaattgggggcagaggatacataatatatccaattatatgggtaggctcattatagatagagtacacatgaatacataatacactaacatgactatctctaggcgccttacccatctcatctcttatttgaaactttattatataaacaatacattttatagtacaaagttatattttgcacgtccatatacacattatgctgaccatagcctta

SEQ ID NO: 71638 - DNA, 567 bp, Zea Mays
gtgaacttgattaatgatgtacttctggagaatcataagatgccaaaggacatgtactagtccaagaagttgctctcgagtctcggtatgcactacgaaaaaattgatgtctatgacaataactatatgcttttctagaaagagaccgtgaatgagaaaaagtgtacattatgtggtaaacctagattaatagaggttgtcaacgatgaaggtgcgaccataatgaccgaggtagcacgtaagtagcttcgttacatacctcttgtacctcggttgaaatgtttttttatctctaagtatactactagacacacaagatggcacaaagaaggtgtacgtgacaatcccgatgtcatggcgcacccagctgatacagatgcatggaaggacctagatgcctttgattctaactttgctagcgaagcgagaaatgttcgcatcgatttggctacatatggtttctcgcctttcaatctaactatgttgttgtactcatgctggcccgtcattgctattccttacatccttccaccagctctttgcatgaaatatgaatttattttcttg

SEQ ID NO: 71639 - DNA, 1190 bp, Zea Mays
ttgaattccctcgggagaactgcgtggtcgcgccaggccttcgtttgggcttgatatttattgagggcctgcagggcgaagacgcagtctgcatccatgagatctttggaggttagctcgtctacatcgggtgaagccgaagcgcttgttcttggggacccatgcttgatttctagcgtggtcatggcctccgaaccgtatagcaggcgaaagggagtaaacccggtcgcccgacactcggtcgtgttcagcgcccagactgcttcaggtagcaggtcgacccatttacccttcttgtcgtcgaggagcattttcttgatcgccgtgaaaatcttgccgttggcacgctccacaacgccgttggattgtgggtgatatactgaggcgaaggcaagtctggtgccaatggagaagcagaagtccctgaagtcttggctgtcaaattgcttgccattatcaactgtgagctcagacgggactccgaatcagcaaacaatgttttgccagaagaatttctgggcggtcttcgatgttatcgttgatactgctcttgcctcgatccacttggtgaaatactcgacggcgacgaaggtgaacttgaggttcccttgggccgtgggtagcggcccgacgatgtccaggccccagcgctgaaggggccacgtgtgggcgattagctttgtgaactgcgaagggcttcccaagcgtggagaaaacttttggcaggcttcgcatgaccttgtgacccgattcgcggtgcagatcatagcaggccagtagaagccttgacggatcaccttggcagctagggccctaggccccacgtgagagccgcaagtcccgctgtggacttcgcgcaggatctggacgccttcagtctcggtgacgcatttaagcatgggttgactgacccccttcttgtaaagctatccctcgatgagagcgaagtcctggcttcggtgtttgaggagcttggcctcgctgatatcgcttgggtggtagtatctctgcaggaacatggttatcggtgcccgccagtcttcagtcatgatgaggttgactatgtggtggccctcggtgtcgttggttatttggaggccctctggactgcgaacggctagcgtgccgatgacgtggtagaacacgtcggagggcagggcctcacctctggcggctgccttggccaatgc

SEQ ID NO: 71640 - DNA, 377 bp, Zea Mays
caatgtagtggcagatgccttgagtcggaagtcgcaatgcaactgtgttatgatggattctcgcattaacaccctgtgcgatgagttgagcaaaatgaagatcgaagtgattccttctggtgccttgtctcacatttccgttgagccagctttgcaataccagatcatcatggcccggcccagtgacaagggagtgcaaattattaaggagaacctccatcagaagaccgagaagtataaatgcttccgccaagatggaaagggtatattgtggttcgaaagcagattggtggttcctaaaaacatggatctcaagaagaaaatcttggatgaggcccatctctccaaattctccatgcatccagggagcaccaaaa

SEQ ID NO: 71641 - DNA, 404 bp, Zea Mays
aaaccggaaatccactcagatacctaataataaattagtcagcattattatgaaaatttaccacgtaaaatttggcaccaatactccataaaaacagccgccacccaaaaaaaatatatcacccccccttccctgaccttccacatttttctctcccacctccatattttttgcactttctatcggtaaccacgctcgcctcctcatggtttccccttcgtcctcccacccgcaatagtggatccatcaacggcgatttcatcttccgcatcgaattcagtggctgttgatctggcctccccacgacaggtccaccatggctccagggaagaggtccacacggaccttatagacaccggaaggtatttaccatttatgaatcgatctcctctctgttcatctag

SEQ ID NO: 71642 - DNA, 476 bp, Zea Mays
ggaaattggtttccactggcagtttcttaagccaaccatcagtgaactttgtattatagataccccttcgtcctcgatgacagaacctatagctagtagccaacttcctttggaggcgattttggaggtctagatttcacaaaatacaaaaggggtggttttgatctttatttgtttggaagaaggtgtctaagaaagattggtttatgtttctcttatcaatttttgtctattctttctcaattttagccacagtttggatctaggatttcaccatgtgagagagaagagtatagttaggttattttctctattttctcaaatgaggttgcttaagatggttagattttgtctaacctatctcctttttcatgtttatttctcaaatcagtttatccatgagacatatttagttggttaatgaatggtgcatttgttaattggtatgcatggagagagagaggaagataggtttg

SEQ ID NO: 71643 - DNA, 477 bp, Zea Mays
gccggtgcattggttagaccgaaagacatcactgtgaactcatacaacccatacttggtaatgaatgccatcttcggaatgtctgaaggtcggatcctgagctgatgataacctgacctcagatcaatcttggagaacacactggctcctctcaactggtcgaacagatcttctattctgggcaaagggtacttgttcttgatcgtgacctcatttagaaatcgataatcgatacacatccgtttggtgccatctttcttttccacaaataggacaggggcggcctaaggcgaggtgcttggccgaatgtaacctttctctgacagctcatcaatctgcttcttaagctcaaccaactccggtccagatattctgtaagctctcttaaagataggggcggtgccagggagaagttctatagcaaactcaactttccgctctggtggcatgcctggtaagtcctttggaaacacatct

SEQ ID NO: 71644 - DNA, 663 bp, Zea Mays
tttaattctctatttttatttgctcccggactgcgagtcattttctgtaaagtacaggggccaatcaataaaaatccctagacacagagggcacccgcgcaggatggcgggttggttcctgtataaacgaggggctgttccgcaaaatgcgcacggcgaaaggatacgaggtgatatcggtcgtctgatctaaggcttgcgactgcgattagattttatcacgctatgaatcagtgtgtgactggcctcgtcagatcggaatccaatggttatgattttatgaagtctgaatcgcttcaaaccgtccgatcagaaccatacggtcccgattgactcgccaaggggaaagcaagattgaatccccaccgtgcattcacgatcccacggctaccaatcctaccgcacttcacctaatctcggccacccatcaagaaatcgacggcccgcgccatctcttctccgcgctcgcctgggtacggcgactccactatgccggcgacgaacaccggcgaaccgcggcctagcgctttaaaaccccaaccctgagcccgatagcctcaacacaatgcggaactaatggtgaacacgtggatgggtaatttacctgcagtggcgcagaagaattctccagccacggaaccgagctgactgcggcggaggaga

SEQ ID NO: 71645 - DNA, 307 bp, Zea Mays
attggaccattcttgatctttaggcgagttggggagatggcataccaactcgagctaccgctagtctatcggatgtgcataatgtgttccacgtgtctcaacttaaaaagtgtctccgtgtccctgaggaacagttaccaatagatgagctcagtgttcagggtgatatgacttacacggagtatccgatcaagattcttgatacattgactcgagttacaagaaataaggtgatcaagatgtgcaaagtacaatggagtcaccatgtagaagatgaagcaacatgggaaagagaagaagaactccg

SEQ ID NO: 71646 - DNA, 321 bp, Zea Mays
tggtgtttgtttgatatttaatcatctgagaatgccaggtgtgttattcagctctgatgtttatgctacaattccaagatataagaccaaaaagaaataacttaatatttgttattcataaattgattgcagttgatctataatgacttacaggttttatataatgagcctgcatgtactgttaatagtagaaacatacctttgagaccgaaatccatattatctaatactaattgatgtctatccgagtacttttaaatgtggatgagccaatctaccccactgtatggaggtttgtaatgactgctacctcttataatt

SEQ ID NO: 71647 - DNA, 486 bp, Zea Mays
gtcagagcgcgtatgtcatccaccatgacatattggtggactgtggctcaaccacttcgtagctattaagtcaataaaggacactggataaaccgctgcaggacatgactgagtgtaacaacgggctctaaggtggcctaggtgtgcctacagtaccctgacagaggatgaaggcatcaaccatggcgtccttcgactgatgggaacccaagaggacaatgaactagacgacaatgcctgacctttattcgcttgacacttaggctcttgtaacagggttggtctctgacattggcctataaacgaagggaaaggcacacgattccgtggacgagcaatcacacatacacatcactagcacaagtcaaagaacaaagcacttataaccgcacacatattcacacactagagacttgggagctcaatccctctctcgcgcgtttgtaaccactactacaaaccattgcaacgtaaaatgagcaggtc

SEQ ID NO: 71648 - DNA, 536 bp, Zea Mays
gggaactggtgctactgcttggtatggtgctatggtaccagggaagggatgggaaccgtgtgcttgttgtagtggtggcagctcgcagccacggcctacacgcagacgtgcaaaacaccacaccgcgtccaatcgtcttatatgtcgtcacttgttcagtgaacctgtttcagcatagattactcctactattatgatcatgtaacacttcgaatgaacctcagcagaaaagaatgagaaatctcggaccactgcctttgcgtgctacgtttcgctgcgaactttagccgcagcaggagaccagcgatgtcttccatcccgtccgtccacgcaagaagccaaacacacttcgtgcatcgaatgtcattttctacgtgccacggtcgctcgtaccgtccagtgctgtgatgtcattttcaactctccacccccacccccggccccggcgctaagaatctgggtgaaatccaaatagatcaaattttgcttgatttctggtactaccgtaccagtttttattagattttcaaaaaata

SEQ ID NO: 71649 - DNA, 706 bp, Zea Mays
cactgttttacataaggatatctcccaatcaatagcgcaagtaaataaatacctttcactgtgacgaaaagatgctagatggtagccagtacctaaacattgaacaacaaccttcttactgaacgaagtaaaatcctaaccctaaccagattagtccaccatattaatagatgaaatagtatatgggttgagtctaaatctattacaattaggatacatacgcatgtctaacaccccgcagttgcaaatctagacatgtagatgttgagtctaacaccccactatcgcaactctaggcattgcagatgttgagtggaacgaaacttcaagaacacttagatgagagccccttggtgaagatatcatcgaactacaaagtgatcgatacacggaggatgtgtagattgccaacgacgatacactttaagtggcaaaattgcaaatcccaccacaccatattggtcggtatggttaaaaatagacctatgatgcaccatttttataagttagggatgcgtgttacataacttaacaagtataaggaccaaaaaatacattttcaaagttcataaacttaagtgaaatctcttgacaagtttcaaggccaccgatacatttaactctataagaccgtgttcagcagtacaccatatggttatccaaaacactgttttacattgtccccaaagtggagcttgaatacgag

SEQ ID NO: 71650 - DNA, 388 bp, Zea Mays
ggcctttggtcgtcactaagaaaatttatcctctagtggtgggtgcttctacatcttttgtgtgacatttggagttttggagggtagctcccattcactcccctctgctcgtctgatttgatcctttaattggtatcgaagtgggtaaatgatgattccaccttagttggttcttgattcgaaaagacgacaatggaacgtggtgttggcaaaccaccacccttcgatgggacgaattacatgtactggaagatccgtataccgacatatatttaaagcattggctcatgattttggaaaatttacctcggtcgcacacttataagatgcaggagatagagatccatgacacatgcaacaaggctcagaatgcattgttttcttgact

SEQ ID NO: 71651 - DNA, 768 bp, Zea Mays
aatgatgcaatcattcataaaattgttaccaatacgattacgaagtattgtcttcacaattttcattgctgaaaaacacctctccacggatgcagtggcaactggcagaacaagaactaactttaaaagtcgatagaccaaaccgaaagcaaggtgcttctttgtatcaaccatcagtttagcaagttcggttaaggttttcaggttggaaaatatgtcatcagcttgtacattatcaatgtagatctcaagatcatgagcaagatcttttagttcttctgaagtaaagtcatctggataaagcttagctaattccactaggctctccaacttaaaatcaccataagaattcctgggactaaaagaagccatgtaagtaataagattggaatttgtttcactgaaacgatcattaaactcaataagtagcaaatcaataacagggttcaaacagtcccatctatagtgctgataatttgtgcggtttgactttttccttggtttatgtcgatcaatatactctgcttccatatttaattgagtgatattgtgttcttcacaaaaggaatatattttttgcaataaagaatcccatccatcatctctaatcttctgaattttttgtttcgttgactccacctctaacatagctgccaatatatcttggtctttcctttgtaaacaaagtgacaaagcatttgcatttcccaatattatcaacatcaattgaagatgaaacacaaaatcaaaatcctgaagataatctat

SEQ ID NO: 71652 - DNA, 1417 bp, Zea Mays
cgtcgtcgtgtttgctgtcgacgacagaacaggaggcactgatgtggatgaccgtcctgcaggtgatggtgcatagttcttcttctcgtcggcggcaggggacgtggaagggggcaagggcttcactttcttgaggatgtcgtggaggactggaagctcctcatccatccggagctgcagtgccgacgacgacgcagcgtcgacgtcgtggccacgcgacacaacaggagcccctgatgtggatgaccgtcctgcaggtgatggtgcatagttcttcttctcgtcggcggcaggagacgtggaacggggcaagggcttcactttcttgaggaggccttggaggactggaagctcctcatccatccgaagctgcagtgccgacgacgacgcagcgtcgacgtcgtggccacgtgacacaacaggagcccctgatgtggatgaccgtcctgcaggtgatggtgcatagttcttcttctcgtcggcggcaaggaacgtggaacggggcaagggcttcactttcttgaggaggccttggaggactggaagctcctcatccatccggagctgcagtgccgacgaccacgcagcgtcgacgtcgcggccacgcttctgagacgatgaagtagaagcctcgaccggtcgcagcttgttatcaggaactgccggagggatcgggtatgggtgctgctgttgcttcgagttcgcttctggtgccgtgatccgagtctgatacgcagcctccgttgatgccttggctcgcgacgtcgtcctccttggtgtcgacgacacaccacgagcccctgatggtgatcgtcgacgttgtggcgctagcgcgtagttcttcgctttcttgaggtggccttggatagcgaggaactctttgtccatccggatccccagtgccgacgacgcagcgccgacgttgcggccaggcttctgagacaacggggaagtagacatctcggcgccgaccgacgtggtgcgtgtcgccggatcggcgcgaccctcactgccggtcgacaaacgaggtggcggcgcccaagcctaacgcgtcgcggcaagaagcgaggctgcacgtggcgagcgaggtcacaagcgaaacgacgatatgatctcacctggctggctgtgtagaacagcgagttgtatttataacccggccggctagcgatcgagtctgagttggctgcgttcgttagggcatgccgcttggatcagaggggctttggatagattatagatagattgcataataccgccatgcatggttccttctagagagagcaggcgccggtcggacatacgtacgacgtcaacggctctagacagagcaaagcactagtccgcatgggaatacgtacgagacacgataaggctgaggttcctcttcaataacaaattaataatctactccaga

SEQ ID NO: 71653 - DNA, 640 bp, Zea Mays
gtgccctgcgggatggcggccacggtattcatctggtcgtgcgcacccccgtcgctcgagtaattcatcgagtacacgctctgtatgctctaggtccttgacaacttcaacagccttgacaccggcaacctcgtcctttcaccactgtcatcgcatgttgcttccaccgggcactcccctcctgtgggtgttggtccctagctccggcgatcgacattggagatgatggtctgcagcgacggatgcttgcgacgcagaataatgatgatcacgctgagtggcgagggaggtgagcgtgagcgcggtgagcgaatgcggaagactaaaaccataggtgacacacacacgatgtattaccttgcgttgatctcgtaggccttctctggttctgttatttcatttatatgggacaccagatcacaatggcttgaagccaatctcccccatcgcacaccgagccccatagactccggctttcttggatcttgaccgcggacatgcgcaacaactacatggcgatagggtgaacacaacaaggcggtcgtgacatgttaggcacaacactgacacccacgattctatgccactaacagctagggctctaatccaactagattacaaacacaacatgtacttattc

SEQ ID NO: 71654 - DNA, 820 bp, Zea Mays
cggcgaattgatcggggcgggcgtggggtatgcggggcgggcacggggcatgtggccgccattgccggcttgaggtcggggtttgcgggggaagggggcacgcgcagagaggaggcggggcgggcgcgaggcatgcggccgccattgccggcttgaggtcgaggtcaggcatgcgcagagagcgcaaagaggaggcgggggtagtctacactaatgccttaatagttagtagatatttcccttctttaagataaaaaatgtatactatgttaattgagttcaatagtgtatgactggatgtcgtaacgttttggggtgtactaatctattgaggagtgaagaattatatgtcgaggaacgaaatagttaagaaattaagttgtgagtatagtcaagtatgagatcgatgaggagaatgttgagtttatcacatccgactcaatcaaggaactaagtcagctcacatgccctaatctagagcgcaacaaaacttatagtagcaacttcctttcacaccgcatatatacaataaggaacaggccgatatgtgaatcaacgtatataatatacatggcaagtatgtgaatcaacgttcgtggtgccgtctaaacacatacgctagagatccgatcagtctctatctagttgcccctggtaccgagcgttaccgtcctagtggtgtatcctaacaacactgaaggtataaccttcatgttcttgcgcatctaatagccaggatttacaaccaaggtctccataatttaatgtctaccacacctcttttacatgttgattgatgaaggggacatatctggtgctg

SEQ ID NO: 71655 - DNA, 363 bp, Zea Mays
gtagcttttcacgctttgccactacttatgaagaaaccccatatgggtgctaaggaattgcaagatacgcttcaaggagttcacaatgtgactattggttacgacacagtttggaaggggaaggagaaggctttaaaagagttgtctagaaggtggtagttcgaaaaaacggaagggcgtggaaaatgctcaaggcacaacaaagataaaaagacagtacacttgcccaaactgtggtcaactaggtcatcggaaaacaagttataagtgccctttaaatggaacaaagaaaaggttataactgaatggctaattgtttttttatttcattgtccattattacttgttagtaatttgttttgt

SEQ ID NO: 71656 - DNA, 658 bp, Zea Mays
gcctcatgtgtattgcaagataaaatctcatttgcaataagaatattatcatgatcaattttaatttctgtatagtcttccttaatttttacaagtctatctttcaactccctatttgcttcatttaatttgtcacacttatccttagcatcttttagggaggatttaagctcatttacagtggatggcatagttttgatttcttctttcatctcatcactagcttttacaactatgtcatattctgtagttaaaaattcattttcatcttttaacttatcacatttagcctttgacttcctaatgatttgagtgtattccttaagcaagtcagctaattcatcataggaaggtgaagcaaattcatcatcactatcactatcatcaataatatcattatcaatttgtaccttccgttcacctttagccatgaggcatatgtgagaagtggatgagggtgatggtgaagagaagtccccagcgatggcggcaactttttcatcattttcttcttcacttgaagaagacctgcttgaggactcaatgtcagtgagccagtcaccaacaatgtatgcctttccatttttctttttatggaatcttttgtgtttcccatcctttctcttgaagaatttcttttcttttttctcgtcatcac

SEQ ID NO: 71657 - DNA, 390 bp, Zea Mays
aacctattttctaattcatttattcattttatcacgccactggactgggcacactattacagaggaaggcaggggccctagcgcaaaataaaccaagacacagaatcctgcagacaggactatgggttgattcttaactttcgcgggggttctttagcaaaaaggccatcacgaaggggtatctagggtttctggccgtccgaccacacatgtgcggcccagattagatcgaatctcgactacatacctagctgcgcccacaaccattagatcccagatccatggcgcacggcgcacgatgcccttcactccctctcggccgcacgatttcctttcaacacgccagatccaaaacgacgaaggggtacccggattctaatcatgaccaca

SEQ ID NO: 71658 - DNA, 451 bp, Zea Mays
ctttcggattagagtttagggtgggcaatcgggtcggtgcgatcgccagccatggcgccaccgtcgatgcggagtcgccgccatgtcaccgcgtcgaggaagggttgagggttatcgtgaccgttagatctgcatttgaaggccaggattagaagatcttaccccttcatttgagtgactcacgtagtcgtagatcattgatccttcggcgcagatcacatcctactgcattaaatcgcgaccgtcgatcgttaatcgtatgggcgcgctcgcacaccagtttaccgcggtcgggatctaatccggacccttgaatctggatcgaacgacactgaatgactaataccccttcggccgcgttttattgcgaatgagcccctcggttcctagggaatcaacccgtcgtccaccctagggttgctctgagtctaggaaattcttatgattttgc

SEQ ID NO: 71659 - DNA, 1342 bp, Zea Mays
taccaacaaaagaattcctgtagtggatttggtcagccagctcgagatgatactcagaggcaaggtgtcgaacattggtgctcctgttgcatactcggcctgtaatctgcctccttccaaggcttttaccaattttgtgtcgaatcctcctgctggtgatagtggtttgggccttagagtgcgaccctctcccgaagaggttagtgctttggttgcctcacttggtgaaatccctgatgacgagaggcaggttcattttgaggtacctttgaatccaagtgatgctgaggtaagtgccatgctggatatactggctgaagattcctctgacgcagcccctgctgaaacactggatgcagcgcccatcctagaggctggcaaagctttggatattcagaggtctgatagttttcacccgaagcgtcctcgccgaggcaatcaaccaacttctcctactgaggggaagaaaaagaagaagagacgtcttcgccgagtgtcaagcttggatcaggatgctggtccttctgctcctgctgctgaggaagtgcccgtgccagtttttgctgaagctgaccccaatgggtgtgacacgactgatgctgaacccaatgggtgtgatctagatgatgctgaccccaatgggtgtgccgtccgcattgttgatgaagatgaggaagaggagcatgaaatccctctagttcggaagaacagccgacgctacatagtcagcggggaaagtagtggtgttccttctctagccttgtctgctctcattggtctgcaagaattgtctctagcaaactttgatcagactcttgaagacatggtcccagaagatctgttatcggagccgacagatggtggaatgatggatatttgtgctgatgtgcctgatgcagggctagagttatctcgagcagcgtcccgtgcctcatcgaccttagagcgcggtcttaagggtcaggaggctggtctggattgttctactcccatggaagtgggtgaaggtccttcatccttagaggtggctgttacggagagctcgaccctcaaggaaggcgctagcgtttacccagcccccgagggttttgccggggatgacccagctcggatgggtagcgcgagctatgacccagctcctgagggtgtccgagtcggttctccctctcacacttccatggacgttcacgtagggtcttctcctccgcattctggttgcatggcagcagctcaagcttcaggtcaggaagtcgccttagaggccagcgctcctgatgacagagttttgacctctgctgatgatactgacctggtccccactgatgcattgcgggttgtttcg

SEQ ID NO: 71660 - DNA, 415 bp, Zea Mays
acaactgcaccgcatactggggaggcgtcgtatacccagctccctacagtacctcccacaaaatgcggggaaagccctcgcgtgcaagtccgtccgtgtgggaatgtgtgttccctccttccgaggacgtgagaagtcatctgtgtaagggtaagcgtaagcgaaaaaggaaaaagaattacaaaaatgaaagggaattagtgcttggctttactaaggttacgttgaggtcttggagtatacttagtcttttattatcatgccttatagcttttaaaagttcttgaccacttaccaagtagtttgaataaaatgatgcatgcatgctcgtcctaagcgacctcacatcaacctatagggatagagacatctccgtccattattagagtagcccgtagggcacattcaaatagcc

SEQ ID NO: 71661 - DNA, 310 bp, Zea Mays
atcagggcaagggaaccgccgaggaatctagaaagcaaggggtgaatgccttaccagccatgagaccatcagacttagcaagtcaggataggagtagctcaccctcgacctcggcagcctcctgtgccatacgaaaaattccataactctcccgagaagtaggagagagggagaggagacatcggctctggccatgacgagccaatggagacccctcggtagatcccatttaaggtaagaacctgagggtcaagagcttagaggtaatgataggcgaacacttgcttaagttttttgaaagaaggaagaa

SEQ ID NO: 71662 - DNA, 566 bp, Zea Mays
gatctttattcatatcgagaaatcttacaaccataggagttttgactcgatatgctttatccatattgaatttctctaacactttctggatatatgccgattgatatataaaaattcttgaaggtaaatagtcaagttgaatacctaaacaaaatttggtttgacccaaatccttcatctcaaatttcgtctttaaatgatgacgtgcttcatttatatctttttcgcttccaataatattgaggtcatcaacatatactgaaatgatacaaaatccagtggaggacttcttaatgaacacacatgggcaatcatcattattagtgtatcctttaagagaaaggaaatcacttaagcgattgtatcacatttgtcgatggattcggtatatttattccatctggaactttcatataaatttctgaatccagtgacccatataaatatgcggttactacgtccatcaactgcaaagatagatgattttgtactgccaatgaaattaagtatcgaaatgttatgtcactcattacttgtcacacccggtttcaaggaacaaagccagg

SEQ ID NO: 71663 - DNA, 485 bp, Zea Mays
gtgacaatgatagaagatgataagctaaaggttgtaagccaattaatcgatatccctaggagtcataacaacttttgtgtcatagatgttgttgttggccaggaattcaccgagcgcatcatgcaaagtggtatcactttgtgccgatatcaagatttccaaatatgagggggattagccatgttcaatgatgccatgttggatatagttgtggtctatgtaatagctaatttaccaaatgttgaggcagacacacttgaagtcttaggaacaaatgaggcgttatggttattacagagatgtgtaaggcaatcatcataggagagggtggtgctgaagtttacatggtcaaagtcattgaggacgtaaacaaagacgattaagtaatcaaggcaaatgggatgtgaggttcaatttaagcctgaagtgcatgcaatcaacaaaggctaatgcttgtgatggtttgctaaaccaagaaatatgtc

SEQ ID NO: 71664 - DNA, 512 bp, Zea Mays
ttgaattcaaattggagatttaaaaataaaaggaaaagaaaatagaaaataaaagaaaaaagaaaagaaaatgaagaaaacatcgtattgggccaaatatcttggggtggcccatacactcaccagcgcttggcccaatcagtcgtttggcgccgacacggtgtcctaactcactagcctctccgcacgctctcgctccctcgctgtgactgaggtatggggccagaagtcagggcgcattaacacactcgagtcgctgctttggggaccccacgcgtcagtcgttccctttgccccacccttgcttcctttgtccggtgggccagtatggtcagttgtcttccccaacaactttgtcgaacatggtggaggcgtgccgtgaatcccggcgtctgttgaaggatcatgcccgactttccccttccacataagtcgcgccctctcctcttcccttgtagacatcgcgggctcaactcggtcgcagggttctagctacacccctgctcctcgac

SEQ ID NO: 71665 - DNA, 497 bp, Zea Mays
ttcctgctaagagacatcgagaagggctagaagagtgtgtaaaattagcttgaaaaactcgaccaaaaggggaaatgcgacaaacaagatccccttgagcatccaaaactcgagaaaggccctttttaaagcgcacttcatagtcatcctcatggagttgtgaaaacgaaagcatattgaaatgcaaatttgaaaccaaatcaacatccttgaagacaaaactctcgttcactcgaacggagccacgagagacaaccttacctcttgacttatccccaaatgtggtgtatgccttaccaatcatagggtcgaggctagagaaccatttgttgcttccggtcatgtgacacgaacaaccggaatccatgagccacatgttctctagacctctgtcctgcaccaatagaaagacacagggtgagcaaatggcacatcactagggtaagtaaactatgaagaataccagtgctgcatcatttgcccctaaaaagtgttag

SEQ ID NO: 71666 - DNA, 475 bp, Zea Mays
ttctttacgagtcaacttttcttgaccaacaggggatgagggatgattgggtgcctgtatctcatctcatatagatgagtctggcttgattcttctatttgggtatccatttgtttcggggcttttgcctgtggttgaggtggactactcatatatccaaacatttttctattccttttgttgttcttcacgatgttgacagaagtttatgtgcatttttgttcatgttccatgtctagagactgagatagctttatctcggaggtgttcggtagtgaactcttcttaggacagttacgaaggtaatgatcttcatgtccacatagatagcaagcttttctttaagttatttcttgactttttccatgtttccatttttgtttcttggacctgatgcgacgacggggctgaaactgtgtgcaggtgatagtccatccatcaatgtaacactcatgtgcttctttttggagctggg

SEQ ID NO: 71667 - DNA, 534 bp, Zea Mays
cggggtagtaaatatcgccttgaggatgaacttaggccactgttcaacctcggtcgccgtgttcgcctgactcatggccggttcagataagatcaccggagttggccgcctatcgaccgcacgccacgtgccttggtaccttaccacgtcgcagtaactcgtattacgcatgtccgttgatcatcggtgagctcaccacagtgaaatccaccaatttcttgcgacagtgctccccctctctccggccgccatcgcgccatctcaaattcatgggccaccacccttgggccctataaattgagcgtgccattggctccgctaggtagtcacacacccaatacaacaactcgtgcctcgaatcatccaccagagctcaccaatttgggatttcccccaaatcggtcaagaacaccatgtgtgtgagctcgtcgcgatcagcgctccacaggtctaatcatgttctcctcgctcttgttctagcattcctgtgtgcccttgaagctcgtcggcccaaccaattgcactgaaccggag

SEQ ID NO: 71668 - DNA, 324 bp, Zea Mays
gctggcgtttacccagcccccgagggtgttgccagtgataatctggctcaggtgggcagcgcgagctatgacccagcccccgagggtgtccgagcgggttccccttctcatacttccatggatgtccatgtcaggtcttctcctccacactctggttgcatggctgcagcacgtgcttcgggttaggaagtcgccttagaggccggcgcacctgacgctagagttttggtttctgccggtgatgctgaattggtccccaatgatgctctatagattgcttcagttggtaatccttcgtcaagtcaccaactgacttcccatgat

SEQ ID NO: 71669 - DNA, 605 bp, Zea Mays
tcatcctctccttaacgtgtagcgttgtttcgttcgcgcattagctcactagggcatcagttttgggtttcccggtcgggcttccgccgtagcgcatgggtggtgccgctgctggcggatggtggtagaagactgtctctgcgccgtccgtccaaggatgggcggacacgattagatctagaacccattcagccgcgaccgacggatcgggcgtgggtggctacgattggcttggtatatccatgcgggtgggattagatcccgcttatttagaatcgtggccgtcgatcgctgagcggatggccactagcgcgtaccggtttgatttaatgttgatctaatcccagcctatgaaatgtaatggggcgggcagatttgccccgtacacccttcagcgtgacgtttttctaaaagaacccctgcaaatttagagtttcaacccgccatccacacggggtgaatatgagtcttggagaaatatacgaattagcccctggtctttcgcagaatagtaaccctagatcaatcagagaataaaaaggataaaacatttcagaaaaatgatttttagtttagaaataaatccagaaacttatataaatcat

SEQ ID NO: 71670 - DNA, 609 bp, Zea Mays
gtggcctcggatgtgtcttaatgcaggagggccgagttatagcatatgcttcaagacagttgcgtcggcatgaggaacattatccaactcatgacttagaattagttgttgtggttcatgcccttaaaatatggtgtcattatctatgggaaatatctgccatatatatacatatcataaaagtttgaagtatatttttacccagtcagaactaaacatgaggcagaggagatggcttgagctgattaaggattatgaattagaaatccactatcacccaggcaaggccaacacggtggcagatgcattaagtcacaaggcttcctgccattgtcttacagtaaatacctctggcatcacattatgtcaagaaatggagaaattaaacctgggaatgattcaacatggaaccttggaccaattgaagcttgagtcaattcttctgcaaaagattattgatgcccaaagaagtgataagggtatgaaacatattcatgagaaaataaaagccggtaaaacaaattgtttcagaaaggatgatcaaggcatagtatggtttaacaaccgcatagttgtgcccaggaatgacgaagttcgccagcaaatttt

SEQ ID NO: 71671 - DNA, 350 bp, Zea Mays
accatttcctgcgccacatcctgcatcgcctggcttctctccggtgaatgcaggagagcgtgcagcagaagcagaggagtccgcagcggaggcgcctgtgtcgcccagaacacccacactagttccagcaagtcctcaggtagagcgtgtgacccccttggaggatgatgatgaaagggtggattcctaccatgacggtgaagaactccgttatcgaaagattcatgacattattggtgatcatgcaacccctctgccggcgcaacggctgtttgcagaactgaatctcacccattctggtgagcctacaagctatgaagaagccaaggatgatccagattggcaaacag

SEQ ID NO: 71672 - DNA, 527 bp, Zea Mays
cgatgatatcttggtgtactcaaagagcgaagaagaacatgccggtcatttgcatatagtgcttcaacgtctgcgagagcaccgtctttatgccaaattgtcaaaatgtgatttttggctaaaggaaatcaaattcttgggtcacactatctctcaggcaggtatagttgttgatcccgataaggtgcaagaggtgatgaactggaagccaccaacaattgtccgtcagatttgaagttttctgggattggctggttcttatcgaagattcattccggatttctctcgaattgcgaagcccatgactgaactgttgaagaagggatccaactttgcaagcccagataattatggcccaactcagtgacaagggagtgcaaatcattaaagagaatctccatcggaagacaaagaagtataaatgtttctgccaagatgaaaagggtatattgtggtttgaaagcaaactggtagttcctaaaaataaggatctgaagaagaagatcttggatgaggctcatctctcc

SEQ ID NO: 71673 - DNA, 520 bp, Zea Mays
ctgagcctagtcgctctgtgcctgtcgaagctagaacagaaccggttgaggagccaaaactgaagaaggcagcggagcagccgaaagccctgagtccaccacgcgagacggaattgccgaaggcatcaaggattcctataatgactccgaggaagaggagaatggctagcgtgctagacgctgtcatggaatctgtaaaggcatcaactcctgcctctgccgaagcgcctagtgcagaaggcaaaattttgaagaaatctaacgaagttggtacagtgcaagctgctgctgaggctggaccctcatcttttaccgaagcaagacatgcggagactgcaccaccaatcttgggaaaagagggtgccgttgaggagtctcctgccaccgaagcacctaccaaaaaattggagttcattgtgcgacatgcttcggggaaacaattgtcaaagaagcagattgccgaagctagacaatatgtcaaggatctgaagtatccccgaggatccttggtatacagcgg

SEQ ID NO: 71674 - DNA, 1145 bp, Zea Mays
ccgccagccattggccccgccaggtacaatacccgcgtttccgcttcttttgatcccgttctgttcgttgggggagggcaggagatctgaaggtttggacggggatcagtgagtattccttgtgggcagtgacgcagtgtggttggctaccagtacttatccgtgtaaatagaattactgttggatgaatgaatgcaatagtagcaatagatgaatcgtagacaaacaagttgcggggaacgtggacagtttgtagtttcctggattagatcaaacgagaacaacaaaactttgacggatgctggaaggcttcaatgatacagtggtaaattctttcttataaaaatgaggtagccaattagatcaggagaggatatgctaggtgtgcttgtatatgacataggcttaacaaacttgataagcaaatcactcagagaaaccaagcgatttagcttagtagctacatcccaaatagtgaccattcctttctttgaagctcaaagattatcactctgttgaagaaaccacaagtattgcaatcattttgctctgttttatctgcctgcagccatgctctgcgacctgtcacaaatgctgtcaggttgtctactgcctacagtgaagtagttttgggatgacttacctgtgtttattcacaatattgccaacaatttatgcgcacctcccccacccccaccactatgaaccacttccttgtagctgcaaagtcttgtttatcctcctatgaacaaacaatatttttcacctttcaatttaaggtgcatattgatgtaacttacagtccagttactagcaaagtgtctcaagttggaataatataaaaagggtagaaataggcaaggcacctaatttagtgtgtcacatcttcatttacaccgggagctaaaaaatgctcctcaatgctccgtattcaatccccacctgaaccacttcagaatcaattctcacctactccccatcctgctcccccatcagaacaaaaaaaaaacttcagcagaggatcaagcaatagagttctaccaaactggacctaagagagaatacataagatgcatataccctcatttcatttcttaaccaattcaattcctgcatgtacagacgttgtcatcgcatgattaagg

SEQ ID NO: 71675 - DNA, 618 bp, Zea Mays
gaagaaataaaaacaacgcggtaacattctgctgcacatatgcgacacgatttacatgagcgaagaatctgttgggactttcgcagtcaaagatcctacatgagatcagttggcacgccgtcaaatcgagacaattcaaatgcacgttcctgaaacacttcaacatgagacgtacctttcgagaatagaacttcagctgcagtgagatggtggagcatgcatgctttgtttgtaacgcaccccaatcataaaaaagcgaactgcagtttcagtattctgctgcgcgaggtaagtacaggcacgctgaaacagaaaattcaaatgaagcaacaagcaggactgaaaagattcaacactacccaggaccattgaacttggtagacttgaccagtctagtttgaagcactcatttccaaaccaaattagatgtttgatcatcacctgtgaagcaccctacactaaatcagtctgtttggattgcggcatcgctccatccagaaatcagttcgttcgtccaaccatttttgaatcagccagtctccctcaaattaaattgcgcttgcagggaatatgaggcatggtttgcttacatataggttcaaactcatgatgtgcaaa

SEQ ID NO: 71676 - DNA, 860 bp, Zea Mays
gcataaatcagtagtacttcagtaaccgacacatgtaattagggattaaattagtcactggggtctcccctgcctttatttgaaaaccatcaaatttattgcatgttttttatctgaaacgaccccggggaaaatttaggagaaattaccaaaaccatcagctagaatccttagactatatttatgagtagtataggagaaagtcatgagcagtgtaggagagaggaatagacacgatggatgagatggtgaggagctgcgaagtcgcgaagagttgtgactcgatggaggagattgtggaatagtttgctgatgcctttcctagctgcaggccaagggaggacatgtcgacatgcgattggctagattctctacttagattaagcatcgaatcagagaaaagagtaaacctctacttacattaagagggttcttccttcgcaatccctttgtttcgcctttgccttgatgtcctcgtgtgtctccttcctccatggcaatgccaccgcatccacctcgtgcgcaccatcaagcagatcgacgatgccttcacctctagctctatagatgatgccacgaggagaagcagacaccctcttccatcctctgccatccacattcaccacggctctgattggagacccaatgagtgggaatacgatgtagatcgcgcacccaccggatgatagcgtcgatggcgaggagcttccacctccactagacaacggcgatgatagcgtgtctgatggttgtgacgggggtggaaggtgtggccgggtaggaagggaaagagggcgagggtgtacagggagtcatcgggctagacaacggcacgaggtcgtgattcaactacattaaat

SEQ ID NO: 71677 - DNA, 804 bp, Zea Mays
gcgccatgttgcggctgtgcgtgtgacccgctgactggtgggcccctgcctcacactcgctcctctcacttccgcgcgggctcaggttgtcagcacatctctcaccctgcaccaataggctccgacgcgaacgcatcgcctcgccagggatcctccagctgttgcaaccacccgcaattgatacgggtttaggtgggacttctgggtatttaagcaagaccgggccacctccttgtacatcatgccgaggtcaccatcgccgggcgcatcgaggatcaggactggtcaccactatcgccgtaagcggataagatcgccgccaagcagtcctctcgctcgcgtcaccgattctaggttacgggtggccttcacaagtcactgagtcatcccacacctatccatggccgccgcgggagaatcaatcaactcaactgttgttgatttctcgccaaagtggaggaatcaccgcgacaccgtacttcgtcatagacaggacttcacagtgctcaaaccaccggtaagttgcccctgtcgtgctcatcgagtgctctgctacaactattaaccatcggattggtgttcggggcgctagtgcgatgaaggggcgtgccggccatggccgccgccgcgccggtactatatgctgctggggccgagcgccaggtgactgaaagaaggtctctgggccattggctctcggttggacggctcagattgagcgtagcgataccctttcagcccatgggatctggatcgtggataggggaatcgaggccgtggatgagaagctaccgtggttgattt

SEQ ID NO: 71678 - DNA, 516 bp, Zea Mays
gggggagtgctccatatgcagtatctcaacaaattcaacagtatctcaacaaattcaacagcctaccattgaccaggtgaatacagatctgaagaaaaagaattgttttatgaggggactcaatgataggcttcagcggaaaatggcaacctgcttggaccttacctacagtagggctatcagtacaacactggcagtggaatccaaaaatgcaggacatggaaaatcaaaggggtttggaggtgaaaggtcaaatcaaggacctgtgaagagaactaggttggtgatccgaccttttaatcaaaatcgttcttcgcctcgcccaccttcatatccattgaagcaacctgtctttattcgtcccactactgcccccgctcctaccaatcagccgagtgcccctggtactcatttccctgttctccccagttcttccactagttgcttcaattatggaaagtctggacacttcatcaaggactgcccatacccaaagcaaaataaaaccaatttcca

SEQ ID NO: 71679 - DNA, 569 bp, Zea Mays
aactattgggtgctaggtggatttcttgcctagtcccgctctgaccagcagcgtgcagtggggaacatcctttgggtgtggaggaagcatacgcggcgcctgtgagggagattgtatcgtcgtaatcgcggtattcttcgttggacttgggatctccgccgtggagattgcccaaccgcggtcgtcgacaactagacaacaatccacggtacggtatacctccatcgattcgctaagtcctcctatttgcgtgcgctagttgaacgctaggatcgcgcctcgggtcaccgaatagcctgctctagcgaggcgtgcggcccctactcggagcgccgtcgtgcacggtctgaaggtaggcgagggttcgtgcgccattggattcgctgtggatggccggattagagacatggcgtacttccctgggagatgggctgagagccgttagatatggacgggcggtccagattgactcagccatgcccttcgcctgtgtgtgattttgtgacgtaggttgtcggatctacggtcgggattaaaaggtgaacatacgtcgggattaaaaggtgaac

SEQ ID NO: 71680 - DNA, 486 bp, Zea Mays
ggttgcatggaaagagaacatgaaatagtgatggtcagaagctaaatgaggcctgccttttctatcatcagcatttcaaaatgacaatcacagtaaatcaaaatagaaattatatttcttccattcaactttacaattaaggctctagaaaacagatactaaacaaagagagagattcaactgattatatgtgaatgcaaggaaacacatttggcaaagacttctcacaaagtaaactggaatcaataaaataaacaagtgaaatgattttgaaattagtgatgaaaggagatgatattattataacaaaccagcatggaataacatttagccaagcaaaatatgataataattccagaggtacaactaatccaatgttgacaagggaagagtaggccaacaagtcaacaagtaaagcaaaagagaaacagataacaaataaagttgagagggaacattcatcaaggacaagatgaaaagggttac

SEQ ID NO: 71681 - DNA, 998 bp, Zea Mays
tcggatggacaagatttatggtctatttggatcctctgagctaaaccaaaagtggctaaagtttaatcacttcagagatgatatgttgcccaacatatttacctagattttgagggtactcaacatgttatttgagtcaccacatggaacggaacacagagaagcctgcagttaacagaacagaaatcagtattaaggttctgtggaaagagaccttgattgttgacagtgttccaccttcattatgctatctctgtacacggcaatatacacgatccgctggatacaaccttactttggatctgcataatgcaagaccttaatcataacaatcattgcatcgtatcgccacaaatcaagagacaatttatgtccacacaagacgacacaatttcgactccatcccgggaaaacgagaaccaaatgctgatggagaaatatggagcaaataaacaggaacgatttcctgatgcggacgtccatgtcaggcgcaccgtatccacctatagaattttaagagcattttattggacgagagcactgttgggatcatgaagagaataaaatcataaattcaagcaaatgacgacaaggaacagagagcaagctccatcatcttggttgcagctgacagttacctttcgaatgaaaaaaaaagtacaggatagtgtgttcatccagacaaaccattaatgcctccatgagaaatccagacgcgggatgagaaatccaattacttttgaaaatctttcctacatcatcatgtgtaaaacgtcactgtttatagtccttgatctaacacttgtttattctccacttatttctcatattgagaatgctgctctggtaaaatgttttgcaggctgcgaagggatactcaaacttgtatatttatgagaagcaaatgataaaatcaagcatggtcgtttcacaaatgtacttaaacaatcttacttgcagtctatggcttagagtatctccaacagtttggtgaatca

SEQ ID NO: 71682 - DNA, 434 bp, Zea Mays
caagaactcgcttcaagtgatttagccgtactaacactcataactaagttttgtagctattagtgattgaattttacgagatcacctattcaccccccccccctctaggtgctctcaacgtttttaaaaataatcgccgagcgataactgatgacactgtcggcattttagaggtaacaaccgagtggtgcttgacactgtcggcgttttagaggtaaacaccgagtcgtgcttgacactgtcggcgttttcgaggttacgtccgagttatgtctgaagttttgctttcctgagtgatgacttgacactttttagaaatggcgcccaacccgggaaaaccccatttatactcatgtcgacgtgcgcttttgatttctgagccctaacttcacatttccgcctcgaaccactcctctgtttccctgagattttgc

SEQ ID NO: 71683 - DNA, 568 bp, Zea Mays
acgacgcgcgtctggcatcgcgacacgacaaagctccttggctaacgcagcggatcgaaagcgagcgaccggagcaggtgcataaatgacacgaacagaaatcgaaaacacgagagaagaagaaggcctcaccggggggcagagaagatggccaaagcgggcatgagaggcgatgcagcagttccgtggtgcaggggctgctgtggtttcgtgggagaagagagcgggagggggttagcgacattgagacgtgtgtatatattgaaaggagaaggcgtgggaggcggttgctgattttgccatggctcgtatcctgaccgagcgagtgagatgattgtgtacacaacatggttgatgttgcgcgaggaggcaagacaagaagatagatgggcgtagacgaggttagcggacgtgagcagcatgccgttcgcaagaagaagccattcggtgatttcccgaaaaaggacatgagatctgaagcaggctcgacgagagaaatatatatatatatataatcgagatttcagatttttcataggttttcgcaaatgctaaatttttaggaatt

SEQ ID NO: 71684 - DNA, 567 bp, Zea Mays
agtaaatatcacactgtggatatgcttcggccactaaattacttcgagcaccgtacccgagctagccacggcggattcggatgagttcgccggagacagtcgcttcacggccttgcgccatgtgccttggcacatccaccgcatcgtcgtgactcgcattagccgcccgttcgtcgccggggagcttgccacggtaataggacaccaatcacgcgcgctagtaacttcctgtttctccgaccgccgcgtgtcttcatccaattcaccggctaccgctcacagactctataaattgagcgcaccgtcgggtccgtagggtaatcacacaccaagccaccaagtcatggctccaattgttcaccagagagctccaatttctcatttcccccaaatcattcaagaacaccactcggtttgacctcgccgtggccagcgcatctcaggtccgctcatatcctctgccctcccgttttagcgttctggtgtgcccctgatactccccgaccaacccaattgggctagagtccctaggatcgtagggaacgcgtgtgaatgtctgtgatgccc

SEQ ID NO: 71685 - DNA, 1294 bp, Zea Mays
aatttacaaggaaatttattttttattgaccagtggtgaagacaacacaacctgataggaattcatttttctctcttcttccccttttctcctctaccccttcctcaatggagtgtcatagaagtaggggcctagagcccctagcccaccttaagatctgcccctggtattgtgtctgtgctttaatggaatgcaagagctggttgatttttctgcagggtgtcactgttgtatacatagtgactagttagatgcacatgcattactacaacttcaatatatcatatagatagacgttgtttaatgggtatttgtttacatatgtttcaaacctttataatgagcatctgaaagtcctgagtggtttgctaggatggtggcggcaagacgggtgcctgcgtcagcgtctctccctcaaccaaacaactacaatattgaatcaaacacaactaatcccaaatttatcacaatagggctcgggtaaatcacatcgacgcccaggaagctcaacagacacctaaagtagtactcggtgagttctttgtagagtttactcctgcaatagtacgttttgattctggagcatctcattctttcatagccatccgttttgtggaaaagcataaaattccaactgcactgttaaatacacccctgatcactcgtaccccatgggcggaccttctctgccacctccagtgttcccaagtcaagatccttttaagtggggtagtgttcctagtagatctagtagtaaatgacatcctagggaatcaatgtaatcctaggaatggattggctatctcggcacaatggcatcattggatgtgtagataagactgtctttctcaccgatcatcaagggaatgtagtttcatgtcaggcccgtccaacggctcaagacccaatggtgtccagtctagcagcagaaaacatgtttgcggttgaagaatttatggacgtattcctagaagaattactagggatgcccgcaaaaagagaggtgtaattctacattgacctccttccggggaccgcaccgattgcaaagaatggtgtttagtctagcgacataaaacatgtttgtcaccaagaaggatggtagtatgaggatgtgtattgattactgatccttgaacaaagtcactatcaagaacaagtatccattatcacggattgatgacatgtttgaccaactccaaggggcatgattcttctcaaagattgatctaagatcgggttaccattaactgagaatcagagaggaagatatctagaaaactgcctttgccac

SEQ ID NO: 71686 - DNA, 318 bp, Zea Mays
aatccaatgttcaacacctttttgtccctaagcttccctcgatgattcaatagaaatatagaccaaatagtattaggtatttatacttcctataaatatttcatacttattgttcattgaagactccttagtatgaccaggattcaaataaggtaacgctttgcatacaagtacagcagcaaggttcagtacactaagcaagcagccactatgcgactcaattaggtgaggtatttgacttatccaaaaagacagagagcaaggcggacctgataaagctaatggcatctagttgtttgtcactctgcagaactggtt

SEQ ID NO: 71687 - DNA, 579 bp, Zea Mays
aaagaatctatttcgttgagagttttatattgtaaactttgtgggtaaggtgagatgttacatgaaagaataaagcacattgatgttaaatatcattttatttgagatgtcattgataaaagtgatgttaagatatgcaagataagtactcatgataatcctactggtatattgacaaagcatgtttctagagctaagtttgagctataatactttattttgctataagatagaacttgtcttaaagtggagtttgctagaatacgatctgaattctaacgtgagtcttgcggtgatgactgaaggacctttggtttgggtatcaattagcgattcatcatgcatacatcttgtaagccacaaagcaaattagacgatttattgtattccctgcgttctgtgaactcttcttgtgttatggagatcgtcagttgacgtccgtagtttttttcttgcaagaattttctacataaaattttatgcctcatgtttaatttagatttgcactatttgctaacgtcatattccatatttgcagaaattgtgcatatgggcaaacacgttcgttgtaaggaagag

SEQ ID NO: 71688 - DNA, 482 bp, Zea Mays
gtttagacacttgtcagaggactcttggctgcctgcgcatcaggatccggcagctacgccactcttcagtactaggacccaggagtccttcttcagggcttagttgtcagcttagatagttctataggctcaccggtgtctggatctttctgctttccatacagcgaccggtgcagagttagagggtcacatcacatatctaccaggattatactctctgctgacttttgatgccgatatgttgaggagtgggtccgagttttctatgccacagtatggatcgaccctgaccatcagtggatgaggttccggttcgagcgtgaggacgtcactatgcatacaactcagatccgggagttatttcgattccctaagtcgatgacaaggcttcatagcatgtgctatggtacctcagaccgtcctcgtcgtcctcatagtggagtagctcccaacaccgctcacgttgctgctctgttttgacc

SEQ ID NO: 71689 - DNA, 497 bp, Zea Mays
atttgctaattcttacagagtcctgtagattcttgaatatatcattcagacttctatctgttaggacccttattttgtgcgcctcaaaatagtgacagagcttgtgggaagccattaagaccacatatgccatcgtttccatctctgacatgttaaacttgatttctttctcccggacgagggttgcactgatgacgctatgtgaagctgcaacatagactaggattgtagcctttgggtctaggctgactagtcttgtgagttttgtaagataaaccttaagtggttcgaaggtttcctcctgttccagcacccagacaaagtcctttgctccacgtaaagttttgaggaagggtagactttgcttggctgatcacaagataaatctgttgagtgatgctttcctacagattatcatttggatgtctcttactgtctagggagcctttatgtctattattgcttttattttataacagttggccttgatgcccctg

SEQ ID NO: 71690 - DNA, 286 bp, Zea Mays
caagcacatcagcacaaacctccatcacaccatcatccactggctccgataacaaatcctctggaaccatatcctcaagagtctgatcaaagttggccagggacagttcttgcagaccaatgagagcagacaaagcaggagaaggaactccactactttcacctctagcgatgaactgccgactgtttttccgagtcaaaggaacttcatcttcttcctcctcgtcgtccacattagcaacacaggcagcacccccactgggatcaacaacagatggagcacccac

SEQ ID NO: 71691 - DNA, 657 bp, Zea Mays
ggtcaactagaacaaaaaatttgagtgagggatgtggcccgtttgggtttatcgatggtctacccatacctatgtctagttgtgtagttcatattactctgcataggggttacagatggagaagagaggaaacgagctcccaaatctttggtgtgcaagtacgtatgagtatgaatgttaatattcgagtactagaatagttatgtcctgagcatgagcctctccaattttgttataggctaaggtgggagcaaactatcttacaagagtccgaggttgggcaaaccggatgagggttggaccctaccgtgtaatctgttcaccgagattcttgtcggtcaagcgacgccgtggctgatgtctacatcttccgtcagggtactatatccatgcacgagtcatcccaaagcctaaagttacattctgtcacgtcccgcatcgggtaggtcgatgtacacttttgacttcctagttgtggaagtggttgagtcgatgtcacagtccccacgtcatgtcggctgacgtctgcaatgtacctgctctcttgttgtcattcaggtcctgcaccatgtcagagcatggctcgcacgtcctatgttagtagtggttgaagcaatacagaccttggaatctcgtgcccgagagattggaggaaat

SEQ ID NO: 71692 - DNA, 1087 bp, Zea Mays
ctcgcaggagagcagcgccacgctggtgaagtcaagcctgcaactcagcgaggagcaagcaagtgacgtcggcagaagcagcaacaacatgatggtgacgagcagcgaaacggaggaggaggccatcagctgctctagtatgtactagtgggtagagtagtggcgattgtgacccggtcgtccatatcgattgaggtggtggtccattttatagcccatgcaaacagtaggacgcaactgcgtctgcgtgggccatccctctctcgtttgatcggggacacagaacagagaagagcaacgcagagcagagcagagcagctagctagcgtccctctcatcactagcaaccagcccagcagcagcagactctcatcattatcgtaccactaccagcccagcagcagcattccctgccggctacgctgctgctgcattcccgcatgcttgagtctttacccccacatgattaattaaggaatgtccatgacttaccattgcagtctatacggcgagagatgatggcattccactgcagcacattactttagtctttacctccagcatgagacgtaagacgtaggcagatcaaaagtagtgttccttgaaaccatgtatacacataggcagcaaagacctttttctagttcatgaattggcccgatgtcgatggagtagaggagggcgtcgcagcatgtggaagtagggttttgtggtgtcgtctcctggcaggagtgcagcgccacactggtgaagtcaagcctgcaactcagcgaggagcaagcaggtgaagacggcagcagcaacaacaacatgatggtgacgaggagtgaaacggaggaggaggccatcgactgctctagtctgtactagtgggtagagtagtggcgattgtgacccgaccgtccctatcgattgagatggtggtgcattttatagcccatgcaaacagccgggcgctgcagcgtaggcatgggtcaaccctctctcgtttgatcggggacacagagcagagtagagcaacacagagcagagcagagcagctagctagcgtccctctcatcactagtagtactatcgtacaaccagc

SEQ ID NO: 71693 - DNA, 513 bp, Zea Mays
cgaacaggggcttttgcgtctccgtgcatcgaattaacccaaactttcgttccattactctcacccatttatcggcttctaagggttcctccgctttgacgaagagtggcagtcgagtctcagagaattccaaataagtagtatcacgcggtccttgagggggaactctgcctccgtgctattggaattggttgcccgtcatttcacgcaagaatcgtgtattatcagcggtggcattgaccagggcagcgatagcctcggccaaagtcggtggtatggatggtggattaggagtatctttctcatcgcgggatgtccccgcaccatcatgtgcgcgagtctgtgatggcatctaaggcaaagaaacatttgaaacatataacatgccaacatacaccatcatattacattgtcgaaatgtagtaattatacagactcctttatacaactcaacctttcttacttattttacataagtacaatacttagactatactactctagtcttcttca

SEQ ID NO: 71694 - DNA, 1215 bp, Zea Mays
gtttctaccattatttttgtattaaaaatgaatttagaatgaatttctatgattttatttgttatctggactgcgcgcaataatacaaagaactgcagggtgctatctaaaaattccaggatcttagtataaggtttttcaactgcttgggactgcaggtttattattaaattgtccagggactctttaacaaaactagtgcgccgaaggggtatcgggtggttagagtcgtccgatcagaaagcaagggctcagattaaatcttttcctcgcctgaaccggtacacgatgattaccataggatcggaaatccatggccgttatttaatggggcaaaggtgtatcgccatgatttaatctcgaccgtacattgcaagatctacggttcccaagtcatcttccacctctcgtctgaaccgtggggcgagggaaaaccacaacggttgcgctattgccgtggtaggcgatctagcatcctggtggttcctactggcgtgtctagggaatatacaggaaataggaacggcgaatctatggatagaaaatttaccggcgccaatacgtagaggaactcggccacggcgcaacaatccgactacgcactccttgtcgtgaatgattttccggccaccaggttccttgcagcgctcaggcgatggtgcaggctggtgatgactacaacgactccctgtggacgttcttctctcctctctttatacacggccagggaaaatctagtgactctcgcgaacgacggaagcagttgcaagtttgttatagatgcgcatggcttgcttctagaagactatagcgaggtcagctgtcaagggaaatccacaccccagtgccgcattactcgcatgcatgcacggagtcgacggaggctacggttggcatacggagtggagcctaggggacccagccgtcactggtagaatgaaactttaatctggctggatgagcacatggatggcagatatctgattagtctcggtggttgtagaagatagcgggtcctaacaaatcggctagtcatcggctgagttagttacggtggtttcacagttgttaccgtagaggagatgaacaactattacgtgaggcccaccaatcattgagacatgttgatttcattgataaattaagcgtgacacaagggcctgacggggaaacaaatagaaaaaaacattaatcgtgtacatgtggtgatcaaag

SEQ ID NO: 71695 - DNA, 651 bp, Zea Mays
ctcgataaccatgactgtaggaagatctccatcaaaactctgatcgattatgtgtgttgtatcttcaactagaaatatcatgcacacacataggggataaccatgactgtaggaagatctccatcaaaactccgatcgattatgtgtgttgtatcttcaactagaaatatcatgcacacacatagggggagctattcctacattctgagttttattgggatttatctatctctcggacagaacttcaaatcaagataagtcttatgaaactcatctctaaaatccttcttatacctaaggtatgagggagatttgaaaaacaaaacttctcttggataaaatgtgtagtgttgtcatcaattaccaaaaatggggagattgtgaatcatctaggccccttagtgatgttttggtaattaatgacaactgtttgtggtctccaggagtttagagaagttatttgaccggattagtaggctagatggccgtactattaagaggggtcaaagacgtttgtctgtgtcaaacttagtgcctcatagagcatctagtggttgcatttgcatgaggactaacagcgcttccaatttcaagaattaaaaatcttttcaaaagcatgtttgaaaaattgctaagtctcgagttgtgcgg

SEQ ID NO: 71696 - DNA, 433 bp, Zea Mays
cgaacttattggggaaagagccaaaaggccgtttgcacttctgcccggaaagaccaaatatttgtgaattttttcctgggagagaaaggtcccaaaaatgacgggggcccgtcgccgctgggtctgcagagccattaagaccggggacagaatcctgcccaaaattcctcgggcactgttccaaaatcttcttgggccgccaaatcaacttccgcggggcccaaggggaaacgcgagaggtcctcaatgatggccgaaatccggagctagcaacgcggccgattctataatttgaataattttgaaattgcggacgaacaacatatccttgatcaatggcggggcgaagtgggaaggaaatccgatcgaaaaccgagtgtcgctgcttcaatcttaaggaagaacgtccgggccttaccgccctacccaaagg

SEQ ID NO: 71697 - DNA, 682 bp, Zea Mays
gttgtgtcaccgtgcgactggaatctggtgctcgtcgttgggtctcgtcgcgggcatgatcgaggtgagaattactccatacggttggccgtcacctctccttcatatattagccttcgaattgaagtatggcgtattgggtcgccggggcgcagtgtgccgggggtgctccgccatgggagtcaatggcgccgctgcttgctggtcggcaggattggggggaggaaggagtatagcatgttcgttagattaagatctagcggctaaggtcagatcgggagagatggtgacagaaaccgttgatcctgggatgtacggttggggttcgatctggcatagctgttcatgcggtgtagtgtggtccgttggatcggttgtagagggatgggattagatcgcagttttattaaatcatggccgtcagattcggatctaacgatgggcgctgcgtactggttcacttaatgcgtcatgtaatcgtggccctcggaatgggatccaatggctagaatccatccatacctcttcggctgtgcatctttgcaaaagagacccctagtttaaatggaatcaacccgccgtcctactactctttgccctgtgtcttataaatgttaccccaagacccctggactttccaggaattgaggcccagcccagtactggtttaaatcgattaaat

SEQ ID NO: 71698 - DNA, 569 bp, Zea Mays
tgaagaagctgctgaacgggccagacttatatgtatatcctttatagattagcttcataaattttttgtagctttggtgctaatagatatttgtgttttagtgcagctgacctctctccccctcccgagccatatgatcctgaaactgatccttttgtgaaggatgcgctcgatatgattaagattcctaatgaggctattgacgaagctgtcgataagctgttgaacgaagctatcgacaaagtcctaaaagaagactgatgttgtgtgtatttgatagtttagtttccttgtatgtagcttctatttttgtaagaaacaattatcaactatttgcatgtatgttgatataatatatttctttgtgatgtgtgaaaccttcgcacataccatttttgagccggcggtgaaaaaaacaccttcccttcttttcaagcttcagaaagaaatctctcttctttgccgaagcaactgtgtagttcttgctgaagacgttgcataagaataccattgtcgaaggcataaactctgtctaacagtacctctgtcataagcatggatcatgcctt

SEQ ID NO: 71699 - DNA, 760 bp, Zea Mays
aaaatccgtgccgccgccgtccgtgttcgtgcgcgataggaaatggatagagtcggagttaaacggcgcatacgtggcaccgttccctgagtccagccggagacttcaccggcggccaccgtgaccattgaatcttgccgtggtgtcgcccatgcctccatctcccgcactgtacctcctaccgacgtggtcggcatgcacttgtgatgctgtccgtggccgcgaagtgatcgtcggaccgccacggctataaatagccattgggtcctcggcgaggtgcttgctgttcttcaaacaagcttgggtacaaccagaaattcacacggccttctccacctcttcccaaattgatgttgcacggtgaaactacagtctcttacagccgtgtagcctcaatccccgcccccaatgtcacccagagctgccgtaacgccgatttcccccaaactggtctaccgcatcgcgaagaacagccgcccgtggctgggccacgctggtgagttcctattcaagtcaagtgttgtttccatgcctctgtatgcttgcgaagctcatggtggcgcccgtttgctttgatcgaccatggtttggcgggaacatgtattcccgtgctcggtttccgcagtgcacgtggaccggtcgttctcggggtgttcgggtcaaattggtgtgtgttccgaggccgtcgtaggccggtgaagcctctccgttagttattccgagcagtcatcgccggccatggccggtacggaccacgttc

SEQ ID NO: 71700 - DNA, 328 bp, Zea Mays
cttgctgcccgcttactgttccctaatgcatagcgccgagaatcgtggtttgcatgtccccttaactgcggaaatcgcttgcctgagtgatagcaccatcgtagggttgctggtcgtgtgggcagggcggtttggcatcctggttctagctattatggccctagatgggttcactagggtcacgacatcgttttgcagcaaccctccatagggatcaagcgataggtcgccgaatcccggtttctggtgatgtccgatgccacggttcggcgcgcgccaccgcacttctccgttagggtaggataagtttccctaggtcgtctataac

SEQ ID NO: 71701 - DNA, 863 bp, Zea Mays
gtctcctaagggtgcagccggacatgcacaataagtgcgcgacatcacccacagggtgcgaagtctttactataagacacgtccgagcaaaagtcgcctaagggtgcagtcgagcatgcacaataagtgcgcgacatcacccacagggtgcaaagtatttactataagacacgtctgagcaaaagccgcctaagggtgcagtcgggcacgcagaaagcaaggtcctcatcccacctgagtaccacaccaacacgattacaaatcaagacaatcttacaataaacgcaacactcgatatgccatcatagtttacatacatacaacgaagggcccgtcgaccacttcgcacaagcaataccaatcgcattttgtcgccctccctctctattgcgatgcgggggagggcagcgttttcactcactatcgcaacacgaggttgaggccagcaaaaatgctacatcggctctgccttcggaataagacccgcctcccagaaattaaacaacatcatcttcaactcttcgccctcaaatagattccgcatgtccccctccccaatgcatgtcccggccgtcgaggatagtagatcgcgttggctaccctgatctaatcgaaaacaggatcattccatacccatccggcgatgcctcccacttcgtgacatcccacctacactctgtttcgacaccaccttttgcctgcggtggtcttcggctatcgccctgaccaggggagcagactcttcgcatgcatcagattgcggcggggactccgatgcaaccaaatccaacgcaacaaagtagtctaaatcttcctcagaagactcctcaatccacaaaagcgggataccaaaatcatccccg

SEQ ID NO: 71702 - DNA, 753 bp, Zea Mays
ggtcatgagaaagattctatctattaattgttttaatctaccacattatctgttcaagagattatcttcaccgtgctaacatgacaacttaacttttatcctatacttgtatgtggtaagggggaaaccaggtcattaaacaatgacatgtagaaattattataaatacactttagaagataatttggcctctccaataaccttacaattaagagtatcatcattcctaattcatatcaggaatcaacaggagggagaggagtccacctgaacataaatacactttagaagataatttggtctctccaataaccttacaattaagagtatcatcattcctaattcatatcaggaatcaacaggagggagaggagtccacctgaacataaatacactttagaagataatttggcctctctaataaccttacaattaagagtatcatcattcctaattcatatcaggaatcaacaggagggagaggagtccacctaaacatctccactatctttagtggggaagtgtgatgcatcggcgaagaggcagagagcgaggcccaacgagacgtcaacgtggcatcgaggaactagatagattgtagacctaagatgatgaggaacaaatcacactcacaagaaggcacacaaaacacatgatttttaccaaggtttggtcacaccaccaatgtgccctactactcgttgaggtgcccacaaagggtcgggtctttctcaacccttttcctcaatgccg

SEQ ID NO: 71703 - DNA, 702 bp, Zea Mays
cattaaggggaatattccgggaatgtagtatgtaactgggggtaatatagtacttggggacacacctacccgcccggttacctataaatacccccgcactgtacacggatggggcatgcataacgagaagctacagttccccactgtttgtcttgtcacgcacctgagctctcacctactctctgagtgtttgaatccacatgacaatgcaatcacgagtgtcagtgcccaacattaggcgcccaccattcgtgcgacgaagagaacacccatgatgcctcccaagaaaaacacatgtcccacctcaccaacaaacgacgaagacgcctgggctgccctcgcctccaagaaaggcaaggttgcctcgtcgccgaccagtccccaccacctaacccgaaggccatcgctaacacgtagggtaaaggccatgccacaaagcaaaactagttgacagtatccaccgagcaagagggcaaagtccacaccaccagctctgatgactcgcaagaccctccgctaaacccaaaaagtcagccctaccaggccaaaatttggtcagatttaacgaggaatttacccccgtgcttcgacgccacggcaagaccctacactaaacctgaaaagtcagccctatcaggccaaaatttggttggacttaactaggaatttaccctcggctccctaggcttcgacgtcgtggca

SEQ ID NO: 71704 - DNA, 468 bp, Zea Mays
aagagatccataatgatcaagtaatgataaacgacaggaaactcccatggtctagattaatcatgaaaaggcttagcattgcattacaagaatctcgcccagattcttgtataccaaagtttggcaacttcaagattgtccttcttcccaactagcttcatacgatactacgactttgaagatggtgatgtcgcagaatttgctgtcccggttagatactaacttgcatctttgtgactacatataatcagtattaatacaattactaattattaatataactattatgacacatgcaggacaaaccaatggaccaacgtgcatttctgctacattacctggcctttcatcgcaacaacaaggtttaccccttccctgcagaactcaaccctttcaaatatgttccaaggaaacgtcgttgtttaaaagccagggcctagctatcatagttgaacatccatccagaag

SEQ ID NO: 71705 - DNA, 732 bp, Zea Mays
tgatcctagcacacatttgagacgctcccgagtttgcccttaaatccaggtgtgacaatccctacaaatactaaacgaaacatatgaccgtcatgtaacatgtagaaccttaaagttggttatgcaatgcggtcttaaactccacctatatgttagcaccttttcagggccaagtagcaataaatcctagggccttcacatgaggtgcaagaccttaggttcgactctgcggggtgctagatggtccgtgataggtcgccagactgtccatgataagacactgaaccattcgcggtagggcgacgggctatccacgacggcgtagagagctctcaggtgaacctagatctcacctcttgggagggactgcatcagggatgagagatcgcattgttgctttaggatcggcaggctacacaaagcacctctagatgacatagagccaaaaagagatgacgataggagttcaggagctacaactagggctaggctatatctagacctaatgcatacagtaaaataaggtaattggattgattcaaatggattgtggtgttccaatcgtccatacccttcatatatatagggtggaggtcaagacccgttcctaggcaagatccaacatattctcgtgagtttgctaggataagcatgcacgatataaggacttcaacccgagataatctaatagtggaccattcgggcacgatataaggacttcaacccgagata

SEQ ID NO: 71706 - DNA, 731 bp, Zea Mays
cgctcctcagtcctcacctgctactccactctcgcgtcaaaagggcattcaattgcagtgatgctctgctgttcttctacaatgctctagcggtctagctgcctgactcgcgtggtggccggagggcagggaccagggaaccctgcaagtggaagaccctatagaggcaatgttcctcgccatggctcggcgaagttgcaagttcctgtagtttagcctgtggcgcgagtaacatctgctgctgtggattcggcgaggactgtaccggcctgtacgtatcgggcctgttccgtagcttgtcttttgccacccttttggtgctgctgcaaattgcaatgcctccttgcacggtgcaccaagccacctagcaagtctccatgttaaaatcctacgcactagtagtagtacgaaacatagtagtcactcccatacatttgcagactttgcagttaagcattctaccaactttcaaaacatttcaagcccaagcagcagccaaaccgaataactagcgccgagtgttaagctaactgctctcatcaatttgaacaaacagcaataaatggcacatgccacacactgattaacacaaagcacgttattaaaggctctgtttgcataacgtcacaaatcgattgttgtaggctgtctttttcaaacgtctttaaacagattcataggtaaaactcttaaatcacgctctcgcataaaaataaggtgtaataaaaaaa

SEQ ID NO: 71707 - DNA, 465 bp, Zea Mays
actttataagtttatcaaggaacgacaccaaaatactgacaaaggttaggctcacaatttaggacacctcaaacttaggctatgggtggaagtaatttaactagctctctaaatatcgaatgtgatgaccactaaggtaagacaccactttgccatataaactaaataaacaccaaccacttgacacatattaccaactaactgcttgaaagtatatccaaaactttcacatgatacttgaaccaaaatcaaacagtcaactaagaacaagtgacaccaatggattctaccaaactcatcattcgcacaatccattcaaccataccttgcacacatatttatctgtgcactcttcataattctacaccttaaacccacatctcacatcaacacaacggttgcttcccaaacactaatacgtccatacaaccacacacaactgaaccatttcatcatacatctcat

SEQ ID NO: 71708 - DNA, 628 bp, Zea Mays
cattgacatcgaaaaaccaagatatgaaatgtaccatagtctagttcccatatgtcctcaataaagccaaaatatgtaataatctcaccagtttcatcgtctatggcctcgcatcgaacaccacagttttgtgacatgctctttttgtccttagacttggtacaaaatgtgaatccactaatgccacaggtttgccatgtcgtgacctgacatgatggtccaaatgcaaaccccttgatggtttgttcttctattgtttctccatgtggaatgtccttcaccattagtcatgtgttgaaccgctgcttgtgttgcttcattacccaatcatccgtatgcccaggattttgcttgcgaagctcattgatgtgttgttagataaatggctccattatcgctagctgatgtatgatactgcgatgtgcctcaactaatgtattgtaatctggtgggatgaaagatttctgtcccatcctcccacttccatatagtctaccctcgtgtcgtgatggaggcaaacctaatgcaacctagtcttttaggatactattgcaagatagaccttcggactcaatggcctcttcagtatagtacccctctatcatggatgcctcaggacgagcacaag

SEQ ID NO: 71709 - DNA, 2078 bp, Zea Mays
gactgatcaagagcgccaggtgtgtgagtggagacatactgatcagcaaaaggggaagtaagtgccaacaagtctgtcggcatgcccaacggcagcccttctggacccaaacccgttcctagcattgtcccattaacaatctgattctcaagctgagacaccaaccccatgtcacaggccccatcttgaggcttcttagaatcaccatgcaaagagttatcttccatgacagtatcttctgctagctcctccagctgaaaagaatcatttccatgtttctcagagtaatcttcatcctctccttgctccttatcatctccgtctcgattacccatgttatctgtatctgtccacttccccgctatgagaaccttgtcaactttgaaaaaaatctcatataacccttcaccaactactatttcagcagactccggaatatgatttacattagtcactgccaccaaaatacgaaccacccccattttcctagtgtagcgcatatcaactttctgagtagcacccaaaatagtgcctattgcccataaaggaagaaaggagcggatttcaaaaggaaccccataaacattcacccaagccttctgcagataagaaataggctctattttttgattaacctcctgaatcactaagataccttctcctcccaacgtatgaacatatttcatagcaatcatacgttgaagctcaacactgcatgggaacggtactataaagccgtcagcatgcctttggaccgaccaattccacttcactggtataagtcttgagagctctgacttaacgagatcagcagagacattaccttccttcactgtaatgaaagtcgtaacaccatccgacctcggaattgcacccttagatccccaagttgggatttggaagaaaccagactcaccgcccgcaaaaccgcatagagctgcctgcggctttggaccattaaacaccggacactcctcagggacatgattatcttcacaaatttcgcaacaaagatcttcccgtcttttcttccccatgtctgaaacaccgggtgttaacacggcaacccgttttctagccatctcagactgagcgcctctgctattattcataacctccctgtccactgcaccaagtgacgtagcgggcgcaagaaaacgtccaccacatccccgccaagcaccgcgaccacgtacctcccaactacctcgaccgcggaaagacccactgccaggaccggagggacgtccatgtacctgctgacgccgatgatccaccacacgccagccagcagcatcagaaccagcattagccataacgccaggccgacttgaggacgaaggaaaatccccaggaagaacgtctgtcctgagaacatcgacgtacgttctgggagcaggaaactgcggctggtagaagctgctcgaatgaatagtacacctaggttttacggtgctgtataatctctaacgaagagaatggaggcctgggtgacggctggcccaattagaaatggtcgaagcctgctcgcccaacgccagcggcggtagatggcccacagaaacacccgacacaggctccacccgatgagaaataggcttaggatgtccaaccgtattcccaggcgaaataagcggcataggaaaatttctttccttggaaagagaaaaggaatttgattttgaaccacaccgaacgtgcgaaaaagtcggcatgtcatccttcctccacgccggcgagcaaccaaggcgggcatcaaccttatttgccgacagcgtcacatggccgagagtaacggcaggtggcgagcaagacgtcggtaatggggcttcgcaaggattcaacacaccaacgggtttacgagaacgtacctgaggcctgggcaccgaatccaggagaaccttccgctcagccgccgcgggatcgaccactcgtgctgcataacgtccagcaatccgatgatagaaatcttcacaccttcttgaccactgctgccttgtcgcttgaatctcctcctggcgtataaccgaacgtctacaccgcgcaagccgataagcctccgtccaccggaaacgggg

SEQ ID NO: 71710 - DNA, 692 bp, Zea Mays
tacctttttgtatgagctagtgaattttttatagtgtcgtcgagtgcgtgaagatgttcctcaatcacaacctaattagttggaaaaagttagtaacaattagctaatatgtaagaaaatgcattaataaatgttcaacttgcggcttaattctatactgagataccatgatattgaaaatgccatcattccagatcaattagtccaacatagatagacactgacaagattacaaaaaggtaaataagacgaaatataaacatataaatacatatctcaggagagaaaaaactctattgagaaatctaataaaaaactattcttttagtaaagaacttacctcctttttatttcttgtctgctaggtaagttggcatcatcctctgcttgagatgtcgataatacaaacaatcagaggacaactgctaagatcgtttccgtaaaacatgtaagaggtgtatagtattatcagtttgatagaactgagcaatttatgcgatatggctacacattcatgttacatagcctgctgcaaacaatggacatccataatcaatatcttataggcctttaatttacttttttaaaaaggaaagtaacataatagtaagcacacagtaataaatatatttatattgaccagaagtttcattactcgcataccacatcaatatttcagaagaacacagaat

SEQ ID NO: 71711 - DNA, 580 bp, Zea Mays
gtcttatgtgatttgggtgattttgcgatgtgtatttgtgtgatactttaagactcacaatcgatgaatttgtggatgatttatgtgatgtgaatggatataatgtggatgtatatatgtgtttgtgattatattgatgttgatgaatatatgtgtttgtgaatgtatgaaatgtagatgaatatatgtgttcgtcacagttacgctaattagtagagctatgtaaagcccatacatgcacattcttgcgcgccacttcttgatccacttcttgtttgcaacctctctagctggtaaaggaacaaagctatcccattatggtttgtttgggagcaaagagattggaggggggctaaaatctcttactactcaaaattgaataggaagggatttaagcttcctcaatcattttggtctcaaataaggccttaaggtcaaaagggcaccatgggctaccaatatattggtgtaagccgtgtaaaccaataaaaaaataaagatgaaataacatcttcagattatcataatttaaatcagcccttccaccttaccagatatttctaaaaaaagtccttccatc

SEQ ID NO: 71712 - DNA, 339 bp, Zea Mays
tttgagtgccatgtcagatgcacactagacatgtcaatgttactcttaaacacaatagagtactttattgtccagtgctactacagcagtattaactcaatcacttcaaacacttttcaatttggattttgtttcgaactatttgtaggctctcttagttttcacaagtgtacgctatcacacctaactagacttgactaggtcaaactactagtttcatgccccattatagcacgactaaagaaaaataaagatcatatcactatgcaaaatgtccgataactataccgacacctataactagttgatacttaaccttctcgaccatcttttaaaaat

SEQ ID NO: 71713 - DNA, 540 bp, Zea Mays
atcgtgtttctgtccatgtatcggtggctgttggtcccgtcttgttggctagtaggataattgacttgagttaatgtcatggatttgcagcatgccagcatgcttgagtcttgctctgctacataggcagttgatagcaatcttgggtctgggaggtggtaatgtaaagctgaaaataaaagggggatggattattttgtatggttgatctggcctgggttcaggattatgatgacattttaaccggctcagattaattattaatagtgagatgctttcttattaatgaatatagtaggattgtcttacgctatatccatttgttctgcaattttgagtagcatatactaccagatgtatcattacggtgttgtgacataacaaagtagtcagagagaatgacatcttcgaccctcgtctccctacctccccctccaacctctccctctcccgctggcgcctcctcctacctccacagcctcacgccggtgaccactccggtgctggcggccaccctgcggtttgtgcattcttctcgtg

SEQ ID NO: 71714 - DNA, 860 bp, Zea Mays
cggacggcggcgtgcgcgctctggcgaacatgtattggcagtaatacccaaccatccatgctctaattcggtctacgcctaattctaactttggcgcaccactggggatcactaattgagcccgatcaccattctagagctcggtccacgtacacccgcggagcttaagacattcccgacacgttcctaatgatttagcgcggtatagcttaattggccgagctgaagggcgtcactagaatgcgagagtgctgaaacacggacaaggagggcgagggtggacctgagagcggctggccacggtcgggtgacacaacgtcacagacggccgatttggggggaaaccccaaattcgcggtctatggtggtgaatcgggaatgctgagcgttgctctgggttcgtaacaagctaacggagcaggccggggtatcaatttatagtgattaatagtagtggctccaaatttggggaagaaagctggtggccggagcaaggtgagtcaccagagtttgcataacatggcattcattggcaaaaggttgcggtcgtcacttggttatcctccacaacccgtgacgacgtggtagaatagcttaaggcatgtcgtcaccaaggtaaacggcggcacgacgacggtggtcacacggccacgtcgccagtgcggcggtgcaagtgggtacagtgaagctgactcaatccactccccctccgatcttttcacgtccgcggtaatatcctgcccgagctgagcacgaatcgtggcggatagcatggatcgcagagcggagatcgccgatggcgaatttcattgaactagatcttgttcagtcactttaccatcgcgaacacccattagtcc

SEQ ID NO: 71715 - DNA, 844 bp, Zea Mays
caatttttgtaccttcagactgttatatgcaaggctatccgcaagatcgtccttcgtcatggcgcagaggccagcttcaagcttcgggaaccccatacttctggacatctcccggcagacagataattctttgttgtctgggaggcaatacaagaagtcatcttcatatgtgccattaaacactaaggcccctttcgggtactttagttctcgggcatagtgtttagcttcaaaaaattcttcttcggataatctctttcccgaagcgtgtcgaataatataatcaaggacttcggaaggcgcttcgggagtaggagcggcagctttttcaggcaacatctgttctatagcttcttcctccgctgtcttttctccaattttcgaggatttctccttggtgggctctgaaggcccagcctcggcgtcagcctggctcattgtagcttcggcttcggtcagctttgtctcggtttcaatctgcgctttcgaagccttggcaattttccttggagtagagcttgaagcttttattgtctctagcacatctagtacactagccatcctttttctcttgggggtcgctgctagacctttttgtgtcttcggcacctccactcctgccgaagggcttagaacttctaatgttttcgtcccttcgattctcggttcttcaattttgtcagtctttggcattgcagtcggctcttcaatcctctgcgtaagagcaggtcctttggcttcaatagctgaagaagtctcaccgctaaattcaggcactatggccggttcaatgtagcgcggtcggtgagtaaggaccttcaatttttttcctcttcggcgcagg

SEQ ID NO: 71716 - DNA, 411 bp, Zea Mays
aggtggatggagtaggctgagttatgagcttcattgagcaggacttcccgtgcctctccttttggtacacacagacggttcttgaaccaaaggactccttgttcatctgtcctgaggtctggaagttgttctttgcgagctttttccataagtctcgccgtttccgtgtccaggcgttgagctttgcatatgaggtcttctagcattgacttgacttctaagctgtcgttgtctcccagacatgcattcagctgagctgattccttcttccaatcttctaaaaagttggttccctttatccctaaaggttttcggctgagggcgtctgctaccacgttggcctttccggggtggtaatggatctcaaggtcataatctttgatcaattctagccatcttctttgcggaggt

SEQ ID NO: 71717 - DNA, 440 bp, Zea Mays
aaaaaggagagatcggaacaagacataaaaaatgagtcaacaacgatggggcagtatatgggaccataatatcattaatttttggtgctgaagttctgctacatcactttccatggcggtgacagacatgatatcttgatgttacaatctataggctgcctacagggtttgccactaaagcaccctgtaaagtcgcatcggttgcctctaaatatcactctaaatttagggacatgtatccatacctctaaacctagggtgttctctctccttttccctagtttttatactctaaattacaaattaaatacataattaatatatatgtaccattttagactataaaagtacttatgtgaaaaaactaatctaaaatatattaggaatgtggtatattgtgtatagaggtaaatttagggacaaccactgtaagatataaa

SEQ ID NO: 71718 - DNA, 509 bp, Zea Mays
attcacccaggatgacctcaacatgagacagaggagatggctagaactgatcaaggattataacctggaagtgcactatcactcgggtaaggcaaacgtggtagccgatgctctgagtcgtaaatctcaatgcaactgcttaaccatgaattctcacatcaccaccttgtgcgacgaaatgagcaagctaaacatggaagtaatttctctggggactctagattatatctccatcaagccaaccttgcaagatcagatcatcttggcacaagttggggacaagggagttcaaatcatcaagtagatgctcacccagaaagtggaaaagtataaatgtttccgtcaagatagcaagggaatattatggttcgaggaccgacttgttgttcccaaggatcaagccctaaggaagaagattttggatgaggctcatctctccaaattctccatgcaccctggaagcaacaagatgtatcatgacctccgatccctatattggtggactagga

SEQ ID NO: 71719 - DNA, 442 bp, Zea Mays
agggtgatgaacgttgtattaagtttcccaaagttgtagaatttatgactccaaacaactaaaattgtagccatcacatctactttgatgatatcccaacaaaccttatagaactgccctgtaaaccatctagccctagagccttgtccgaggggagagtttttatgatctcccaaacttcatgttccacaaaaggtttgtccagctcagaaagatcatagctcggtagatcaaatgcttctagctcaatatttttgtccatgtccacatgaacaccaataaggttggagtagaattggtgaaccaactttgccttctcttcatgacttgtgactactcgatcaccataaaccaacttagccacaaatttttttctcttatgatggcgagcatgaagatgaaacaatttagaattagcatcttctttctcaagtcatgaaat

SEQ ID NO: 71720 - DNA, 685 bp, Zea Mays
cggactgctgagtcaagaatctttactggcttctcacgatactgaagatctttctgaatctgtattgcctcttctttgatgtgactttttggtgcttgcaggcatttgcggagctgggacacgtgaaacacattgtggatgtcagacatggattctggtaattcaagacggtatgctgcgggtcccactctgctaatgatgggataggggccgacgaatcgtggtgctagctttcctttcacttggaaccttctgacaccacacatcagggagaccttgaggtagacgaagtctccttcctcaaatctgagttctctccgcctgttgtccgcataactcttctgccgactctgagcttccagtaatcttctgtggatcagggcaactttctcctcagcctctttgacataggcaggtccttccagtgccttttcccctacgttggaccacatgagagggtctggcatttccgtccatacaattgttcgaacggtgacatcttgatgctggcctgatggctgttattatacaagaactccgcataaggcaaactggattcccaacttctatcgaatgttaacacacaggctcttaatagatcttcgaggattttgttgaccctttctgtctgcccatctgtctgagggtgataggcggtgctgaagtctagcttggtgcccatagc

SEQ ID NO: 71721 - DNA, 548 bp, Zea Mays
ccctcaggttaaccttaagattatgtggattgatttcctagtaaacatagttgtcctaaggtctagtggaattgatgtgattcttggatccgactagttgaagagttgcgacaaagtaatatcatgtgccaagagagcagtcactttgacaaccccgcaaggagaaagaattgatgtcagtgtcagcatgccagcagaagcagatgccatgataaatcaagtggaagagaagtctctagagaacatcagagtggttagtgagtaccgagacatattctcggaggaactaccaggtatgccacctaatcaagatgttgaattctccatcgagctaaaacccggcaccgcacctatatctaaaaggccatataggatggatgttaaggatttaggtgaactgaagaagcaaatagaagaactactatagaaaggttttatctagcctagatcaacaccatggggaacccccatactttttatggataaaaaggatgtctaggatgtgcatcaattatagagatttgaataaagtgaccattaagaataag

SEQ ID NO: 71722 - DNA, 605 bp, Zea Mays
tcatggtgcaaaaaaaaactaaggctgcattcggtttggcccattccgggcctacttccagttggaataaatcagcctaggttagaaccggtccagtatgttagcagtgttctttttaagctgggccgaaaacaatctcatctgatttcaacttccctccttcaattcttggtctggaatgagtctaggtggtctgtcttctggattagtttctgatctgaaaatagactggtgactagaaataagtaacaaggttccactcgatcctatgctgacttggttacggcttggatatggacctaccgaacgggaagagttttagccaaccaaacgcacgagcacgatctcgacacatccagccccgaataataaatcccttctccgtacacgttaccatcagctatccctttccaattccacggacgtacgctaggtgtccccatcgtgtgaccatctgatggagccgtgcccatccctattcccccctactgcccacgactgggactcctgggatccaagcgtggtggtgacctgggggtccacgtggacgcctgcgggccctttgcacactgctacgagctcgtccaatcttttatgctttcctt

SEQ ID NO: 71723 - DNA, 531 bp, Zea Mays
aattaaacaaatagcacgacgaaaacagtgcgtgcagtcctaactacgacaatatttcacttcattttccacctagcctttacaataccatccacttgctactctagctgtttttaacacttaattatagttatttaaccgatggcgtgatagctacgaagtcatgctatcacttcaccttacaattcaaattaactaaacaattccaatcgaactcgccaactagccaattgtgtgctagcctatttttcataccaccactacaccacataccgcatactcagaacaactcattcacatttcacagatatcattactaaaacctttctcgcatcgcttgtaacttaaaactaagctttactatgcaaacacatgactttcagtttaatcacgaatatcatcatcacaccacattgactcgattcaaaataaccctacatgttcatctcatgaatggagcatttcaacaatcattctaaaatgaactaactccattacacaacttgtattacgagcctacttgaccacttg

SEQ ID NO: 71724 - DNA, 302 bp, Zea Mays
tccggcttcgctccgacctactatgattacccccaatgtaagtaacaccaacgaactccaatctcttagagcttacatagacgaacagcgagaacaattacaacgtatcgtaggggatatacaaaatgatcataaaaggctagtgcgtgtgcttgatgagtctactatggcaaatcttccttcacacgaggttgaattgagagaatacacacataattcatcggctacaggttgtcacgaccagtcacaacccctttatgggatgtcgatggacatgtaccctgggcaacgacagcttccca

SEQ ID NO: 71725 - DNA, 881 bp, Zea Mays
gacagatttccctttccggtggattctcgcttttctttgctttcaatttacagcgatattgcattgtttttatatgacaaaattactctgtttttatatcaaaactagttgtcagagttcgagtccctatccgtgcattactacgatttttatatatcaaatgtttagactttaccgatttctattggttagggcatatacagttcgtgtgcggtgccgacggatctctattttctcggtgagaattggactgatgttgatggccaccattaaacaaatatagattaaacaaatatagattaattgagtgatggcacatactactactactagtttttctaccctaggactcagggatgcatgatgagtcatccgtaaactcgtagataagctaatatttttatgagtgtgctagtaacccgcaaaaattagtctatttattaggagttcgtagttaacccgtcttgtatcctaccaggattgtatggttctaagtacgtgggggtgcatgtcattttcacatcgtcagacccataaataatgctccgtatataatatagcccataaattaagaggtcgaagataaggtataccatgtggcatgtgcaatggaaaagacgtggtttcgcgtattgttaatggaaatactagggttctccatctagatgatactatattgacgaggccgcatgcgtgtggccggtcggtcttccgtgacttgactaaggacctatgaccaacacacctacttgtatgtgtgaaatttgctccggttcaaagtcgggtctctatcaagcaaacaaagtaaatagattatttcaatctcaagcagtggcaaataaaaatttgagcctttaaacaaatcagactgtatttatatc

SEQ ID NO: 71726 - DNA, 764 bp, Zea Mays
cgaatgtggaatttgagacaaatggtttatactggtccaagtttgtgccctagtctagtttagtgttgatcgttgtattgccttggagcgtgttaaaactgttggtgtgtgggaagaaggaggggcccctgcctttttataactcaagggtaggaccttacagtgtggacttgtattctcctggagggtgcctggtatgttgcctctgagtgacgtagttctcctgacatcgtccgtagggtcgtgttcagtcatactcccgttatggcgtaacacttcgtatgcatggtatacgggtccctatagcaagtctcatgctgatgtagtgacccctaccagggatagttctactacgtgttttggggtcgtgcgtggtgcaactttgtctatcgtcatgagccttgtgacacattcctgtatgcgtaggcatacacccgttatggtgtattgtcccatctattcctatatgcgggtaactacagagactccgacactgaggtccccacaatcggggttgagtggccccacaagtcagcggggacacgtctgggaccgtatgtgggggcctgcaatcatgccgatagtgacctcttggtgcgcctacggtatgtcgtgcctgtggtccagacgtagtttggtggagaaccatcttattatgttgatgttcgtcggtcgtactgggattttgcctcctcctcgtcgagttggtcggccaggacttggtcggttgttccgcctcacggggttgcttggcagcgacttga

SEQ ID NO: 71727 - DNA, 508 bp, Zea Mays
gcgtataataatactttgcacgaggaagtgcacgtgttgtatgaccaattacatccaaacgtgccactggaggttgcaacaatgggagctagtgcattaggagcagctggtggaggaccttatggggagatggatctctttggagcccctccttccatgaacatcgtggatgatcattctcctgaagctagcagtggagcgggagcagccaaggacacggatcactagattagtgtagtagtacgtggtttccttgtgtaatattaataaggaaaagtgagttgtataagttgagtatgtataattaaaacaagtttggaataatgtaacagaggttatgtaatcgtggcatgtaataatcaagtaagttttcttcttcagatgccgtccagaacccgtgctcaggatggggctagaacttcccgtggtggggaggaaactccgacccgccgcctgtacctcccacactggcagaggctatcgctgccttaatcaatgccactgctga

SEQ ID NO: 71728 - DNA, 463 bp, Zea Mays
gttgattgctccgttagtagggtatagtggtcaccctgagtcgagtaagcatgcagattgataataaatagttcaagtgcctttgagaatgaaatctttttattgatgattaattttccgattacagaatataatgctgccccgatagcttttgaaatctagctaggggtaaaacttcccgagatgctctatattccatgaattccctatttctgtgccatccatttgagtaagccgatatgatcctaaccgagtgacttctgctaccatgaatggcccttcccatagtggcgataatttgtgtcgtccttcccccgttagaattcggtgaaggaccaagtctcccactgcgaagtatcgatgtcgtatggccttatcatgatagcgcctcagggtttgctggtacctagctgactgaattactgtattcaatcgttcttcctccaatatatcaatatcctcc

SEQ ID NO: 71729 - DNA, 408 bp, Zea Mays
cgcttatatagaggcaaattgtactagtgtttatacggtgattttgtctaatcccgaaatatatctctaggtttaacctgttctggtggctaggatcaatcttacaaggatagcatgaggccggaggagacggtgctgactccatatacaggagtagcatatatacgctgcctgagcactgaacaacaatctatatacgtgtgagccctggaagtgctgtttgtcaaccaaggcacatgggcaccaatcatgccataaaactgttgagcggcgtgttaattggtcatatatccagcctcagcatcggtcctttgggtagtaggctacatatttggaacttgcgtggccactcgaaatgccgtagctgatacgttgctgccggtgctcatgaaaaagggtcgctctcac

SEQ ID NO: 71730 - DNA, 629 bp, Zea Mays
ctttcttattttatggtattgccatacaacattgccaaaaagaccatacaacatgtgtaggtgattacgaaaaaataaccttctttattttcggggctaagaagtgtacaagaagtgctaagtaacctttcaaataagaagtgccagcatgaaactgtctttcctattatatggcatattttgccataacctatctcagtcgtacatcactaaactgacatggaataacatacatatatttgatagttaaaaaaagggaaaagtttgtcataggttaagaaacacaggatactaatttgtatatattggtgggtcacacagttgctttggaatcatatagtgtaccatttgtaccaatcttggcttccctctgcaggacttgggcttccatttgtactcaagcaacaaggtcatatggacatttcaggggagtttctggctcatgcccatgacaaaagttaccagggctctagggaccaccggtgttttcctatcagcaacctcaagccaggtgggtcaagacccacatgtgttctggtcctaccttgtgctgcaagaggctgcacagcttgttgccagcaaggataacactggtggcagcatcatcggtgatccaacgcaggttgccg

SEQ ID NO: 71731 - DNA, 846 bp, Zea Mays
cctttatattgcaaatatcgaggttagagccaagcttgggcaagacgaaaatctgcccgaggtcgcgaccgagcccgctccaggattcgaagatgtgcacgccacagttgaaggagtggcctcctacgggattcgcggggagtaggtagctgaggcagagctcgggcgaggtggagtttgtcttgaggccgaggtcgactttgggtgaggcagagtttgcgcccaaggttcagcctgcgttcttgtcgtatcgtacgtcccatcgtgggttggtagaaggcgtgcgggaacagtggtcacatgcgtcattgtagttgatgaagcttgttaggaccgcggtcttgttgctcatgttcaactgcaactttgtgtggggtaggtatgcgcattgaatgctcttgtcccctgcgaacttcggctgagccttgccttggggttgtcttccttacccgagatgggctcaggcgaggcggagactgtcgttctggggagaggggacctcggccgggacaaggattctcccgagtacacaccctgttcgagggcaggctcgtgcgaggcagagttatggtgacccctgagaggggcctcgggcgaagagtgagttatgatccttcgtcctcggggaatgtgtcttgatggcggtgtaggggttaagcgtgttttaggggcgtaatctaggtgcccctaattacgatacccgacagtacccccgagccctccaaggaagtgttttgacacttgtttggaggctcttctattctccgtgcggatacgctgcttaaccttaagaagtggaagatttttttctgatgatgtgctcgtgtgtgcttttaccttgctcac

SEQ ID NO: 71732 - DNA, 1073 bp, Zea Mays
aattgggcagtatggccctggatatcgctcaccatcataccatgacactagggttcctttgcttgatagagctgtggacaggacaacagaactgagaaagaaacatgaggaggcctggaaagaatatgggggcagtcttatgtctgatgggtggattaatatgaggcaacacgacataataaattttctcgccaatagtccagtaggtaccttctttcttgagtctgttgatgcttcatgtgaggtagctaatgctcaaatgttggtagatttactggagaagcaaatcaacaagattgggaaggagtatgtggtttagattgtcacagacaatggggccaacttcaaggcagcgggtaggattctagtggataggatgccccatttgttttggacaccttgtgctgcccactgcttggatttgatgttggaagacattggtaagataaaagatttcagtacttgtatcaatatggcaaagaaggtgtcaaggttcatctacaagcatgggagacttgaccaaatgagagagaagataggtggggatctagtgcggccagtagtgactcgatttgctacctccttccttacattggcaagcatgtataggcataggaatggaccgagagctttattttattgtgaagaatggcatgttagtcgattctctactaccacagaagggcaacaagcagaaaatattgtcctgtcggccccattttggaataatgttgaaaattgccttaaagcaacacaaccactacttgttgccttgaggatagctgatggagatgagacaccagcagctcctgaaattcttgcagccatggatatggcaaaaagcacaatcaaagaagctttgaaagacaaccaaagattacttgcagaggttctaaattgctatgagaagagatgggaaacccaaattgagcaaaaattgtatggggctgcacagttcttgaatccagggaagttttttgccataagggacaaagacagaagacaagctgcaaggctaagatccatgtttaatgattgtatgtggaagatgggtgccaatgataatgaacaaa

SEQ ID NO: 71733 - DNA, 552 bp, Zea Mays
ggcaacaacaggtgctattgtaaactttggtttggagagaccattcctaggcatatccgctaagacctcatttctgtgatccaccatcacaatcgcacccccccccccccccccccccccacccccaacacacacacacacttcaggaccactaagaaaagggtgaggaaaattccatgttcagttttctttacttgatcttgtcctatcaactacatgcatgtccatttttcagtcttcacgttcgtcatcttcatggacaccattcaaccccatcaaacattttaaatttctttaagattcaaagagccgtcagtcccatataatttattgagcacagcatgcactcggcacttcggcagtttattcctgggcatatgcggaaaactggttcagttgttttataatctaatagtatgtgtttacgtactgtcaatacaataatattttattaccacggaatgggagctaagcaaagatgatgttcccctggaagccgattggtttccacgcccgctaacacactggcagcacacgtatccactccaccag

SEQ ID NO: 71734 - DNA, 341 bp, Zea Mays
cctcggtgtattcttgaaaaaaaataaaactagggtctcagtacagaaactacaatgcatttaccatttcttctatgcctttctttatgattttttccaggagctctgaaagtacaagcaacttgccaaagcttagaagaaatgcatctagttcctctgatatgagtagcatggcttcacaaggtccttcaactaatacaggtcataagatgttcttttgaaacacttgtagtggcactggcacatgattaagaattcatgtccctggattctcaattttcctgttcgctatttatgagcaaactgcaaggtcacaagctctaatcctggctagggcaata

SEQ ID NO: 71735 - DNA, 494 bp, Zea Mays
aggtggttagtgggctgagcagtggagcgctagataggctgagccgagaaaaacttgaataaaagcctagtttccattggatttggccccacctaatatacaaaagtttctttattttgatgcatatctaaacctaagtacaagtggttataaaaattgaggtggggccatggcccaccattaccacccctcatgtccgtctctctggtgacgaggaggctaggcggcgctagcaacaagcgggttaggtcattcaataaccaatcaatctatgactgaaggagcgggtgagctacgagtaggctatcactaggggagggaatctaatggatctaccaattagtcaatgactgaaagagcggatgagtcacgagtaggctagcactaggggaggggatcgaacgactctatgggtattggactgagcagtggagcgctagatagtctgagttgtgaaaaacttgaatcaaagccttgttttcatttgatttggt

SEQ ID NO: 71736 - DNA, 539 bp, Zea Mays
caggtttctgcatctttagcttcactataggattctgcatctacagcgataccaggctttttcagcaaggattcaacatcatcttgtgcaggtgagttctcagcatcaaggtcttccgcaccttttccgtcgctcaatgatggttccagtgatttctttgacaaatcatttgcgtcagtattacccagagaaggatcaaaccaaccactccagcctcctgtttcagtctcttgtgaattttcttgcgtagacaatttttgtctactctcctcgtcttttgctaaccactcagaccatctaagagccccatcttcccctattctggcaccaccactgttctagaagtgttcaaagcgcctttgtttactgcttgtcatcagatacagagctaaaccaaataagataaactccatttttgtctgaaatagcccagttgctaattcccgatgtcctgtctgccacttaaattgccacaggttaacaaatatatccactaaccccacttctagctgaactaaagaagaagatttcaaatccat

SEQ ID NO: 71737 - DNA, 422 bp, Zea Mays
aataatgcttgaagtttgaagccttcaacccatgcattgccgacttcagcaattgagttgacttgctttggttaaccaattgcgattgacagtctgcagatttgtttagttcaatgcccctacgtaccatttggtggctacaaccgaaattcctgtgtcttggcgatttggaaaacaaatttattggctgcccatggcagcatgatcttttccaactgattttatctcaacatggatgttttgggttctgaacccggcctcagatttcgtacgaatttatgaactctaaaccattccaaattcagccatgtggccacatctaatgtttctgctcggccgggatctgggaggcagtccttcattagtactgatttcatgttgacctcgatatttttcttaattaactttaattacactgtcac

SEQ ID NO: 71738 - DNA, 608 bp, Zea Mays
ccaggttccaggcaaggctcgagatctctttgttgcggtcttggtaagcgaaataggggatgaatcaaataccatgttttggatagataagtggctccgtggaaaaaaggatccctgacattggttctacattatttgaatcaatcctgaagaggattgttgacagaaggactattcaggaggccttaactaataggagatggatttcagacatcacaggagctttatcagtcggagctttagtagactatctccatctttgggaattaatatccagttttcggcaccatcctggcatagaagacaaacatattttcagcttggcatcaaatagtaaatattcggcaaaagctgcttatgagggggtttcataggatgaagctcttttgaacattacaaaagggtgtggaaatcttgggcacctctaaagtgtcgtttcttcctttggcttgcagctcagaacagatgttggacgactgatagattagcaaaaagagggttgaatcatccaaatagatgctccttgtgtgaccaagaatctgagataatagataatttgctagtgtcttgtgtcttcaccagagaattatggttcttccttttaaggc

SEQ ID NO: 71739 - DNA, 875 bp, Zea Mays
ctcacgctggctcccggctggtcaccggggctgaaggtgggggctcacgtcgacgaggtaagttcggtgtccaatttggaggatgaagaccgtgaggatgatacagcaggtgtcttctcagtggattcatcgtcggtggctgccttgacggagggacctaggggtcgtttctgggtccttcaagctgagggagaatctgacgatgactccaatattgagcgggatgttgtcggtgcggagaggcagatgaattcggtctctcccatggccaacaataatcacagcagggatgtaggtactgcgttctcgagcacgggctcgcattctccgggagtgctatcgttggaggtgatgcacaacggtgagatgcgggggtcgtcgtgcggcagatcggtgagtcgccaaaatatgcttgaggaggaagcaggttgccgtccatctcgtgcttcggttagcttgaatgggagtcgtcgggcgagagcatggcctaccatggcttgccctctgaccactccttctcccaccgacccgaggaggaagacaaacagtgtggggggtccacatgtcagcggactaaagtaccccgaagaagaaggtagacagtcgcagagcgtaacagagcgccagcctatgggcctgggcagtaattacggattagagcctcagcagaagttcaatcgttacaggccctacaagccgcctaatggtcttgtggcctttttcgaaaagtctttctcgctgttctcactccgtagagctcctagtaccagtactcgccgcttaggattcccatcctacgctgcagcagtcaaggctaggccaccggggacgatggagaagcagaacccgcagccgccggctcaaggaggcaagat

SEQ ID NO: 71740 - DNA, 469 bp, Zea Mays
cgaatggcagtataatttcttggtgattgggggcacaatgctcgggtgtacgatgttcatatgtatgtaccatagaattcaggatcctcatatttcaatatttatttaatggattgttgtttactacaccttaacctacctgtgggcagagatgatgttgaagcttggtattatattgacatgacattgtctctgtcagttcaactaaagattcaaactgaacttaagctttgaagtgatctgttcacagtggtcactctaagctctgactcttttagatctatagcactgagccactgagctgtcatggacctgatttttacagttaccagttgtactagtgtaatagcttgtccagtcagtttcttttgaaacagcgctacatttcggtgagggatgtggactgtaaaatggtatcatcattaagaatgctggttgcagtgggtgcttgtcatcagaccatgggcaa

SEQ ID NO: 71741 - DNA, 1064 bp, Zea Mays
cagggatgtatggctcaggcagcggagaaagagcagctgtagaaaaaatattcacgtcataaaccacaaatgattatccgaagcatggataagtaagtaagcaagatactttcgagtttcttcaatcataggcttctctatacttctgtgcttcaacttgtgccactatctttgtttcaaggtcaacaatatgttttgcactctggatatttttttttaaaattcagcatgatcctcaatcaactcacttgctaaggtgttcaagactttttctttctcttcagcttgatactaaagctcaatgacttcggaccgtaagtttctgaaggctatccaagtgctttcatcttcgacatccttcttagcttttagagctttcctcagaataagtcccaatgtatcattaagatcgaaaaattagccaatcaaaatttgtttgtaaaaagacaatgtgtaaaactatatgtcgacctttaaattgttataagccaagcaatctacaagttgatcattcgatatgacagataattcgcattccaactttggataacccatcatatccatcatgtcacgacaaacttcaagttctttattgtccggaaggcaatagagataaccatcttcatcatttctgccataatcaaggaagcctgaggggtattttagaccttcaacataattttgaacttcaacaatctgtttcacaattagttttcccccagaggcatggcgaataatgtacttgcgctgttcaaacgacgtctccttaattactacttcgtcttccttaggaagtggaacaatagcctccccaccgggcctcgcaataaaatatcatgaaaacatttacctttaatcgtttcgatgtgccccctctttacggtcgacttgccgaaaatgacatgacttggcttccaagctcgctcttcggtcgtcagcatcctcttcaaaatcaaagtcctcgctatcttcagaatcatctaacaatctgatcaacatttcatcagtaatcttctcaacattggccctctccatggcttcccgaaactcaacatgggcaagct

SEQ ID NO: 71742 - DNA, 329 bp, Zea Mays
aggttgtagtgccctcataggtacaacattattggtgctctccaatcttcttgcattatcatgctgactgactgcgggttgtcgttgggctgcctgatgaagggtatctctatgacttgataaaatatgttggaaggtaagggttccccttagtcatggtcttcgctagtatatcagcttcttcgttcttgcctctgacaatatactaaattgtgaagtcgtggaactatttcttgagacttcgaactaccaaaaggtattgtagtagtaccgactctcaggctgcataatctttttctatttgtcctgcaacaatcctagaattggtc

SEQ ID NO: 71743 - DNA, 462 bp, Zea Mays
gcaaacttattgttatcattaccaaatgcacagtcaatcattaagatttagactaacatgcacaacgctatttaatccataagggttcctcaggggctcatgaataccattcgtcgtttggagccatttgttgacttcagatcaacaagtaaaatgaccatcagggtctaacgctcacaaggacgttcactggttgcattgtgcttttaagcacataggaaaatatgtgtgtagataatggtagtaaagtgcacgacatcaggccaatgctgccaagcaaatatttttatatgcatagatgtatagtccagctcgtttttatcattgcccatggtttacccaattactcatactgttctgaaattgggtatcaatttgtgcaacatttttaggtattataattttgagagagaatttataacaatagttaataatttgtgatgccagcagggcaaacatttc

SEQ ID NO: 71744 - DNA, 390 bp, Zea Mays
gcaacatgctcacgcttacttaactcagggtgaccactataccctaccaacggagcaatcggcttaagtcggcgacgacttaagacggtgcatcatgctcacgcttacttaactcggggtgaccactatgccctgctaacggagcaatcgatttaagtcggcgatgacttaagacggtgcaacatgctcatgcttgcttaactcggggtggccactaaaccacactcacggagcgatcgatttgagttaatactaacttaaactggcgcagcacactcggcgcgcatacagttactcatcccggggcgacctctatgtcccatgaagaagtctcgaaaccatcacgctgcattttacttctacaaatttagatactgctgaattctaaac

SEQ ID NO: 71745 - DNA, 502 bp, Zea Mays
cttatcggtaactttgctcaacagtctgttgacaccttcgtcaacggcctcgttagcaattctagttacatcaagcgcccccttcagagatggatcagcttcaggatcgtatagctctagagggggagaaagcccagctgcatcaaaatacaagtatctgttagtaccgaagctacaataatttacgaagctaagttgtaatgaatatacatataagtatggcgcattcagtagtctcttcagctctcttagcctcttctaaggcgtcatgagactctttctcatttcttctaatagcttcgccagctatttctcggccacccttcatccatactttggaatagaactttccgcttaatgcagtagcgttggctgaagggtttttaatgttatcagccgaaagcaagaatcctggttgagtcacatccttggcatgttcacaaccgaccttttccaggactgacacgaccccttggacatcaacgaaggcacataaatctca

SEQ ID NO: 71746 - DNA, 814 bp, Zea Mays
gcctccagtacgtccatgcgtgtaataagtttagcaactcgtcgatcaagctgctcataggatgtcgccgcagagtcctggtattttttaaaagcttcagtcatcgcgcgcatcatctcctttaattccagctgagagacacactcatcgtcgttaagcttaagccccttgtccttgtccatttgattctttggttttgtcattgttagcacaaaatagagacaaaaaggcaacaaacaatgtgaaccctacaactatctcttagggtggtggtggtggtggtggaatacaaattatgaagcgtcttatcccgctcttacaacgttcttaccagcactgcaggtggcaaacagtgaccggtgtgactgtccaatgagcgtgtgtgtgattgcaaaggagtacctgttctgctcaagagaaagctggagttctggaaaggctgactaaatatatatatgtggcacacaagtcagtaacagatagcaatgttgaataagtgttccaagtactcgtcctagttgctggcctagaaaatgtaatagaacagttggaccaaggcacaagaaaggaggtacaagtatctaggtgcagcaagaaacatgcttgggctaaaataatcacagaggtgcacagaacaatggtgtttctgtttatgtgctactcttttctttttttttcttttttttgagattttttcaaatatttttttatatttttctcttttgcagcagcacatatgaagaaaacacaccaagtttcagatttttttgtacaatgacgcgtcctctggaatttctacaagtttgccctaaaa

SEQ ID NO: 71747 - DNA, 337 bp, Zea Mays
aaagtctaccatatactgaattctcatataataatatttatcaggccagtctgaagatgtcaccttttgaagctttatatggcaggaagtgcaggactcctctgtattgggatcagactggagaaagacagttctttgggcctgaactgattcaagaggcagaagaacaagtccgtataattcgggagaatttgagggtagctcaaaccaggcaaaagtgctatgctgataatagaagaagaccactagaatttgaggaaggagattatgtgtacctcaaggtgtcaccacttcgtggaatgaggagatttaaagttaagggcaaattgtcccctcg

SEQ ID NO: 71748 - DNA, 427 bp, Zea Mays
gttaattggttgttgtaattttaatgcactaaatgatttggataaaatttgtaaggctacttgctagtcctcatgtaattaatttaactctaagaagtggtaaagtgctagaatgattcaagtccctagagtgctgcaattcttgaattatatagaaactgggatttattgattgctgttttgggctgcacgcactgtttttattgtgctgtttgtttgataaaccaaatcatgttttctgtagaaaagtcatatagaagagttgtagataacatgattatcttgcttgtactgaaatttgacagccataaacctgattgtttaggagttgtgcttttcacaagcccagcacctgaatctgtcgaatttctgaacagatttcagagattgcaatggttgcttaagttaatcttgaaattagttattg

SEQ ID NO: 71749 - DNA, 721 bp, Zea Mays
aaattatacgcctcgtccacgttactaaatgtcataccgactttaggtatcaatcttatatcaatattgtccggctgcacacagaaatttaacatttacgattcaatagcgactaaatctaacgtaatataggtacaacattacagaaagtatgtaagaaaataatagtatcataattgagagaacttacatggctttgaagaatatgaggtgtgtcctgttcatgcgtcccaatatgtctcatggggatgtgcttattgcgcctatcacgtctgcccattttgtgtgctcatcaatatgtcttggtgccctcaatgccgcgggggagtaacagatacaccctctgtgtaaccggtgatcgtagacggtacaggatgcatgtccattggaataggcgtaccagttgatctatgcacagacactacaggttgcatgtcatcgccagcgccggtgctggacattttctcgccgttaatcgccgcccggtgctctcccttccgtcgccgttaaacaccgccaatatcacagatacgaacgtggacgagcggctgtaaattagaatttatttcctcccgtagctgtccctttatttacgcgattatgtagcacgtctttccttatcttaaaccggtggagatttatataatgcatggtttatgctatcatgttacacagcgttatgcagtcgtaaacagtgtgcacatggtaatattcgttcccg

SEQ ID NO: 71750 - DNA, 294 bp, Zea Mays
cgagcggagcgcgattttcacgtcgtaatttaggcaacattcgtcgttacgaaatagattgatgatgtacgataaaatttgtacctatttacgctgtttggttcacgttttacgctaaaatttgaccaagccaaaatccgtgcacgatcgaacgtgatcaattttcacgccgtaaattttggacctcattcgctgttacgaaacaggtctataatttacgtaaatttcgtattcatttacgttgttttagctcacgttttacgccggaatctgccctagccagaacccgcgcac

SEQ ID NO: 71751 - DNA, 647 bp, Zea Mays
cagggagtcaccattagtagaatggaacgccaccccaaacggtttgggtgtaccacagctaccttgtggggtcgatcagaacagacctcagcaccagagtatcaacaatgacacacataccataaaggaccggtttgtgcgccataccgagcgtatatatgtccgtatacggtggaaagcgacgggaagctcacaatgatggcccaggccacgtcaagtatgatcgttccatgagactgactcatgggaccctccacgcactacagccaagacgtcagcaatagactcgctacagggagccaacacaatggacgacgccatatcgggggtatggccatgcacgaccctacagaagacccatcacatcgacctaggaagatatatgtttctctttatctctcttgcttgtcaaaagtaaggcacctatgtaaggtttctcccttgaaatataaaagggacgacactccccctactcacacacgagcacactagttgtaacatgccacaaagcaatactacgatcagcactatactggaccagggcgtgagcctaaaccagtataaccccactatcttaaacccacgttcgagcctcaacgattcaccattcggagtgagcctatgctatcatccccacagaacacaaa

SEQ ID NO: 71752 - DNA, 304 bp, Zea Mays
cacgattccgcccgacgaagccacgaccacatccggtgagcaccgcaaatccacccagccaccacacaggggaactagttcatcagcgtaggcgtgggtcgacggcggcttcatgttttctctctccccgcaacagtggcttggcaatgatactaccggctcggatagactgagggggatggggccgcttggcactactctttatggtccgcagaccgagccgcaatactagggtaacggtggttgaaacggcttgcccgagaaatccggccctgcgattcggtcaacggagtgcagtgcaagc

SEQ ID NO: 71753 - DNA, 312 bp, Zea Mays
gaaaaatgttgaagaacttcgcacatccaagaaaagatgctttgaaaaatccttggattgtgtgaagaaaataaaagaaagtttcgccaaagtgggtgcctattctgccgaagagaacttcatacgaggcgaccccgaaggtgttattgaatggataagtggagaggccgagaccttcgaagaaattttaagtgatcgcggggatgtttgcacgttttccggtgcgtggggaatttcagccatcttggagaaggtgggatgtgatcatatcaagaccatggcccaggccgaagctgccttctccgtagacga

SEQ ID NO: 71754 - DNA, 956 bp, Zea Mays
attctgcgaaaggtcaggggctaacgtgtaagaaaacaggaccctcataaaacgttccctagtctgtcatggactgtgggttggtttgtaatatccctaggggctcttctataagatagccatagcgaaagggtacgggcaaaccctagcggccagatctgatcctgacggctaggattatgtttttgtttaaaacaaatcagtacgcactagcagccgtaggatcgaagatatccggtccggatctgaaatcgcgaaggggtatctactcatttattcctgggcgcacatcgatggatcaacgacctagaactacccatgccatgatctaatctccctcgcccgttctggatccgatggtcataagcaattggggcgaattgctttccttatctctaatctcagtcacccatcaagcaatcgaggttgacggacgtctccctcgtttcagtcgagcaaagcgacgctgccctactccccgtagtggaggttcgctggcgcacggtgatccaggattctagtaccctatctgtaatccctgctagtgctacgctaagctgagtgaataccaaggatagtgacaggtaccacaacagtggttagatcacacagaagcttgcctccaatggcgcggcggcttggccgagagcaccggagttggacgacaaattcctagtcacccacacgacaccacgcccgaccgcgccctcggaagtgttctacggactacgggtgatgtcgaacacttttttaccactcgctgaggtcccacagcgacgaggctcgactctcaacaatggcgattctctccctgttttctaatggcgagggcaatcagagacttcagcacaaccggacggaggggtgaggggaggactttgttttgtgccccagacagaaggggactggcgcgagccgtttggattacgctcaggaattctgcagcgcaacgagcg

SEQ ID NO: 71755 - DNA, 428 bp, Zea Mays
tctcagtctttggcacatattttccaacaatcttaatggcctctgactccacctcccgcacgaaggcggccgcatcccacccacacaagtccacagcgaaggttgggctccgcaccattttattccccagcgtcggcatccggcgaggtctaatttcgccaaaaacccactcgtgcgccagcggccacactccgcaagcaacgaactcctccagcaaatcatggccgctgctcagtcgggccacgtagcgaagggcctgctcatcccgatcccccttcttcaccttaaagtgtggaaaggccacatagcaatgagagcacaaaatggcaggggccaaggtaggcaacccttcgacatcctcgggcgccacataaaaccaaaaatcccactagttaccccatttattcttggcacaaggaacagtcttg

SEQ ID NO: 71756 - DNA, 378 bp, Zea Mays
ctcattgcatatgaagacatgacatggtgtcatgtggctatatggagaagatcaagagacatggcttggcttcgatgaaccaagtggctagtgtgaagggcaactcaaaggctcattgtgagggaccgcgtggcggtgaagcaagagcaaggacttagcaccgatggacataaaagcaatggtgaagagcaagcaatgttgagattgatgaaccaagaaggccatgcgataacatggagtggatcatatcattatagaattatcaagacatttgttgatctgggcttttgatcaagtggcttgatgatgatggtggaggaacttcatgctatggacaaatggtaaaaggtatcatggttggctacacttatggatgcc

SEQ ID NO: 71757 - DNA, 1073 bp, Zea Mays
cgagttattgtggaaggcccttgatcgagtcgagcccacggcgtggttaatcgaacacattggcacacgagccacatgctctcgacgatcgatgatctgcatgcatttaccttaataactaggtacaacaaccgcgttcgtttcagaatctaaccacatggccggcggcgtcgggttactacgcaccacgaacgacgatcgctagcttgctcgttgacctctagtttgcatgctttgttattaatcggtgaattagtttctactacaccctattattgagtgattttattagatccttaataagaaatgggatgaaagcgggtaaaagtggattctctactaatcttgactaaaatacagatcgagtgaaggagagagcaaggtgaaggaggggattttttttaatttcctaccctaaaccctaatcccacctacctcgtgatatgaaagtctgtaacaatgcccttgacttgcatggtggtctgttagcccgatcggacactggactctggagcacgccttaacagctcgtcctaatcaattggacagcgctcccaggccccatctcgagcacagtacagctggtagtagactgcgtgaccaccaccggcgtgtccccgtcatcacatgcatgcatgctcgcatccgtcgcctaaacgacccttgtattactggaccatatatatgcacacacgccacacgcatcttttcattaatttcactgtgcacgcatggtggtatggatacatgctgcatagtactcctactactggagtagtggtatttgtttgatacataaattacaggacaggaggagggtgtgtgttgtactctcctggatcggagtcggagtgctacgtggcagcaccagacaggcagggagacagttaagtactccaaatttttaatttaattaattagcctgacatgccagctcttttccactgacatactgccttgttatttcgggcggtcggtttctcttccacgccacgcgtgcccaattcactggttctctcgtgcatgcatgtctgactatatactaattggatggatcctaatctatatcgatc

SEQ ID NO: 71758 - DNA, 512 bp, Zea Mays
acaatagatgtcgtccatataacctgtcaatacataagagatacacctcgatgtctcaaccttttcgaagttcggcaagaccaccacaccttatcttttgaagaagaagaaaaacgacaaggtggcggccatcaagataattaaataagcaagcgaacacaaaagggatcaaatgattttggatacaaaagacgattatttcaaccatgaagagcaccaagaaagcttggatcccaaaggggaaatgataacaccgatggactttagagaatttagaaacttggtaatgttgggaagcatgtcataggatgaatcatttggatcacgtcattgccaagaaggttagtgaaaactatgaacccaaattcccatacccatgttaggtaactagatttaaattctcacaatcacaagtggtatctagttcttttttatgtctagttctacatatgtacatttaaattattgtcatgcatacattaggtaaatcatatgatttgattgctcagttt

SEQ ID NO: 71759 - DNA, 578 bp, Zea Mays
agaagagagatagtaggaagccaccccgcgtcctcgccatcggtcggccttggtgtcgggtctggggagcacccaatggagcagcgctattcatcggtcaaccagatacggcctcggactgcgcagtgattgccccatagttgtcgtcggtgagccacccttcttcctcgtacctctttcttctctgctcggtatgcattcgatgttgggcgttgcagtgaggatggggcggatatgcgagtccacggtctcgtccacggctccgctggcgtcgtctgacccttctgtccatgcccgctccgctgtactagcgcttgcgctgccgtcgtggtatgtgtcgcggggaagaagacgagctcgtggccgttgccttcacgatggacggtctggatcggaacctagatagcgctaggttatatgaaatcatatcggtttgattctaatcgagtggccgagatttggtaccggttcggtatagataggttctaatctgggaccttgaaatttgatcggatgcccctagctcacccgtaccccttcggccatgccaatttgcgtaaaagccctcctggaatttg

SEQ ID NO: 71760 - DNA, 324 bp, Zea Mays
aatacaataaattgcctcagtttttatgaataaacacctcatttgaccatacatgggagaacaaagggcaggtggagaaatcagattaaaggatagagtatgtttggttgcctgacccaaaataaaacatagacaggaagaaaaccaagagcaaggaaaacaaagcagtaagtcaacctcccatggatggtcattagtcaaatatatttcatcacaggcaaaattcacaaaatgagcaaggaaaacaaagcaacaagtcatactctcttgattgatcatcattataaaacatatcatcataggcaagtaaaggcaacagttaaa

SEQ ID NO: 71761 - DNA, 282 bp, Zea Mays
aaaggtcgaaatagtttacaattttgttttacaccagaacatctctgttcatgttggttggttgctccaaatcatctgagatgtcgttcaaattaagcctgcccgtgcctaggttgctccaacaacaatgccatacttgtacctagacttgtacgaatgttcgtgatccaaactaaatgttctgcactatgcgttcaacaactaaggcggcttatctatctccatacacatattcaaattacagtctatattgcaaaacaatgttttggatgaccatataaa

SEQ ID NO: 71762 - DNA, 447 bp, Zea Mays
ccgaagctgaacatcaaaagatattacctatacgttttttgcgctctacagcctcttcagcttgtcttgcttctactcgggcgtcatgggtgtctttttcacttttcttcataatttcatgggccatctctcggccaccatttacccagatatcactgtaaaatttcccgcccattaaacttgcttcagctaagggatcttttgtatcatctacggagaaggcagcttcggcctggaccatggtcttgatatggtcgcatcccgccttctccaagatggctgaaattccccgcgcatcggaaaacgcgcaaacatccccgcgatcacttaagatttctttgaaggtttcggcctctccacttatccattcaataacgccttctgggtcgcctcgtatgaagttttcttcggcagagtagacgcccacgttggcgaaactagttttca

SEQ ID NO: 71763 - DNA, 542 bp, Zea Mays
cacacttctcgctgtgcatgccgctgccactgagtcccctctcaggttgttgagatactaacagaaccacccctagctcgtgcttatcatcccatatcaccgcctcacctcgcacccctctacttcgtgcttcgattgggtgatagccacgaaccccgtcgagcattactggaggccgctgctgctaatccgcgctcttccaccgctcgagccccatcctgaggtcctaggaagctcacgcaagcgtgtacattccgctcctcgatcagcctagtttggtgttggcagttgtgagcgcaattgctcgccatggtcgatggagtcctcgggtgccgctggttgtgtggaggcaaggcaacatcgcctcgattcgaggtaaaatcacttctctattcttcgccctaccctcctctgcgtagggaacctttcgggatgaagtttagggcattgaatcacggaaatcgctggcagcgggagatgcgccgccgtgattatcaggccatcgtcgagtttgtgcgctggggatagaagacgacttctgg

SEQ ID NO: 71764 - DNA, 740 bp, Zea Mays
ggcgttagaggtgaagacaaggtcttttcttgtgaggagtgtcttccatgctgcaacggtcaatgggagcgtatagctagtgaaacatgtagcaaacccaggcaagcaatcaacacgtaccataaaactcatgaagccgtgtctaggcattgaatcaatgtttccaaatgtggcgatatttgttagggtacatgaagttgatcatgatggaaatttggagaaagttggtgccacgacagtaggtaaagtggacagacaacttatgggtagtgtgtagaattcaaacaacaacaatgaaccaaaattaaggattgagagcaacactcaacaaactgacctttttgaaggcgtaagacaggaatggtttcctgtagatccccttagaggtcctctctgtagcaaggaacgaagacactaaaacaattaggccataacataacgcacgcaaccaacaagagttaagggtaaataatacaaagggcatactaccaacatgattccatgaaactaaaaaccatcaaaggggtagcaacattggccagcctttcacggaacggtgtagcaactccaaaatgcactgtaatgcctggccccctagcgaatgaacgcattttccccaatagtcagcgacacaaacacacatccccacccctttataagctaccataaattagaggtcgtggtgttgagggtggagaaggaagacatgtcagggtgggaaatatgcctaactgtcaagt

SEQ ID NO: 71765 - DNA, 283 bp, Zea Mays
aatcaatcaaacgtgtgtgtgcatttcattcaaccaactacaaccttggtctagagctttaagctattgattgatgcgaaaggaatcattgtgtaatcaagaggtggagtatatgcgacttgtgattgctcagaactttaggggtagaacctctatgtatggataatagtgtgagatgatttcagatgagttttgtccacgctatcagtaataggataaagttgctgctcactggtcaccgtgacttaacagttacctacacgtgcaaactgtacaaaaggac

SEQ ID NO: 71766 - DNA, 518 bp, Zea Mays
ggtgtggatgtggaagatgatagttcagatgaaaaatcaggaatggaaggaagacacatgaaagaagtggattctgtgggataatatgaggagtgagtggacttgttgtgaaaaagggcgattttcattgaaactcacatctctagaaattcgaatacgacgagtagctggatcataacaacgacagcctttgtgttcaggactgtatccaagaaagacacacttgacagattgagcagtcaatttagtccgttcacgtggtggtaacaggacataacatagacaaccaaacacacgaagatgatcatatcgtggagatgtcccaaaaagaacttcacctggtgttttgccagaaagttttgatgatggttgtctattaatgagatacacgacagtggaaacagcttcacccaaaaatgtgaaggaacaaaagaagatatcaaaagagtacgagcactctcaataatatgacggtgtttgcgttcaacaacaccattttgggcatgagcaccagggca

SEQ ID NO: 71767 - DNA, 802 bp, Zea Mays
acttggtccactttgttccatttttccatctaaatataatgatacacaactctcctacgtattcgagaaaaacgatagcacatagtataagttattgtttgagtttgagctcccttgctcggctcagtagtagatattataaggggaaggtagggctattcccactcactagctcagatgtcatctgagtatgtagcctctgctcacacttatatttaaacaccaagtaggacacaaggtattgcgtgtaggcatctcaaacctttataaatcatgtgtgtgcatacaaccatgtacatgtcatggtccagttgtttccgccgtatgccccctctctctttctctctgattttctatagtacccttagtatcgtggtgtcacaacatagcgacacttggcacgccaagtaggggcttgggtacactttgttgtgttgcatcgagatggcttcactagtgctctcggtcaatggagttgtgtcctctaacatcagctctagcattattgaccatgaattgtgtcatgagcgacgcaacaatcttgcttagtccagccctatactacctcaactgtagttgaatcaagatgatccccctcttctgatgttgcccaaacatctttctcaatcagtttagttcggcaaccccttagtgggccatgtggtgctgtcgctactagccccgctcatgtcggcgatcctcccaacatgcataaacttcaagaacctcacaatggacacctccatgagcgataggagcacatcgtccttcaatacatgcatgtcactcatctagccatgtt

SEQ ID NO: 71768 - DNA, 392 bp, Zea Mays
atggaggaagttgggataaaagtctaccgtatgctgagttctcatataataatagttatcaagcaagtctgaagatgtcaccgttcgaagctttatatgggaggaagtgcaggactcctctatattgggatcagactagagaaagacagttctttgggcctgaactgattcaagaagcagaagaacaagtccgtataattcgagagaatttgagggtagctcaaaccaggcaaaagagttatgccgataatagaagaagaccactggaatttgaggaaggagattatgtgtacctcaaggtgtcaccacttcgtggaatgaggagattcaaaattaagggcaaattgtcccctcactttattggaccattcatgatctttaggagagttggg

SEQ ID NO: 71769 - DNA, 599 bp, Zea Mays
tcttcaaattcccggccaccgtctaagccgcctataaattgagccctcccctagctgcgcaacatcattgcgcacccccacacctagtattgctcccagccgatcaccagcaagctccaattttgtattcccctcaaatcagtcgaagaacaccgtgaaaccaagttcaatgtggccagagcaaaacacttgatcattagtgaaattaagttaggggaaaggcttgggatggattcaattaggtgttagtcgctcggagaccctagtcgttgccccaatcggccggcgtatgagctcgttggagctcggccgtgttcaccgccgtcggggacctccctctgcgaaggaatagaagtttgaggactcttctgcaaagcgtcagtgactcaagaaaacagtgaaagaacccgttcctagttagccagaacaccgagggtttttctgcaaagtatccagcgcgcgcgggcgcgggcgcgattccgcgtaggcctgggttgactgggctaaaattggcccagtactgttgctagtttttccttttctttttcttctagagccaaataaattctaggaaattgtagaaaaaacttaaaattgtg

SEQ ID NO: 71770 - DNA, 779 bp, Zea Mays
ccatcatagctcggaagccacgggtgaccttgacaaacttgcgcctgggggtaatcgtgagtggggagccgaggacctcacgtaattgtcgccggactccgactctcacggccgagccgccgcgcagcgagggcgagcttccttggagcctaatcgccggtaaaatcatcgcccctgcccttgttgttctattggcttcgttttgcaccagctaggataagtaaaggaccacccgagcgcgcaattgggttactccggtggaaacccaccatgagcgcggggcggtggcgccgtcgccggggtgttttgggggaaagaaccacaaccgttggatcgaccgtgaatcacgcgacggacggctcagattagaatttcataccggttagctgggggttgatcccgagcgttagatgggaatccgagggtcacgatctgataacgagtaattaaatcccctccgctgattcgtattccggcgaccggatctgcataccgcttcgattagggttagatctaatcagggcggtcgaggaggaatccaacgatcggagggtgtcgttggcctgtcgccgtcgatctcagatcgtgcggacaccagtgcctaccgattcggggtgagggtcggtctaatcagaggcgcacatttccgatcttacgaccgagatctgatgataccctttcgccatggttaaattgcaaaagagcccctactaaattacaaaatgaactcgcagtcctgacagaggaattctgagtcttaggaatagttgcgcaatggc

SEQ ID NO: 71771 - DNA, 570 bp, Zea Mays
atgtattgcatttatatagtgtccactttcattctgattttacttagttaactctgagatattcatttagatttccactgcttgtttgaaatgtattgtccattaagaaaaaacatatattgtctacaaagtggtccaaaacaatatttaagttatctgtaatttttagttactgggatgagttctctacctatttgcatgtccctctgttaaagttgtcgaaatacatgttttattgaaggttgagttatccaaagagaaaatgaatgatgaaaggttatgtcgattatgttgcaggtactgctgaactgcacacctggtcttcccagtgatgccgtcaacagtgaacagtcttttagtccattaattccttagatctgagttgtcttgtaacagttgtttgcttggccgtctcttaagaaaatttagcattcttgtgtccagttttgtgcagtttttcaacaagccaagcttgatcgagctaagtatcctgggcgtcaagctaagtatcctaggctgttacagccactagaagtaccttttttagggaagaatagcatgtttatagct

SEQ ID NO: 71772 - DNA, 792 bp, Zea Mays
cttgatcgtcaaacacatatcctacggtggacgccatcactcaccgcgccatctaatcctgtacgcccatttcctgatctacgccccaaattctatctttccctgtccttctttcttcgtcgctcacacggaggcgccaggcttcctcgcggcggagcgcaggtcgccggcgcacatcgattggccgacacacggtcccatctcgcaatccactgacgctacaccacccacggaagacgacgaacacgcataggtaacacttaccgacgatccaggcgcgcagacactagaccgcggcgagatgcagacgcgcgagtattcccagctccggcgagcaattgggaagcccccaaccaacatcgagctacctgaggtacttttatcggtagaacgcgccaatacgagctctcccccggccacgacggatcccgcggcttgagatggatcacggtggtggtgcccggtatgtccaacagagggagagagagtcgcagcagaggaaataggatcgaccgaggaccacgactcttcatataggcataaggcggtcagagtttgagcaacggaattcccgagtccacggggtgacttccgccattggtggtgaggtagtcggagtggacgaccaacggcctggtcccaccagcagtggttgatagaatttgcgcagatggtgtagtgggtcccgacaggtcgcccaggttgtcacgggtccggagatttcgccgccacgatcaccgagcatggcagcatcagattcagtctttatttgaaggagagggggaaagggat

SEQ ID NO: 71773 - DNA, 772 bp, Zea Mays
gtttacgtgtgtgcatatgtgtgttatgttttgctgatgggtaatgatggaggtgtgaggtcgagtaaactagtggtggcccatgcggggtacacgctgggtgccgctgaggctgcgacgaacccatgggcgaggttctacaccctagtcgagggcgacgaggaggttgccaatgcactgcttcttatgggattgttgtaggtgctatgaaggctctaaggaatgctactgaggctacaaagtctacttttgagcagctacattatgtgagtttactagcttttctgtttgggttgtgcttggggatttttgctaatctttgttttcttggtaggttggcgccttcactagccaagtggcgtcaggtgccttcatcaaatccatcacttcacagctgcggtcgagaaggtggagctagatactagggtagagcacttattggccaagaacatataaaagctgtaggagaagtcagctatggaggcaaagagtcgactccttttagataaggcttcccatcttgagagagagaatgcataccttagccactagctagatgacttgaaggtggcggagattaggagacgggcgaaggcgctgtctgctcaagagtgtgcagctatgttggaaactgaggtggcaatactaatggcaggatgagaggagtcataggatgagacccaagttgaggtggtgggcatgtgctttattttgcgaggcctaccatgacttggatgctgagtcggcgccctttgatgtgaccagagagagg

SEQ ID NO: 71774 - DNA, 361 bp, Zea Mays
attaaattggaaatacatatttgcttcaagtggaaggttgtggacatacagcgccacctacttgacatgatgaatggttcgtgacattcaaacacagacagacaagtctggttctacctccttaactttattggctggtcatcttcgcgtcacaagggcaggagagaacaataatttcgtcgagtggtgggtcaaaatcaacaaatgggtgccttcaaccttaaaaaagggtctaattccttgataatcctaggctcctggatgatttggaaacaaagaaattagattgttttcaattggaccacacgagtatcctgaggattcttgtccagattgaggaggctcatctgtggtgtcttgc

SEQ ID NO: 71775 - DNA, 650 bp, Zea Mays
aaacaagagagtagagggcaagaccggacctgaattgcactggccacggtgagagcttgttcacggtggcggaaacagatttggcggaactgagcaattcgtggtctttggtgagtaattggaggcacgagcgggtggattggatgctggaatacctaatggagccgaggatgtgctcaatttatagggctcttgagcggtggccggtgaatttgaaggaaatgcgcggcggccggagagaaggaggggcactggcgcagtggttcctggcaattacgggatacgaagccatgacggtcactgggtaatgatcacaactcatggcgacgtggttaatggccggaggcatggcacaatcatggtgaagggcgcaaactccggtgacagccgcaaggccacgtcgccggtgcaagtggtcgaggaagagcgaggccacagtagcccaaactcatccgtgacttgatcttttcacggccaagcgcaatctacttggcagcggcatgaatcatggcaaccggcgtgaatccgggcgcacggttcaccggcggcgaagttatctgatcctgggatattttcagtactgtaccatcagaaatcctattcagagctcctgacagccagatttatagcgcctagatcatagatttttg

SEQ ID NO: 71776 - DNA, 542 bp, Zea Mays
aataaagaaacaataaagaaaaagaaatggaacaacctgtgcttgggccagtttcgcctcatcgcggcccaagaagatccaccaccgcgctagcccggttgccaactctgtgtcagcgactggtgggcccaactcgtcattctcacgcgcctcctctcatttccctaccatgtgggccattccactgttcctcttctccaccggtgctgggactgttccgcgccgaacgccgcggaatccacgcggtggccaaatccccgcctctgtcgcgctttccctctgactataaaaccagccgagcacctgggaaccccctccatccacctgtgagccgccactccataccaccatcgtcgtgtggaatacaagagatgtttccccaccaactctgcgccgtcaccgcgggatctcaccgtggccgtggtatcgacctcaaagacccgttccagggaaagtgtgggccgcagggaaaggctcggtggcaccttcgagctttgggatcacccgtcactgccttatttgctcactggagccggtggttg

SEQ ID NO: 71777 - DNA, 576 bp, Zea Mays
caaaaaacaccttcctcgagcaagttattaaaacggggtcgcctaaatgcgtcttgcacagctagctaacacacacaacatttattactggtaccgacctgctaacattaaattatctgcctctgaagcttattcactcttcttactttttgcgagcttctgaaattcgagattttcaatgacctttagaaggtgaggattaggacaactgctaggctagtaacaccaacattgttagagacattgcaaatagataaagaatctctaggcaccaaagttattcaaggctatgcaagtggagcttgtcgggagttgtgacgaaggcaatagttgtgtcaaagtaaagaaatgttgatgaagtaaccgaagagggaaaatgtttagaggacaatgtttttgatgctgaaaatgatgttgttgtggaggaagagtttgatattctgtaacacccctggtgttacgagaactaaaactttggcatgacatcatatgcattggcatttcattatgtatgatacacctaggatgcatccactaggctaaaatttctaaacaaacatgtgtgatgatctgact

SEQ ID NO: 71778 - DNA, 615 bp, Zea Mays
cgcggaaaacgtatttgggggaaacacgaaattgggagactctggtggatgatccgaggcaagggctggtgcgttggatgcgtaaatacctagaggaactcactggggcagcaatttatagagtcttacggcggtggcgtctaatttcgagaagacgcgttggaggccggagagaggggaagtcactggcgcaagcactaccatggcatttaccggggcagtgtctcaggcgatgaacaagctacctaaggcggtctactacgacgtggtaaggctttgaggcatgtagcttggccggataacggtgaactccgatgatgctaacgcgattgaccgcggcgggacaccccacacgacggccggattcacccacactggatattttcacctcgccccgacgttatctactctccccgcgacacgaatctcccaggcgggtgcgaattgtggtggcagaccaccggcatcgagctcacgacaccggagatctttatggtccttgtaccatggcgattttcatcagacaccctgacagcgcgttttgtagagcttcattccctacttttcatgtaacaactcgatcacttgtctgcatcaatattgtcgtccaaagaa

SEQ ID NO: 71779 - DNA, 442 bp, Zea Mays
ggaaaagaaatacacaacagctggattgttaaaacaaatggagagttttgagtttgttcttgtattgcatcttatgatcagactgttgggcaaaactaatgattttgtcgtagtgttttcaaaggaaggatcaaaatattgttcgtgctatagggttgattgggacaacactgtagaaaatgaatgacatacgggacaatcgttgggacaagttatttgcagaggtagaaaacttttgtcttctacatcacatcattgtgccaaagatggatgatacattaactgttcgaggtcgctcaagaggtcgtggtggacagttggtaacatattttcatcacttcaaaaatgaaatctttaatgttgtccatgaccaaataattgtggaattaaataatcgttttgctgaaaggtccactcaactattgagatgcattgcttgttt

SEQ ID NO: 71780 - DNA, 1023 bp, Zea Mays
tctccaaatcgatccaagactacgacgtgctcaccgtcgaccactctgctgctcgaaccggccaagattggtggtggctgtccaaattaattattgggcaagcattatggactcaatacaaccctagaacaagcttcaattgggtggttatggccctggcttagcctgaccacggcggcggggaataccgaacacaatttcatgtgttccaggtaattgagcgtggacaagcatagagggtggagccgatgagtatcacgagcgtatatgggtgctgaaacacgattaagaagagtaggagcagacctgggggtggctggccacggagcgcggaagattttcacccgttggtgactgaaaaggggaaaacggtaccgcgacgggtccaagtggaattaggaggtgaggttggggctacactgtcgcaaaggactgtggattcactgtgcgccactaattttgggagaggtggagaggattctgtgaattttgtgcttcaaccgagctcactggtgaagagatgaaaacctcgtcgtgggtggcggggctatttaaaggcgcggtggtccggctagcgatccacggccgcggattacatcgtttgtgcatggttaccacgtaaagaagggacacagtgagggaggagcgaggcatgggtaacacggcggtggaaatgaccgagccacggtgaccgtcggtgaattatctccggctaggctcgggctaggtcagcgggattgcgacacgtccgaagctacctccccgtggtcgattcttaccccaaatcactcagacacatccgattctatagtgcccctgatctttatcctcgctttttcaaatattttggtgtcctgatcttcagcacttttctgaaccggccccctttcaccctccttttcttttgatttgtgttaagaacaaggtgatctccagtaataaaaattgtttactgaacaccagtcttcaaacttactataggctccttgggccaaaatcgaatggaaccaatgatatggcact

SEQ ID NO: 71781 - DNA, 314 bp, Zea Mays
tgggggaagggatgttaccccaaacccacctccgattcctcccacgttagccgaggcgattgccgccttggtgaatgccaccgcagacaatacccgcttccttagggaaatggtgggttagcagcaattccagcagcaggcaggaaggggttatcagcaaggcccccacgaaactacttatttggatttctcggaaacccgtccacccctattcgtcaaagctgaagatccactagaagccgatgagtggatacgggttattgaacaaaagtttggtcttctccgctgttcagaaacgcagaagccgttattcg

SEQ ID NO: 71782 - DNA, 448 bp, Zea Mays
ggcaaagcgtgctccaagactcctttagtagaagacatgcctatagtggcttggataggagccaatctagcattcttgaggaccaagtcttgaactggcgaggtatcgatccgaccaggtcctaggaccttgcaaaggttctctggtactcctcaagagacccttggggtagcatgtatccagcgccacctactcccctaaccaagtcagcgcacaacgttggacaattgacataaagcccttgtgcatcgtatttatcgcgaagaatgacatagcggtcaaaagtgtcactattaccgcctgaggccttaggtgtacctgcaaacaccatgtgatgtgtatgggtaaaacagtcatcgtagccacacttggggctgtagacgtacccacaagcattataaaggccgtatgaccacaccaactaagaactatacgtactcaacggcat

SEQ ID NO: 71783 - DNA, 667 bp, Zea Mays
cccaagacgactacgacgacaacgcggtttgtgagggagtgggttatccagcgatgatgctggagctgttggattccctgaaggatgaaacagggactgttgtgggtgacaaggaggttgcggttggtgccaagaacacgaacaccatgcctgatgctcgttgcgacgatgatggcgatgattgcgtcattcttgacggtgaccctgataagccggttgccgttgcaaaggaggaggggggaccgccacgagatgcccctgaggatgaactgcagatagttgcggagaaaggagaggtattgctcttacgattactagctttaatttctccactgccgttatgggttgtatgatggtgtcattgtgagccgctagcgattgtgttgtcatcgtgagtcactagcgatagaatccaaagtcgtatatgtacgccgttgtcgtttatatagcttgaaaagattttgactgggttggcaaaagattttgaccgcgttggtgcctcttcgtgaactcttgttatgtagtcattgtatggcaatatatatctcgctaccgacaaatttattttacaaacgcagctgtcgaaccacagttcattttatttctttcggtcctagtaatgttaatcctatctttggttaaaatttaacatttgcatgagcacata

SEQ ID NO: 71784 - DNA, 538 bp, Zea Mays
ctcaatgtattgctcggctgaagggtatcttcaattctgttggagccgtgtctaaagaagttgtcgaagatattcccagagctcttgaatgtgttgaaaaataagttgacgtcctcgacgaagtcataactggccacggtgatttctgtgcgctagtggcttctcgtggcatgactgctgctttcataaaagtcggatgtaatcatgtaaaagccgttaacagaccaaatttcagcctttcaccatcggacctagttgatactccaaccgaagctcgaagcataggcaatagatttatcacccaaatctaggcaaagggcgggcgggagatggctggaaacaaatcttgaaatcttctcaacaaagtacataaaatctctctacctttatgcttttattttatgtttttccttaccatattcctcattacccttgcctttgtcattcttcagggtgatggtgccgaaagctagttagccgaagctagttctgaagcgttgaagaagactttagaagctcattttgttaatatctgtag

SEQ ID NO: 71785 - DNA, 408 bp, Zea Mays
aatgagtaagacattaaatttacggtcgcccctccatctaccaacatcttagcaatcggtattccatcaatatgaccgcgcacaaagagcggctttaaatggttgaccgatttttttggcttagtgaaggcggcctctttaggactaaaatcgaatagagcaacgataggtttatcgtcaccgataatagtacaatcggcagagaacataataacatttacgtccatacctgagtgttccggcgtagctccgtagtcgaccaagtcttctcccaacaagtcctcctcctccataggtattggcacatcgtcggaggtgttgtagcgcagagcggatggtccggactcgagggatggaccgtgcgcgacatccatggacggttcatctttaatagctagactgtccatc

SEQ ID NO: 71786 - DNA, 712 bp, Zea Mays
gtgcacaggaaaaccgcggtggtcgctcttctggccaagggcagttcgcggggcgctatgggtacaggaggccgctcggttctttcaatggccatcgtggcggcttcgatcaggctgggagaggccggtccaattccaatctggttggttttgctgctggttcgcgtggtcgcttttctggaactggaacttcatcgcatctgggggggcagtatctggggtggcaggggcctcaatcagccggtctccttgccatcagtttcggatgcgcagaatttggctggggtagctgctccctccactgaccttttggctcaagcagtggcgctgttgagccaggctattaacccaccgacgcctcagagttcctcggctgctgcttccgtggtgcctggtcagtcacatttttcttgggaagataaaggaaaaggagtgtcggatgagcatcttgtagccaagcctcctgggacagtgaaaccagcagcgaaggagggcaaggcaccatactgctacaggtgccttactaaggggcatgtcatgaaggtttgcacagccaaactctattgtgacatatgtcgatctgaagcacataatactgagagatgtccgcagtttcggggagataaaccatctgcattaacgtgtggttacgctgtggatggtttgggttttttctacatcccttttgttcatcagcagattcagaaggtcg

SEQ ID NO: 71787 - DNA, 532 bp, Zea Mays
gtgcactgggtgcgggtgaattgctcgatgtgtccacattgccgccgcggacccgcctcgcaccgtgtccggcctcgtcgggtctccaattctaggtacggaaacctcagccatgtccgtctcgtttagcgctatgtgtaggactagttaatcggagtatggtgcgctggggcctgtgaatggcatcgtcgacggtggttctcgtcgccgccgcgcggtggggtattttggccggagggaagacgatgtgtggtggtcggtcaatcaatggatcaacggtccagatcatgtcgcattgtaggagggttctgtgtccactggatgtcaatcggacggtccaggatgaatctagagcattttaaatcagcgccgcagatcgcgaatccaaggggcctcgtgtgcgtaccggttcgggataaaatcaatctaatccacaccgttcgcgtctgatccaatggccgagatctgactgtaccccttcgcgggtacactttacaaaagaaaccttacgtttttaggatttagaacccgc

SEQ ID NO: 71788 - DNA, 871 bp, Zea Mays
gccgccgcgtacatgagcgcgctccgggcgcgccggttcgggaggtggatgctctggacgcccaggattggttccacgcaggatctcatcacgcggtgagtgccatgtctggtttcgcgccggggagggatttgggttttcgttttatcttatttttactttgtttgacttggcgtcagctcgtgttcgcaggaactttgcaaagctaccggtgggcgttgtgtgcgttgccgacgtgcagttcaaagggagaggtgcgcgtgattaggggctggcttgttgctcttagtgttttagtcctgatgaatttgcaactttgattacaaagctctcgaattttatttcaggcgagattgatgctctcttatacttatgatctcattgataaaactgatgaaactatctgctgaatgctgtgtaacctttaagattaagtgcttgaaaaatgcagtctgactgaacacaagtagaatcttactgtagtgtgacaactctttatcaaaataactgttttaattgattctacttttttgtggcaacacattcttaaccagttggctaaaccagatcatacatagcattcccttttttctttcatctttctaatcacataattttagtatgcactaggtgctattaagagataacaaatttaatctttgctcacgtatcatgcaggccgttcaaagaatgtgtgggaatcgccaccaggctgtctcatgttctctttcacatcacagatgcaggatgcacggaagttgccccttatgcaatatgttgtctgcctttcgataactgaagctatcaaggagctgtgccgtgccaaggttaggttatagttcagtgttgtcatgtttgctgcttattgatt

SEQ ID NO: 71789 - DNA, 639 bp, Zea Mays
gcaagttcgtttattctctaaaccagttttaaatacgaatttctaccgccaaatatttctactaaaacattccaacttatgtatccatggcatagagaatcttacaaggatttcaaaatgtcctcatttaactttttacgatttttacacagttttctacggattttcaaagttaagcataaaatctgcgctcttagactcacccgagggcccacctgtcattggcaccaggagtcttcttcaacctccagaagcccacacggacatggcagctagctcagaacggagtgggagaggagctgctggccgagatgaggagaagtgatggccatgccacgtgagtcatggacagagctagagctcacggcgacacagaagggagggagatggcatcctaagcgcggtgtgcgtgcttctgctcgtgtgcggctgcgacggtggaggagccgctccctgctggcgagctcgagtaggagcaggggctggatgtgagggtcggccatgggagagctcctgcccagcgccagtgtgaaggagaggacgagctggggagatggcgtgagggagaagggagagggatgggtgctaccatttatagagcagagctctggatatgtcagacaacagtgagcagtggca

SEQ ID NO: 71790 - DNA, 378 bp, Zea Mays
catgtgtgtagaccaatagtccgggtttatgggggcaggccccattgggtcgttgtacacgtatgcgttatctagtcacaagaaaaggaaaccgactcgaccccttagtcttgctctatggatagaacttacagagatacttggtctcggggtaaggtgctcctccagtcgtagctagatggttccccttgggtcggtgcactcccgttaccttgaagggtccttcccagctaggggagagttgtggaacccctcttggtatggtatctgccgtggggctaagccctgacccagggttcccatctgtcttcgaatcgggagcccttgcctctggcagcgatcacttctgcatatacctgtctgcagcttagacccatg

SEQ ID NO: 71791 - DNA, 388 bp, Zea Mays
cagcacacccaaaagactcgccaaggcccgagatctagcaattcctatgaagcgccggtaaggatctccagcggcggcccccaacctcaccgcccggcgagcagccatcgttgcaccaattgaccttcaagcttaacatctccatggttcccatcctgcctgcccagctaactgcataggtttcgagcgggagctggatggatgacaggggcacaaatctatctatggcgccgcacgaactgagccaggggaagggggtcacggtttatatggccgcaagcacccgaagtccgcgcaggagcagggaacgaccgccgagatcagcgcggataatctgctgcggccagcagagacgatcacggccaggaaaaacggagcccgattcgcg

SEQ ID NO: 71792 - DNA, 598 bp, Zea Mays
aaaaactttcaataggatagaggacggtggattaattataaaactattcgaggtctcttcaataattttaccatgaccgaaggggtactagccgatccgatacgttggatcacaactcaatggcatgcattatatctttcccttcccaaatcggtacgccgtgtcggccatcagattcgcgatcaaccgtaaagatttaaaacacccgaggcctaatattacgcgtacactactagatctacggttgagacgaactcaagtcgaactattattcatgttccaatactcaccctccatcacaaaatcaacaaacaccaacccatctccatcatccgtcgattgccctcgacagagcagaccttgcacgatggcgttcacaccggagcggagccgatccaacactccagtgccctgagccccaccccgcaagtctaaacaaacatgggagaggacaacacacgcggaaagtgtaatacccaaaatgtatataggaatactatattgaattttcttattttatgtgccatatttgcatcataaaaagagcacacttataattaagagtgattaattaaaacaaattatattaaaataagag

SEQ ID NO: 71793 - DNA, 422 bp, Zea Mays
aaggctcatcgatgattgataagggtaaaacatatcattgggtactctttccaaaacagggatggggtgtgtttgtggttgcacgatctatgtaagtcaatagttggaacattattattccaatatccacacgtgtttgttaaaattggacggacgagagttgacgtcggagaacgtagcaatctacgactaccttcaactagcctacaaccaaacacaagggatggcaacagggcagaagagatcgtctcgttccccaaaatttattctgtctctacctcgtttaacttaacgagcacaaacttatctccatctccaccctcgtggatccttgttccctatttcggggcctcttagaaaatactataataaaaaatattcacgacaagataacaattataaatatataaattatgaaagac

SEQ ID NO: 71794 - DNA, 687 bp, Zea Mays
ggacgctcttccatcggatgcttgcctgagtccataaggggtcacgaaggaatcgtcccaaggaaggtagaagcaaggcgcaacaaaactgctcaagtgagtgattatttataagaggacacgagaaacgacgaaatatgactcaagtcgaacacctcgtatgagatgaagcgacggttcgacactaatcgtgtgaaactatggaagtacgtgccgagacaaaaggcaccgcccgacccttcatcgccccccgtagggagacactctctccttgggggctcgagggctactttcgggggaatggccattagtccctaggacccgccagtcagagagtgtgctagggaagggagcccctggtcgctagggcccgccggtcagtcagaagagacaagtgcaccaaccctagaaggacccgcccccgtttgaaccctgtggcactgagcccggtgtcgggcatggtgaagtctgataagggaagtcaagcgtgtcggaagggaaccactcgagtggatctcgcgcctggccatagactaacccgccataaatgactattcgcattaaccacgcctagcaccaagccacaatgtgggcgctagtctgcttcccactcatgacgtacgaacccctcgagctgcatagcgctcatgacttatgagcccaaggactacaacacattaatggccc

SEQ ID NO: 71795 - DNA, 509 bp, Zea Mays
ctcccaaggatagcattgtagcatctcaggaaatccaccacctcaaattgcagttgttcagtgcgaaagttgggggtccctgaatgtgacgggcagagtgatctacccaagggggttggcctggtggttagggatgacgccatggaacaacgtcgagctagggcgcaacgctgagtgcaagatgcccaaacaatcgaaggtcccgatgtacatgatgttgagaccgcttcccacgtccatcaacaccttggtgaggcgctttgatcccacgatcggtttgacaatgaggggttaggtcctgagatgtaggatcatgtcagggtggttgtggcggttgaagactgtcgggattctgaccaccagaggtatcgtgggacgacgggctccacggcgaacacctctcgttgagctgccttgcggtggagtctgtcaccttatgcttctcccccactaaagatcatgagacatcccgtgatttcggggatatcttccatgggggtttcttgttc

SEQ ID NO: 71796 - DNA, 328 bp, Zea Mays
atgtgtcaccgagaccgaaggcgtccaaatcctgcgcgaagtccacagcgggacttgcggctctcacgcagggcctatggccctagccacaaaggtgatccatcaatgcttctactggcccgccatgatctgcgttgcaaatggggtcacaaggtcctgcgaagcctgccagaaattctctccacgctcgggacgcccttcgcaattcacaaagctaatcgcccacacgtggccccttcagcgctggggcctggacattgtcgggcccctacccacggcccaagggaacctcaagttcaccttcgtcgccgtcgagtattttaccaaa

SEQ ID NO: 71797 - DNA, 665 bp, Zea Mays
tgatgttgaatttgttgacacaaatggctctcaagaagaaagtgaaaacttgagtgatgtaataggaaatgagttgagcaatgctatcaagacaataggtattagtgatgtgaaaccaaaggaagatgatgatgatagcgtggttgttataccatattcctcaactataaatgatcaaaatcaccaaagtcaacaaaacaatgaagttgatgattctgaagatcatacatctccaagtcacttggtatgtccctaaacattaactcataatcctcatcctctctcaagaattcaccatgttattgcaaaagatcacccgattgatacatatgcttattatttgttctttttgatatgcaacagtggtctgggcaaagcattgaaaggacgccaagaagattataaagggggacaacatggtcatgatgatgtagatgtggattatgatccaacacttggttcagaggctcagtctttagttggtggtggagtgtaagtgattcctgaggatcctagggctaatgagcctattaacatctataggtggacctatccaaagaggagcttctcaatgactgagtattcaacactaagaagtcataatcagtatgcccttgaaaatgatacaaatgtgctcttctttcacactcagatgcagtttgatg

SEQ ID NO: 71798 - DNA, 319 bp, Zea Mays
caaaaaaaatggttgaagtaatagaaactattaccgagggaaattacaaggaattaacgagatcactaaggatgtgcgaaatgaaatggtcgatcatggatcatcgagaaacaagggtggtcaagggcgtgaaaaatgaaatatcttaaacagaccctgggatataaaggtaagcataaaaaagatgagagtatgaaagatgtcaaggagatgagcataccaatacctagggagtacgaattgccgaaagatagcgacttaacaacaaaataggaaagggtctcaaaagacacgatgatcatgaacatataaactgaaa

SEQ ID NO: 71799 - DNA, 544 bp, Zea Mays
caccatgtgaatctgcatcacatgaccagtcctggatagagcatcgacagccacattgtccttgccttttttgtaaacaattttgaaatgaagccccatcaacttagccatagccttcctctgcatatcagattgcaaaagttgatcatccagaaaactcaaagcctgatgatcagtattaatcacaaattcagccctctgcaaatattgcctccacctgtccactgcaatgattagagccaaaaactctttttcataaatggagagcatcttattcttagcacccaatgctttacttagatatgccactggtctatcacattgcatcaaaacagcacatatcccatcatcacaagcatcagtctccacaacaaataactcatcaaacctaggtagggccaacacaggagtagtaagcatagccttcttcaacgcttgaaaagcctgatcagcctcaggactccactgaaaagccttatgcttcaacagattagtaaggggttttgcaataatcccataatgtctcacaaatctcctgtagtac

SEQ ID NO: 71800 - DNA, 397 bp, Zea Mays
ttgggccagtatatcaccatcccctaggttcaggatatcgcactttagcatgggtaaaacctctatcttgcttaatggtgttctagggtcatggatttcctgcaaaaagggcctccgtcaaggtgatccaatttccccctatttgttcatcattgttgtcgatgtgcttcgtcgccttattatccatatgagcgacattgaggatctcaaccacccagctattgataatgccccttgccccagtgcttcaatatgttgatgacacacttatatttgctagggattctatctcggtcattttcgttgttataaaggctctcgtttgctcttgctactggtcttaccattaattttcataaaaccacccttcaccctctttgtgtggacgacactactg

SEQ ID NO: 71801 - DNA, 397 bp, Zea Mays
ctccgcacctcagtggctgagcaatcggctgaatttcaccggagcacacacgcagccccaaattccctcctcctcctatgttcttgctccgccgcatgggactccaccgtggacagcactcttcgggttggtagtttctcaattactctctgttcttgcccgtgtatagtctcctattgctctctgtactgagcagttggaatttggccgaagtccatcaccggaacgcgcccttgccttgtaaaacgccgccgtgaaccccctcaccgtcgacccgcccttcgggtcttgttctgcccaaaccaaagtatgtccatggaccctggtgaacccgtgaacctttacccagcctcaatttggccatccccgtcgctgtttgatcagaacatgttcatcc

SEQ ID NO: 71802 - DNA, 480 bp, Zea Mays
cctggaagtactaagatgtaccaggatctaaaggaaaagtattggtggtacggtttgaaaagagatgtggctactcatgttgcgatatgtgatgtgtgtcaatgagttaaagctgaacaccaaagaccaccaggattgctacaacctctcaaggtaccggaatggaaatgggaagaaatcagtatggatttcatagttggactaccccgtactcgggatagctatgattcaatatgggttatagtggacaggttgactaaagtggcacactttgtacctatgaagacaacttactcaggagcccagttagcagagttatacatgtcaagaattgtttgtctgcatggagtatgaaagaaaattatattagatcgaggaacccaatttacctcacgcttttggaaaagactatatgagtccatggataccaagataaacttcagttcagcttatcatccgcaaacggatggacaaactgaa

SEQ ID NO: 71803 - DNA, 306 bp, Zea Mays
tttcttcatggtctatgggtcagaggcagtgctacccgccgatctcaagttcggggtgccaaggttgatcttcgaaaacatagcagaagtcgaggccaccaggctggaggacattgatatacttaaagaagaacggctgaatgcggtaatccaatcagcacggtaccagcagactctaaggcactatcacgacaaggctgtgcgacagcgatccttttcagtagaagatctcgtcctccgccgaattctaacgggggaaggacggcataagttatcgcccttatgggaaggacccttcatagtagc

SEQ ID NO: 71804 - DNA, 916 bp, Zea Mays
tttggcttcactttcacccatagaccctaatttagggttaagtgtccttccctagggttcatagtacaccaagccttaacatcacaacctctttgaaatttttacctagtgaatgcattctaggtgtaacaaacaatatgaaatgtcaatgcacatgatgccatgctcaagttttagtgctagtaacaccaagggtgttacatccttccaccgataaaagaatctcgtcccgagatttaaggtcctagggcaagtaatggaaaaggaaacacttcacatctttatttctttaattgtcttacaaagcaggggtggtatagggtttacttctccttcacaatccaaagtacatatcttacaagttacatgaagctaaaaagccagggaaattcttttctgagaagtcttgagtctcccatgtagcttcatcttcagtatgttggttccactgtaccttatagaacttaagagtcctttttgtatgatcttgtccttctaatccaagactcgaataggatgttctgaataggtcaagtctggttctaagacaacatccaccacatcaatggttcgatctggaacccgaaggcacttcttcaattgagatacatggaacacattatgcactgcagacaatgcttctggcagttggagtcggtatgccactagtccgtatcattcaagaataaggaatggaccaatatatcagggtgccagctttccttttaccccgaaacggctcacacccttcattagtgacactttcaagtacacatgatcattaatttgaaagaccaaagactgtcgtctcttatccgcataattcttttgccgagcttgtgcctctttcaagttttgtatgatccattggactttttcttctgtctctttaaccatgtcaggcctgaagaaccac

SEQ ID NO: 71805 - DNA, 943 bp, Zea Mays
gcgagtttcaccgattcaccagaggtcgggtacacatgcgaatttggacagaacgggggtgggagagtgggtcgacataagtacactctcgaatgtgttccgcggcggcgaggtgatgttctcgatgccctaccgtggtggtgttcaatcggttgagctgacgagctacattaacattcaaagatgctaaaacatggcacaaagggggatgaacagacatgggaatggctgatcatggcaggatgccttacggcggcgcgagtgaccaatttggggaaaaatccaattcctcgggctacaatggagggattgagaggaggagtggtgcgctgggtgcgtaacaagaatgtggagcagggagggccttcaatttatagtgactacacgagtgcttcgcgaatttgggacgagatgatcttgcagccagaagggaggtgagtcaccggagtgcaactatcgtggcgctcggtgaggttaggacccggcagtaaatgggttgtccactgcgatctattgcgatgtcgtaacgcccccatgcacgtggcatcctcgcggcgagcagcgaatgccgacgatgtcattccggccggtcgtgaagcaagtgggtacggtggccagctcacattctcatccgtgatcacgatcttttgacttgcccggttatatccgcgtcgagctatgcacgaatcttcacggcgagctcgaatctctatggccgatcactagcggcgaggtgcactgcaccaaggatcttctacaaatttgttgtggtgacctatggcaaaatccccatagatcaagagatacagggacctaaagttagcacaatatcactgtttttagaattaagccatatgggtgcccttggggactttttgtaatttactccaatttgttccacaaaacttggaaatctccaaatgtaaaagttgcttaatttttg

SEQ ID NO: 71806 - DNA, 567 bp, Zea Mays
caacgtgcgggtggcgcgacatagaagaagagcgcacatgtgggaagtgagacacgcacgaccattgatagtcgtttgatagtactacctccgttcacatagaagaagagcgcacatggatggagtatatttttattcctaacggtccacacgttgcgtcaggcataagtgttagttttgatgcccgttaaacaaccatcggaagttaccttattttcgacggatgttaaacacacgtcggaaattatactatttctgatggctgtcgacgcccgttgaaaagagcttatttgtgatggtttatacctggacagttggaattgatgtagtttcctgttgtgtgtgaggacattagatcacctgattagagggtatgtgactggctaaaatcattgtggttctggtcagcccagcgctggcaaggtagccactatcccaatccatctatttcgttcatgatgctagcttgcatagggtcagatacctagagggttagatacaaatatacatcatgattaattggaaaaagcagcattgttaagcatcgaaatgatgtttgattaactg

SEQ ID NO: 71807 - DNA, 760 bp, Zea Mays
gaagccattccctacagatgtggcatgtaaataactgacacttgccttttgttttcattctcggggttgccattttcgctcgctgctgcttcacggctcacggacctctccttcctcccagctcgtaccagatgacgttactgcccatgtactgctcattattaagctaagcagaggcttggattcgagcggggtgattaggttagattaaaaaagcccagagcgaggatacagagatgggcacggagggtgggggataaaagaggcaggggaaccagagagggcaatagatcagggccggtgagtgtgacggtgaggggggtattggtattgcatctcgctgtcgcattgcacttgcacgcaccaccatacgccgcactgctgagctctactactctactactcctcctactcctgtctgtacaaacctgttccggcgtctggctgtaccgctagtcttcttaacccctggagcgagacggaggcctacggaagagagagagggagggagggaggagagggtattcagaatttcaggagcaaagtgcacagcggtgctgccttgccagacagctacggcgctaggctgtgctgctgccgaggcggggcattcgttcctccccagtacgaggagaggaggaagatttggttggttggaggggagggggagcagaactggtcagataggaccacacttctctctctttctctgtcttcaggcatcaaagattgcagctacctcccttttattttgccagag

SEQ ID NO: 71808 - DNA, 755 bp, Zea Mays
tgaatgggccaactgtgagctcacatcagcataggtcgacgtgagggaattagctgaactacagagaggcatcaacctacaagacagacctaatgccccaaagtcatttccggcatgttcaagtcagcgcaagacacaaaaacattatggtcgatgacaccgacacctcaaagaccatttggattggggtggcgttctctagcaaacaagaggacaccctcgacaactttcttcgggccaactatgatgtctttgcctagaagcccaccgacatgacaggaataccgagggagctcactgagcactccttgaatatccggcctacgacaagaccaatcactcagtggctctgtcgttttgatgaggagaagcgcaaggccattggcgaggaaatcgcaaaactcttggcggtcgggtttgtgaaagagattaaccacccaatgtgggttgtgaaccctgttctcgtaaaaaagaagaatggaagctagaggatgtgcgttgattacacgggattgaacaaggcatgcctaaaggatccttttcctctcccacgtatctaccaagttgtagattccaccgttgggtgtgaactcctctccttcctggatgcatacttaggctaccatcagatcgctatgaaggaggccgaccagcacgctacgacgttcatcaccccctttgggtcattctgcttcgtctccatgtcgttcggcctgaagaacgccggggccacgtattagcgatgtatgctccaa

SEQ ID NO: 71809 - DNA, 990 bp, Zea Mays
tacctcaccttaaacgatctagtcacgcaggccaacatggccaggccgacacggccaccatcacacaccaacggcccacacggcccaccacacccagcaattcaaaaaatgaaaaatactacttcctcccgcgtccactctcgacgcctgcatccatcacgcgcgcaccacagtgctgtcatcttccccaccttcaagagttgcattaggggtatgcagtgatcaaattgcctcattggtggtagatgtgtaggaacattaaacaattcagcaaactcttgcagcagcaaactgaatatcagcctcattaacttgactgccagaatcagcagtggattccactagcaccatggcccaaatatcatgtccagcaagccatttctgcacttgaagtgctgatacctcctgaatggttgaacccgggtggacatcatccccatataaggtcacctcctgtccaccatcttgaaactgcagaaccttgtgtacccaatcacattccatagggctatgttgcatcaaccaatcataacccaatatagcatcaaaagcttttaaatgcaatactctcatgtcagtatgatagaaatgaccatgagaccaccattcaacatttctaaccatagagttgcaaatcattttgtgtccactggccaccttcacttgtacagttgggcactcttccacctgcaactgtaattgtttagtcatgtgttcactgatgaaagtggaggaactgcctgaatccaccaacattagcatcacttgtttgcccacaatagacctcaccctcatactgtaaatactgtcagaacctgatagggcctgaaaggacagatgacagcatacctctctttgttcatcttcttgttccaacgtctgtaaaacttcatcagccaacacctctggttcctcctcatccaccacaacatttaactgaacttgccctcttttggcacatttgagaatgtgaccaggctcaaatttctc

SEQ ID NO: 71810 - DNA, 894 bp, Zea Mays
cgcggctgagcgggacctcgggtaccagtcgcccgagggggacctgaaagatatcttcaccggaggctcctactctagtgaagacaactagacagaccctagagggaccctgtgttccccggtctacggagctgaagcacgcctttcctccggaggcccttccggaccccccacgggtccgagctgcagagaggtatatgcagaagtgatcacagccagagatgagggctcccgtgtcaaatgcagatgggaaccgtgggtcggggcttagccccacggcaggtaccataccaagaggggctctgcaactctcccctagttgggaaggacccttcaaggtaacgggagtacaccgacccagggggaaccatctagctacgactggaggagtaccttaccctgatgccaaatatctctgtaagttctatccatagagcaagactaaggggtcgagcctgtttccttcttttatgtaactagataacgcatacgtgtacggcaacccggtgggtctgcccccatgaacccggactattggtctgcacacatgcacgacaagttatgaagaagaaactaccccctcagccgtactcttgtgatagttccatcttgctgctccatggtcctaccttgcaatctttcagataatacctttcagctaacccacccgtacgatttccatctgtctgacatggcgacatctgaattgaacaggcaggcttgcagattagggcccctaacgtgaaagtagggatgtccgacagcctgggggccagctctagagaacgggaccccgttccatagggtggtccggagcctgtgtagccgctcagccaggtcctgtaccgtgggcctacatgctccaccaccccgttacgaggactaagtacctag

SEQ ID NO: 71811 - DNA, 527 bp, Zea Mays
ttctaatcttctgttccaatctttgtgttcaattttgtgaatctttgttgcaatcttgtgtacatatagctcaatgagttctccgatcaaggaccaaggattagggcctgaccacatggaaaagggtgtttctcgagaacaatccagtggtgaaggatatgaaatgcctagctacccttatcctagcatagatagggttgcttgccatgagttgcaacgtgaccctacttatgatccacgagagtgtgaggtaaagtacacatccttaatttcgtgtgtgtacctaattagctgacttcacaatgtctattacacatgcatgatttcttgtgcactttattacatgaataggaggtcttgtatcaatatcgtgcgatacttgatgaagtcgcggcatgattccaagatgcaccagagtcgacccaagatgcaccggaactgactgataaaaccaccgagaggtcaaggaaaaggaagctgagcgatcgaaaaagagctgataggggtctgaacaagtttccagacaa

SEQ ID NO: 71812 - DNA, 463 bp, Zea Mays
ggcggcgatatttacgtgaccccgagcattatccaggcactggtgagcacgaatcacctcaccggcaggaatcgtggcgtgagggtcatcggcggtgagggtcactgaacctgattcgatcggctactgtaccatgggatgcttcttcagtatgcctgacagtcatagtttagggccaattctctctccatttcttatggcatctcacccgaagatctgcagcaaagctgtagagctacaaaccagctacatttccactataggaactgaactgagttgagcactagatcatgcttgaattcctgtccaaagtcactgcagttgcactgtcagtctgagtttcagacattaaacagcctgacagcctgactttgagtgtgattatctccaatttcttcataacaacattacttacactcttaagcaaaattgttctcttttgttaggtctacaagtttgatgt

SEQ ID NO: 71813 - DNA, 310 bp, Zea Mays
cgcagaagtcgcctaagggtgcagccggacttagcacaacaagtgcgagaaattccgatgtctatcgcgaagactatccgcgcagaagtcgcctaagggtgcagccggacttagcacaacaagcgcgaaaaattccgatgtctatcgcaaagactccgcacaagagccgcccaagggcgcagccgacctagtacaacgaaagcagaaacgacagcaagaccaactgtaatcacaccggcacagcataatcaaccataccagacaaagtacacagcgccctcgcaggcgcaggcacgcgagggcacacaac

SEQ ID NO: 71814 - DNA, 566 bp, Zea Mays
atcgaatcacgggtatgtcgtcggtagagactcgacagtgggtctaggatcttcgtcggtcaacaccgggcgcgtttgtggcccatcatacaagaacgatgatgaaagttttggtgaaattgctcgccgaactccagcgggaccgctggtctgcccctcaccatgggtagtgggcgctgcggcttgaatcaaggtaatgatctacctactatcttctactccctatcctattcgaaaaagctccgtccaatttggttttggtaatctagggaggtctgttgctacctcgccggcgtgctccaccaggtgggcatggcagcgctgccgtgttccagtggggtgtgggtggggcactcgaccgccattggatcgcaatcgaacggtggtgattagatggggaaaaaactattcgatgcattgaatccgggtcgtcgatgcgatcacgggcggatcggatgtggtcgtactatgggtcgtagatctcaaatcctgtggtcctcgtcgaatgcccgttcggattaatgaagatctaatcatagccactgatagaagatcggacagttcag

SEQ ID NO: 71815 - DNA, 719 bp, Zea Mays
actgtgtgtgccttcattggcacaagggatctgattcaagagcatatatccttcagggtatggccacttgtggaaagctgggacatgccgaaggagaccaccgtcgattctagtgagggtggactggtccgactaaactataccttcagattcaaggaaaaatttgatgagccaaacgatgactgactaaagtgcatcgaagctactagtgacgagctacttggagcatactccaaggccgaagataatgctctgaccgcagcctttggaggtcggggcaagaaaatattaaacagggtatttgatgctattggcttcgtataccctaattaccattatccgataaaagggcaagagaaaaagaggaagactgccgcttcggccactgtagctgagccgaagggcaaaaagattaaggttctgacccaccggccaggctacattgaactgactgtagtgcctgaatttggcgcaggtctacttctgtaacgccccgaattttggagttgaatttttctttctccttcactcgccaaattcgggcgttacctctcttttcccatttctttttgctacaccttacccattctcaaaattctaaagagagttaactctatgtcgtgtaataataaatcctagaagtgggtttctttggttgttgcatcatgccgaaccacgcatcaatttcccttgtgtgtaatttcttggtttccataaag

SEQ ID NO: 71816 - DNA, 595 bp, Zea Mays
ttgcgtatttttctatcttgtgggtggtatgcatgggcaagaaatgagctgtcttggttagcctatccacaatgacccaaatagaatcgtggtgccggcaggtgttgggcaatcccacaataaagtccatgcaaatgtcctcccatttccaagatggtatggggagaggttgtaaggtacccaccacctttaagtgactggctttgattctttggaaagtgtcgcactcagatatgtactgagcaatttctctcttcatcctggtccaccaatataaggatctgaggtcgtgatacattttgttacttccggggtgcatggaaaatttggagagatgagcttcgtccaaaattttcttcctgagttctggattcttgggaacaaccagttgatctttgaaccataaaatacccatgctgtcctgaagaaagcatttatacttatccaccctttgattgagcatttccttaatgacttgaacacccttgtcaccactctgtgccatgattatctgctcttgtaaggttggctcaactgagatataatcgaaagtacctcgggaaaccacttccatgttcagcttgcacaactcgtc

SEQ ID NO: 71817 - DNA, 471 bp, Zea Mays
ctcagtggaaagtggtgttgtgaacattaggacctttttagaagaggctttccgtcatttgggtgatgagcattaccttctgaatgctctccttgctattcgaaaggaggtagatctgatggagcaggatgcactggagagcaaagcaaggtctgacccagagaaggagaggatggaggaacaaattaaccttgccgaggctgcgaagacagtgcctagacaattcactttcacccccccttcctcaccagaattgtatgaggccagtgacaatgactcctacgactcggacaggtccactaggtatagcatttggaacctgtaatagtggtacctagaccatggtcttagtggtagtaatgcatccaaataaaataggaacttctgtgttatgtctgtgatgcatgcgtaaccgatgtaggaatgcttgaagcaattgtttccttatgtacgaaccttatgtggaatgct

SEQ ID NO: 71818 - DNA, 533 bp, Zea Mays
cattacagttgtttcttcaacgctctgtgcaattggagcagcctgtcttgcttcggcagttgaagaggctcctttgccaaatttaggcactatggccggttcaatataacaaggccggtgggtcagaacctttacctttttgttcttcagctcagctggggtgaccgaagtagcaatcttgctctttttctcttgccctcgcagcgggtagcggtaatcagggtatacgaagtcaatagcatcaaataccctgtttaatcttttcttgccccagtctccaaaggctgcgggcagagcattatcttcggccttgtagtatgctccaagtagctcatcactggtagctttgatgcccttcagccagtcgtcatttggctcatcaaacttctccctaaatctgaaggtgtacttcagtcggaccagaccaccctcactagaatcggcggtggtctccttcggcatatcccagctttccataagttgccataccctgaaggatatatgctcttgaatcagatcccttgtgccaatgt

SEQ ID NO: 71819 - DNA, 275 bp, Zea Mays
gatgggctgtggcgagctctaggatatggaggccaggggtcggtgtagccaaaatgatgatgcatgggaccttcgcctcccccacgtcatctgccatggtaaatacgagatagctaggtagcctcggggcccacgagtacgcgtagctccacctaggggtaaaatgctggttttgcccttgccttacggctccttcccagggaagccaccactggccgatccctctcctagccaataaaagggagaggctggcctcagggaaagggggtcgaaag

SEQ ID NO: 71820 - DNA, 2422 bp, Zea Mays
gcataaggagataacgtccagcacaaagcaaaaaaaaaagtaactcgatgatttttcatcttcatttgagtacgccatcttcaatatgaacaaattgctgtacacttcaccatgcatgtcaggtgtcttggtcttggactgcgactaaaagctgtatgaggctacatgcaccgagcaaatacctttgctggtcttgtaaacactcactgctcaccgcggcttgcaagacgccgcattcaagtattcaactaatgcgatatccttcctgcatgactgcatccaggtccaggccatcagggtctcaacctgcagggttatttcaccgctcacgagtagtgcgggagttcagtttgttgttcatatatatgtaaatgttccgaaatgccccaatttcgtcaaggtgacaaggtgtcaatgctgcagataaccaaaaggccaatctgtcatagcctgagctgatcacgtcatgggacatgaacaaacaccagatcagcaagctttccactgctgcagtactgattcatgtcagatgatttcatctctaccgtaatcaactacatgcagtaatgagtgttcatggccatttttagggtagctttgcaatgctgcatgctggactttaatccaactagaacctgccatcttgctcaatcctctcaacctcatctccttcctcaggctatcagcactactccagttgccctcagcagcaaaaatatgtgacaacaaaacgctgtaaccagcatggccatacttcttctcaatgcagatcaatctctctgtcaccaaattcaccaattcctgcttgtcctgtgctttgcaggacgcgagcagtgttccccaaatagaaacgaagtcaccctcctcccccagttcctgcacaaattcataagcttcctccactctgccggctttagctaacatgtccacaatgcagcaacggtgctgaggagtaactacgaccccaaaagtttccattgatctgtacagagcaagcccttcatcaaccagcccagagtaattacatgctgaaattgctgccaagaaggtcacaccatcaggttttagccccttctcttgcattgagtagaaaagggacaatgcacttttgccaaaaccatgctgaccaagaccagaaatcatggttgtataggagacagtgctcttctcagtcatatcagcaaagacatgttctgcagtagaaatctcaccgcacttggagtacatgtcaacaagagcagtacctacgaagacattggtgtccaaacagcggcgcaaagcaaaacaatggatctgcttccccgcacacaaacctcctcctagaggatcacatgcagggagcaccgaggcaagtgtcactgaagtaggttcaagacatgcctcaatcattgcccggaatgccaagattgcttgttcaggatgcccagtctgtgtgtaccctgctatcatggcattccaggtgacttcatctcttttggcgttaccatagtcatcaaatactctctgagctatttctatgcgaccggacttggcatacatgtcgatcagatagctctccaatccctcaccctcaatgccatgccttataagataactgtgggcttgtttaccaatatgaaggtctcctgtatttgacgcagcagagagaactgcagtcaatgtcactaaatcagctgcaaaacctgatttttgcatctgataaacgagcaacaggccttccagatcaaaatcgttctgcacaaaagcagtgatcatggtgttccaagaaacaatgtccttctcatgtaaccgatcaaagagctcaaaggcagtttggacattgccacatctcgagtacattacaacaagtgcattaccaagtatcactggcaaagtggtgtgcattcctttgatcaagtagccatgcagttgctgacccaacctgccatcctgggactgtgatgctgccgtgagtgctgacaagaaggtcacgacatccaatggaacctctttagacaccattaaccggataacgagacccatagcttcagcaaatttcccgttctgcacatacccagtgatcatcgtgttccaaacctcggtgttcttcttggcagcatactcaaacaccctccaagctgactgcacatccccgagttcagagaacatcacgatggccgagctgacaacgaagagatcattgacatattccatcccatgcttcacaaggaggccgtagagcacgaaggaccagctggggtcttccttggccactgcggggaagacattgacgaagctgactggcgtaggcttgatgccatcctccagcatacgcacaaacatctccagagcttcctggggacgtccggttttgacgtaccaaccgaacagtgtgttccaggaaaccgcgttccgcttgggcatcgcgtcgaacagcctccgg

SEQ ID NO: 71821 - DNA, 351 bp, Zea Mays
gcaaaagtaaacttgagaatcttttgaatgattccataatagttaatttctcatccaagtgcatcgccctagacacaactctggatttaattatggctgcttaaggacgagaggcttcaaaaggggctgatcgaaagcgaaagccattaatattgtaccgactattgcttctaacaaccaccctcccataggatagttgtcgcaaatcatcatggacaatggcatcttttgtgcatcacatgaagaatataaagttaatggacaaatactactatcgtttgaaagaatgagaaaatgaaccaagacaagatcttacataaaatcgaaaccaatcgatgaaatttggtcctc

SEQ ID NO: 71822 - DNA, 361 bp, Zea Mays
cccttgagaggctagattaacagagcttttgccatctcgaattgaaaccttgtttacgttgctttcactcccccgttggatcaacttgttcgggagagccagtcccaacacccgaccattcgccggacctgtaccatcgcctgtacgccgcgccaccgctttttctctcctcggctactgttccggcaaggaaggagcgcgggttaaagaggggaaaacgccagggggttatgtgctaagtcagtgactcatgtgaatagttccccaggggcacagtttaaacaattcggttaagaaaaattctagggaccccgatgcaaagttgttttcctttaaacttttagatttattcttttcaaat

SEQ ID NO: 71823 - DNA, 292 bp, Zea Mays
gagttggatcaggagaccagggacttggagtccattcatcagcaagtgcaaaggaagagagaaaagatgctctggctagctaaccttaagaagaagatcgacgaagctaccgaggaaatgcgtcaccttactcaggatgaccaagatcgaaggccccaacacagggagcttcatcaggaaagcccaatcaatgaggatgaatggtacaatgactttcatcatggcaactttgcttttgatgacgcttctcctctagcagcagagttgcacgctaccccgtggccatcatctt

SEQ ID NO: 71824 - DNA, 286 bp, Zea Mays
ctagtttgaagagttgaccaaggattcgtttggagtgtcgtgtctttaatctaaatatgcaatatacatctatgtatgactctcgttaacattgttacctttatttcttcaccaccttctctttgtgcagttaaatcatagaaaaactcataatgacttgttgctcagcatagtagaattagcaaagttaagatacaacagttaccatacggagaggttcagctcccctctaaatagattttgatatatcatgaatatttataatcatgcatatagagtagactat

SEQ ID NO: 71825 - DNA, 970 bp, Zea Mays
cagacagctaatcagtaattgattatttgcaaatgaactacaaatgtcagctgaaaaggattggtctccttatgaaatttactgatccccaatgatggactcaaaaactctatagatgctttcactaggtaaccattagtattaaaaacaatgttagttggtcttaacgtgtacccatggtccaactggaaaagcaacagagtgtactagtcaatgactatatcggacccttgaaaattctccatcgccccttctttttcctttcctgccaagattgtctatatctaaagaagtccaagcatcataaagaatgcataccagtatcaacaagcaccagatcaaccccccccccccccctaaatctaacactatgtaattacttcatctgtttcattcagttactcagcatcttggcctaatctggctaaatcgcacattgctgctgcagataaacagattcaaaacaggaaaaaaaaagtgaaacttacatggaagctaaacctgttatgtgttatgatcagattccatgtgttctgtcattttctcaatgctacgctatcggtccactgaacagcataaagtaaaacataaatgaaccacccctcctctcgttttcggggaaaatagtagtctggtagagatctgtgccattctaattcactgcaaactattacagtgacatggtatactgacagcctatcgataccaacagcgtaaatgtagcatccacagatccacttactgaattatgttctctagctacacagattatcacgggaaacaaagcagactgcttcgtttcaagggggaaaaaagcaaactattgtggagaaccgagtcaccgatggcatgtgaacgctcttggagataagccagagagacggcaacaggaggagtgatgaatcacgtatgaaggacaagcagaggacacggaggggacagacggacctgcataccgcgctggttgagc

SEQ ID NO: 71826 - DNA, 472 bp, Zea Mays
atttggagcacttggatggattggatggctaggagatgatcgctttacgtatgactgatgtttcttagctcatgtatagagttgtgcccaattggggtggtatatataggctccccacttaaaactagccgtttgaaccccactcaacattctgcgtgttcaccagacatgtctggtggtggacctggcaggcccgatcccatctcagtattagcaattgggtaaagctatcaaaccgttagtctgacacactgtgccaatcatgtccgatgtgccaccagatacaccacgtcaactagttgttggagcttctcgttagccgaccttgaacattgtagatccgatgtgatgtctagtacgccaccggatatgtcaggtgccccattgtggcttggttcatttgacatgctctctgagtgtcgtgttcggtgtgccatccggtgctatgccgaacacatcaggtgcactttgt

SEQ ID NO: 71827 - DNA, 515 bp, Zea Mays
agagtcatgtgttctactgattgggaggacttgttccctaatgttttgctgcagagttcagcttctgaagtgtctgaccactgccctttactgcttggtcttcgggataacaggtcaggaaagcaaaaattccatattgaatatttctggccaaagctagatggtttccaggaggctgttcaggatgcatggaactcaatccctgctttggagtgtcctttccaggctctagacatgaaatttaaggcgacagcaaaaggattgcaaagctggagcgatagtagagtgggacatgtgaactcccaacttgcccttgctcatgaggtgctgcataggttggagattgcacaagatgctcggtccttatcgctaagtgaaatttggctcaaaaataaattgaagaagcactcccttggacttgtctcattaaagcgcaccatcgctcgtctaagatctagagtttcttggctcaaagaaggtgatgctaatacgaaattgtttcatatgcatgcccg

SEQ ID NO: 71828 - DNA, 370 bp, Zea Mays
tctattcgttgggctgaggggtatatatagccatcagctcgaccccaatggctagaacgttttcctcacatcgtactattacagaacagacatgtgctcaactctctcctcccgtgttgctccttaagctctcaagccaatccttgatttccaccactaaaacttgagagttgagagaaaagatatcaaacttcgattagagagtgtacctattgattccccatatccaaagagcattttgttcacgtttggttcacgattctagggtttattactcttggagcttgctcctaaccaactaggtgcctctcttgtggttttgaacttgtgtggaagtttggaaggttggtaacttccgtttgtagctaag

SEQ ID NO: 71829 - DNA, 580 bp, Zea Mays
cgagattaggtagggttgaaccacgattcacccgaggccccgcccaacgatcgctcaaaactgcgtctcgcccgagcccctccataggtgaaggctgtgcccggaagaaatccttgactcgcccaagggcccccttttcgaaaagacaaattccgtctctcccgagttcacctcgggcagagaacagcctcaagcctagcctcggccaaagatctcgggaagaatgaagacgcgcacattaaatacaaatgatacgaatatatgcttcatgtgacatcgcggtcaatagaggatgataggaccaaactcccatatactttcaccaactacgatgacatacactcgcgaataccggacactgctcccccacttcgaccacagttctcgaacaacttcgaatgggacatgcaaacgtctgggcatagccacacactcgggggagaactccgcctcgcccgaagacgacttcatcctcagaagaaaattgtgcctcgaccaagctcggccttgggcaactgcctcggtagtagccatcgactccccacaaatctcgcaggaggccactccggcaactgttcta

SEQ ID NO: 71830 - DNA, 351 bp, Zea Mays
agaagtgatgaggtaatcgggtcttcttgtgctagaggaggctgttgccgaaggtaccttgattactgaagctaaaagatcgcagttgaaggagggagtgagaaaaaagatgaagaggattacactaatatgagcccagcgaaacccagccacattgaatttggtaaatctactgtgacggcggacgacatggttatgatgaagaaattgggctactttggggaggccgagagcaaacttgtctgatttgctggggaagaggtgatgaagtcgtagtttttaaaagtttcttcagggcaaaactttgtttccctctgcatgagatgattggagaagttttgaaaaattttg

SEQ ID NO: 71831 - DNA, 532 bp, Zea Mays
gtaaatctactctcctttggcatgatcgatggaatggacaacgattatctgaaaagttcctggagctttggtcttttgcctctgtcaaggagattaacattagtcaagctcggttggcttccccgaatgaactgttccatacccccctctctgctgaagcgttcgagcagcttctctcacttcagaacacccttggtaatctacagttgcttgatcacaatgatatttggcgatgcagtgcctctttcaatcggttttcttctcagaaggtctatgctcacttgattggcacccatcaatcgctccctctcttcttttggttatggaaatctaaatgtcaacctaagcacaaagtattcttctggttattgctcaaaaatagattgaatacccgctcccttctcagacgacgttcaatgcctttagactcatacacctgcgacaactgtattctccagattgaagaaacgtctattcatcttttcttcagatgcaactttgctaggagatgttggctacttttgggcttcct

SEQ ID NO: 71832 - DNA, 512 bp, Zea Mays
actacaccacgatatgcttcgacactacgacgtgaccaagacgcaaatcacatatgaaccaaaaaatacgacaagataggggtagttgagcttctgcaagatggagggcaccatcgtacatagatgtaactctctctctcctctcttctgctataaaaggaaggggagcaatgactttttctccttaagacatttttgggcttctagacctttcatactcccaggcccaatatcattgaagctcgtaagtgttgtccgcacttagatctatgcatccaccacatagatgaagtaaggtattttgttcaggcaacctaaacttctataaatcgtacatgtataatatgtcgtgtcagaaccccaatctagcggtcccaaacttacgctccttgctttgacgacaacattactattacatgaatatgtagctacatgaattcgacatagagattataccaaaacgatcatctcaactctaatgtaacttaagtgtaggcttaattagatttaat

SEQ ID NO: 71833 - DNA, 282 bp, Zea Mays
tggagcaaagaatccatggaggtcaatgatggtggaggaggaggagatggacgtagagtaccataggctgaagctgacgaagctttgctgtactgctgtgctgtgtgatgctctctctgactgacggcggcctgcgacagcttcgtaatggcggcttcggttcgccgcagtccgcggtaacgggtccagcagaccagcgctagctccacctcctgcaacggtcggtgcaactgcaacggacacttaatttagggcgggaaacaagaagagactacagctcgc

SEQ ID NO: 71834 - DNA, 2473 bp, Zea Mays
tgcggatgctcacaaaacagcattccaaactcattcgggtcattatgaatttcgtgtgatggctttcgggttgactggtgctccggctacctttcaacgggcaatgaatactactttgtcaccgttgcttcgtcgttgtgtgctggttttcttcgacgacatcttgatatacagtgccagctttgaggagcatttgcagcatgtgcgccaagtcttggagctattggttcgggacaaatggcaagttaagtggtcgaagtgttcgtttgctcaatcacagttgacatatctgggtcatgttatttctgcggctggtgtggctacagatcctgcgaaaattgaagttgtggctcagtgggttactcctaagaatgtgaaggaactgcgaagttttttaggcctggccggttattacagacgattcgttcgacattttggactgttagccaagcctttgacgaccttacttaagaaaggaaatttgtttatctggacaccatctcatgaagcatcatttgtggctctcaaggaggctttgatttcagcgcctgtgttggcacttccgaatttttcattgcctttctcgttggaaactgatgccagtcagttgggtgtgggggcagttttgatgcaagctggacatcctattgcatatcttagcaaggcattgggacccagatcgcagggactttctacctatgaaaaggagttcttggctcttttgattgcagtagatcattggcgccactacttgcaactcaaagaatttcacatacatacggatcaccgtagtttggcacaattggatgagcaatgtttgcacactccttggcaaaagaagatgttcacacgtctgttgggtttgaagtaccgcatcatatataaaaaaggagtggacaacgacgctgcagacgccttgtctcgtcacccaagtctgtcttcatcatgtttagcaatttcatcatgtactcctaaatggattacagaagtggctgactcatataatcaggattcacagactttggctatcatcgcaaagctggccgtcgatacctcggttgtacctcatttttcttggaaagatggtttgttacgttataagaacagaatttggatcggtcagtctgatattctacaatacaaactgatctctgcattccatgcttctgctgtgggtggtcattccggatttccagtcacatatgcaaggatgaaacaaatttttgcttggaaggggatgaaaagttcagtgcatacatttgttgctcattgtataatttgtcaacaagccaaagcagaccgcactcgtttacccggcctccttcaaccattgcccgttccatcttcgctttggcaaattatttctatggatttcatcgaagccttacctcgctctcaatcttacacttgcatcctggttattgtggacaccttcaccaaatatgccaacttcttgccgctcaagcatctgtatacagctttgtccgtggcacgtctttttcacgatcaagtgtacaagcatcatgggttgccccagtccattgtatcggatcgcgacaaggtgttcctcagtaatttgtggaaggaactgtttcgctgggctgatgtgcagttacagatgagttccgcatatcatccgcaatctgatgggcagacagagcgtgtcaatcagtgcctcgaaacattccttcgttgctttgtccatgcctgtcctactcaatggagtcattggttgtctgttgcacaattttggtacaattcttcgccgcattcagctacaggtcgcgccccatttgaagtattgtatggttgtcgtcctagacagtttggcatctctgataacgttgttatctcttctactgagttgtctgcctggttgcaggaccgccagcttatttctgatttggtcaaacaacatttggagagggctaaaatgaggatgaaacgtcaagcagacaaacagcgttccgagagagaatttacagttggtgattgggtgtttctcaaattacagccatacgtccagtcttcagttgctcatcgggctaaccagaaacttgcctttaagtttttcgggccatttcaggtgatccaacgtgtggggtctgtcgcctataaactgcaacttccttcatcgtcgcgtatccatccggtttttcatgtctcacagttgaagcgagcgctggggaaaggtttggtggcctcacctgcattaccatctgatcagtaccgtttcagtgttccagttaagattttgcagcatcgttcttctgttcgtgggctcaattcctgtccccaagtgctggtgcaatggtctgctatgcctgaggagctggcaacttgggagaatgtccaagatttgcaacaacaatttcctaatgaagctgtctggggacatccagcaggcttagcaggggggaatgttagcataactgaagagaaggacaacgacagtcagcaggaaggagatgat

SEQ ID NO: 71835 - DNA, 476 bp, Zea Mays
catgtgttcgagcgcctcatggggacagtccaacaggttgacccgtactttgtatagcgtccaaactgcgctggaaagatgggactctccgctttgcagaaggttgttgcagccacctacatcctcgcctatggtgttcctgcagatgttgtggatgagtaagtgtgcattggagagtccaccacacatgaggctcttcaacacttatataaggccatcgtagttgcgtttgatccgtactacctgcgcccgcctactcccgatgatatcacgcaactactccaagtcggtgagtcaagtggctttctagggatgcttggaagcatcgattgcatgcattgggagtggcgaaactgccctaccgcgtggaagggtatgttcgcatggtgagggaagcaccccaccatgatcctaaaagcggttgcatcttatgacctttggatatggcacgtgtacttttagcatgcccggtagta

SEQ ID NO: 71836 - DNA, 484 bp, Zea Mays
gatcaaatgtaatatttgttttaccggttcaacatatggtatatgaacaatatgttcactttggcattaaattcatttattatggatatttttatgtggagggtccattaagactctcaagtgtcgcttagtcactcaatcaatatcttcaaatatatcgcaatgtacgggtgttagactagttagtataaaatttagagatcattattactcgtacttacaatgcggctacaggttttaccataacagtggttttttctattgacatagcaggttatgtattttatggataagattactcatgactcaattactgaattacgctgacaaaactgcatttgctagttctatttatcgacacacagtaactctgttctgagcaaacaagctgtttttatggtttgttctattaattgattgatccattttctgttattacttcattctttcagaataatagttggaagaaatggccttgctaaag

SEQ ID NO: 71837 - DNA, 465 bp, Zea Mays
cccagccagccacaaggttgggttcagttttttgaaaaccaactcagtcggtttttggactagctcaacagtttttggccctgttccaccctcctactcgtccagtcactagaccgaaatccaatctgttgaaaaacagctcagccgatttcaaaaccggctcagtcggttttcgagctgaaaagtccaacgaccaccagcttttgggggctccttttatatacccctttgccccctctctctctttattcgcttctgcccatccacgaattcttagctgaccaacactcaaacaagtgcatttacttcatctcccacaccccaaatcacatccccttcaatcatttggaggacccttggtgtgaggtgaagtttgttgaactcattggtgatttcatctcttgattctccctctctctcttcctctcttgagctcattgcaaacttgaatcttgtgcagatttg

SEQ ID NO: 71838 - DNA, 556 bp, Zea Mays
tggacctggagaaggtgttcgagcgggagcggaaggtgacctgggaggagaggaggctggtcaagaagaaagagcacttggaccagagggaggcggtcatcacggaattccatgataagctgaaagcctataatgtgatgctggagaagcagcgagatgagcagaccgcgactgaggcggctctgcaaaagctgcagcaggagcttgatgacagggctagcaacatctgtctcgccgaggaaaacctcaaggcgaaggatgcctccctagaggagcgggcgacggatctcgtctggcaggagaaggacctcgcctggagggaggagatgtgggaaaggcgggaaaagttgctggccgagcacgagctcgaggcagaggagaaggagaagaaactggaggagaaagagcgggcattggagaagcgggtccgccggttccaggcaacgcaggcagcgcaggtagcccagacggcgcaggtggctccgggttcccaggcggtggaggcgatgaagaagacgctagaagatctccgggcggagcatcgcatcggggtcca

SEQ ID NO: 71839 - DNA, 751 bp, Zea Mays
gagtgtgtggcctttatatcacctcctgatgaactaatatgtaacatcttcttaagagggtactttggtatgttatgttttccatgaatgactcagttataaatgaatgcgatgctccagagtcaaataaaactgaagcaggtatggagttgataagaaacataccatacaccatgtcggcatcctcaggaattgattctgctgtcacgtgattaacccttcctctattctagttctgcggcgttttgttctacgcagatccacgagcgggtgtgttctggtcagttctctgactgctgttcttctcgggtgtctgttggttgcgccttgggcagttgttagcatagtagccaagttcgccgcacttgaaacaactttgggttcgactggtgtgttgttgttgcttttggcctgtgtgtttacggcgcttccttgacgagtttgcgaattaccaccagacctttggttggtctgagagttattcctctgatggttctgagtttgattgcttctctgaccttgttgtctagagcgttgtatttgatagttgtttccaccctgatttccagagcaaaactgagaacccttcgagttgttctagcgagtatttctgctagactgaccttgaaacttccttttatgattagacatttcccttcctttgctctcaaggccaattgccttgttcagcagagtctggaagttggggaatgtgtgactctgtagctgatagtttagcggtccaatcaac

SEQ ID NO: 71840 - DNA, 601 bp, Zea Mays
gacaacgcgagtacggtaggtggtttttctgttatgatattccatatctcatccacaggcggccggcccaactctcatacgcaccctggcccacaaccctgatagacactcttccccgcccgacacaatgattcacagctttccacctccttcgctcacctcttcttctccagtcttctctgtcacttgtgtcttggacgtcaggcgtgacagttgccccctcccgagagcttgcttgtccctaagcaagggaatgaggaaaacgttcctgaagcacgtagaaatcctcccaggtcgttgaatcaggagaaagatgactcagaataagcacctgtggcacagctctgccgcccttcttcaccaaacgtcggtccaaaatttccttaggaaccacatcatgctgagccagatcctggtaatgaggtaatgtggtgaacactggcgtataattgcgagtgaatggcttgagttgagaaacatggaacacatggtatatttgagcagtagggggtaactccaagcgataagcgacagaggccactttctccaatactttgtatggctcgaagaatctgaaggcaagtttgggacatggtcgaga

SEQ ID NO: 71841 - DNA, 885 bp, Zea Mays
ggaaagtaaatgagagaaaaagggttcagtctgtctttaaaccaacttctgaatttttgctcaacaaatatacttcacaatggaaaagaaatgagttccaacatcttagaggtttcaacagacctaggtctccagaatgggcacgaggtggcctctatgaacagaaggaagggccgctgaactggagaagtagggaagagggaagactatgctcatgcagaaagccgagatttgttctcacaacctgaattcccgaagcgaccatatttggagacagagcgaaagtatggagtgtggagcaggctagggaggagtgtggggagtcggcccagggctgttgccataccaaaaggcctcgaggagttgtgcttgcagattcaaaagaaatggtctcctcgcaacccaacagatgccagagggctgtgtatgggcaaaaaattagaaggggcattattgttgatgggcaaaatgagccgctgggcaaaagcgactcaaaaatcatagtgggaacagtggagtgtgacatattaaatgctatagaaggttcctaggcagagatggcaacacaaaatggtcaggtggctgtcacaaagaattacacaaagaaaggtgaagaagtggcagccaagccaaacataggacatggacacgtagctgctgctgggacaaacagattataggggagcaggccacaaagtggtggtggtcaagggatgagaagcaagtgtatgaagctttatgtagtggttacacgacaaatgagtaattctgctagctaggatagggaacacaggactgaaatgattgtgaatcagtgcatagtcggtcccggtgttgtgatggatggccactatagcggagagcatcacacgtgggccgaacaac

SEQ ID NO: 71842 - DNA, 812 bp, Zea Mays
gcatcttaggagctcctctccaggagagagagctctcagctcctgtgctatgtcaaatctatggattatctccaaagccatatgaagttgcagcttagcatccgagatagtgttgaagctccactgtctgagggcccttgctgtagcctgcagtttgtgatagagtctgtggaaaggctcctggtgtgtgcagtgagcgcaccaggacctcgacaccacttccatgaatcctgggagcatggcccaaaaattctcaaatttaaaagagcgcgggcgtcgggggccagtttggttagagagcagcagtggacagtgatccgagagcgaagaagataggccgtgcagcacgtggctatgaaaagcttggtcccattcagcatttgcaaagaccctgtcaagcttaataagggttgggtttgtacgctcgttgctccaagtgaatcgtctattttgcaggttaatttccttcaggtcacaacagtctagcatatcactgaaacggctcattaggctaaggttcagacgcctcttattcttgtcactagctttgtaaattagattaaaatctcccaaaagcagccacttaattccggattgcggtttcagatcttgaatttcttggagaaaggctgtcttcatgctattgcttgtaggcccataaaccacagttaataggaaggcagtatgggacgctgttagcttggcctttccagaaatatggaaatcaccaactgtaaaatcagtcagctccacatggttggtatcccatagcaatgcaatccctccccgtgtgccgctggggcctccagccg

SEQ ID NO: 71843 - DNA, 556 bp, Zea Mays
cggcattacaatggtcactaatttagccacttctgatatatagttcagcgcttacagtttatccttaagacaatcacataccatgtgattggttgctgcataatgttagcctgggctgtatgtaaggagccgggcttctcgtgcccaggctagattcgtacattgtcttttgtttggttgtttgcatcagtaaattcagactagatacggcaagtgtttagttatttgtactgaaacatgtaataaacaagtgtataataaataaatctctaaattttatatagcacgagtaatctgattttgtttataaaaatctcatgaacacaaatataaaaccggtttgttgattaaatctattgattaaaaaatataataaaaaacgatttaaaaaaaggtttcatattccgtgccatgcatgccgccagcttcatgcatcctgcatggctggatacgcgcctcgcgagcatctccatggagcctggccggtccacgatttttgcatcagctgagactgtatacgtccaacaggcaaccaatcataacatgctttaagact

SEQ ID NO: 71844 - DNA, 358 bp, Zea Mays
aaattatttaggaaaatgtttgactctatttccctttcaccgggccaatgacgagaagggagaactacgagcaggagcagcatcgacgaggtggacaggatcacaggagggagcaaggatagagttagctcgtaccgtactcgtcgtagttcaggaggacaggagggagagaagagggagatccacttgcagcgccaatgaggtggacacctacgagccgccgacgatggttgcacaccgacgaccgagcgcgatgtggcggcagtcctagggagcagtcgagcagggagagggagctagggttacaaaatcgccgatcggatcgagtgcgactatgcgggcatgggcgaaatgtgtg

SEQ ID NO: 71845 - DNA, 560 bp, Zea Mays
tataaattaaagctaagcgaacaggctaggatatggcaagcagcctctagggaatggccgccgatgtcgtacctatataaactaacctaagggaaatacatagaactgttcatgatataaagctttgttgatctgatggaatgggacagatcaccattcatcaaacaggtaggtcagacgtgtgatttccaagatagaatcaaatcccatctctagtgtctactttgatgttgtgctacctcccatatctgcaagaatttcatctcctcatgtcacatgcaacttttatccacatctactatccatcaggaacaaaagaattgagttacgcgatattccgaggtgagatttttcaacaaagtttactggtcctgagtctaggctttgctgctaccagcaatggaatagtagttggcaatgttggctcgaagaacaaggaccatgaagcacatgtgagatttcgctgacagatttgagtaaacactgggcctgcaacctttcaggctttgtgtaactgagccatcgatgcgagtttcttgtatggaaaatcagaaaaaaca

SEQ ID NO: 71846 - DNA, 1331 bp, Zea Mays
agaacactcattgattaattttaatttagcgagggagcctaaaaatcggtttatttatgttgttgtttgcatgctcacacgtgaagttgtgaaagtgcataggagctctgaacttcctgaaaggattaggatctagacgtctagagcaattgcaacaggttcgtcaaatatgccccttgaacccaaaagttgagtttcacacaaaaacgatgggcggagggtctctactcaaacccccctgaaaacaacaaagatgcctctcacattgtcattaatgtcacctagaggagggctactcttttcaattttagctattttttccacaccagaaccatgcttgcccaagcactcgctccttcccattgcttgatcgtcgttgttactagattggccgctgataccacgctcggtctacacttctggctcaatgccttctccaggaaggcggtgcgggcgctacgcccctccccatctccgatgatccgctcatctgacatgtcgccacccctcttgtttgcttgaggcaccacacaactctcgacgtgccccccaccccaccccaggcagatccacgtcatcttcattccaccatgacatcatccttcatctcgcttgacaccctagtgagcaaggctctctaaggccagtgacgaacaaattgattctaacaataataaaaggaataacatcatgcttcacatatttataatccattagcggttcataaactagtgctagtgactaaaggaatacagatatacacatgcttacagtggggtttcgacgctagaatagcgtaatagtagacaaagcatatcaacatcggtgtagagaaagcaaacaaacagcgagcagtcatgacgacgattcccaaaactttatacagcccctactcgtgcagggacacgaggagacgtaggcttcggagatcctgctctcccaacctcgatgacatgtcggcggcaggacggagaagacgaagtgagcacaacgatttggaacgaggaggagtctatgttctgatttgtgctggagacgacgtcttgccccgttatatgcacacggcgcggctaaggtaagtaattagccacgtgatcacaaccctaacgtgattgacttgcaatcaattaaatcgatcacaattagtgcgagggtaattacttgacggaataggccaacacaattttctccatgcaaggaaaaaaatcgagcagcaaaaggtagttgggcactcgcaagggtggaggcaagaaatcgccggaccattcacatgcatggcttgcgcccacgcccattgccccgtcccgccccggtgaaagggaaatggcctc

SEQ ID NO: 71847 - DNA, 352 bp, Zea Mays
cggcaccgatacacttattccacgattgcaaacttgttggttgctgaccctcctgttgagcaaggtaagaattggtaagagcttgtgtggcagtttgagagtgagcgccttgcagtagctacatcctaatagttgtagagtttttattccttcattttttatcttgttgcctctgttcgtctaaccatggcaggattggaggttgatgatgcttctcgtaatatgccacactctcctcgcaccaagggcatcatacaacactttgtaaggctggtgaagacgcacacggaaggtcttgataatgacttgcaggtgacgaatgaaaagatggggcaattggaggccacacaga

SEQ ID NO: 71848 - DNA, 725 bp, Zea Mays
gagagctatcacatagctcatgggaatcttcggtcataagtcattacattaaggaacgaagctctcgagaaagataagatattgctttccttcgtggacaggctgaaaactagcgaagccaaacttattgcacaagccgaagctcacaaagccgaagttgaagtttaaagaataagcttgcagaaacaagcgaaaaatttgaagttgcaatggtgaagcacgagataagcgaaattgaaaaatcaagggcacaaaagaatgccgacgagctccgtgactccaaagagagatggtatgaaatatcgttggaatgcgccaagaatctaaagaacaattttgcaaaggagggagcatactcttccgagccgaggttcatccacggtgaccccgatggagtcgtccagtggatcagcggagaagtcaaagccattgacgaaattttaagtgaccggggagtcttctgtgcattctctggcgcacgaggggtcgcgccgatcaaagagaaagccagttgtgaacatgttaatgctgcaactcagtcgggaattgttttcttagcggatgacgccaaagacccttcggctgaagcttcttcgctcggcggaaggttctaccctgatgtgtggatgaagggcggtcgtgagatggctgacaaagcgatcagaaaaaataaaaaagaatctcacgacgctcgagaagaagccaagcgagctgaagaagctgcc

SEQ ID NO: 71849 - DNA, 646 bp, Zea Mays
aagaattaagaataacaatgaaatacttcatttccaactttaaagttaacttctatacctttatactgttgtacgcaaggctatcagcaagatcatccttcgacatggccgaaaggccttcctcaagcttcggaaatcccatacttttagctatctcccggcaaacggatatttatttgttgtccgggagacagtacaggaaatcatcttcgttagtgccattgaacactaaggctcccttcggatattttagtttctaggcgtagtgtctggcttctaagatttcttctttagataatttttccccgaagcatgtcgaataatgtaatcaacatcttcagtcggagcttcgggggcaggagattttgctttttctatcttatcttgccccgctgccatgccagtatctgaagtttgttgctcagctttatcttcaggcacggtagccttcgtcttaatgggcaccgaaggccgagcttcggcttcggcttggactttgatagcttcgacaacttccttagtaggagcaggggtcaaggcttttgtggtctccttgacagcgtctagcacgttggccatcctcctcctcttgggagttgtggtaggagcgtttgtcatctttggcaattctgcctccgccgatggg

SEQ ID NO: 71850 - DNA, 376 bp, Zea Mays
tatcaccccgggaaggccaacgtggtagccgacgccctcagtcaaaagccattcggaataaaagggaccaactttctagaagactggaagaaagaataagcacaactaaatgtatgtctgggaaacaacgacagtctcgaagtcaaaccaatgctagaagacctcatctgcaaagctcaacatctagacccagagacggcaaggcttgtggagaaagcccgcaaggaacaactcccggacctcaggacagatgaccaaggagtcctttggttcaaacaccgtctatgtgtaccaaaaggggaaacccgagaagtcctactcaaggaagctcacgacttggcctactccatccaccccgaaactaccaagatgtacc

SEQ ID NO: 71851 - DNA, 839 bp, Zea Mays
cgatctaccgagcaacagcttcaaccacagcgggctcttctccgatcgtggttagggtgaccatggtcatggtccatcagcgcgatagcggccaagcaaggtgtcatcgtccggtcgttgacgtcaacacgacgatgtctctacgggctaacgtcatcccggcgacacctggcgaggtataggcaccgacaaccacgcaagtatttcaagcgacgctgccacttttgatctaagtgtccctccattgggtgtgcgcttctgatcttcagggaggacatgccgccgccaaataggaccccatgcgtccggatttggagtccctgaagccatttccccactgccaaccaccgttctaatctgcagtgtgctccccaaaaggtattcacctagcccatttaatttcacatatactaccatgtgtctgattgcctgcacaatccaaccctcatagccggtatgaataccctcatattatacctgtttgtagtcttaaggagtttttaactctgccatttagctgtagatcttagcagaccccttgccatacacttgggtaatatttttttagatatttaccattgagcgctttaggtagcttcttcccttgcaaatcttgaacaaaatatgcatttccatgcacaatacctaccaccttgaatgcgccctcccaattcggtgaccacttgtcaaaccgattatctctggaccctataggcaaaatcgtttgccacaccaattctcccatctgaaacgatttatccctcacctttttattataggcctttgctactcttagtttctccttctctatttcccttatggttgttagtcagctttca

SEQ ID NO: 71852 - DNA, 313 bp, Zea Mays
agaagtagagaccatggtaaatcatttggaagaaaagtctctagaaaatatcaaggtggtctgtgaatacctagacatatttccagaggaattactaggtatgccacctaatcgtgatgtagaattctccattgaattattatctggaactgcacctacatcaaaaagaccctatagaatggatgttaaggatttaagtgaacttaagaaacaaatagattaattgttagagaaagggtttatctgtccgagctcgtccccttggggaggcccgattctatttgtggataaaaaagatggttcaagaagaatg

SEQ ID NO: 71853 - DNA, 400 bp, Zea Mays
tagatttggatccatagatcgacagagtcagagtccataatgatgcttaagtcagtgtcttagtctcagttaatcttagttagagttagtttgcttgtcatatgtcttgatgcttgtcgtgatgaacttgtaatgaagttggatctttgtaatgattgtcatcaaggtgtgggcctccgctgcaacttggtgtagttattaataaagtcagttatttagttgagcaacctatttatttccacttttctctttatctgagaagctgtcagtgaagatgatcaattgttcagtgctatgaagaaacttggtgtagttatatcttttcttatgctgaaagaccgcagagtcggagctgatttgtgtgtgctttttatagatgtctgagaacagacacagatgt

SEQ ID NO: 71854 - DNA, 607 bp, Zea Mays
tagattcgggtaattccaaaactgacgtagtcgcaagcaatgttgatatcgactttgggagagtagatggctccacggacatggttactacaggggtatagtaggttcctgagaaaaactcacgttggcatgatctcatgcaaaccaataagaaaatataggacaaatcgatagatgatacacgtacctgtgttgcatggtgatcactggcatctaatgaaccaactgtggcttcaccataaacatcgactacagagtcatctccggcggtggcatgagtagaaacccgtgggtcttcctccatgccggatgctaaggctgcctggtatggttgcagcctaatcgtgcgatagcctttactagagatcgatcttttgtagagcgctttcctggtggtggctcgatcgcaagaggcgttcttccgtgcagaaccctagcggcagatgcgaaccaaatgacgcagtagcgcgacgatccgtattgccgaacgagccgagcgagacaagccaagcgacgatccgtattgccgagcgaaaccaaagacagccgagcctacagcgaagcgagcagaaccgagactacggaggaggcgggcgtccgatgtgaa

SEQ ID NO: 71855 - DNA, 446 bp, Zea Mays
ccgccagcaggggccaggaatctttttttttctttttggtggctcatcgtatatgcattgatgcatccaggggacgatgtcgtggtcgtctctctctgctgctggcttgttgccacgttgagtgtgccaccggggcactcctgacggtgacctctcgtcgtagcgccctagctagtatgtagcaggccttctaattccttggctctttggtgatgaacaagtggcgcgcgagcacatatggacataagcgtgcagctgatgtgtctatgcaaatccttggatttcgagagttttagaagcaacaagcaagggccttgcttggggggcacgatggattaggatatgcactggctggagacgagacgactcacgactggtgtgagtgaatagtgatcctcggttgatgcatgtctgtctgcatggatatgccagaagggatggagaga

SEQ ID NO: 71856 - DNA, 300 bp, Zea Mays
gtccagcaaggagagtttcagatggcatctcctctacctgctacataggcccccaatataagtaaatccgacaacatccaatcgcttaggcattgtatagatgattgtgatcaattaaaacaatacatgaggtgtatggaagagtcctttaaaaaatcgacacgtgcatatgaaaaaatcccccatctccaatttttcagctacaattggtcattcacaaacccagccatcttatgataatgtcaatgaaatcatgcaccgggcaaccatagtctcctccgccaatttagaataaaccag

SEQ ID NO: 71857 - DNA, 715 bp, Zea Mays
aaagaataggtacaaccttacaaatcttcaccatctgaagttctgaacgaagtgttggactatgactacacaacagaccaaaacaagaggtcatcaaaagtcaataaattgcttctcctaataaacaaatttgctactaagatctgatgagaaccaccaacacatctgataggccaaactcttaccgcccttcaccggcatcaaaacaaatatcgccaaggtaggtgtgggatacctcgcaagtaaaacagacctagtttaattaggatccactgaatgtaatacttgtaccatgcaatcctactagctaggatttctgcattttagcagactagaatgcttttctggactatataaagaacgacatgactttctagatcagcaaaaggacatggctttctagatcaatgaccgatacataacacatatatctcataattcaacatagggcaactcacctaactggacgtagtgtgctacgctattcaacggcctgaatccacacaaatcttcttgaaccaatgggattctgcttggcttgcaatcggctgttccatctccataagacataaggcaaccaatcatgcaaagcaccagacatgacagtaaggctctattggcagaatggcctgctgggttgtaacatctcaaaatgctactttgagaattaggaaagaaaagtattaatcataaaatctaaaacaaatatgtttgc

SEQ ID NO: 71858 - DNA, 800 bp, Zea Mays
cagcatcgaagtccttgttgccccgattgaaggcctcgaaatgcctacatctctcgtgggacaaggcatttgcagccccctcacaagtcacaagcgacacataagacataaggcctgtcacaatggacgggagtgactccagctcttcctgcagccaccccaagaaatgggtacccacctcctcccctgacttgtcgaagggagcagtctgcgtgccgaggtcgtggtacacatccacaaaaagtgtgtgcgtctgatccaccctggtacgggtcgccaactctgtcttctcatggtagccgcgcatgttcctcacctcaagctgtagatccgcgacacgcttggggcagcttgggcctccacgcgggcattctccgcatcttccttatcatcattaagccagtggtcgaggtcctccttttccttctcaagcatcgtcaccttgtcgagaaggtttcggctcttattttcggccgccaacttgtccagtctgggtatcgaacatggtgactccacccaccaggtaatcgtccacaaacaactcctggcttgtccccctagtacccgacaccaccgtttcagtaacatgcggcggcgaagacggcttcgtagccaaagctagcgccatgggggcatcgtcgtagaaggagccacccctttctcactgggtcgcaccgccttggcatcagggcgcgggtccactagccgcagtggggctttccgcttcttccaatggatctcttggtgatccttctctatcactgctgacacaatagcaccaatatttctcttgtaaggaa

SEQ ID NO: 71859 - DNA, 569 bp, Zea Mays
gcgacatgctcacgctcacacgactcagggtgatcactataccctactgacagagcaatcggcttaagtcggaaatgccttaagtcagtacgacacactcacacttacatgactcagggtgatcactataccctactaacagaatagtcaactcaaaacggcagcacttcgaagaaaaataactcgttcacatccttaagggtgttttcagcaccctactgacagaatgatcagttcaaacatagcacaattacatacacatggaattcataatacactgttttgctaagaagtactaactcaataaagagatgttttcgattcaaacgaatcactgcgtaggagcatttttgtaggaagcctcggttgcagcagtagcagaagaagatggtcgactcatgatagcaggtgcggcaagaacatctgcaacaatatcttcaggcatcacaacaccaggcctcctcattaggatccgcccggcgtgaatgaccttgtccatggctttgtcgtacatcgccttcataacagcacggtcatcctctaaggccctgatgctgagatgggcggcc

SEQ ID NO: 71860 - DNA, 586 bp, Zea Mays
gttttcagacaatgtcttcgtctcaatgaccttcggcggggcaaaagatactcatcacgaagcttttcttatgacgaaggtcctgtaatattcaataatacactagaaacaaaaggttagttgtgtctttgaggaccttcggaagagaaaggcccctaataggaccctcctcgccctttcagacaggacaaggggaagactgtctaccttgagcagcaagggggcaagaagaagagacatctcaacagagccacccgtgtagtgattgcagtagcagcagtagatcaggtagagcagggaggttagttgaggatttcctctgatctgattgctttctgagtacgtcgccactcgtctcagactcgctcctccactgctcggtccactccctcagacccagtctccactccacctcccacttcgccagctccttccgctctcgagccttcctccacactcgctgctactaccacctccaccacttcagcttccactgctccccctcccgcttccgctccacctattcctccacctcgcttctgagagcgtgacgagaccgaggtgcgacccctcactactgatcctc

SEQ ID NO: 71861 - DNA, 277 bp, Zea Mays
caagcactggcactatacgggtcgtgctttttcgtgtcatgactggactggtccatcgtgttagtgccaaatgaccatctataccgccatcacctatgagaccacctgtacagcgccatggtggatttgcaaacccagtattttttggtgatgtttctcaggccaaccagaaccagaatactggcatgcagctatttgccgggtttcagtcaaaggtcttgccgagaacatcctcaaaggatttgactgatggtgataatgttgaacagacaattgc

SEQ ID NO: 71862 - DNA, 405 bp, Zea Mays
ctcgcgtcctattgcctgcctatgtcgtctgtactaatgcaggaaggagaaggatggagagaagaactaccctatggggcccacccgcatgcaacatgcaacacccccacgcacgatccagttttcccttgttgttgtcgtcattagtcctaaaagtttgggtcgtgcccaatgggctagctcgagaaaaaagcacaaggcctagcctagcctagcctggacaatttattcgcgggctgggccatgctttaactttcgatccgttgtgctacacggctcgtcccgtcgtcatgggccacgctcatgtcagcccggcacggtaataggcacaagattagggttttaggctttagggttcacacacacgcggtcagtcgaacaccgggtcacacctctcccacttcc

SEQ ID NO: 71863 - DNA, 593 bp, Zea Mays
aagaaatgcatgccaattgattaggaaatataatttgttggagctaactttaagttttcataagtttcatttaaacccgaccgtccagtttagggaagaacattcagaggtggcttatgtgaatagcaataaaataccacccaaagcaggaagagcagtgtccttgggcgcgtaggagaacggagaacatgaattaacacaagctagacaacatatatttgtgtagtttaggctttcctttcaaaggcaatgtttagtacggtaattgaaggtgagacattcgaaatgtagacaggaataaagatgaaggggaatagatggtgagaaaatttagacacaccttagtaccttactgtagccgaggaccaactccatgagcagctctatttggtcttctcgcatctcccccgacaaaataatatttttaaaaaatatatagaaaagataatcaacattttttgtcatgcaacagaagaagaatggaggtgaacagttaagtgattagcagcgaagacgactctgaaaagggatctaccggcgatgtcgtcgcatcctgatcactcaatcattgggataaacaccccctggcagac

SEQ ID NO: 71864 - DNA, 1116 bp, Zea Mays
gatgggtgatgcaaggagacacaagatttatcctggttcgggaaatagaaggcgctacttctagcggagggtgatgagacttatattatcttgcacctaagtgcttgtactagggggtacaagcaggtcaagggagggagttgatcccaagtctctgcggatgattgaggcaagtgctaatatcgatcgtggatggcaattgctaaagtgttgtcctctatcccctggaggccctggactccttttatagcctcaaggagggaactcaggggtgccaaggtcgtcgtaatgtggagaggaggcgagcctaagcccctgtagcagtatggccactagaatggctcttttccttgctgctatctttgattaggaggatgatgtctagcccatgtatcccatatcttgaccaagcaaagagccgaggccagggttgggggctcggacacgtacccgagcccatcttgtggatgagttgtctgagttgtagttgttgaaatagtgaaaagtgcatggtaattcgtctcttatggcgtaaagtaggcttgacactagccctgtggtttctatagccatctcgttattagtagtttttgtggaagagttggtggcatcgggtgtccttttatcgatgttgtttggtcgaggtcatgctcgggtgaggtagagatttctcctgaggccatggtcgggcatgcaccttgacacgcagttatgctgggaatggtcaaaatagtagttggagtggtctcctgtggcattcacggggagttggtagcatgcgctactgccagggcagttggccgagactgagctcgggtgaggcagagtttcctcccgaagccaaagccgacttcgggcgaggcagagttctctcccaagggtgaggttgtgccttgatgtttgcatgtcccatccagagttttttgagaacagtgaccagagtgagggagtagtgcctagtattcgtgggcgtgcgtcatcctagtcattgaaaagtagatgggaccatggtcccatcgtcctctgttgactgcggtatcacatggagcaggtactcatatctaacccgaggtcacgttcagttgtgaccacctcaccgtcgtcggccttttcttt

SEQ ID NO: 71865 - DNA, 383 bp, Zea Mays
gccactgctcccattgcttagttgttccctagacagagtaatagagagactctcttcagtggtagctatgttggccctggaaccaccacgacctctaccacgacctccgcgacctcttccatagctcccacgaccacgagtaccccctcgtcctccacgagatcctcccctgccaccatttcctctagggttgggacaattgtaactcagatgtcccctttccccacaattatagcattctctatcctcaattgcaacgtatgctggcttcacatgattaccactacccatcactcgaagtctgctctcttcatctatcatggcagacacaacctcgtccatggtaggaagactctcctggtgacaaaaggccgctctcctgc

SEQ ID NO: 71866 - DNA, 529 bp, Zea Mays
ggcgttacagtttcatagaaacacaatcaagaaagttgtacaaaaactcaccagacgattagatgacacctagctgcacaacacatctgtgtttgcaagatctcgtcccttgtgccccttgaggtagacatgaacatcactagggactacaccactgctggcttcatgtatgtgcaattgagaagcatataatcataaattacaaacaacgaaaacagaatcaatcgcacttaccatatattttgataaacaaaagtgatcgtcactctgtatctatgatgcgaatcagttccatgattggacctttgtcgcacatacttagccttgaactcattagaagtccaataacgtcctaaggcacggcaagcaacatcattggcggttatccacagaatcgaatgcttcacataaacaattcatttataagtaactccaacctctagaagtaaattgttccaatacaaacatacatcatttaccagaataaattgttcctcactcatttatagtccatactttgatgcctcac

SEQ ID NO: 71867 - DNA, 585 bp, Zea Mays
gcgtgttaaacttctgctaagcctgtaaataaaattggaatatatataattcacaaagctgccactgattcttcatgatccatgacatcttccatcacagcacccaagaaattatgctatcaagagcaaggaatgtacacacagagaagggtttgcaggatacgaagcgaagagagtgtaagcgtgaagtcaacaccacagagcacatacggaaatcatcagcttccttctgttcgaggcaatgtgacataaggccaatgctacgagaaaggaccgaagtcccattaccaaaacaatgctacattgaaatcttgtgctcctattatatgagaacacggatggtactattctttgtgtggtaaaacatttggtgcgccgcaaacgtcataagacaaaatatattatcaaccaagcatcagggttcaagtctgacagcaggatcagaacatcataccaaatatccaataggtcaaaagaactcaacacaccagcttcataggacgctggtcaaatccaccaagaaatctagaaagaaacacctagcattatttactaatccactaatccggtccaccagtatcccag

SEQ ID NO: 71868 - DNA, 636 bp, Zea Mays
gtgacattatatgacgataactgaccttgtcattaggtattttgtcataaaaggacaaatttcttgtagtgatcattcctcactttggcaagcatgcaaaaacataagaatggtctgcgtagtttgtttatttgtgatgattggcaacattctaaattctctaccagtcaagaaggtacgtaagctgagaacattgtcctctctatagagttttggcaacatttggagaattgcctaagggcttcacaaccccttctcattgctctaaggattgttgatggtgatgagacaccagcagctccagagatcatggcagcaatgggtaaagcatgagacaccatccaagaagcactaaaagggaagcctagactacttaaagaagtattggcacgtttcgaaaaaatatgggatcggcaaatgaagcaaccattgtatggagcagcactgtttttgaatccagggaaattcttctccattagggagaaagacaagaagcaagctggaattctgagatctatgttcaatgatgtgatgtggataatgatcagtgatgaggaagagcaaactaaaataagtaatcaagcaaatgactatgagaggtccgaatgggaagcattctcaaaacgaggagcaata

SEQ ID NO: 71869 - DNA, 595 bp, Zea Mays
tgacttgtggaccgtctcctccatttgctcctttaggagcttgttgtttgcctcaagatcttggcggctaacacattcatcgaagtctgtagggatccttgcttcttcttcgtcgcctgccatcgaaacacaaaaacaggaaacaaacggtgaaggttatccctaataatttcactacacactcctctcaggtggaacacaggaacacgctctaatgtatcttactaagctcttacaagtgtctgacgaaatacaaagcaaaggatggtacaatcagaggctggttcgtgatacttaccaagagggagtgaaaccgcgattgcaaggtcaaagatgtattgatcagaagaaagtacgtggagcttgggaggccaaaaattaatatcaaggattagcaaaaatcaagtgcagattagcgaagttcaataagtgtccaaagcacaagtcacaattgttggctaagccgtgtcctatcgaagcacaacaaggtaaaggcaataaggaacgatggacaaaaacttaaagaactagcagaatggcagttctgtaaatagaacagatttttcagcattagtagaaatcaaaggcgcgtttc

SEQ ID NO: 71870 - DNA, 905 bp, Zea Mays
gtttgccttctaaaaccgggtgtgacatgcgtgatggaagaggatgaggctatcattttccttttcggcccttgttttcgggcaggaaagcagtaatcagaataaaaaatccaatcacatcaaaaactatattcaacctcctctttccgtgagcgccgaaggcagtcgtcatggcttcatcctctgcctttgtgtaacctcctaacatctcgtcactggtagcttcgacaacctcaagccagtcatcattcggctcatcaaactgatttctgaaacgataggtgtatctcaagtaaaccaaaccaccttcgttggaactggcagcagtctcctttagcatttcccagcctttaacaagcggccacaccttgtaagaaatatgctcctgtaccaaatccctagtaccgatgtaagtgtagaaagtgttgaaagccatcaaacacgcttgcactttgttcccacttgcaattgacgacctcctgatgccgaagcatgaccgtatgggacactagataatacccttcacatcttccctctcactcagatcattcttgacatagaaccattgtttcatccaagagcctggccacttctttcggaatgtcggcacgggttacctcgcatcagagtggtgcacaaagttgtagcacccgaagttgttgtgatactgttcctttccaattgcttttgtatggtaggataattcatgaatgttgtagaaacacttggcatctggcaccagcccttggctcctcatggcacaaataaaaatcccccactttaattaaagcttcgggagtaagctgatacaggtatatctcaaatatatttaacatttcaaccagcatcttatgcaggggaaaatgaagcccagccttcataaaactcttaaaaaccactacctc

SEQ ID NO: 71871 - DNA, 691 bp, Zea Mays
ctatagtgaagttcatagagcaggggactagggttttgggttctaagtaccaaacatggttcaaatcataccaaaatttacccaaggcttctatataatatttaaagcttatctaaaaagtttggtgaattttgggattattaattacattctaaaattccagaagtatgagttttggctattttaaatatcccaaaattccttatttggaataaaaatcctgaaactatttttactaaatactatggaaaattagtaatttagcaaaattggtcccatgtttttattatttttctcgaattctttatggatttctaaactttctcagaaaaagaaaaaggaaaagtcatcaacagaactgggctgatatcggcccacccagcccaggcctgtgcagaatccgggcgtgcccgcgaccgcacggtgaactttgcgcaaaggcccttgacggttcaaaaatctaagaagaagtactcgactggttttaatgagtcactgacatgttttccttagccccccaaacttctatgtcttttagagttaggtccttgaccccggacagcggcgaggacgaacaccccttcctcgcgccacggccatgggatacccgagcacccgttgctccctgccccaccaaattctaccctagcttgagctgttatgggcatcaatttggctggcacactccgag

SEQ ID NO: 71872 - DNA, 1022 bp, Zea Mays
gtttagcttctggcctgggatggcgcggtggccacacttgagtgcatatgcatcttaatcccaagcggtcggttgtctacactcgagtgcatgcatcaccaagtcaataatcattaatggcacctaggagcgagtattagcgggcggtggacccggtccttttacatcacaatgagttgacaaagcaatgcaaatcgaaaagcgctgcatgtgatgggatggatgcagatgccgatggctaacggtatccacgagaccatgacgaccaggaccagcagggtgcaacacagctaactagctaccaacgacggacgcgtgggatacatcggtacggctcggacaatcctctcgtcttcaatcccagccgttcaacacgaggtcgatggaaggcagacgtccagatcatgcagggcgcgcaaggggataattattaaagatcgatgaactctagcgcgcgcggcgacaaggaggcatgtcacatacacgcgcagctaataatgcaggagagagagacccagtccgcagttgcatgggcagtagttgggcaacacgatcgagcgagccaaaccagctcaccttatctatgtgcgtgtcagtgtgtcgacgccgacacgtagctgctgatctctagcgcccaataaagcaggaagcaaccaggcaaatgcgcgctagcagctgcctgccgttccatcggcagctgggaaattaaacgcggggtcggtcgcgattgttaataggttctaggaaacgtacgatacataggagtgcaagtgcaacatgagcgcgcgcgcatcgtaaacagccggctgctagctagtagctagcacacacgcggcaaaaacacacacaaaattatgtttgctagaacaaaaacgtaacttcgtgacgccgtcttgcttgtactcgtgaagaacgcaaataaataattatggcgtcgttcatatatctctctggtatatatcattacctccattcttaaatatttatcatccactagtttatttaaaaaacaacgaaaagag

SEQ ID NO: 71873 - DNA, 445 bp, Zea Mays
aattctaactcctttaattctcttcattaccttttatcctaaacaagccctaagggacgtccccgctacggcttccgattttatagagcctccgaacccttcgtaatctcaaatatacacaatatatataatataatgtagaaagactttttacattagtttagttcagtatctcctaaactaagcttctttctggctccatccctgacactaagcacgcagcagcaaattctggaggcaacaagctcagaggggaaaaggatcaaacagaagaccgcatgcagggcatacttttaagttgccacatcctagtggcctatcgagataccatcgaagacaagaaataacgttaaccaaaaaaattattaaagcttattcagttataatcacatatggattgaatacgattagaaaaaaatgtgaaagatttagacttatttaggat

SEQ ID NO: 71874 - DNA, 1167 bp, Zea Mays
gtgcattagtcagtccaaatgacatgaccaaaaactcatataatacatatcttgtcgtgaaggctgtcttgggtacatcttctgcccgaatctttaactgatgatatcccgatctcagatctatcttcgagaatatcttagctcccttcatttgatcgaataaatcttcaatccgaggtagtggatatttattcttgatggttacttcattcaaacttctataatcaacacacattctcctcgaaccatccttcttgttcacaaatagaactggggctccccaaggggatgaacttgggcgaatgaaacctttttctagtaattcttctatttgtttcttcagttctactaaatctttgacatccattctataaggtcttttcgagatcggtgcggttccgggtaataattcaatagaaaactctatatcacggtcaggtggcatacctagcaattcctccggaaatacgtctgggtattcgcacactactttgatattttccaagggcttttcttccaagtgattgatcactgttttcccttttttatctgttgacttgtctatgttagcttggattcattcaccttgaggacttgtcaacataattgttccattgacacactgtatcactccatcacaacttttcaaccagttgcatccaagaatcacatcaatatcgttggatcctaggaccactgggttgactgaaaaatctattccttgaatcttgatattaacatgggggcatgagtgtgtggccttcatgtcacctcccggtgaactaatgtgtaatatcttcttaaggggatacttaggtatattgtgtttttccacaaatgactcagttataaacgaatgcgatgctccagagtcaaataaaactgatgcatgtatggagttaacaaggaacataccatacaatatgtcggcatcctcaggcactgattccgcagtgacttgattgacccttcctctgctctggttctgcggagtcttgttctgagcagatccacgagtgggggtgttctggtcatttttctgagtattgctcctttggggtgtttgctggttgcgccttgggcagttgttggcatagtggcctagctcaccgcacttgaagcaaccattgggttggccaggtgcgttgtttctggcctgcgtgttac

SEQ ID NO: 71875 - DNA, 1220 bp, Zea Mays
cccagggctccaactatactgcatgccaaccagaaagctagacagaagcttgtgaatgtatgctcaagcgatcatgcaaccgtctattcactccttacagtgttcaggttgtggaaaggtataggagtgctgtgtgcagggactgaactcgcaccatgagttaaagcaagcactgttcctatccatccatcatatcaaaagctcgatgatttctctaatcacgaccacagtcttcacggggtagctgcaaaggttttggaccgagaaagcaagaaaatatatagtagaaggttaaagcatgacatctatctacccggccagccagcatttcgacagcgcattcaaatggatacatagatgtgccaaaatcatgttcatcaatgtagcattcacgaaaaattcagtgaatgtttgtagggcagcgccataggaaaaggctggggcccactggcctgcttcagaacatatagctagcaacagggggcctgcggccgcgtatgtgcacactagtactccgtcagtacacccgtcgagtatggcatattcgtactccgatcactgtagtagtttcgtactggcatgtttttctgtctgtctgaataactctgtgcgctgcatcctcgatcggatctggtttaaatgcataggttttgttgagcaccatatttgacacatgggtacggttagatggtccagccctatggctcgaacggtccgcgctcccgcggctagctaaacacgggccaaagcacttatctcatacatggttgtcctaacctatctatggagatatgttagatctcgtctagcaacaagtccaaatctcctataaatataaaaggggtatgaccgattgagaacaccgaacacattttaaccgaaccaatctattactttctttatcattcatatgacctaagattagatgtagtgtagttatagttgtagctttctacataacatcaccacctccacctctattcgactctatttcgtctagatctgtcttaagtgacttgtcgaccacaatacgatcctaggattttaactctctcgggggcaagatcaaccacattcaagatactctttctcgacttgatttcttaattcataggcaactctacgtcatataggtatgcctcgggtggcctgccagatccggatcatcctaagatctctccccaagaaggcgagatctaggttttagccaggaagaagac

SEQ ID NO: 71876 - DNA, 401 bp, Zea Mays
ctcagacgtggactgtggggtatcgatagtgaaagggggttagggcatgactggtcagcatggtgcaagcgaagctaaggtgcccgtaggcccgacagtttttgcagcgaatggagccacgacaatcctcctcctagagcgccctctgggatgccctgcaaccatgctccaacgccatccgaaaaaccgtgcaccagcacaagctgcttgagaagaccaaaaaagccatctccatccctgtccttcagaagctggtcagggctactgggcttggggtgcaaggtagcatcgaagattggcgcgatgccccctcccagaatgatcgagatgcatctacgacacccggttgctagaaagtatcatgacaacgatcgtcctaaccccctcccagaacctgcctg

SEQ ID NO: 71877 - DNA, 518 bp, Zea Mays
ggtggctaactcagcgaggacactttgggcgagcaccctcaggcttctgagtctccactgctttgccaagttcttgtctagctgtgatagccatcggctcagcacgggtcgagtcgggaagattccccagccaacatactaagcacaacatctatctctgcatcgtctgtgccagctggcatctgaaaatgagtttgcttctcatcattgggaagattccgaagaggggcaatcagatcctcaatgtcctcgggggagggtcacactgtaagacccagaccaccatcactagcaggagggttggacacaaattcagaaaatgtcttataaggtggcaaattccacacaaaataggcaacaggagcaccaacatttgcactctacccctcagaatcatatccagttgactcaccaaatcttcagtgggaattctcttatttgtgacccgggtagagtcattgattccactttacagataagctgggtacgctctgtccttcaaaggctgaatattcttg

SEQ ID NO: 71878 - DNA, 876 bp, Zea Mays
ttgcgcaagatatttgtaacaaagttgtagctggtacattgcacaacaactttactacaggtggattggtgagttactacatagaaattggagaacaaagccatgtaattctctttgtcacgcactctaaagagtgtttgcgatggtacagtaacctaaataagatcgcgggttcagtgtatctcgccgccgatgactccgcgtcgtgatcctcgccgacgctatgattcgtgcccagtaacgtgcggataacgactcctggtgaaaagatcttgtcgtggatgaagtcggagcactatattgccctgtcgccgtacccacttgcccggcgatgtggccgcacggtcatcgccgaggctgccgccattttccccggttgcaccacgccttcggtagtttaccacgtcgctttgcaccgtggaggttaaccagtgatagccatccgcctatgtccagtgaatgccacgatagaacgccgcggtgactcagtccctcttctcggccgccagcgcatcttctcaaaattgggcgccactgctgatggacacaataaatcaatgccccagcgagctccgttaggttgttacgcgtctagtgcaccagccctcgcctccaattagccatcgtatctcgcgaatttcaaacttcccccaattcggttctccgcaccactatgaaccaccgcgtcgtgaaccgccgtttctaggtccgttcacatcctccttacccttgtttcagcacattggtatgctagggatgcttatcgacccagccaattgaactagaccacgctagatcgtcgggaacacctcgggttatttttggtttttgccatcatcgttgacagagagattttgagctataattttgcaattg

SEQ ID NO: 71879 - DNA, 886 bp, Zea Mays
gggccatttgacatcagtagtgttaagcacaatccttggtatgaaaacctcttcaccgactccggagggtgttaacaccatgcattttaagaacacgatggccgatctcagttacaagcatccttgttccattacaaagtcctgcggtctggttcaagttacgtagcagcgtgactgttacgcctctttttagcacgagtttgtggcaggggaaatttgccgcattaatagagtttaggaattcagtaggatatagcatgtcaaaatcatgtatgtgttcagacgactttgagattgtgtcgcaactaaggcattgtacaccatgtctagggagcaatgagacaatgtagtcgtttattttatcagttgtaaggttattaggacatacaatggcacatgtagctaagtatgtagggtccatatatctctctaacaaatttgggtagacctcggatatgagggacgcaacggcatcaccatccgtgtgtatcaacaaatcttcaggaatcgtaacccatgtaggttcggactcgtctcctcttgtcacggccggcagagcaccatcgctgatatccaagacccatttgctaaattgttccatgtctgcacgttccttcccatgtaaagaagggttggagatcctcatatttgttcgtagtttcaaaacagttgcatgttaccacagcggtgaacttgtaattgatgcgttcactatggcagatcgtgagcctttgcgcacaacgggtaaaatttggcgaaagtctcccctaagcataataggtttgccaccaaatggtatgttcgcattttctgctttatgttccgatagaatatcacgcatagtcctatctagagcctcaaagcaatgcctatgggtcatcggcgc

SEQ ID NO: 71880 - DNA, 336 bp, Zea Mays
cgagaggcaggttcattttgaggtgcctttgaatccaagtgacgcagagataagtgccatgctggatatgttagctgaggattcttctgacgccgctcctgctgaaacactggtggtggcgcccatccctgaggctggcaaagctttggacgctcagaggtctgacaatgttcgcccgaaacgttctcgccgagccgatcaacccacttttcctgctgaggggcagaaaaagaagaagagacatcttcgtcgagtgtctagcttggatcagggtgccggtccttctgttcttgttgctgaggaagtgccagtgcctgaatttgctgaagctgaccc

SEQ ID NO: 71881 - DNA, 331 bp, Zea Mays
gcgagatgtaagttcgaattaccaaattggacagaaactaatctgataatgacaagatgatgagataaaatatgatgggatcggtttgggagattgaatttgtggattgacagcggataaaaaatatcaaactgatccaaaaacaaatataaaccagcaacaaggcattgacctaggacacaaactcaaaacggcgaaatctaaaaccaaattgtgcaaaagctaagtcgaaagttgtaggtcaagatattaatgattcttaaggttatgacgaagtttgtaggtcaacactgatgtttttttggctttttgtgggttataggacgaacaa

SEQ ID NO: 71882 - DNA, 786 bp, Zea Mays
cccgatttgaaccagtcccagcctggggtacggtagatctaatcacgtgaaacagtgaagtcatctatttactctagacaacacttgatgatggtataagggtaaaacgacatgacgtgtcatatttactctacagctcattattttttgtaattgaaaaggcacatttttaccgtcgtgtgtcatgcacaaaacccgtatgtttgtttttctcccacaccacgtttcacctaccaatcagacgtaagcattgtatcttggatgcgcaatcaatcatgtttcatctagcaaccagataagataagccttatctcttgaatgtgcaaccaactacacaaaccatgagtacccgagaagtgtgtatatctgttttttttatcaaccatgtctcctctaacaaccagataagataaaccctcatgtgttgtatgcgcaaccgaccctacaaccatcacgagcgcttatattaactcccaactttatatctatatccccgcctctgtctccctcagccagattctttcgcggaggacatcggcctatcgtgcttccctctgagtcgctaactgacgtcgtcacatcccacccacgacacacctttcccatcgtcggtaagcgtcttgaaccgttgtcgcgactctctgtcgccatgtgcccgtgcaggcagcgggacaagaaagaacaaccgaggaaatgaaggaggacatgcgccaaatgagaggaggaggcgcgccgccgacgatgtgtggctaaaaaaaatcaaacgaagtatgaattaggacagag

SEQ ID NO: 71883 - DNA, 425 bp, Zea Mays
cgagacattttagatagaggattaaaagataatggaagctcaagagttgttggtttcactgcccaaatgacctggtcttgagatccacttttaccaggggttagtttagataattaggcacacctttcataattagagctaatagttttggggtatgcaatttagtgaacacttgttatctttataatagggctagttttgaaatgatgaaaatcttgatttttctttgcttttctccacatttgtgacatgattagggcctttgccacactttttggtgcttaactcttaataacttttgttaggcatgcaattagccataacttttgttaagggtccactcttggctaagtcatctggttagttttcatcagaggtttcatgtttggctcaatagaagctttagttggggtttgagtgtcaag

SEQ ID NO: 71884 - DNA, 557 bp, Zea Mays
ggagccgagctccggcgagcaagaccggccggagggggccaagaccggcgctcccgagcggtggacacaaccttggatctaccccgactgtttcccctaagtgaattgcacgtgtggcgacccacaccgtcctgcccacgggaacagcggaggcatcggataaaactgcgtgttcccagagattggtggcggtataattcaattgggtgggtcggtgagcttaaggaggatccaagaatgctagaacaagcagcaaagggacttgagctcaccaaaaccgagctggccatggtgaggtcttctttgcggtggcagaaagttgatttgggggaaaacgacgattctccggctagggggctaatcgagggggagagtgggtgctatggcttcatggtaacttggcgcaacagccccggccatcaatttataggaaggtaaagcggtggccagtgattttggggaggacgcgcggcggccggaaatgaagaagaaggctctggcgcatgacacaggtggccattcaccgtggcaggtgctccggtggtcaccggacatgc

SEQ ID NO: 71885 - DNA, 756 bp, Zea Mays
gtttggtgttgtcgggtgatactgacaccctattttgtgcttgtgagggtgccaaaagtctgtatcaccctttattcaggtagaaactctaggcttgatctttgtggccgcttcgaaatgtgggaaattgaatgagactcttaggacctttgtggtctcctcaacaataagaacataatcaaaactttgtgatgtggccaagccttgagataaatcttatgtatttatgtgcttattacttgtgttatgtttgttgtggaggctcaatgtacattgtgagtaggtgttggagcaaccaaaaggtgtgaaatcactagaactactactttaaacatgttgtgaattcaatttagtatttgagcatttcgattcataggcctttctccagtaatgagggtgcaacagaactgattctttagagggcaaggcaacctttaaatgagacgatgatgtgatagcagaatactcccacctagtcgacgagattcatcttaagtgtgtattaaaccataagaaaataacacattttataaaactaaaagcaatcgtaagactttaggaacatgtttatgcattatgatgatttctatattttttgtaatgatttgtataatattacaaatgttgacatatgtgagtgctaacatgcgctattgtgtaaacatgtggatttttgtgtagcgttgtttctaatgcgaacgaagatgaacgtgtgcatgtgatcaacatacctactgtgaagatattcaagcttcc

SEQ ID NO: 71886 - DNA, 374 bp, Zea Mays
ttctcgttacattctcttgccgaggcaggccatggtagggcgaagaagttggcgacgagaataggccacgactatagcggaggcgaggtaaggtagtccgcggcagagacagaggacaaggcaaaagacatccaaattgaaggttaggtggctaaataaggccatcttcagcaatagcgtgcaaacgggcatgcaaaacactgtcttgtattgtagatgcactatttacagagtagatattgaaataaggagtgcaatagggtgtgagataggaagacagttagagatagcctaagtccttaagaggggtgacgatgttcttgcatctacttcatgagttggggtcttcgtcactcgtacaatcctaccatacc

SEQ ID NO: 71887 - DNA, 1734 bp, Zea Mays
cgatgaatgattcttcccatggtggtgacagcttgcgtcgtccctcccccgttagaattcggtggaggaccaaatctccctactgcgaaggatcgatgccgcacaactttgttgtggtagcgcctcaaggtctgctggtacctggtcgactaaattactgtgttcaatcgttcttcctctagcacatcaatgtcttccagcctggttgcttctgcctcagctatgttttcaaaggtcagcctcggcgccccaaagatcagatcggcagacagcactgcttctgacccataaaccatgaagaacggggtacttccatgcagagctcgactgggctgagtttgcaggctccagaccacatatggtagttctctgatcctcttccctgcaagcttttcgctcttgtcgaatacctttttctgagtgcacctagtatcatttcgttggctctttccacctagccattggctcttggatgtgccactgatgcgtacttgatctggatgctcctttgttcgtagaaatcgaagaacttagagctggtaaagttggatcacaggtttgatgatgctattcggtataccgaacctgaatattatatcctggataaactccactgcttttgatgaggtcaaggaggcaattggcttgtactctatccattctgtgaatttgtcaatggcaaccagtatatgagtatagcctccctgagccttcttgaaaggtccaatcatgtcaagtcccccaacatgcaaacggccaggttacgggaatggtctgcagctgctgcgcgggcaagtgttgttgctttgacaagaattggcacgcttcgcacttttggactaactcggcagcatcactcttcgcagttggcaaatagaaaccagatctgaaagcctttcccaccagtccttgatgcagcatgcactccacactgcccaacatggatttcatctaacaattgtctcccagtggccgagtggatgcatttcatgaagactcctcctgcgcctcttctgtacagcaaaccccctatgatggtgtagtgggctgactgccttgcaatgcgttctgccatggctttatcatattgctcttcttcattctttatgtacctgatgataggctctctccaatcgttgggatctacctctggctgactcaaggcgttgcattcttccacctggtccgtgaggatgctcagctgtgatatttcttggacgaagatctcaggcggagcatgggcctgactggatcccagcttcgacaacgcatctgctgctgcattgcgatccctttccacgtgatggaactccaatccttcgaacttgtcttccagttttcgcacagctgcacagtatttgccattgaatcggtcgagtagtcccaatccttgtttatctggcttatgactaccagtgagtcgccatataccatcagcttcttgatgccgagtgatactgtgatggtcagcccatggaccaatgcttcatattctgccgcattatttgatgctggaaacaacagctggagtgcatacttgagttgttcacctctaggagcaataaagagaatccctgctcccgctccttgcagcttcagcaatccatcaaagtacattctccacacttcagtaacttctaggctatccgggacctagtgctcagtccattctgatataaagtcgaccaacgcctgagtttttatcgccgtgcggggctggaactctatgtcgtg

SEQ ID NO: 71888 - DNA, 514 bp, Zea Mays
ccggatgccaagtcaaatcacaacatgtacatcgttaagttgcagagggcgttgtatgggcttaaacaatctgggcggatgtggtacaatcggctcagcgaattcctcctgaagaagggatacattaataatccagactctccttgcgtattcattagaaaatcccagaagggtttttgcatagtttcggtctatgttgatgacttgaatatcattggatatgctgaggatattgaggaggccagcgcctaccttaagatagggtttgaaatgaaagacttgggagaaaccaagttttgcttgggcctgtagatcgagcatctcccagaaggaatatttgtacaccagttgacctattgtaaaaaggtccttgagagatttaatatggttaaagctcaccctcttgcatgcacgcatggacgtgatgcgttttttcgatctggtcaaataggctgacgcttaaggtgcatgcgtcgagcaggaactgcactgcacatgcggttgatggtttccg

SEQ ID NO: 71889 - DNA, 341 bp, Zea Mays
cttcgtttgagaccttagtatctttctgggaaaataaataaataaagtgtctacatctgatcatctcgtaagcagtgacttaagcatgcaatacatcaatagagtacttaattaccagccggtgtcaagtgcttgaacgacagtacaatcatgtgtctaatttgcatcattcatctggtgcagttctgactatagtgtcgtcctaatctgttccatctaaccagctaatgaacaaagcactggttacttcctcgtaccttcgagattctaacttcgtaacgaggcgaacttggacctcaaatgctactcctgctactcccttcgtcccaatttataattcg

SEQ ID NO: 71890 - DNA, 431 bp, Zea Mays
cggggttcggttttctccggatggtgatgtggacggcgcagcggccggtggcgacgacggcgctctctttgggtgagtgcgacggcgcaaccgcattacgcataacgggccacggccaggacggacatggcgctaactaacccattcttggagttggaggaactaattactaactggcccgtattaattttattagtgcgtatgttagcgtgcacttaaattgatttgcgtgaagacccagagatgcatgagtggtcgtagtcttccatctttcgccacgcacggaaagatgcacgtggcaccgacgacggtcaccgtatgtatgtatgtccacccctaccatggagccggcgggcccagagactgaactgccgccgcaagacccaacggcgacaacaacaaacagggtgccgcgagaacaaatcatgtcc

SEQ ID NO: 71891 - DNA, 577 bp, Zea Mays
ttggccaatcccataataaaatccatgcaaataccctcccatttccaagatggtatgggaaggggctgtaaggtacctgccaccttcaaatgactagccttgattctttggcaagtgtcgcattcagatacatacttagcaatttacctcttcattctggtccaccaatacaaagatctaagatcatgatacatcttgttactgccggggtgcatggagaatttggaaaggtgagcttcatccaatatttcctttctgagtttgggatttttaggaacaaccaatcggtctccaaacaataaaattcccttgctgtcttgatggaagcatttgtttttgtccaccttttgtccgatcatttccttaatgacttgaacacccttgtcaccgatctgtgccatggatatttgctcctgcaaagtgggctccactgaaatataactcaaggcacctgaggaaacaacttctatgttcagcttgcacaactcgtcacacagggtggcaatcttggaatccatactcacgtagttgcactgggccttccgacttaaggcatctgccacaacattggccttgc

SEQ ID NO: 71892 - DNA, 826 bp, Zea Mays
tttgtcgttgtccatggttatttcggagggaacttcgatctgcatatgatgttctgacagaagattttttgggttgtatttgactttataaaggaggctgccttcacttttctccatctagtgcagtactctactacgacaaaagcatacttcaagttcccttgagctgttggtacgagttcaatgatgtatatgccccaacacagcagcggccatgtgtggccaattaacttggatttctgtgagagcccccctttgcttggagaaaacatctggcaggctccactgttttgggcgatattttggacatacctaacaatttcgggccaaaagaaaccaagccacaagatccttgaagcgagggccctagggccgacgtgtcatccggagatcccttgatggactttagccagcagctctctgccttcatgcttggtgattcatttgagaagggctggacaattccgtgcatgtatgagttgtcttcgacaactgtgtattggctacttctatatgcaagcctggattcttccgaaaggtccgctgggtggtagtgcccttgtaggtaagatattatctggaccctctagtcctcttggcaaaaaatgttgactagtattacttctaggtctagctatcttagaaagggtgtctcgatgacctggtagaacacatcgaaaggtagaggatctcctcttgaagcggccttcgctagcacatttgcttcctcatttcttgagtggttaaagtgcgggactatgaatcctcaaaattgccttttgggacttcgcctgcctgacagatattgtagcaggaccggctcccg

SEQ ID NO: 71893 - DNA, 529 bp, Zea Mays
aaacaacgtatgtcactgattctgctctgccttatccatttgtgcactaagcacacgctgcacaatgaggctctcataatgctctgcatcatctgcaccaatttgttcttcgagtggttccttagtgcatgcaccatcagccacaagcaaaccaagtgtagcttcatccaaattgctagcagagggatacccaccatcgtcttttaccaccaaaacacgctgattaggacaatcacgctacacgtgtccatagcccttgcatcgataacactgaacatctcttgttctacccgtggaggctactgaagaggcactacctgctggtttctgggcagatttggttgttgaatttgtggaagatgcatgtggtttgtcgccgaaggaaggtggtggtgctggtcgactcggcgagggagttggtgctggtgtacgaccgttcatggacgtagttgtgcactactgccatggtgtagattttcctgcagaaacattagaccttgcactagcacgtcgtccctgcacttccctt

SEQ ID NO: 71894 - DNA, 696 bp, Zea Mays
attaaccctattttacttactagcattattattgaaaacaatcctttcattggtaggacgtgaaactttggtgaagacagtcctttcagcgcacctatctaccatgtcactgttttctcaactaaaaatggttaatcaagaaaatcgatcaatattggagaagtttcttgtggaaaggcaaggagatagaaaatgttaatggtggtcgctgcttggtaagttggccaacagtatgtgcaccaaaagacttagggggactaggcatcttagaccttgagcagttcgctagggcactaaggctaagatggtattggtttaaatggaagcatagtgacaggccctgagcaaacatggatatcccttgcgacaaaagcgatagagacttatttcacacttccacgattgttactgctcgtattggcaacaaatccctcttcttgcattcaagttggttaaatggacaagccccaaaaacctagcacctcatgtctttagcaaatccacacagaaggacatcattgtttagaaagctccacagaataatgcctaggtttctcacctacatgggttcacaacacaagagttcataagaaaatatgttgccttgtgggaggcaattcaagagatcaatagagatgaatccgccgaggatcaaataatgtggaaatggacatccaatggtgatgattccaatat

SEQ ID NO: 71895 - DNA, 876 bp, Zea Mays
gtgaagtggttttgtttgttgttttatcagacaccccttggaatgagggtcaatattgacgaagtagacaaaatcgtgtagcatgctgaaaacattagagtgactctcaaagaaacaaccttgaggtaaaagtatttgtcacacacctaggaagtgtgtgacggtcggtacaatccagagaaagtaggaatcctatattgcgggtaaagtatgcaaacctgtcgatatttgttactatctgatatcagttgtgctcacagttaagagcaaacttggggatcctcacagattaaagtttctcataatgtggtttaggttttgacaggttcttgtttacctttatgttcatggcaattttgggaggttatacttttaccttgataataatgatgataagttaatcaacttaaatggttatgctcaactagtccactatatagccttcatatgcattgctttagtgtcacttgttgagtatgagaaatgatcacccttgctattttctgcaacaactttgttgcatcaaatgcaaccgctactcaaatggagttggaggagaccacggatacatggtggaattccaagagtttgatgattattagatgggcgtgccaccaattagatgcctatggggttactaggtttacagatataaacattattcgttaagattatttgcttttgatatgactatgctttgtaataatattatcatatgatttatttgaagtaatatgtgatgatactttcacttatgatgccactttgtatgtgaaattgatctagcacatgcatagtttgcattcggttgtctccttgaatccgtgtgtgccaccgtcgcaactacatctctctcacatacaccccatatccatc

SEQ ID NO: 71896 - DNA, 376 bp, Zea Mays
accgacgaagccaggagaaggtgtccacatgattatgtggccgaagcactaaaggcagaagacaatattgccctcgcattattttaaaaatcatatgtatcggctttgtggacatatttataatttcatacgaagctgtacttttctttataaatagatgaatagtgccctgcataagcaccttttaggggagctggataattgtttcttcttttcctttctttgaagctcctttgctctaactcactccatagagccgaatgtacgattgtaaatgcattatatgaaaggggagaaatggaatgttaagacattgaagatgagttaatatgtttgacccctctacattccttgtatatttacttttatacctctg

SEQ ID NO: 71897 - DNA, 734 bp, Zea Mays
cacatctgcacaaaggccccccaagggtgcagccgaacaagccagcaccaccctaatggcgcaaggtacgttacaatcgctggaatccgacacagtcgaacaaaaccacctacggatacaaccaagtacgtgtcttcgacacccacacattgtcgcggcaagtgaagtccccatctcacttcacaacaaacaatgtcatagtttacatacacacagcaaagggccacctgccacattgcacaaataaatacctaccgcattttgttgccctccctcttcatcgggagccgggggagggcagcgttttcgctcactaccgcaatacaagagcgagggcagcataaacgctacattggctcagccttcgggataaggcccgcctcatgaaaattaaacaacatcatcctcaactcctcaccctcaaaaagactccacaaatccccctccccaatacatgtcccgaacgatgaagacagcaaatcttgttggccatcctgatctacccgaaggtgggttcgctccatccccatccgacgacatctaccacttcgcgacataccaccaacattatgcttcgccaccacccttcgccggcggtactcctcggtcttcgccccagccgggggatcgaatgcttcacgcgcttccagccgcggcatggattccgtcgcggccacatctagtgcagcaaaataatccaaatcctcatccgaagactcttcccaaactcaacc

SEQ ID NO: 71898 - DNA, 467 bp, Zea Mays
gggctcatcacgctttatagccacgggctagcagatgagagggtgccgaaaggagaaacgacgctgcacaaatgctcggcatctattggtgatggtagctggcgagtggacaagaaactgacgtggttaatggagaggaattagtcacgagaaactgtcacgacaagtaacaggcgtgggacggctaggcaccgagtgcggtgcggcagtccactgcctgggatgcgagcaggcgggggagacaaagcaacagtggcaggcgacgagaaggtagattgcagcgacggcgctgcctagacccgttcgaatggacgaacagagaagaaggctggagcagcagtgggatccacttgccattgaaagaaaagaaaagagagggagacccacaagtaagtgatagagtggaggaaacgtgagatgcctcctgctggtcgctggttgagtgggctgagcttgagaggggctgg

SEQ ID NO: 71899 - DNA, 398 bp, Zea Mays
gcattatgtttgttggcagtaacttccatagttgatgccttgcctaatggttgcatggagaggagaggagatgagcacatctacgttgttgtaatttgggcctccttgcaaaatagccaattgccatcctctggagctgaagactcatgtgaaaggaaggagacgagatggagagaagcaaagatggaatggtaaacaggtgaggctgatgactcctattatggctcacctgtggccaaattgccagtgttttgcacaggccttataaatcttgtccttttaccgttttttgtttttttgtctgaatcaacctttccccttccacaataccaatggctccatcgcctcctctgtttcaccattgcttctaccactcttagtgacactgtaagcatgtc

SEQ ID NO: 71900 - DNA, 1297 bp, Zea Mays
cttggacacaactggacgccttcagacagagatgaacccacaaggacgaacatgaggagcgccgacgaggaccaggaggctgaagccccgccaagccaagacttcgctaggactccaccttgcagctcctaagctccagttccatcccgataagagatatgagagcctctcctcactctctcgactacttgtaatccctactacgagtttgatcatcgattgtgctggtagcgcaagacaccgatgactgaaagtagggacattctacctgagctagtataaatcttgcgccctcaacgcacacccttgaacgtgtacaataaatttaattgtcggagcgaggtacgaaacaccgacaattggcgcaccatgtaggggacttgtgtgttccgcgatgagatcatccaagcttcggatggctagtaacaacagtggcgtggtctagacccctgggacgcccatttattttgggagtctggatttcgtcatcaacaaagaggcagagatgatgagggactcgatagacccgtctcccttggcaagcaacttgtcggacgtaccggaagtctcggcgaccttcaactcgacgcacctcaagagaaccatgggtcgcagggcttgccaccacccgatcatactgacgtactaggagtactagactgtgtccgggcattcctggatatgctctcgtcagggtcagaagacggactcacgtccctgcctagcaaggcaagctgcgaccctggtcaagaatgccttacaaccaacaccataggagatcattttccccacatgaggagccccagcgagaactcgcttagcatcatggagcgcaccgtgatgtccacctcgcatcagctcaatctgcctccccaggagctgtagttacgcccgaacctctcgcgaagcaaacaacaccccacgacaaacaaggaagcctgtggggggacggggtgaccatgccaagcaatggggcaacaccacgccacgacgataaaagcatgccattgcctggtttatggtaggggcgcagcgccgcgtttccctcggatgagccaaaacaccgtagctgctgcggtgcttctgaacaagcaacccgaagcagaaacaccaagcgattggaagactcacaaagagatctgggacctcctcggtcttgctatccagcaacaagcggagagctccatgtcccggcgtcacgaaccggagaccaaccgctacactgcatctacgccaatggtaatgatgccatgtcatggcaacctctcgagctggaaggaagtgtggcatgggtccc

SEQ ID NO: 71901 - DNA, 629 bp, Zea Mays
tgcaagtggcgacaacagtttgctaaagcatgtagaattatatacagtatacatgcagctacgttgcaaataatgtatgcaaatgtaaaaaaaaggttaaaagagacagttatttactgaggaaacacaaacagagtttttttaaaactctgaatttttccaggctcaacatgtggcttttgaaaaagggaatcgggtggggggtctagtgaaggcccacgaggatggaatactctgctcaatgcattgagaaaacaggacaatgttctgtttacacagtttcagaccctaaagagatatatttttgctttagattatctatatcacgtagattttttcgccatttactaccatgagaaagttgacgagtgaagcgatcaaatcaaagaaattacaatattcttttgcaatgtttttgtcttaaaataaactacacgttctttgatagatttttttcagttcgacagtgcatggctcatcgttggttttaacattttattatagcccagaagcagagaaatccaatatcgagtccgcaagacctaaacccgtcagaccgtcactataaaagtatcgtcctgtccttcattttcccccacccaaatcgtcgaggccaccaaccaaaccac

SEQ ID NO: 71902 - DNA, 305 bp, Zea Mays
gcagacttcagtgttaggcaaaattgcaatttaatctggagattaaaccttcgatcggtttgggaggctagcaggtagaatcacaaatttttggtaggggtcacttgagttgctgtataagaacatcaggctaatgggattgagaagcatggagttttgccctcgaagaactgctttgcttcggcttagatcatctgacaactaacgtcatagtcatgcagctgttggtttgtttgggaaagtgaatcggaggagattgaagggaataagatactcttactattcaaatgctaagagaattttag

SEQ ID NO: 71903 - DNA, 973 bp, Zea Mays
gtttggttgaataaagggaggtgttggatgctccagcaactgcagatgtgagagtagcaaaaatgcttttggcagaagagatggtgagcatttagcgtttcaaatttaggaacatgtacagtccgtgagtcccatcccgggacatcttttccgacttactatattatgatgctaataacttctgatgtgtcccttgaaataatagaagttcagtggtgttctcattaaaaagtgtttctatgcactgaacatcaatcagattaccttgcctatgattttaatttggattagacaccactgtaattcgtaaacatgacactctggatattttggtagcgagtttccttaaaataggtgtatcaggacttctattctatgtaaaaaggtgaaaggttcatgttcaaacaaaattcttctatgacagcataggtggtggttgtaaagaaaaaacatcagatttcagagagcatccttttgtttttgcaatctattgtcgtttcagattttctgaataatcaacttttgtttcctagatatatctacatttgcatactcatctgagatagatacggagtaccggctaaaacccacacccacattactcttaactctggaatgaacaaggcaccgtggtttagtcattcctctgattatttgtagcatcccaaaaatcctaatctaggtttgaaaccctaaatccaccttttccccctcccttcatcctttaaatccaatacctccactagtttttctttcatcatatgcatacattttgtttgatcacaaagcacctcacttagattatattttctaaacacttagagtatccacaaaatttttgttcaaaagaaaaaaggggcaaaatgggaaatagaaattagaaagtaaaaagaaaaagggaaaaagctctctcctccccctgctggaccgaatccaggcccaagcccacgacctcccctctcccacgcgcccg

SEQ ID NO: 71904 - DNA, 338 bp, Zea Mays
atcactaaggatctcttcaaaagctttggcttcttcaccgatccattcgacgattccttcaggatcgcctctaataaatttttgctcggatgagtaagcacccacctttgcaaaactatcttttagcttcttggcacaatccaaggatttttcgtaatatctttcctttgattcccgaagctcatctacgttcttttgcaaccttgcgctagtccactcgcttatttcctgcttcgccttagccacttcgaaatcttcgctcttcttggcaagctttttctttaaattttcaatttcggctctatgagtttcagactgcgcggcaagattggcttcac

SEQ ID NO: 71905 - DNA, 618 bp, Zea Mays
ctaatgccgaagcacgatagtatggggcgctgaattacgcttttcacatcctccctctcactcaaatcatttttaacataaaatcattgcttcattcatgagcccggccactttttccgaaacgttggcacatgacacctcacatcagaccagtacacaaagttataacatccgaagatgttatggtactgctccttcccattggccttcgtctgataagataactcgtgaatattgcaaaaacagttagcgtccggttccaacccttggcttctcatcgcccaaataaaaattccgactttaattaaagcttcaggagtaagttgatgaagctatatttcaaatcgatttagcacttcaaccagcatcttatgtagaggaaaccgaaggccagccttcataaaactttggaaaacaaccacttcatcagcttcaggaagaggattagtgtcccttcatcaacttccagccctcacaatagatatatcatgaaaatatttgcccttcattgcttcaatatgtcccttattaacggtggatttttcaaacacaacatgacttggcctccatggccgatctttggcatcatcgttgtaactctcaatatcaaaactctcg

SEQ ID NO: 71906 - DNA, 450 bp, Zea Mays
ctgttttctgcatgccacatagttcattgagacccttctctaccccatgcatatggtagtttgtaatgaagtttccatagctgggcgaaagagatgccaaaatgaagtcagtagccaactcttggattactggtagcctagcttctccaacctctgactgtaaccaaccattttgattacatgtagcctagctgttgtgccttctgctagcttgcattccagaaaggctttggacacatggaacctttcagtcctagcctgagtctggaacatatccttgagtgccacgatcacatcgtgcgtctcatagtttgtttcaaactgtacctgccactcaggctccatgcaagcaagcataaggaaactcacttcaagattaggatccattgctttattgtaagcggttttagctgtagcagttgcatcttcaccaggatcctctagcggtgg

SEQ ID NO: 71907 - DNA, 690 bp, Zea Mays
gcacagcacagtaggtggcggatgatggatcttggatggtcaagggaacaactccactcggactcgcgtacgagtactgcgtgcgcccccccaaacaaaacagctttgcctccctttgcaggcaggagaaaaagctgctcgcccgccgccgctgccacctccccgcctccacgtcgtcgctgaactgaagaaatcatcaccgtcgtcgcttctctgccatacgagtgtcagtgtctttattcaatccttctccgttcgttcgttctcgtcgaacacaagttaagaattcacaagaggtttcgtagcgacctagatttggggggatagattattgtttttgggtgataatggatactaaacgatcgatttaactaacggtgttatgttttttgattaacattgttgccaaacaggcaggctctgagcctcctgcgacgagattagagcccaactgcgcaagctagcgacaactcttgggctgtagtcgtaacccaccccgaacgccccgggccgctatatttcaccaaggaaggaaacgagcgaagcatccagaatgtagcccaactgagaggtattgttgggcctccactagtctggccatgttaggtagcagagaaaggtagtacgtacgtttttgccatcgccatcctcaccatcaatcaagtatgtgtgaagatgtttccctatcct

SEQ ID NO: 71908 - DNA, 986 bp, Zea Mays
attggctgtgcggatagcaccgcttttacaagtgtttctcttccagctttggacagcagcttccctttccagccagctaacctgttattaattttttcaataaggggttgtaggtcgatcctcttcacattcttgtaatgaagggggagtccaaggtacttcccggggaggctagagaatttgcccggaaacacctccttaagagccggccatgatgaatccgggtaccgaattgggaaaatttctgttttgtcatagttgatctttagtcctgaacatccctcgaacgctttgagaatctctttcagcacctccaagtctgacctgtcagctttaatgaatactcccgcgtcatccgcgtaaagtgagcagcgaagcttagcccctctaggcagtacctgtcccagcagtcccacatcagcagctttttcaatcatccgatgtagcgggtccattgctaagatgaaaagaaagggggatagcgggtctccttgtctcaccccacgcctgtggatgatggcgtttgaccgctctccgttgataattattcttgaggaagaagatctcagaatatctgctacccaattgcgccatttcagggagaacccacaggctcttaacacatctaggagataagcccaatttagggtgtcgaaggctttagagatgtctagcttgacgaagagagctggattacctttcttgtgcaatggatgaaagcacagccacagtcctgaattcacaaatgctcacgtgagccaagccagcacacataagctccactctggctagctactgcacatgtgtgcatgcaaataaaacacttgctgatctcaggttcgtcatcgagctgtagccagccggtgcacaccgacttgttccactgcgagttaagagagaaacaaaacaaaaagaactcacgtcaatcggctacagctcacatccacgctgtgttccgttcgtactgaattaacctcttttttttt

SEQ ID NO: 71909 - DNA, 355 bp, Zea Mays
gcaggtcattgactagtccacatcttagtgcaggtgtcgttagcatcaggatttcccttgatccagaccaacagcaccaacagcatctcggaaaccgccaccacatcgagcaagtataatgccaaccatgtaccggtaagctcccatatagaatgaaagtgtgagaggatgagaacaaaggtgaccaagcatgtggaaaaaggcgagagcagatcgacactatatgtgtatgcagtaggggacagcgatgctatcagacatgtccccaaggtgaaagaaactagaaccagcacatggacgttgggaaccttcaatattgccttccaaaactagatatgcatgagctccttcagat

SEQ ID NO: 71910 - DNA, 520 bp, Zea Mays
cgattccacttgattccaaaattatcagctctactagaaagcttaggcctctaatttcaatcttagtctgagggcatgagtgagtgcctctaagttcacctcctggtgatcgaattaatagtttcttcttcaagggatagtttggtatattatgtttttccacgaatgactttgttatgaaggagtgagatgctctagaatcaaataaaactgatacaggtatggagttaataagaaacataccatacaccacgtcggcatcctcaggaactgattctgctatcacgtgattgactcttcccctactctggttctgcggagtcttgttctgtgcagatccacgagcaggtgtgttctagtcagtcctctggttgctgttcttctagggtgtctgttggttacaccttgggcagttgttagcatactggccaagttcgccacacttgaaacagccattaggttgaaccggggtagttgtgttgttgttcttggctggtgtgttcacggcgcttccttgacg

SEQ ID NO: 71911 - DNA, 500 bp, Zea Mays
tactcctgtagatacaacaggttggtgatctggtctatggagatcgagagcagcagaggctgcatgtgcaccgcaatccctgccgtgccgtatggcgtcggctttggttggcttggctgcccagtgcccagtgcagtgcatgaatgaggaaggaagcggacgaacctgcgccggtgccgtgccctgtccacccggagactggacgatatagaaagagagatggagagtgcaccgggggatggcatgatggggtggcagaagggcgaagagaaggccgccggcggcaatcatcgagcggagcggagtccatcaggtcggtcgaatccaagcccaagtccagttcagccagctggcacacgtgggcgatgaagcaacaccgtgactgtgagcgtcacgtcacgccaaatggccagttgcaggagaagaagattagtgcagtacgtagtatacgtaacgtaatcgaggagaacaacaccggtatagaaagaaagaggagaagc

SEQ ID NO: 71912 - DNA, 709 bp, Zea Mays
cgagggtgtcttttgcaaataaggctcgacgaaggggtatgagtgcatcagggccgcaggatcaagatctgattcccacgattaaatcccgaaccggtatgcaaatgagaccacacgatcccaatcctatggtcaagattttatgaaatgagaccaaacctaacccgtctgattagcagatcaacgatcaagatccttgcagaaagggtacgctagagatcaaatcaagatcgttaaataataatccaacggttcccacgctctcttcctgaccaggacacacccggcgacgccacgaaatctggcggccggacctcgccggtgaacaacgatttggcgcactgatagtgtattccccagcccaaatcattcatgcgaactagtgcagaacgtggcagaggacaaggcgaaagtagaggagtactactcacctcctatggtgtagtggagaactcggcccacggtaaacagcggcagtgcggtgtatggacggccccggtgaggaatccccgtcgttctggtgaccttcaatgctcgagaggaccacacctaggttcctggcgccctgaccatcatcccccacaagacttcgaggtcaggcggcggtccaaagcggcggtcgatcacggtgtggcgcggatcgctggtgcccgtatagcaccgacgacggacacgggcgagcccagtggtgttctttgtccgaggagcc

SEQ ID NO: 71913 - DNA, 820 bp, Zea Mays
gtcatgctctacgcagcccaacccccccacgtgtgtcactggaatgtgggacccagtggtcaggcgtcttcaacaaacccgctaaatcaccggagctgctccttacgctggccgtggcagctccgatcgcctcggactcgctctcccccatataacctggaacgtggggcacccccttgatccgtttcatcgtgatccgtcgttagccacctgggattagggctttttcactccagtcaggaaaggggcggggcgggtttcagccgccactgcaatttcgcgtcggcagtagaaatctggcgcattggtgtctgctcggtggtagttcgggtcatatccaagccgtcggagggattaattagtcagcgaatcaccacaggattgggaattgctcgccggccattcaagctcgccgcggattcgcctggtaccgtagccaagcagcaccgccttacattcgcaggtaacctctgtcctatttcattcctagcgctgtgtgcttcgttttgtagccatcaatttgagcctcgggccctggcacggcgatttgggtgctcaccggatccgtcaccgccgccgtcaggggggaatagtcacgcgcttcagaccggggtaggagacagtgtagtgaccgtccgatccttctcggtcggctgcgattagaagtcacgataactcttcacttcattaaattttgaccataggatgcaaatcatccagtagagattggagcctagcgtagcgtgttataggccatcgatctcggatccgtcggtcggggtagtacgcgggtgagttgagcgcctggttttaatctggt

SEQ ID NO: 71914 - DNA, 545 bp, Zea Mays
gcacagtatatatcgagtcagagttattaaggccctgtagactggcctgtagaaactggttttggagtttaccataagacaagatgatgctaagcagaaaagggacacgagccctaagcgccacaaagaatctagtagtaggttgatagattctgacgagtgagtgatcgagtaggctgcactgcagtaccagaggtcgttcaggcttttggaactcggtcccagctccagctactacaggcacagtcttctccggccctctccctccatttattaggtcggctatcttaccgctactacagtggagtggattgttgttttatccaagatcggtctggaaagcaataatataatgcatgctgccctagtttagttttactgagagcccgagagaccccagcgagaaggatctttaccgaggcccgagaaattaaagaaagcacccgccagttcgttctcgtcctcgtcgtcgtcctccgccgagcgtatctgatcatctccccggccctcgcccttgctcttctcttcagatcaaagctgccgcg

SEQ ID NO: 71915 - DNA, 824 bp, Zea Mays
ctcgtaggtcatgagtgctacgcgtccagaggtgctcgtagatcatgagtggtaagcgaataggagtcgcgatgtggctcgatgctaggcgtggttaaatgcggttcgctatttatggcaagtcagtctagggctgggcacgggatccacttgagtggttccattccgacacgcccggcctccccaattaggttccaccacgctcggccccgggcttggtgtcgtggggttcaaccggggtgggctctttcagggttgacatatttgcctctcccaactgactaacggaccccaacgatcaggggctcttccctcagcgtactctctgactagcgggtcccagggaccgggggtcattcccccaacaccgctcctgccatagggtcgcagaccgtccgaccctaggtcacagaccatccacgccacaaccgagagcactattgccggtacacctctcagtgattagtgcctagatctgcgccaacagttgataagtacaaatagataatttttgaatcgtgacatattcatacaacagtttgttatgtcttaaaatgacacttgtaaatgtagaccatgacatgtataataattactccataatgctaaacatgacacatccatgcaactagggttgagcattttgaacccgctaaccgaacccgaatcgaccgaattggccggtccggtttttggatctcttttattcgagtatcgggtacgggttcgatttctagctagtaaaacctgaatatactcaagcaaccgaaatatagaaaaccccaaatccctccctccctcatcctaaaccccgcaacaatagc

SEQ ID NO: 71916 - DNA, 315 bp, Zea Mays
aaaaaaccaggaatctaggtacaatcaagaatagagataagataatgtgcataaaaaaaccaggaatctaggtacaatcaagaatagagataagataagtcttgcaagaggtaaagtataggatataaccacgggtgagataagtaagagaccacgcttgaactaaggtgggagattggaggttttagataacgaacatagcgtactcaccaaggtaagattgagagatgagaagggtaaaggcaataagaagcaaaagcacaacaaaggatgaggttacaaactcgtgagccaaagaagaggatacgaccaaga

SEQ ID NO: 71917 - DNA, 409 bp, Zea Mays
gatgtgcttgttcggggcgacccatgctttatctcctacggcgtcatggcctccgatccatataatagacaaaaagatgtgaatccggttgcccggcatttggtcgtgtttagggcccagaccacttcaggtagttggtcggcccatttacccttcttgtggtcgagaagtcttttcttgatggcgatgaaaatcttgccgttggcgtgctcgacgaggccgttggattgtgggtggtataccgaggcgaaggcaggcttggtgccaatggagaggcagaaatccataaagtcctggctgtcaaactatttgtcgttgtcgactgtgagctcagacgggactccgaatcggcaaacaatgttttgcgagaagaacttttgtgcggtcttcgacgttattgtggatactg

SEQ ID NO: 71918 - DNA, 448 bp, Zea Mays
gggggaggagataattcggctgagatataaaacatgaataagttcgaagtcacaagaataaaacataaagtcaaaagcaattacacaatacctatccgcctttcaagttctgcagttttttcaactgcctttgttgcttctctagcatcgtgggtatctttttcactttttttataatttcgtgagccacagatgtcggtaaaaaactttccgccaatcaagcttgcctcgtccgaagggtcttttgtatcttcaatggaaaacgcagcttcggcttgggccagaatcttcacatgctcgcatcctgccttttctaagatggtcgcaatccccctggcacctgagaaggcgcaaacatctctgcggccactcagaacttcctcaaaggcttcggcttcgcccttgatccattcgattggaccttcaagatcgcctactacgaagttgt

SEQ ID NO: 71919 - DNA, 1072 bp, Zea Mays
aaactttcgttgtaatcatgaaaatcaaataatagtgtctattcttgccccttgtttagaacatcacttgacaatgaatgaggatctaatcatgagggtggtccagagctaggtagttgcttagactggttccgtaccataagccttcaacctttcaccaccccagaacagctgacctagtatatcagactgagtattttggggtcagaacctcgttcaaactcaagggatgatctcaaacttggatcgacaagaataagcactactattcgaaggattgaatatggtagggtaaagatcccaagggtgtgctgctaagcattgatccttggccataatagggatcgacccctggtctgatcgtagcctcaagctttcgaggataccaatatcccaggggggccagctgagggaaaacttgtctttacaacaggaagtgaggctcgggcgccactcacctaaaaccctatgcgggatccaatttctatttgacttcatgaaacctagattacgtttccaccttgtcactcgatttcagaacattcccttgtaatggataaggattgggtcacaaggggctaggtccaggggaaaggaccacgttctcgggggtggtccagagccgtgtagcagcttagcctagtcctgtaccctaagcctacatgcttcaccaccctagaacagttgttctagtacctaggacttggcccctagaggcctaaaccttatcctaaccaaggaacaggttcctgaaatcctgctcggcaaggtcgagaagcataataaagaggattgaatgcaatcaggatgaggaccccgtaggtatgccactgagcgccattatggagccatgtgcagggatgccttttcaattcaggtcaccaggcgtgggggccacaggcatgatgccttctcaagtaaagcacatttatggccccaccaacaaggtcaccacctcacccaaggtgggcctgggggccactgtcggtacctcaagattggggtacccactacttctgggtcaaggcaaaccctctgggactaccctttgtcaccatgctaatgatggtcc

SEQ ID NO: 71920 - DNA, 646 bp, Zea Mays
tccgctctgtcatggtaagtcgcttcttgtggcctagttcatcctccctatgcactcctactcactcaagaagttggtttaccacattgcctcctagtgcccatcatcattggagcatggagtaaaccttgggcacatgatgaatctatttcatcaaagcgtcttgcgagaaaattgggcaaaggcatgcaggtgggccagaggcctatgctagtgtccgagagaggtcatatctctagatgctatcaagatgtcctccataaaactcaatataattcgttgggacccaactaacactagtcttgctcgtgccctggggacctacctcatctctgacgaagataagggcccatgatgtcggtggacctagtcttgacatccatcacattgtctgaggctctcctagcctaaaacgcctggcccctaggtctctcaagactttaagaatccccagtgttctagagctctcctagtcacctgaaaccccatacctctgaggccctcgaccttagagcattgaccaatgcctgagttcccaaattctctaagggtccacgacccattaggtcaagaatgagagatcatgcacataaaggaatatggtttgctctaccatagagcagggcgactttagaaagtacattgc

SEQ ID NO: 71921 - DNA, 515 bp, Zea Mays
gtgccttcctcgtcgtaatcgagcggcttgtctgacgaggtgtcgcccccgatagtgtggacgtggtatgttggacgagctcaggctccctccattgtgacacggtgatttgggcctataggtgtgcatcaaggtcgagttgaccccgaatctcacactaggtcttgtgcttgtccaatgtttcggcttccgggaatttgtcaaggagcttcgcgacagccgcacattctggctcgctcgaggaaatcatggcagtttgctttcatccttgataatgcggccatggacgctaggtgccgcgatgagtgtacgtccaccaccccgtcgtggttgggccgacactatcacggtgttcctcgtccgtcgattgggagatactggttgtcctaggaaggactttgctctcggggcagccttctgtatgtttgatcgagctatggtggtgcaacaggacggcggcgtggctggaggaggaagagaagaggagaggcctgcgggtggggcccacatggcgg

SEQ ID NO: 71922 - DNA, 274 bp, Zea Mays
gcataaactgttcctactgccccgtgcccctgccgattgtagaggaggttttgtacctaatcgactaaatttaacaaggaattggttgtgtggcttgtcggtaacgcgagtgctgcattgcacggcgatatgccgtacttttgtcggtgctgatttctgtttttgcacagctaattagatatccatgggcgatcgatctgaacattttagaccatgcacgctgataaaccagtgatacatcaggcagaataggagtgtgaaaatgcttttctgc

SEQ ID NO: 71923 - DNA, 435 bp, Zea Mays
caaaatctgattcaccctttctgtctggccatctgtttgggggtggtatgctgagcttcggattacttggatcccaagggattcttgcagcttttcccaaaagcgtgccacaaacagtgctcctctgtcagatatgatggtctttggaataccatgtaatcgcattatttgatcaacataaatttctgcatacttctctgacttgtgggtggtgtgcactggcaagaaatgagcggtcttggtcaacctgtccacaataacccaaacgaaatcatggtgtctagaggtattgggcaatcccactataaagtccatgcaaatgtcctcccatttccaagatggtatgggaaggggttgcaacggacctgctgtcttcaagtggctggccttgattctctggcaggtgtcacactcggatatgtacttggcaatttc

SEQ ID NO: 71924 - DNA, 815 bp, Zea Mays
ggttcgggttcaggtaatttacagttacccgattttccttacatccagatacaataacaaatgcaggcatgctacacagctagtcagctatagacaacaacaatcctccatagcttgggctacaggacaataagcaaactgcaaacaacatgttcacaaacagctacaaggctacatggctacaaacaacattacatgcttacagccatcaaggctgctagactaggacagattcacaaacatgttcacaaatcacaaatcacacattcagtctcaagttctcaattgtcaagtcacaactcacacaactctcgagtaataagccaataacttgggcttttgtgatcttggtgccatcttcttccttccatgttgtgcacaatccttgtcaaggtcaaccacctcttgatcaggagccccttttgattgtgatggttgtgtttgtgtcccatcattttctagagtgccagtgcccactgattccatacccttgtccaatatgtcttcaggttcaggcatctattaaaaaggaggacacacatagtaagtcaataatgaagatgaatacatgatgcaaggaaaacatctcatgtgcaagaaggaaacacacagtaaggaattaaatatatcctagctcatagtaagaactaagaaacaaataggaaaaccacatctacttgctcgcgagaacacacaaataggagggcacatttcacattagcgtattgtacaacctaccttcactgcttcacacaagaacacactagtattaccaattcaccaggatgattaaaactacactactatttctactg

SEQ ID NO: 71925 - DNA, 608 bp, Zea Mays
ccgagacatcacgcggccgcaagatccgccacccaccgcaactgccttcgtcgtgattttaccaccggtatgagcctctctacgtgtctgtcgtcctctcataaacatttagcatactccgattgaagcgtagggcgtctggagcaccgggggggacttgctccggtggcgctccgccgcggggagccctgtttcccctctggttgtggtctggaggtagaagatgcagtaccgccttcaactgctagatggacggcttagattagccactctataccgattcgggcagggaaccgaggggcgtccgatttggatcagataatcagcggttgattctaggataggggaatctgggtcatcagaatttaatcgggcggccaggagcagtgcagagttaattgaatcacgaccgctagatctagatcctatggcttgcgtcgcgtaccggtacgaggatgcctctacctaatctggtacatcggtggtggatcggatggctcgggttagtccagacctagccagccgagtgttttctaaaagagaccatgcgctttacaaaaatcaacccgccatccaaggggaggtgtagactgagtctaggaattttt

SEQ ID NO: 71926 - DNA, 744 bp, Zea Mays
gttcaaacaccatgggtctcattccctctagtacacagtggtggccacactataaactcagttggtatgatttcgcaagactataaacccctctgatacaacatacaactattataatggtgtacacaaacccgaaaccggttttcatccctttccgcgccactcggaccagtgtgcctctacatagcacaactttggcaaatctttctcaactaaatttggttgcggccaaggtgtttctatgatttagacaaacatatttagtgactttctaactagtataagtcatgaaacatggttgttttaaattttctaactcatatttctaggctcaacttaactccaaaagagtcaaactttgaatataagctttccaatctaaatagggtataataccaagaaactagtttttaagaaaccagattcttaataacaagggttaaccatattcttggtttttaagaaactagagaactagtttttgtaaactaaataaaagctgacatgtttggacgccttctagcttttaaaaaccagtttcaaagaaaccaggcggatctaaacagggcctaataatgaatattgagcgtgatagtcgacagagctacccaaaaataaggcactttatgccacctgaaatcggttcagctactggtgcgcccactagagccaagtccacttttgttgcactagagctcttagccaacacgtcaataggggtcaagccctctggagcctctgaga

SEQ ID NO: 71927 - DNA, 423 bp, Zea Mays
atacattatgggaataactaatgctgacagagtaacgcatgagtaatcagtggaagttatgatggctgcagtccatgcagcattgataggcagtaacttgcacgagttatggtgagtgattgccctcgatatagtaacgtgcgagtaattgcgcggcccacgtatcgtggactgggcacgccacctgtcactggaaaggacaggcgcacgcctcatccgtaatgaatgtgaaggcgcgcgtagcccagaggcgtcatgccaggttccgcccgttggcttatgccgtgcgtagtataccatgtggcagcatcgggtctccgcctaagcggggagcaggagtgtatgcggacaggtccggacacgtgtcggcaccggacccccacctgagccctgattaaagcccgggcgtgttctgtcctggaa

SEQ ID NO: 71928 - DNA, 527 bp, Zea Mays
agaaagtcctgcaaagccgaaaaaacgaagaattatccaagtggcagatgtgattcatcagacaccaccaccgatatcggtgtcaaaaattgtcattgccgagaccaccgaagccgaagccgccgcagtcgaagctaccggagccgaaaccactgaagctaaaaccgccggagccgaagctaccggagccgaagccaccggagccgaagccgggaccaccaaagattctaacctggaaaccacacttgatgttattgacaatatacttctgaaaatggctgaagaagaagctgctgtggctgcggtgaacacggctactgaaaaaggaaaagagcaggttgaagacattttggaggaaggaaattttaactttcaagatttacttggacaagaattaacaggcgctgaaaaaaagagctgaagaaatatgccatatcctgtggatataaaccagggtctctgctatttggtggggtcaacgaagggaagctaagatgccttcggaatcgcaccgaggccaaagttgt

SEQ ID NO: 71929 - DNA, 467 bp, Zea Mays
tctgtatctggatcaagacgaacgccatctccttccatcgccggcgactctccagacccggccatctccaacttcgattagttatgcaggcttagtggtctttttttcgaatgaaagtaaatctcggatactataaaagtaacagcatccacgtttacagggtctccccattatttccgaatccgtcccaatattatggcgacgtcaatgtcaaactaaaatccataataaattatttacgcacaatgactcaacgttttacgccaaacggtatatactgtttatgcaactattatgccgtttcggttttatgccatagctttcaacatcttatgctacatttttttaccttccgccattacttcccatgcaagatccataaattacgcgcccacgtatcatagtaatcacgtttgcatgtggaaacttttccctttaattccgcgtcgttcccttaccattcaaac

SEQ ID NO: 71930 - DNA, 435 bp, Zea Mays
caagatggagaagatctgactcaaaaacaacagacatatgattacctgcaaagggcaattgactgttgaaattgataggaggaatgattgctggagcagaattctgactctttcgcttgggcgccatcacaatctcgttggcgggctgagcggaagcgaaatcaaagggaaacagaggaaattcggaggcaaaagtgaggctagggcttagaatgcagaggcgtgcggcaacgtgatacaaatggggttttcccaggtcagacaccatttctaaatgtgcttagtcatcactcggtcgttatttctaaaacaccgacgtggcctgatatgactcggttgttacctctaaaaacgctgacgtcgccagtcgtcactcggccgttatttctaaaacgtcgacgtggctcgaaacgactcggttgttacctctaaaac

SEQ ID NO: 71931 - DNA, 364 bp, Zea Mays
tagtaatgcgcgcaatatcattgtgctgggaatatggaacaatgaatctttcgttttgggaaatgacggagatgattactaaatgtgggagacaaatatgtcgacacctatcttgcctctctagattgcaaatggatccaaaacaaagtcctaggcatgagtgctttaagctctcttatcgggtcattgataaatacaatcgaggctgaaccaataatcgcaaaataaaagtcacgagcttgaagttcggacatttatgggcactattgaaataatgtgtggtgaatgcgatggttcaagtggtattgtgagagacccatcccatatatgtgttgaataaacattattccgctatatgatataa

SEQ ID NO: 71932 - DNA, 761 bp, Zea Mays
aagtaaataaataccttgctgataacacggtcagtacgagactctgccagtaaaacaacaagcagttaaaaggttgacacttagctagtagtctactacaaagaaagtggtaattaaatgcattatgtaagttgattaagaatcatcaggataagcaagccttgctagttggagcgcatcagagttggctaaatcagaatttgcaggagaaacagccaagataatacaacttggatgcttaatgtattgcatgatcttatttcactaattaggggctgattttctaaagcagatgggttgtacagactgataaaggttcaatttttcattaaagccacacatgattattttcagtactgctctttgacttttaaagtatgatagtcactgtggggcaaacatatctattcatagaaagtaaggagtgttaaaagtgctagtgaacaggactgaagaaggatgaatgaaaatatatactttgaaacatgtctaagggaactccaaagcctaatgaagtaacaatctatccatttactatggtgtttcttttgcaggtttgatacttcatcgtttcattgccaccatcgattagtaacattatcaactgcatggttccttgatcttaggtttaaagcacttgtaggcgttacggtgaacaacaaagaaaaatcgttcggtggaaaaaattgcaaatgcagaggaatataaaacatcacccaccaaaaacatatgaacaatgtagtgtttgtgtggtgggttac

SEQ ID NO: 71933 - DNA, 832 bp, Zea Mays
taaaacttaaggagatgcttaatactctatgatttagaacatctgccccatcctctatgatgagcatgtaagatttgggtccaatgaccctagacaaattgaatggaccctcccaccgggattgacaacctgtgaagccttagggcatgtacagcggcattaactttgtcgtctgtatactgccatctcagcaaaataacctgacgtggaagggattaaatgaagggagagatcgctttcgtcgtctcgcaaggcgacagtgacggctcgtgctcccatgccttatcgtcggtaaaatcgccattgtacgatgcggctgcgactcatcgacaagcgaaggtgatttgatgtgcgtgtgcctgagtctgaaactgatgtgcgtgtgcatgagtctgaaactgttttgcgtgtcatgtgcgtgtcttgtggacaacatcagttttgcgtgtgcatgaggatatgctcatgtataaattgttgcagggtgttagcaggttagtcactccatccacaatgtcaaacgaaccagagggagagtttgatcctttcgagttggatcccagtgaagtttacacgttagaagatttccttgccgaggatgaaatattagatgaatttggaaggaagatcgaagagaatttgaaggctgcaatcgatggagaagcatcgaatccacctcgccgcagacgcctctccgaaatcaggagagttattccaaggaatcgacaaggtgcacatgatgatcttgtagcaaattatttctctgcaaatcctatctacaccgacgagatgttccgtaggaggttccgtatgagaaggccgctttttcttc

SEQ ID NO: 71934 - DNA, 311 bp, Zea Mays
tgtacgtacgtggccaggcgtaatcctcacgcctttattgcgtccgtacggcgatcaggatctgcgacacacacacagccctgaacattattcgcccccagacggagatacagatatccgttgaactcgtgactcacggcgctgctaggcagcccccggcggcccggccgagctcccccgttctggtccctgttcatcccgtcgccgacaaaacaaaaggctgggcagcttcttccaccctgcaccttgacgtgggaactatgttgcacacactctcggtctttccttccctgagaaccgccacatatcat

SEQ ID NO: 71935 - DNA, 311 bp, Zea Mays
attatcccgaaggttgaaccaatgtaaggtgtgatgccctcgttgtatgtatgtaactataatttgtatgataggctgtgtgccttcgctgatccggccgtgcccgtaggggaattgtgcacttgttctagcgcgtttattatgtcgatccggctgcacctgtagtcggtctttgcacgggtagtctttttgagagagacttcgattttgcgcgcttgttgtgctagtccggctgcacccttaggcgaattttgcacggatagtctttggaggaagactttggtttcgcacacttgttgtgctagtccggc

SEQ ID NO: 71936 - DNA, 555 bp, Zea Mays
gtggaagtctagatcaccatctcttcaggagtaagcatctggcagctgctacacctttattttaagcatatgttgccagcttcagatatgttcttgacaacactaccatctagagaaatgtgaaaatatgttgttacatgggactacacatacctactgtatatttagatatgttgttacatgggactacacatacctaccttcaaatatgttcttgacaacactaccatattttggttgccattgttcagttctccaatcacttatcatctgtgcttctcatgcaggctatagagaagataaaatctgtcaggaataaatcatcgcaaggaaggtgagtatctcttggcatcttgtacaaactacaaagtgcaggtgagtatatttgcttctttaaattgatcttactgtcctaaaactactaattctcgacttcatgtgaccagactcgatttttttcaatccagttgccaccacatcagcaccgctacaacggaaagtacctccagaaaatgtgaccccaactttcatgattatatgttattcttagccttc

SEQ ID NO: 71937 - DNA, 713 bp, Zea Mays
gtcgtcgtcagttaggatccagtgttaagcctgatgacagcagactcacaactttgaaagcttacagaagggccaagggtttgtgtttcaagtgtggagatagatgggggcataatcatacgtgctcaaccagtgttcccatgcacctggtggaggaaatgtgggcattggtcaattcagctgaagaagaggatggcaatgaagagacagaggatcaaattgataaaacaaccgaggaaacaatgttggcaatctcaattgctgcagttagtggaggagagggtaacagagccatctaactatgggcttcaattcactatcaacaggtcctaatacttgttgattccggtagctcagccagtttcatgggaagtcatctaatgggggtcatgtctgatatatagaaactgaagcagcccatgcaagtaagagtagctgatggcaggtgcatgtggagcaaatatctggtgtctaactgccaatggttgtgtgggggtatcaatttttgtactaatttcaaggtgttacctctaagtgtgtaagacttcatacttggtatggattggctggagaagtactatcctatgtctgtgcattgggtagaaaagtggatggaatttgaataccaaggaaaaacatttcacctgaaaggaatagttcctcagttgcagacctgccatcagctgtcttcttcccaactgcaaggcttagtc

SEQ ID NO: 71938 - DNA, 355 bp, Zea Mays
ctagtgtacaacactcagattggtacaatattcataatgtacagccacactctacaccatagcagcactaccatcctccaccttcagtccaccaaagccgaagctttcccacacccagggtcgagtatcacccaacgcataaagagttagaggggttcacaccaccacacacagattattctcatacgggtaaccgacataacaatgcccagccacctaagcctcatgtctcaggatccagacctataccactggctagcatggataaaattagagaagaaatagcggaattattctgagacaagctagatataagtatgtccaatttagggtcatcatattagaaaccatatga

SEQ ID NO: 71939 - DNA, 410 bp, Zea Mays
attcaatttagcctctctaccgaaggtgtccccggagcacttaaatgcgtcgagaaagaggttgatgtccttgatgaagtcataactggccacagtgacttctgtgcgctagtggcttctcgtggtacgaccaccgctttcataaaagccaggtgcaaccatgcaagggatgttaacaggccaaatttcaacctttcgctatcggacctagtttgtattccagccgaagctcaaagaataggcaacaggtttgtcacccaaatctgggcaaaaggcgaccgagagttggctggaaacgaagcttgaaatctactcaaggaagtatagctctttacctctattcttttattttacgttttttcttaccatattcctcatcacccttaccttcgtcattcttcagggtgatg

SEQ ID NO: 71940 - DNA, 635 bp, Zea Mays
cgcttagctcagcgttggtctgggtggccggaatttctcgctggtggtcgtgcacaaccgcggatccgcccaacgtcatgggaagccccgtatctatcgtccctgtcggtaagaacccctcctgtatattcgcgatgacctcagcttcgagtaggattagtcgacggtggtgtttgggcgccggtccgaaggatggccttgggtggcaatggcaccgccgtaagggagtgcgccgccgccgcctggttacgtcgtgtggaagaaaggcaccgaccgatggatccctttcttgcggctgtgatcagatcgcctgagagagctattcgaccgattgaatcctgaccgttgattaaccagttgaagggctaggattagatctaggtaatgtttcgcccgcgaccgtcggatcacgatcggactgctcatggcgtgtaccgattcaaacccctcacgatttaatctggtgcgtccggagttgatcgaacggccctgagatcccgataccccttcgttgttacaaattcacaaaagagaccccgtagttttatagattgaactcgccgtccacccgtgacattggattgggtctcagatttcttgcgcaaaagtccctgtggtttcctgttttagtgcgc

SEQ ID NO: 71941 - DNA, 359 bp, Zea Mays
cctcttctcagggcactatcaacatgatgtcaagtgctgagcagcagttttcagttccacttcctctgcagtagttttatgtgcctgggacttctcaattcgtgccgatgcagggttttcctcagtatctggctacgcctactccttcaccaactactcctatgccgtctcagtttggagctccgcgtctgcctcacccggcggttcagtggggttcttctgttaatttcactccaggagcttcctcttctgcgtgtatttccggggcttatgtgctacccgctgcggatgtcagagagaaaggagacgtggtgacaggtacaatttcagttgattcgtttgtggcccatgctcttttt

SEQ ID NO: 71942 - DNA, 764 bp, Zea Mays
ctggcagcttctttcagttaactgaaaatgacatttagtgggataaaaggagagtgattcagttcactgaatctagaatcagatcgaagatgaagaaaagatctctttgccctactgtaatccacttttgtgctcaagccaggacgtgcatgagatggcaacaagggttctcgaagtccagttttgctgtagaaaatatcatgtcttggcttgtactcatttaatgcacccttatctatttaaattcttgtctgcaaaaataggacaaaatgggtgtttattctgaaattgtgaaacctgtgtggagttgtagttgtgtgacacgtgtggggacctatgcagtgctggcaccctggagaatactctccactgcttaatattgggctcacggatgtctgtccctggatgcagtcaccttagggcttagttttgtggagtctttcccctgcccttgaactcgagctcgtgtccatcgcgtgagaggaggagttctggttttcaggtctgagtaacccctttccatcaccaagtccggtctgccccggagctgtgtgccatctctgcagtttggtgaccacgcccagctgaccctccccctcaccgcggcccaggttcctcgagagctttctcagtcgtgtggtgagtgtcccatgctctccttggaccagtgaagctcatgcaactcagcttttgaactctaccgtggtctgctgcttggaacagggtcgcgccaccgcagatcggtaccatggacagcctcaccg

SEQ ID NO: 71943 - DNA, 579 bp, Zea Mays
cttgggctgagttccgtgaggtatttcggacgcattatattctgaaagccctgatagagatcaaattcaatgagttcttagatttgaagcaaggcgaagaagagagtgtaatggaatattttgagaggttcactcgcctatctcagtacgtcttggattttgtaaataccaatgagaagaaaaggttctacttcctacgtggcctcaacaagaagcttcagggcttgatggcaaccagtttggctgaaagatataatgaggtggtcagtcaggctgttttgggggataacaagattctacttcatcaggagtctaaaagaaagaaaattgcggaagaatcctctggtaaaatcaaacagtgtcggagggttgtttatcaatctgtttattatcctcgtttttctccaccccagctgtctagctctcctcagtcatgtgaaaaacaagctgtcattcctttcattccacatgagtcggatgccccagacattcgttctaaagatatttcagacaatgttaattcatgtgagaattgtggtaagtcagggcactctacacaagattgtcgctttcctaagc

SEQ ID NO: 71944 - DNA, 390 bp, Zea Mays
attcatcaaggattccccttagagctggatcagcttcaggatcatacagtttcggggggagaaagttccgctacataaaaatgtagttttgttaaataccaagctagagcgcaacacaaatatacctatacgcctttctcgctctgtagcttcttcagctctcctcgcttcctctgaagctcgatgggtctcttcttcattttcactgatagcttcgtctgttatctctcttccgccgttcatccacacttcagagtaaaatttctcgctaagggcaatagcttcagctgaaggttccttaatatcattcgctgaaactgaaaagtctggctgaattacagccttcgcgtgatcacaaccagctttttcaagaagcgacacagcccctcg

SEQ ID NO: 71945 - DNA, 546 bp, Zea Mays
gggggggtcatctgagcatcgttaattgctcatcggagcaaaatttccgccgtgagccgctcctcaccgtggtctgggcactgggctgcatacatctcggtgagtaaccccccaactacttcttatcgttcgtatttagggattttcgcctctggtttggagtttatgcgttgtgagtgggggattgagtggcactgtcatagcgccgtcgtgttctggccgccgttgctatggtagccgaggcattggtagaagaaaggtcgcaggccattggatagttagcggatggctgtgattttgaccataatacctcttcggtgtatgtgatccgaaccatcggatcgcgatcgaacggatccagcgcgatctagggtattttaaatccgcgccctcgatatggtgaatcgcggttcagattaaatgagtggtgtaccgcttcgtgatataatcctagcctttagaatctcatccaacggccgatctgcaccgataccccttcgcgatgtaagacttgctaaagagaccctgtaaaatcctataaacaac

SEQ ID NO: 71946 - DNA, 1470 bp, Zea Mays
ttctatgtgaagtgctactagcaatcatggtgtatgcatatggtgaatataatgcttcatgaaatgggactcttaggagataattaaggggggttaggagtttagggtttctaacctttgggataaaaaatgggatgttacagacctaccccacttaaaagaatctcgcccttgagattcagactggtttgagaaaagataagggtattccttcctcaatgagtcctcactctccgaggtagtctcctcttctccttctgtactccattgaactttacagagctttacttctgagtttcgggtctttcgaatggctgaatcaagaattttgactagcttttctaggtactgcagatccttctgaatttgaactaactcctatgcgatgcgactctttggtacttttaagcatttgtggagctgagatacttgaaatacattgtggatatctgacatggactctggtaactgaaggcggtaagccgctggccctattctaccgatgataggataggggccgatgaatcgcagagctagctttccttttacttggaatcttttgaatccacgcattggggagaccttgaggtagacaaaatctccttcctcgaaactgagttctctccttctgttgtctgcgtaactcttttgtcgactctgagcttcgagtagtctcttgcagatcagggcaactttctcttctgcctctttgatgaaggcaggcccttctaggttattttcccttacgttagaccacatcagaaggttctggcacctccttccatacaaggcttcaaaaggtgacatcttaatgctggcttggtaactgttgttgtacgagaattttgcaaacggcaaactggactcccagtttctgtcgaaggtcaacacacaagctcttaacaaatcctcgaggactttgttgactctctctatctgtccatctgattggggatggtaggcggtgcttaagtctagcttggtgcccatagcttgctgaaggctcatccaaaattttgaggtgaattgcgttcccatatctgacactattctttgtggaatgccatgaagtttgactatttccttgagatatatctgggcaagggtggctcctctgaaggtagtcttcacaggaatgaagtgagctaccttggtaagacggtcaattataaccaagatagaatcgttccctttttgggtccggggcagtccgattatgaaatccatgtctatttcttcccacttccatttgggcactgggaggggttgcagtaggcctgcaggcttctgatgttctgccttagttcgttgacaagtatcacaccgggccacatattgagctatctcctttttcatccctctccaccagtatctggtcttgaggtctaggtacatcttggtagaccctgggtggatagaataggctgagttgtgggcctcatctagtaggattcctcgtgtctctccctt

SEQ ID NO: 71947 - DNA, 442 bp, Zea Mays
tttccgcaaaaaatcgtgcttattgcagggcacaagcctagcgagtgtagctacttcatactgggtgttgaccaagagccctcatttcatccattgatcttcatgggagcaccagcaccccatgatttgagacctcgtgtttagatcatctgtgctccgcacgatgcatttgtccctgcaatgggcttagttttactgattgggcgtaccattcttgagcctattaaagtagatgtgcttgctttgattgcctggttgggtccaatgggctgtatttgatatacgggctttcaagatgtaggagatggaacatgcgacaatggttcgtttgattggttgagagccttttgcagctttgctgcttcggcccgtatagtcactgtgcttgattgcgatgcatgaacatgtcaattgtgcttgattgctctcgctagctcaaaag

SEQ ID NO: 71948 - DNA, 1204 bp, Zea Mays
ctctgtgtggtctacgaccagggggaccccctctaacatcccttccttggatgaaggagagatcttcgacaacttcaatgtggttgcgaatggtgtacacatggccatcctttaatcagttggtgagtcatgtagtgccccaactagaggtagaggggcactagaaggaggaagctccctatcaggaactgtgaccgttaaacagacctccttgaggatatcacaaagatccgagcaccaagcccaaagatcgaaggacctagtgcgatccctgcgccttgagcgctcctgaacatagtgaatagcacagctcctgcccaaagccctagcagccacaacttcaccccaatagtgaactggaatcccctcaaccctaaccttcactctgaattcaaagcaagttttcctggcataacactcttcagaccagtccccaaagtgaaaaacccgaccacgataggagaccgacctcctatccagagcccactgcttggttcttgaatcagcgaagatgataaagaactgttcaggaaaatgcttgacaagttgatactgactgtgatgaagaaaagaatccctcagcatatcccccgctgccagcacgtccacctcatgactgttcccatcaaaggagcaaaccactgccttactgattaactcatccctacgtcgatggatcaaaccagtcgcgatgatggcacagacagctcttgcaggccgagcccttgggtctccggggtagcgagcatccattgtctgaccaccctggacagcctggaggtaagacttccgttgcagcaaagaagaagtgggtggtgcttgcacaggatgcaactccagccccttttgaagagggcctgagaaaggtttcagttgttgatggctcgaggagaaagagctgcctctctgagttgaatgcttgagtgaaacaggtaggtcacgaaatgaatgagatctcccctgggaaatatctctaggacaagacctagccctgtgtccagcctgcagacattgccagcagcgtaccggcgccgagcaaagaaaggcgtagtggccagatgccagacagctgaagcatttgccacttaatttcttctttaaaaaacgggtgcccttcatctccctatgctgttttagaggcaactctccatgagaatcatagctcttcctccaccagaattttggctgtaccatggaccagcct

SEQ ID NO: 71949 - DNA, 672 bp, Zea Mays
atgtcttcatcatgtgcgaccaactccccccatcggtcgaggtgcttctgcctgaccggctacgggcgctgcctaggcacgtggagcgtgtagtccttgaaggtgcatacctcgagagcaacatggtcctagggcaaatagtctcgcacttcgacgagatcgatgcctcggtgatcacggagggttatgccaccagacagagcgaggaggagctggacgccatcgaggaacaggtccacccttatgcccgatcactcgcaagcaggtcaatgtgaagcttctcctgaccaactccttgagtgaagaggcttctgtcggtgatccgcctgccccacctaggctgtgctcccccttgtagatgtaatgtacttttttggttacttgcaagacacttttgtatatgacattatttctggctcgaccatcacattattctccttctcttctattttacatgccttagcctttgcacatgaccatctggctagggttttggagggtgaccatatctcgccccccgagcagggcatgtcgaattggtcggtatgcgctgcttgtgtgtaaaaagagggtttggaaattgcttagggatagaacttcctcaggttttcgatgttccatgcaatgctcagaagattgtcgtcgacagccttgagtcggtaagcccccagg

SEQ ID NO: 71950 - DNA, 607 bp, Zea Mays
cgtggttcgtgggaccttggggtggcggcgttgagctcgaggcgtcgctggtgccagctcaattgctccttggagacacctcaccactgcggatctacgcatctctgtgggcagggcacaacaatgtgtgattcacggtatggtctcctcccccatactcgtgttcatctctatcgtgtttagcgtctgaagcatagttgtggggtacctgggccgttggtggctcttgccggcgatgcccgccgctgagaatctggcgccgttgtccgccaccgtcgggggagagggagatgtctgggtcacttgatttagatgcaacaaccgagattagcgatagtatatcgattgggggtggtttggcctacgccgttagatgaagatcggacgcgtaaacatgcgcctcggtcactttaaatgctgaccgttggggagtaatccgagggctggcactacgtaccgttttggaaagggatccgatttaatctgggccgtccgtgatggatcggtcggccgacatctatttatatcgcgtcggatagccctatttacaattgagcccctgttcttccttaatatcaacctgccatcctacagtagcgaaggaaag

SEQ ID NO: 71951 - DNA, 475 bp, Zea Mays
tgccattggctgaattctcctataacaatagttaccaagagagtatcaagatggcaccttttgaggctctttatggctagcgatgcagaactcaactgaactggtcagggctcggtgaacggtacttctttggaccagatctagtaaaggaagaagaagagaaagcgaaacttatccaacagtgtttaaagatagcacaacatcgtcacaaacgttatgcagataagagaagacgacccttgtatttccatgttggcaattttgtgtatctgaaagtttcacctatgaaaggagtaactcgttttggcgtcatgggaaagctggcaccacgatacgttggtccttttgaaatagtagcacagtgtggatctatggcttacatagtaaagctgcctgaacatctttcggtcatacataatgtattccatgtatcccaactaaagaaatgccttcaagtacctgacaaggtggtgga

SEQ ID NO: 71952 - DNA, 520 bp, Zea Mays
ccagcaggaaccgctagcacataagaaaattgtatatctaggttcgaacaggcaagaacatggttatgcataatcatgaactgctagagaagctagtgaaatttatacctctgaacaggggcaaatgaggagtaggctcctgcttggacgttcctaagtcagctgaaccaaaaagtgaagaaccaaactcagaatctactgaacatatagatgttggcacacacatgaaaatgaaggaccagcgcagactcacctggtcgttggtgggcgcgacatttgggggatagttgttgtgattgcagtaccaagatcgtgctttccaaatcggcaacgtagattgtgcggtttccaaatcatgaacgccatagccaaatcgggcgccattgccgcggcttccaaatttgtgggtgcattttctcggattggttgcttgagcgcggaggggaaggagaggcggggtcctgacgggtcaggcggttgcacggaggagaagccgaggcgaaggcatggtggatcgtgc

SEQ ID NO: 71953 - DNA, 671 bp, Zea Mays
cacaagaccacttgaaccatcgcattcaccacacattatttcaatagtgcccataaatgttcgaacttcaagctcgtgactttcattttgcgattattggtttagcctcgattgcatttatcaatgacccgataagagagcttaaagcactcatgcctaggactttgttttggatccatttgcaatctagtggggcaagataggtgtcgatatatttgtctcccacgtttaataatgatctctgtcatttcctaaaacgaaagattcattgttccgtatttctagcacaatgatattgcgcgcatcgctaggaatttcatcatcaagatgaacctcttcgtgaggcaaatcaccatcagggtgaattaatcgaaggagagttatcacagaccacatgaatttgcaatcagaacatatgctttgactaaggccgatggatcatattcgcaggcatccccgtagaatagatcaaatgccaataagtcaaatgtggatatgatattaatcccgggtatatccacatttacatcaggtagaagcattcaaacctatttggttactcctcaatgatttctagcaaactccatatacacaggagtacacaccgaacgtcaggttcagtttggcttttgtgcgtttatagaatattgaggcattacactagatgggaa

SEQ ID NO: 71954 - DNA, 274 bp, Zea Mays
ggatacaatatgatctctatattggtttgaatatatggacaagacctaagaaatcactacatacatatgattagaatagaggatgaagtgattaagaggattggtcaaaccaaagtgaataagatatgaggaatcgtggattggcttgaccatattactatcagtccatatatgcttctatgagaatcaaagtagagcttgattggtcttaacaattatatctaaaagacattcaagcaaggttcacaatattgaagaaatgattctctcaatg

SEQ ID NO: 71955 - DNA, 396 bp, Zea Mays
cgggcagaagaagggcacgcatacccagtgcagcattcgatttactttatcagcgaagtcctcggtccctcaaagataagatatcctcaagttcagaagctattatacgcagtacttctaactgctcgcaagctctggcactactggttgatttcgtatcagagtggactaaaaacaaggtcccggaaagcccagaagctgttcaagtctggagaatgtatttcgatggctcgctaagattgtagggagcaggagcggggattctcttcatcgctcctggaggtgatcagctcaagtatgcacttcagttcctatttctagcatccaacaatgctgcagagtacgaggccctcgtccatggactaagcatcgctgtttcactcggcatcaaaagat

SEQ ID NO: 71956 - DNA, 723 bp, Zea Mays
gtagtggagaaggcatcgaactatacagtcttactgtgcatgctcagaagagcgtcggaccgagcatctaactcacagtaaaggaaggtgtgaaccatatggtcccactattcatgttcagaggagcgtcataatgagcctgtacagagacactagaccatcgaagatagagtacaatggccaccagaaaggttttatatagaaaaaggcatcaaactagtccaatgatggatatcaaactatatgtcatggagacgtgccccatcggttggtaatagtttgaactgacatagtagttgttaagagtcatcagactctaacataatggtctggacgtcgaatggttcgacaacacatagacaaccattgagggtgcaatgactataccttttcaaagggctataaattggaccccaaatgaacatttgagaagtgtgggagctgaggaacatatcaatagagttgaggttcatctttactagctctaggcactcaaattcttagagaatctctcggtgactagcataggtgctttgcaaaagtgctacctctaagtttatatctagtgtttaagtgcagttagtataaatcttatcccttggtatttgcatgtaccattttagttgtaacgaaggggcttgtagtcttgaaagatcatacaaactatgtttgtggtgtggatgtcatcgtatactagaaggaacgagccatgtgtcatttcca

SEQ ID NO: 71957 - DNA, 462 bp, Zea Mays
tgggatccctagggaggtgattgagcaccatctgaagatctatccggacgccaagccggtaagccagaagcctcggagacagtccgtggagcggcaggacttcatccatgaggaggttcggaagctgttacacgccagcttcatcgaagaggtccatcaccccgtgtggctagccaacccggtcatcgtgccaaaagcaaatgggaaactccgaatgtgcatcgactacaccagcctgaataaagcatgccccaaggacccatatccacttccacgtatagatcagatcgtggactctacctcggggtgcgactttttgtctttcctggatgcctactctggttttcatcaaatccggatgtctagggaggacagtaagcacaccgcttttgtaacggtagatgagctgtactgttatgttgtgatgccctatggtctgaaaaacgccctgccaacatttgt

SEQ ID NO: 71958 - DNA, 357 bp, Zea Mays
cggttttgtaaattcctagggacccaaaagtaatgcacttcctaagcagatggacgacgggttctaatattaaaacactcgagggctcttatgcaaactcgcacggcgaaggggtatccatgttttctagccacttgatttcaatccgagggtccggattagatctacatcactatgaacctgtatgcgattgtgattgtccatcaaaagatctgtggcgtagattaggtttaaacgaacatcaatctcatccctccatcatccgatcgatggacgcgaagcccccagccgaacaggtacgcacgacacgattcgggccgttagcggcttgatcaatggctccgggccttcttctac

SEQ ID NO: 71959 - DNA, 872 bp, Zea Mays
atcaaacttgcctctatatctaaaagtatattttaaatagaccaagccaccctgactagacccggcagcagcctccttcggcatctcccattcattcacaagcggccatactctgtaggcgatatgttcttgaaccaggtctcttgtatcaataaaagtacactcattgttgaagcttctctggcatgtctctatatcgttcccaagagcggtggctggcctcctgatgccgaagcgagaccagatggggcgttgaataattccttttatatcttccctctcaattaaattattcttaacataaaaccactcctccatacaggccccgggccatctttttcggaaagttggaaccaggtaacttacattggggtggggcacaaagccataacaaccaaagttgttgtgatactgctccttgccagtagccttcgtctcatacaacagctcgtgcatgttgcaaaagcattttgcgcttggctccagcccctggcttctcacggcccagataaaacccccatcctaataatggcttcgggggtaatttgatgtaggaaaatttcgaaggtcttcagtacttcgaccaggaatctgcttagtgggaaacgaagccctgccttcataaaactcctgtaaataaccacctcatcctcttcgggagcaggtgcagcgctatctcctctagctctcacaattgaaatatctcggaaatatctccctttcatagcgtcaatttgacttcacttaatggatgattttccgaagatagtgtgacttggtcgccagggccaattttctgcatcttcgtcttcactttccatatcaaagctcccactgtcatcagaatctttagacaaatcagctagtatctc

SEQ ID NO: 71960 - DNA, 681 bp, Zea Mays
gagaatccctgcccctgctccttgcagtctctgtgagccatcgaagtacatcttccatatttcagtgacctcagggctttccaggacctggtgctcagtccactctgatatgaagtcgaccagtgcttgagtttttatcgccgtgcgaggtccaaactctatatcatgagctccgagctcacacacccacttggctattctcccaacagcttccttgttgtgaagaatatcgcctattggaaatcctgtgactactatgactttgtggtcgtcaaagtagtgccggagcttgcgagcggttagaagtaccgcgtataacaaattctaaacttggggtaccttatctttaagggtccgaggacttcgctgatgaagtaaaccggatgctacactgggtatgtgtgtccttcttccacctgctcgactactaacgaggtgcttaccacgtgagtcgtgtaggagatatatagcaacaaatcttctgctcggcatggtggcttgagtactggcagagtggtcaagattttcttcagtgcctctagagcctcctgtgcttctgtggtccattgaaatttgtccaccttcttgagcaatttatagaatgtcattcctttctcgcctagccttgatatgattcttcttagcgctgccatgcatccagtgagcctttgtacctttttc

SEQ ID NO: 71961 - DNA, 626 bp, Zea Mays
gatcaacattgtcaatataaccaaaatagttaaatacctcaatgtgtcctcccttgatctttgatttgccgaagttcacgtcacttagttttgtaggacgaatggtagtgttgtcttattcaatgtccatatcgccgctatccacggatggatccgcggcgccagctttggcctgagaggcggtaacctctaccgccgtaggcaagttctcaaccctttggcgcatctgacgaaggtgccaaagatacctcagcaacagattgctctttggccatttctaatgaaaaagcgtgtttttaactggctaaggctagtttgaaggtggaaaaacgcttgaagcaagcttcaaaggcagagcaggctttaagagcaacaagtgcaaaacaacaaatgtcatgtcaacgccatctggcatcgcttcctttatatctgcaaatttttcaatttaaccttgtactcaccgaaacctggaccccaccagtcagggtgatcataggatgctaattcataacgagcttcgggaagatgttttttggacctttggcgcaaggcctcccaatctcttttattttgcgatctaagctcgtcatgaagaaacgaactcattttgcaaggggctactattg

SEQ ID NO: 71962 - DNA, 782 bp, Zea Mays
caggagtcctcatgaaatttattcactcggctaccgggaagcaattgttagatgaaatctatgtcgggcagtgtggagtacatgcagcgtcaaggactctagtcgagaaggctttcagatacggtttctattggccaacaacgaagagcaatgctgccgagttagtccagaagtctgaggcatgccaattcttatcaaagcaacatcacttacccgcatagcagctgcagaccattcctgtaacatggtcgttcacatgctgggtgctggacatgatcggacctttcaagaaagctcagggaggctatactcatgtactagttgccattgacaaattcacaaaatggatagagtacaagccaatcgcttccttaacctcaaccaaagcggtggattttatacaagacataatattcaggtttgggataccaaacaacatcatcactgacctgggatccaacttcaccagttctgaattctttgatttctgcgagcaacggagcatccagatcaagtgtgcgtcagtggcacacccaagagccaatagccacgtagaaagagccaacggaatgatactggaagcactcagaaagaaagtatttgacaagagtgaaaagcttgcaggaaaatggatcagagagctgccatacgtggtttggagcctgagaactcaacccagtcgggttgtgcatggaaataccctgttttttatagtttatggatcagaggcagtgctgcccgccaacctagtcttcagggcgccgaggttaactttcgaaagc

SEQ ID NO: 71963 - DNA, 957 bp, Zea Mays
cacggatccaactgggacgatcacggtgccaataatctgaagcccgccgaagagtgccacggtttgagggcatattttctgtatgatgcaacagaaacagcctccaaacagccatatgcatatgccctcagttatttttcaacaaaaaaccaagtgtagtatacagttcaatattttgaaagaaaacatcatagggcaaagcaactagatcatctcacatgtatcacaagcctcagttcaatattttcaataaaacagcaacaaacagcctgatgccctcaaatgaatataacagccatatgaactggcattgtcaactatgcactgtcaccacaaacatccatatgccctaagctatttttcacaaaaaagaccaagtgtagtatacagttcaatattttcaaagaaaacatcatagggcaaagcaactatatcacctcatatgtatcacaagcctcaaaacagcactcaggttattataattccatcacaaggctgctacaaaccacatggcgcagatatctcaagcattggctcagtaaaagtttcagaatacaaacctgatagtatttggccaatgtctcctgagcacaaacgacggctgcactcgcctgttgataagaacacatagcacttttttccgcctccacagcggattcaagaacatcaagcgtagaatccacatggttacctactgatgctgtggcgcagagatcaccagcaaccacacaggtggcagcagaagcactcaatgtgtcacgggctgcatcaacggtcgcggagaacttctgggcacatagctcagcggcagattccatgccggaatccatatctgcaaacatggttttaaagtcgtccgactaatcgcgattagtcgcaattagtcggacttatcgctgctgcaaggccgattagggccaccgacgcgattagggcgactagaaacctagtcgtccg

SEQ ID NO: 71964 - DNA, 713 bp, Zea Mays
acactaagtgttggcgaaaagaccaaattgccctctcagcaaaacaaccatatatatgttttcgttataatatcccttgagcactagggatggagattcaaatagagataggataaattagatgcataaatccaattccaaatcctaggccttagattaaactaccactacataaaccataaactactctatttttagggtagaggacatataaagtctcttgtttacaacgacagaccacccgttatggctgggtatggctcacgccatatcttcctgcgacccacctatattatttccgacactatagtactgcacgaagcctcatacaccttgctctattgcagcttgtttctctgtcgccagccatcgccattctagctctcctctccagctccatccacagcctgcgctcgcgtctcgcatggtctgacattgaactccgccttctgtagtctcctacttctgtatagcgtgcaccattgcctgtgtagtcgtcggcctcaggtcgtggcccttctcaacatcgtcgcgtccatgctctcatgtggtatccctctccagtcttcgctctcccctctccaacatgcaacaacttagtgtggcaacgtccatctccctccctagccataccttgtttctagggtgcgctccatcactgcatgtttatgattaccttacacaagaagaagaagaagcaatagccaaagatt

SEQ ID NO: 71965 - DNA, 716 bp, Zea Mays
gttaatcagtaaggcggtggtttgctcctttgatgggaacaaccatgaggtggacgtgctggcggcaggggatatgctgagggattcttttgatcttcatcacggtcagtatcaacttgtcaaacactttcttgaacagttctttatcatcttcgctgattcaagaacccaagcagtgggctctagataggaggttggtctcctatcgtggtcaggtttttcactttggggactggtctgaagagtgttatgccaggaagacttgctttgaattcagagtgaaggttagggttgaggggattctggttcactgttggggagaagatgtggctgctagggctttgggcaggagcttcactattcactatgtccaggagcactcaaggcgcagggaacgcactaggttctttgatctttgggcttggtgcttggatccttgtgatatccccaaggaggcctgttttacggtcacagtacctgatagggagcttcctccttctagtgcccctctacctctagttggggcgctgcatgactcaccaactgatctaaaggatggccatgtgtacaccattcgcaaccacattgaagttgtcgaagatctctccttcatccgaggaagggatgttagagggggtcccactggtcgtaggccacgcagagaatttgtatggagctacggtgtgccagattcggttggagaaaaaagagagaga

SEQ ID NO: 71966 - DNA, 351 bp, Zea Mays
ctcacgcttacttaactcagggtgaccactataccctactaacggagcaatcgacttaagtcggcaacgacttaaggcggtgtgacatgctcacgcttacttaactcagggtgaccactataccctactaacagagcaatcgacttaagtcagcgacgacttaaggcggtgtgacatgctcacgcttacttaacttagggtgaccactaaaccctactaacggagcaatcgacttaggtcagcaacgacttaaggcggtgtgacatgctcatgcgcaactcagggtgactactataccctactaacatagcagtcagtttaagtcggtaatgacttaaaccggcacgatgc

SEQ ID NO: 71967 - DNA, 571 bp, Zea Mays
gccaagaggaggggtgaagggaaaaaaaggggtggccacctagggtttttgtgggagaaagaaacgacgcctcagatgacttctatctttgcatccaatggcccacaaccctttacctcatccacgcaccaaagtttaacttttggtcaacatttttttgggatattacactctaccccccttaaaagaattcgacctcgaattcggccactccaagcaaaacacccaagataccccatatagcaccaccattcaaaacatgggtccattaatggtcttaattaacagaagaacttctaccttggactaattgtctaaggaaactacacgacctgacatcaagcatgaaacaacatgcaatgaagctcaaagcaattcatagttgcaatcaacactacaatttcacaccatcaaatttggatgcagctatacatcaacatcaatgtcttaagacaacactcttttatgaaggggtaatatgcaccaagcacaacccttaccaacttcaacaattaattttaattaaatggtgaaacatctacacccgacgaatgtataagaagatcaaaca

SEQ ID NO: 71968 - DNA, 657 bp, Zea Mays
attgctccgttagtagggtatagtggtcaccccgagttaagtaagcgtgagcatgtcgcaccgtcttaagtcatcgccgacttaagccgattgctccgttagtagggtatagtggtcaccccgagttaagtaagcgtgagcatgtcgcaccgtcttaagtcaccgctgacttaagccgattgctccgttagtagggtatagtggtcaccacgagttgagcaagaatgcagattgacaatgaacaattcctgaagtctttttattgatgatgtgtttcccggtttacagaatacattgccgccccaatagcttttgaaatatagctaaggataaaatctcctgaggtgttctatgttccatgagttcccaatttccgtaccgtccatctgagtgaggcggtatgatcccggtcgagtgacttcagctactacgaatggtccttcctatagaggtgataatttgtgtcgtccttcccccgttagaatttagcggaggacgagatctcccactgcgaaggatcgaggtcgtatggccttatcgtgatagcgcctcagagtttgctgataccgtgctgattgaatcaccgtgttcagtcgctcctcttcgagtacatcaacatcctccagtctagtagcctcaacttctgctatgttttca

SEQ ID NO: 71969 - DNA, 582 bp, Zea Mays
ggaatgttttcaagcaccacgacatcgaatgcttctgatttgtaaagtgaacacccacacatatgagcacttgttaaagatttgagaagggaaaaatattggaacaaaaaagattgatcgaatggagcatcttgcataaataactaactaactgaaattgaggagaaatagtaaagtgtaaagggaatggaaaaagaatgattttctctttgttgtgtcgctgaaagatggaggataagatattgtgtgtggtgccccccttctcgacaacctcagcgtcgttgacgatgtcaaagttccaacattcgagcacgaccagctatagctttccggcttccaaccattctgcaacaatagtctatacccatgactgggaagatgggggataagatagtgtgtgtggcacaacccttctcgacgccctcggcatcggtgatgatgtcgaagttccagcaattgagcacgacccgctatagctttctgacttccagccattctacaacaatagcctgtacccgtgactggttctcttgaaaaaaatacgaggcatgaagaagtactacagacaagcaggtaaggagt

SEQ ID NO: 71970 - DNA, 390 bp, Zea Mays
cacaaagaacttgttcttgcaccaaagctcaaaagagagagatcaaagaataagagttgaaatcatgtttgagatctaaaaacttatctcacaccgaagagacttcccaccgtcgaaggatgaagacttggggcgtgagatcggaattgaatcactttgaatcgaaggagagcagctgtcacaacccaaccaagttatatggcccacgtacaccaatccttgccttcaaggcctttgtcggtaccctaaaataggggtaccccttactgccgtataaaggcacattacccacgcggctatccttggtcacgtggtaaaagacctgtgtgtgtgaccagaccatgactcgcccaagcctcgggtgtctactctgggccagcaacaatacct

SEQ ID NO: 71971 - DNA, 487 bp, Zea Mays
aaaagctagaagcatgagatccagcataatactgcattttgtttattgctttggctatcattatgcatgtatattattagccctatacacaagagattcatgagcacctggattggaggtaaatattcaaatgcagcagttctttgctgttcccccaccataatgtttcatgtcgtagaaaacacttccacttttgagttcacgttttccttaatgtgcgcagtactattggcaaagtacatgtcctttttcaggacctgatgttgcagctcatttccattggtgttcaataattaagacgatatttagtcgaagcttactaggatgcatggagataccaacgtcactgatacgatactgagtgacaaaacatcattctctctctctaacttcgtcggcactccattcttacagaatcattcctttgttagaagaatctggcatcgacaaaggcattggggaacacgaacaagagaggcaggatatt

SEQ ID NO: 71972 - DNA, 416 bp, Zea Mays
gggcgacgcccaaactacatcctgagcccataggccaaatttgtgcccaatccgcccacaattaacgatggcgcgacaatagctaggaaagggaatacagcgagggtaaagaaccgagggctcatcgaacacggaggtcgaattggcgcaagacttccgacgatggatctacgtacctgccgtgctctgatgaggaattagatggtcatcggccaaccacacgtgtgacctcccaccccaacatgtcactggcaccagggtaccgttgcaaacccagccggagcccgagcagcaagggttcaggtgaatcgtgggggcagcggtggtgaatcaatttggctccccgactaccgcaccttgtcgatggtggctggctttgggggtggaaaggcgaagagggtcagaggtaccgcgca

SEQ ID NO: 71973 - DNA, 329 bp, Zea Mays
ataaaacaagtgtcatgatcctcggaagatgggggtatgagaatgaccagaaataagagatttaggtagatcaacatctgatacttgagaataggttatagcagataacaagatgacgaggtatatctcgatgaatgatctagggactcgacagatatggtcacaacatgattcacacggaaaagattaccagatccaagtgaaaagagaggtagtcgcatgagatcgattgggatgagcagtagaaaggttatgaagattcgggacatgatctatggaaagaaacatggccttgatagggtttgtgcaactagacaccaaacaacaat

SEQ ID NO: 71974 - DNA, 909 bp, Zea Mays
ttaagcccatctaaaaagaattatatagagatggagaaggtcctctatgtagtcataatggctttaagaaagcttcagcactacatccaatcccacaacattattgtgccatcatctcaagcactcaaggatatcataagaaatagagaagcttcgggtcggattcgaaagtgggcaatagaaatcaatgattttatcatagacttcgttcactaaccttgcattcaatctcaagcattagcaaattttattgttgattggactccgagctgacaggacaaagcaacccaatcagacgaagttgtctggacagtcttctatgatggttcatgggggtccttcgtggctggtgctgcagctatcattgtttcaccatctaaagtaagaacttcatatgctgccaagttgcagttctagtgcacaaacaatatagcagagtacgaagctctgcttctaggataaagaaagctaaaggcaatgggtgtaagaagggaagttttgaaaccaaactcccaagtcatcataggtcaagtggacaaatgaagcaaagtgaagagcccaggcatggagaattattttgatatgatctgaaggatggaatcttccttcgaagggttttcagtaaaaaaaacattccgacactagacaacgaacatgcggatatgctgaccaagtctgccaagggctcccctgcccctcaaagtgttcttcgaagtgttaaagacaccctcagttgacttgatggaaagaactatcctaactatctgccctacacacaatgaagattggagaacaaaaattataaccttccttcgaggaaaccatccagctaatgacgaagcatacatcaatagaatgcaggcaagagtaaagccgtataaaattatagaaggggaattgtacaaagag

SEQ ID NO: 71975 - DNA, 468 bp, Zea Mays
agtaggggcacatatgacgaagctagatgaagctgcggaagatcttcaagagtttgttgaccataatagcaaaggaaaagacatcattacgcccaccatgttcaatagtttgaatgtataggtttgaggtcacggttgtaattttaccgaagttgtacccctcgcctatagatagaggaacaatgccatgcattggtacaccttctggatcggagagaaagtgagtagctccttcttcgaagctgtaatttttccttcatcctataagctttgcaaagccgaaggtataaatgtaatctttaatttaatactaaaaaggccgaaggaagtaagcgatgtttacaaaattgtattatatgttttgtgtttatgtctcatgtgctttacttactattgtatttacattttccttattaactttacttacatcttcatcttttacttgaccttctctcgaagatggatgag

SEQ ID NO: 71976 - DNA, 683 bp, Zea Mays
taaacacaccctgctgtgatttgttttgaaataatggaaagttggattaatgttttctgtttttggtggatgatgtttgttcgtgttggaatctacctctcgagccctttctcgcgagagttcgattatggagtctgcccgaggattatagtttgtgccttgttgatgcctcggcctccatacgtaagatcgtggatcctcgggtcctcaccggggtgcggtaccagcttaagtcacctcgtaactctccatcggtggtatttcctggaagttcatcagtgttatctagagagttcgtctgttgcagcttagggcccattcacgggcggtttcaacgctgcttcgaacatcatgctggaggtcggcataaaggaaataactgtgcatttgtaatcccacgatttgcttttgtgatatgttactaataatgttattattctgtaagcaattttattacaaaactaacacaacttgaaggggtatgggatcgctagggtcgtcggatttcattctcaaattttgcaggggttctttagcaaaagacatcgactaaaggggtatgggatcgctaggatcgtcggatggaaaatctacgcatcatattagaatgcccataccttaaactggtatccaatcctcgccctttgatcaagatctaacggcccaaggaatctcatgccttg

SEQ ID NO: 71977 - DNA, 521 bp, Zea Mays
ctacccgccgatctcaagttcggggcgccaaggttgattttcaaaaacatagcagaagtcgaggccactaggctggaggacattgatatacttgaagaagaacggctgaatgcggtaatccaatcagcacggtaccagcagactctaaggcgctatcacgacaaggctgtgcgacagcgatccttttcagtaggagatctcgtcctccgccgaattctaacgggggaaggacggcacaagttatcacccttatgggaaggacccttcatagtagcagaagtcactcggccaggatcatatcgtctcactcagatggatggcacggaagtcgggaactcctggaacatagaacacctcagaaagttttatccctagctgtatttcagaagctatcgggacgacgatgtactctgtaaagtggaaatatgccatcaataaaaaaggggtttcaaagatactcagtttgttcacgattgacttgctttcttacttaactcggggtgacccctatgccctactaa

SEQ ID NO: 71978 - DNA, 405 bp, Zea Mays
caatttctagcaccatttctaagctctcagataaaagaaaataccaaacaggaaacagtgttgggcccaaatctagctggccggcccagcaccagacagacctggcccgcggccgatggcccgtgctcccgcacttgcgtttttgcggggagacccccgatggccgaacaaatcctgtacgcatccctgccactggtttcctctctcacagactgatgcacatgggtccctcgattaccccccttttacaacttctcggcctcgacagtcgccgccctactacggcgatctggcattagaccgaccaccgtggtgcaacgcgaacgacggtgacggcaccaccagggtccctaaaccatggtgaatacgagcacatgctcaatttgaccgcgaagtcgctggagc

SEQ ID NO: 71979 - DNA, 397 bp, Zea Mays
ggagaagaaagcccgaactttgttaggaacatgaaaggagagttttgcccagggacatgctggatcagttttatgcagccataactgtctcatctgaagagcccagcacatctcggataaactggagatgcccagacctcccaatttaagaggccgactgtcagggcccaagatgggctgcggcaaggagcagcagcaaggataagattaggcatcaagcatccttatcccctttgattagaatgttaaggcccataaagcccatatattctcgtctgcctatatatatgctacagtacccgagggggtgattgtcttgcctaatcaaggttagtaacatggtaacagagcaggttacgaaaccctaatttcttagccgccgtcgcggctgttcccc

SEQ ID NO: 71980 - DNA, 333 bp, Zea Mays
ctgtaagggtagcctgccgttctgccttcgttcaatctggatcgtccatcgctattgttcaatctggttcgtccatcgaaccactaacctgctagccgcgccctcctcaccctgcccaccgaacctaatgcagtcccgcgcaacaaaataaaccgtccttacacaggttcataaaccacattccatctctctcagtgagcaacatacgatacacagttgcgcttataaaccatgtttcgtcactctcagtggccggtgtggcactaatgaaacaaatgccataccagcgcgcctgtgccatcagttagtgcggcccagtaatttacgtgtgga

SEQ ID NO: 71981 - DNA, 616 bp, Zea Mays
caatgatagccatggtgtacatctatttcatgccttgtagtcccgcaatagtactatgcctagaggctatggagacctctacaaatgatatattatgttgttgcgagcttgctaatacatgaaacaacatccaatttggggggtcattgttggcctcgtagctgcggaacatagcagcccttcttgcctctatggtagtggcctcctaagactaagcactaatggatacccctagcatgctcctgctctaataggagcccttcatcactatcagtgataggcatcactgggggaacattgtcgtcgatcaaggcctctagcatcactccatcgagagcatcgcctactactctccatctcattcaagcgctaatgcatctgaggacaccattatcatctctatcgtgggggtctcatcaccagccaaccatgagcataaacttttcttagcgctaagctcattgctagagatgtcaatgacaaggggctcaccacccctaataacggttgtcgttgcctattggttcccttcaacatggaatttcttttgtgatgatatagttggtcctagtagtggccctttgagtctgggtccctaccgagggcattttctatc

SEQ ID NO: 71982 - DNA, 664 bp, Zea Mays
gaaagacgtcatgaaagtgtacctacccattgtcctagggcaagacgcactgcaatggctctgacatctacctcaagactgcatcgacgactaggatgacttcagccgtcagtttgtcgtggattttcaatcccttttcgacaaaccggcgcagccctaggacctcaagtccatcaagcgccatagcgacaagatcctctgctcgttcctcgggcggtttcagacaatgaggaaccgcatgcccgacgtcatagaggcaaccatgatcgaggacttctaccatgggtccaatgactcggcttttgtccgggctatcctccagaagacaccctcgacctcgaaacaacagttctgcgaggcggacatctacatcaccgccaacgagcgagcccagaacctcatcaggaacacaaagcatgcaccccaatgaagaagaaagacataaattagtaacaagacaagcgctgagacaagaggccatgggaggaagtgcacgtcgttgggccgccgagtacccatccccgcgacgcgccacacggcggtggacaaacgctagacgagatcctcgactcctagtgtccgtaccacaaggagatgcgccacaccttgcggaactctcaggactcaaggactctgtcggccaaggccgacaattccagctgct

SEQ ID NO: 71983 - DNA, 370 bp, Zea Mays
ggaaactgtccacttgccaatttgccactggattgcttgttattttagcccttcatctgtgctgcgctagtacttctgtatctcagtatccatagcttagtcccctacgggctacagtagtaaggatgactgacaatctggtatcaagcatggagactgcagctctggccgacgaggatgcatcgccgaagaagacgaagcagggcggcttcaggactatgccattcatactgggtgattgcccttgcttccaccgaaattttcctctcaccagatcgcgattcaagcaacctttccatgagcatatacatactactgcgaacgactgatgcccgcccccctgcacctgcattgcagcaaacgagatctg

SEQ ID NO: 71984 - DNA, 368 bp, Zea Mays
gaaatgtcgctacaatcgttggatcaaagcggtcaaacgtgggactcggctgcgccaacataataagttgcctatcctgaatgagacaagaggctacacatggtcctcatagacgaaggaaggagtcttaatatcatcttcactaaaaccctcaggaagatgggattattcgagaaggctttgaggccgagtccaatctccttctatggtatcatccctgaccagtctaccatgtcgttgggacagatagttctgcttgttaccttttgtatcgaacccaatttatgcactcagtccttacactttgaggtagctgacaataacgcatctcatcacgtcatcacagggaggcctagacaatgtttttg

SEQ ID NO: 71985 - DNA, 513 bp, Zea Mays
caatccccaactatgtcgtcgactcgacccactgcaccatgtccttacgcatatcggtgtccataggtgtcaaccaccacagctaatcatcttgctttcattacatcacctttactatcaaccatcgcttcctgactccacacctacgcaccacaagccaagacaattttgcacaaactcacttcctagttagtccacatgatttaacccaagaagctacacccttgacaatcactcatcacaaacccaaaccatatgggcacatatcaaccttgggtttgcactttgtcgtttttcattggccaaagatggtgactatgtggtatattgggaccactacaggttggcttctaatgcaaactatgaaacacatggagtaatgtgacatgactttttggtaagattattattttctttgatagataagtttttaaagtatatagtgcatatatttacttatcacacatttttttttagctatatttttgtttgccagaggaaagaaactacgag

SEQ ID NO: 71986 - DNA, 453 bp, Zea Mays
atcaacagttccagtaaatcacatatatttttcttcttcttcttttaccgttggattattgagattgttgaggtgtccgtcgatagttagataataacgctagtgttcgaaacagtacaggttacagtgagccgcgggggctataaacggtgatatagcggctcacctcagtccttgctacgcaatacatgtggtgtgtttggttccctatatattttaaggagtttgatggaacacagaatacaatgtaaatcccattatcaacttgtgttggttgggattgtgagattttggtacaaaatccaatacaaaaatcataaaaactatttggtgaaaaatgagacaacgttttttttgaaaggacggtagagggttgccgaaattttattaataggacaaggacaacatacaaatgcaatggaccactgcccttctctaaacggacaacataca

SEQ ID NO: 71987 - DNA, 518 bp, Zea Mays
tgatggccttgccgggcaatggagattgacgacgatgaggtggagcttgctggagaagctcacagcgccagggaacgacggtcaactcactggtggtcaaggacgagcacttggagcgagcaggagggagcacgtccacggcaagggctccctgtactaagaagggcgccgagctggagctagaggaagatgctagcggggagctcgcaaaaatgggagggacaacgctgggagcgtggagaaggaatggggaacgttggggagtgccctggcgccgtttatatagatgggggaggcagagaagggtcagacaggaaggggcaatggcaggtgcgagctctgctcattggtgggcgtaggcggctgcctgccagagcaccagtctgcacagcaacagaagaaggcacgcattggacgaacgtttttagcattttctgtttggattcggacccggatcactgcagaagatttgttccttgatgtatactctacaaatcgtgtatagagattgaggtgat

SEQ ID NO: 71988 - DNA, 801 bp, Zea Mays
ccgccggtgacctccctgcgcgaagattcgtgccatcgtcgccgtgattcgcgacctgatcgactggataacatctaaaggtcaccgccgtggataactccgaccattaaacaactccggccactgtaccatggtcaccgcggcggaattggataagaacgccggtgatcaccgtcgcacggccttgtgccgcatgtccgagcctttccaccgcgtcgccgtgactccctatagttgtcccatcgtcgccggggaggttgccacgacggtggacacgaattcacagcgcccaggttcttcttcatctccggccgccagcacagctcggccaaattgatcaccaccgctcgctccttctataaattgagcccccgggcagctgcgctacctcatcgtgaaaccagagtcccactcccaccctcaatcatcctccagagctcactaatttcgaacttcccccaaagtcagtctccaccaccgtggaaacagcctcactgcggccaacgcgattcaggtcagcccacaccttctactcccttgtttgagtattctcataaccctgtgatgcttgccaaaccaccgaattgaactaggagcccgccaatcgctaggaacacgagcacatgtccgcgccgttcactgtcctcgcgggcagagctaggcagatcaccaattataaaattgattgggggggggaatggtccttagaacttgaatttggcttcggccaaagtaggacactggtcactgagcgaaatagccggttcacgtgatcgtcggagccctgcgcatcgccgtccg

SEQ ID NO: 71989 - DNA, 323 bp, Zea Mays
atttaatatgatgtatgaaaactttatttgtggtgtcggcaacatgagactatcaataagagactttaaatatggtatcataccttcatttctttgatttgtggattcctttgtacttaacccttataggaacctctttgtccactcgggaggctctaggacctgaggggatctggagacctggccatttgattcatccgagatcgagtcccctggccatctgttaataagagatctagtttgagcgtgtgcatgtgaagtagaactagcacatgtttggaaacggcaaagtttgtcttccatgtattattgcccgaggaaag

SEQ ID NO: 71990 - DNA, 612 bp, Zea Mays
gaaatatattacatcatgagatacaaagcttgcaattgtttattacatcaaaaagcatacaaaattatgtaaatgtttttatgcatagtctaattatcctccttcaggaccctctcagcagcttcgcttagaagtctatttacaccttcatcaattgttgcattcactattctaatttcatggagggtacccttcggggctggatcgtcgttagggttgtatggctctggaggaggagacagttcagctacaccaaaatataagcttttgttagatatgaagccaatatacttacgaggctaaaataagacaaacgtacctatacgtctatcgcgctcagtgacctcctcgacttttattgcttcttctgaggcaagatgagactcttcttcatttcgcctaatggcttcgtctgccatctctcgaccgccattcatccacacttcagaatagaactaagggcagtagctttggctgacagctccttgatgtcagtcgctgaaactgagaagtctaactgaattacagctttcggatggtcacagccagctttttcaagtaaagatacaactccccgagcgcctacgcaggcataaaaatactcctttccag

SEQ ID NO: 71991 - DNA, 793 bp, Zea Mays
tcaggctgtcagtcgggccttacaatgaaaacagactatcagtggtttctgatcaactttggagtcggattatgcttgatttagtgagtaactactcaagatccttatgacaaagttgaagctggtatataggggaacaactttggtacagtcgacttggtggtttgctgaatgaaaatcaaaggaaaagggccctcaagttgctctatcagggcactgaacggagtcggcgatggtacagtgactaaaaaaatctttgtttccatgaacccgaagccagcgatcttccacctcgattcgcgctcgctgggagattcatacctggggagagtggataactttggaccgattcactgctctgtggatggagccgaggggtaaaagatctggccggcgcgcgacactcttgagtgcttcatgccgcggtgtcactgacggtcgagccctccatcactatgcctctctactacgtggtgtccatgtgattgtgtcgtactcttgtgaccatagatagccagtcatgtcatcgcgccattgtttgccacgatgcctggccgtcgtggaagaaatccgagcgccgccgtgaatgttctcatcccaaattcgaaagcacacgagtgatcactataaatttagtgccatccatgctctgccttcttgttacgcgcttagtgcaccactcctcacctcaatccctccaccgtagccggagaatttggaattttccccaaattgatcgcttgtgccacggcgagacatctcgttgtggccagagctctctaaggtaaccgcg

SEQ ID NO: 71992 - DNA, 604 bp, Zea Mays
ggcggaatgagtctttaattttgtacggaagagtagacattgaagacggtataatttggtctttgttggattatgaaagttttagtaatttcatgatctttccaaagagtattggtttgtaattatcattgcatataattggagttaggctgctctgaagttgttgcaccgttgtgtctgaactttacgtgtcgttataatcaccaataaatcgaccgcgttttgatagtttcagagcccaaatttgggaattctctttaagcaaaacttttagttcttctcagtaccttttaaatgggtatttacttgtgattgtctgttaaatagattgggagaggtggttgtccggatataagtcgaatctctaatgtgcagtatctcaggctgagtttagttgtaggtcatgcagagttgagggctataaagataaatttgggtgcaactttattgtaaaagtcgtggaaaattttcaaaacttttccaacgcgtgttcgttgtagtttaagttgagtatagcaggagttataggtttttgaattttagttgtccattgtttcaatcctatcagttttccaacaaaagaattgcattgttttatcagttt

SEQ ID NO: 71993 - DNA, 315 bp, Zea Mays
aagatgtgtgcagctgcaacctctccctttttcttcagccatcgaacagctcatcacgtagtactagtgctccgttgcgggggcagggcagtggacctctacgtacgctagcttcgttattacaaatacgaataatggggcctgctttgcttaaccgccggacgcgcgcacttgcacatcgagggagcgtgcggctttggtcgccatctatagcccgcagtcgccatcatcgtgtcttccccccgaggttgttgtggtcatctaaacctgctgcaatgatttggggacggagacggcacggcaggttcaggttgg

SEQ ID NO: 71994 - DNA, 441 bp, Zea Mays
tgccgggccgtgcgaaccagaaactgtcgttggtgtggtggtgcttggctttatttctgtgggcgagccatggatgatgcagggactgagggacccctggcctgaatcgcaggagccaggagcggtttggctacgagcggttagctagcttgctagcagccacatgctcagagcagaggcaagccaggtggtgggtttcggtttcggctcggctgccgttggttagcttgcccaagtgcagttgggcggccctactgcccggctgttcaggagcgcgtctgaaagcgaggtgatcagtgagctaaccacggcaacgggatcggttgatcattgagcgaccttgagacaggacgaagcaagtcgctctgtcagacgagaggcaataatttgcccttttttcacttttcatgcatttcagtcgtgtgtgggtgtgttagttaa

SEQ ID NO: 71995 - DNA, 705 bp, Zea Mays
ttattctacagacaggagaagcacatatcttatgagtatgcaaatgtaaaagcacagcggattaaaattctacatcatatagcatgctccaagtgcttggaaacaacggcagtattcattttataattcttgagttatagaaatcgccgttcaattaagagggatccgcaataagttaagtaagttatgcaatgagctcaattcaaattccttcaaatcctctaacagaacacttttctagatcatgaatgccctttgaaaaaccactcttactccccacaaaagttccaccttgtttcacttcagttttatcaaaacttgctcttcagtttcaaaaaccggtttaaccggacctgaaaccgattcaatcggtttctggactgtttcttctgccacctctgtcctgccagtctgacaatcaaaagctatcagaaaagttgtgtgcagagattttttgaaaactggttcaaccggatttgagcccggctcaaccgattttgagtccggtcaagtctccggctgagtagcttagtgaaccgagaaccccctggtggaaaccggttcaaccggtttaagaaccggttcaaccagtttttggtccacttctcccaacggctgccagcttttgggggatcctttaaataccccccacactctctctcttcattcacttctgcaattccatgatttcttggctaaccaacc

SEQ ID NO: 71996 - DNA, 628 bp, Zea Mays
atttatgcggtgctgcttattatttatctcctaaccatatatatgaataagaagtatatatgtgttagagttctaataatcttagctcacaaaccaagctattagaaatgttaaaataggaagctaagtcagagttccggtgagcagggacctgtgaacacaacgatacatgccttctcttcactaatcgcgcgcgtatagattagatcgtacctcgtgtgtgcttagaaaaaaagtacgacaatgttggttcgtgtgtcggccccttgcttattatgtgaaaggtcacaactaataataagttgttgcgcccctcgatcaaacagtgatgcttggtccaagtcaatattctatccaagtcagatgagatgaacctaacattctctcccttgatctcattcttaaacttaatcttttagcttacaatttacattcctccatatatcaatataccaagaccaaggcgttataacaaatattcatacgctattgaacttaatgactacagtaggcctttctatcttaaagcagagaacttatttttgagggagatggttttattgatgagcctttgatccaaaaccaaagtagctccattaaaccatacccgctatgtgctttttgaaca

SEQ ID NO: 71997 - DNA, 550 bp, Zea Mays
ttgtttcctacggtgtgtggacgctggctcatgagtggggtctagtcgaagtcaggcttcgcccgatgccttttttgggtgatcagatggtgtggagtcctgctttcaccctcgatctgcgagtgcgggaagcagccacctttgttcaggaggtggagtcggaggctgttaagattgttggtaaatatgtgccgaagatggagatgataaggagctaggatatatgcgattccaacatcaggttgaaccaattctttgaattgaatagcttgcggtatagtcctaacccggagggggactgtgctgatgctggggacgaccgagggaaacaggtgaagacccagtctaaagagggcacctcaaagggaaaggctatgatcgcagtagctcagaagagggaaatagatgtgaaaggtacaagaggaaagagatggggccgaaggcttctggggtttttgttgaggaattgacgaggacatgtgttgggcctagggaggttatgacttcgctcgagctcggagaaacgtcttcacgaatgttgaaggttacc

SEQ ID NO: 71998 - DNA, 648 bp, Zea Mays
ggcgagagggtcccaggctagcagccgctggtaagtggggtcgatgcaacgtccgacccacggtcagtgggatgggtgttggtgagaagtccacccaccccatcctaccgcaagcaggggaggggagggagaaagagatggttggaccccgagctagctggtgacctggtgtattacgcatttgtatattaaagtaggtataggtatagggatcggaatcgggctgagttattgccaagagaatttattgagttgaattgaatcgaatcggatggggtgtggccgtgtggggaaggaggagttcaaatgctgagcagtagccctgcggactgcggttcaatagccgattattatccacaatccctccgtaaaccctacatcaatcagaatctcctaaactagcagcttgctttacatgcaggctagggtgctctctctgcagtacaaccaagttgctttacatgtacgtacaccagcaatacggtgctccgtgctctgcggagaacgcttcagagctaaccttccctttccggctagtgcatcctgatccctgaagatctcggcccaagcaccgcgctttgctccttttatcggcgaaagtgtaaaaaaaaaaggctaaagggtcaatggaagcaaaggttctttttg

SEQ ID NO: 71999 - DNA, 674 bp, Zea Mays
cggactcacggacaggaaacagtggaagtggactaaacctgggaagttggcttcttggaagtatcggaccggcttgggcacatcccagccctcgaccgtgatatcctggaggtggcagtattgtgacacctctgccttcaacatagcctggacacataatccattctcacgagaggtgtaggttagatttcaatatgagatacaacaaaatccttctcccttgtaacacacttaaactcattgtcgattttacccaatatataatgccatcatagccaagcaaatatttcagcacactgcatgctttgacaagaggggtctcaaggacccatcctccattcaaatgcagggacccgatcatcttgatgcattgcgatgtacagtttttggtccacgcagagtctctacacatttgaagcacaaagctgtttctagagtatttgaagcttttaaattacagaacattagatatgctcgtgcttaagcactaacttgctgaaagttgcttttgatgatctgaccgtcttctccattttctcgtatgatgtccatcagcttggacctggtgatcctcagaatctgagatagtttcgtagtccagaaagtgaatgacgaccctcggctacttggtagttagaaagtagctatgggtttaatgtgacacaatagaaaat

SEQ ID NO: 72000 - DNA, 508 bp, Zea Mays
ttgaactagaaaactttctgatcaagcccatgtgttgctttagtaaatgtttctcgattcgggcacaatgctattgactatccgagcttcggactcctctcgagtgtcacgttgttgttgcacttggcgatgcccttctggctgctggttatgagccatggtaggtgccaatggtggtggtggtggtggtaactgagcccatgcaacttgagaatgacttgccggagcaactaatgtcgtgggttgctggttgcccacatattcagggatatatggcgaatagcatgaggcagtatgcaagacctacttcggctgattttgtcgtgcttcggcttcagcgatctccttctgcttttggatcgtgacttggcacgtccttgttgtttatcctccccacagaataagcagaacaatctccggggttgagtgctaaaccttccttcgaagcatcttccccctctgcctcttggagctggtagcctataggatgtttgctgcattcccgaag

SEQ ID NO: 72001 - DNA, 271 bp, Zea Mays
aaatctttgactcgctcaaacttaggaagtgagaggcacgataatagagtgttatgggccctgttgttagaatcatggaactctatttgtagaggcggtattcaagcacccaagagatcatacgcaacatcgaggcacatctcccatactcgaaagctgatgctctgaagatacatagacatgcaaatattccagtatgggaactttatcccttcgaagaatggaggtttgccaacacctcgttccatgtcaccttctgtgggtcaagaac

SEQ ID NO: 72002 - DNA, 590 bp, Zea Mays
tccggcctttgcacaccaaatcctatgtctagacacaccctcgttccatgaaaaatttgcaagcaccatagagtttcacgagaatatagattttgaacatagaagctgatgtcgtagttcgatccgagtgccctttcttctgattcaaacattcgagtgtagacaattggtaaaatttatttgtttctaggagcgtctaataaattgaacacaaccccaatattgtcttcagtctcagcttgatccgaaccattttttatctttaaaatcctagtttctgaaactgtatttatatgtatatttgcattcgcattttcgagaatgaaatgaaattaagtgagaaaatcccattttttctttattctccaccgcttttctttcttcttatccaatcagatattttctttttgcttctcgaagctgcaacttccaggtcgttctcatcccaattcccatcgttccttctctgctcgtgggcgcagccaacactgggcgctcagctccctgcccctcccatggcggctccccctgatccctccctgtgcggcttcctcttccctgctgcgcccctacgtagatctccttcgtcc

SEQ ID NO: 72003 - DNA, 632 bp, Zea Mays
gcaggttcatcccctactgctgctagtaactcttcaacaagtcccatgccattttgcactcgagcattgcctaaacccagaatgtgttcaagagtcttgtatctgcgtggagcatcatcatcatgatctgcatcaaggtcgggggtcactgttggtggtgttgcaaactccacaacaccggttgttgtaggggtctacagttactgattccacctggagtgattgctgaagattggactggcatgtgcaatgtcgtggatggtgccctggatggtccagcaaagtttttctccctgactggtgtattgtccagctgctgatcgccaccaatttgcatgaactcaacacagaaaggattctcatagtctaccttctcggcatcaccccagtcccatgcccgattttcttcaaacacggcatcacgggataccatcacacgctttgtggcagggttgtagaactgccaagctttgctcccatgctcatagtcgatgaacacaatcggcgtgcttctgtcctccagcttcaataggtgtttggccccctgtttgacatgcaccacacatccaaacgtatgaaagtgttcaacatagagcttaaaaccataccatgcttcatgaggtgtgcaccct

SEQ ID NO: 72004 - DNA, 637 bp, Zea Mays
aagagactggtgaaggtaatgttgacttaatacttcttccacaacttgttactgatggaggctgctttaacattcatgtcaagcacataaaagaagtaacagaatattaaaaaatacacatgttttttctgttgcagacctcacatgaacgaaacaaaaagtgtaacaaaatattaaaggggaaaaactgaaatgaagggaagattaaatcaatagggagctatataacctttcaatcggcatacttggtgatatttctcaatgaccagttctgtacttcagcacatgctcaatacaagaggctggaaatgcagaggaaaatataaaaaaatcaatccctttagctgttatggatttgcgtcccacactacatttactaatggatatcatcgtgcacaggagtaagttagtatgaattatgctcatgtgaaatagaatcccacgaaccatttctcacaaacatgtgacgtggtagaggaacaaacaaacatgtggcacacctgtagatatgtataaggcatgccacatagattttagatctgggatctaccacagtagaccttacgagaataaatgtgagatgagtacctctggaagcgggatcagccttcgcgttgtggctgcgctagggatggct

SEQ ID NO: 72005 - DNA, 374 bp, Zea Mays
cccgcaccagagggccccgcacctgagattcccgagctggagagtccatcacctatgttcattccacaaccagtttggatgactttggttcaccacagaagtggtccgacccttcagttttctcgtatgctttggaaccttcttgtagcttcagaactagatgaagtcaccgtgacctacatcgacgtgtgtcgccagcatattcttggaatccaccatgccgagtgacatgtcacagctgagatttctggcctcgatgagtttggaggtcaagtggtgagaggacgacactatgccatcatcgctcgagccaacttcgatgtagggatcaacaatgcggctaggttggcatggtcatccttctgttatcggaa

SEQ ID NO: 72006 - DNA, 478 bp, Zea Mays
gacgttgtcatgcatggatggtgctcccccaactaggggtagtgctcctgctccatcagggcaaaggtagaagagatgggaccaccaaagcagactgatggatgcgggagtgcaaacttggcgaggatgttgatcgtggttgtgagatgcgatgtcggagtggttaccgtggtcatcgctaatagactcagactcacggttggccatggagatgctacatcaacatgccaaatgtggtccctatctggcacaccagttgtcgtcatctaaccgttagggatacaagaaagtacccccaccccgtttaggttctacaagggtttagcgttgttgcgatatcaacactggtgaccggttgggccctatccggataattcaagagagaacacgttgaacacgtggacaccgcaagggaaacaacagatgtagaggggtttgtgttgccggagcgtaataccctacgtcctcttttgggtgg

SEQ ID NO: 72007 - DNA, 1127 bp, Zea Mays
gccaagtaccacaccgtgtgtgaggcgtcctagcttcatcaacttttctaggatctccacgaccctctttctatgagcatccttgtctacgatgacaacatcaacactatctaactttctatcaccttgatttaataccaacgcaaaaggtatgtcaagattgatctctccatgagcgggttgccaccagggaagttcataccctccatgtctcaacaaccttgagttcgtcgacatattcaccaaaggcttgtcctcctttgtgtttatagtctttcaattcaatttgaacatctattgtcgctagagtttctactgtgggggtgttagactattatgtgctggttacgtatatgggcctagagtctgacccatgtagcctattagtgagttgtaaccctaagctggttagcctatacattgtagcacttatccaattaatataaaccatccatttaccctatttgaacaactatgttctatcatattaatgaaacttcgagatgacttggcacattcttattgacaaaacttttccaaatctaggtttttgatcttactattgtgaagccttctgactttgtggaatatgctctggcttgtttggaacaacttgctgactctggtgatcacagtgcgaggtttgttcgccataatctacgagtcatggtatgtacaaaagtttggtggctacaatcatttcaaagactgcaatattagttgtatacctcccagtttttatgcattccaaggtaattgtggattcatgagttgcattttctaatactagattgatactttgaccataatttgtatgaagcatctaaaaagtctatgacatggtttataatatctcttcacattcaaaatactaattgtggttcatctttccaaggtagaccacaagtagtttgttagacaatgttccttgtcatcaatgagaactctacttttgacatattttgaacatggactctggattgctaccttagggaaattgtcacttccaaatacttattctaattcatctttcctaggttgcaggaggcgatggtacaataggttgggtgttgggatgtttaggagagctatacattcagaacagagagcctgtacctccagttgct

SEQ ID NO: 72008 - DNA, 684 bp, Zea Mays
gccacgctggcatgagtggatctccatcctgttcgacatggctcttctagggctctgctcaatggcagcaaatgatcagccatccaacacaaaaagaggggtgaggcagggagaccccctctcccctatattgttcattatggccattgaccatgtgtagcgtatcctctagctagcaacctagcggggaatcctgtccccctttctgctgaacacagccaatctaaggacgtctctttatgctgatgatgttgctatcttcatcaacccctccagagatgaacttgtggcggtcaaatacatcctacatgcctttggctgcacctcgggcttggttactaagcttgagaaaagctccatgcacccgatccagtgtgaagacatcaaccttgaccatgtgctctagtcgttccacgggactcgagggactttctcctgtcgttacctagacctccaactccatacctgcgcactccgaaaaatccacatccaacctatcattgaaaaattagcaatttcttggcaggatggaaagggaatctactaaaccgagctggctggctcacgctcgtgtcttttgttctgtcctccatgcccacctaccacttatcggtttttcctgttgcagtctggtcatgcaatcgtattgataagatttgttgctcctttctttggaaagggaac

SEQ ID NO: 72009 - DNA, 642 bp, Zea Mays
cactaatcgaacaagccctgaggatttacccaagcctgattgcccaaaagaatacctttgtaaatttgcacatcgccacattgagtaatttgtaataacaactccacatgcacttaggacatgtttggttgctgccctagaaggaaaatagctgctaggcaacaagttctaaccacaaaacacttaaaattagtagcttggattgctacatgctggtcaagcaaacataggagcttgctgcctctgatgccgcttgacatgtctgattcaacttctataatataatttattaaaatgatcaacaaacactctagtttataagtaatcttgtttaagcttatttcaatttttgctcccatacatgtttgatcccccttcactcgacccaaatacaacaaaaagacccaatttccttatgcaacatcacacactatcacaactcaagcactatttatggtaaggacaagtgaaatgtcatgcaactatatatatcatctttgtatttactacattcttgatgctaatctccttttttcttgataatcttcactttgccaccgctgacatccacctttagttccgtcaatatgcaagccacttctgttacaagttattttttagataaagatgttacactttttt

SEQ ID NO: 72010 - DNA, 891 bp, Zea Mays
ttaagtcacagctattaatgaagcggtacgcacttcaggcccttggatccgagatccatggaccgcaacaccccacgcccagatccaacccaagcccttgatctacagatcggtggtcacgatttaacgcgacaaggggtatgcgcaacatctaatcgtggctgtccacccatgatccaacggtgtagatttcaaataccaaagatccgatcacggccattcgcctacgatccatcggcccacgattgctatagctgaaacattgctacacacttaatcgccaccgttgatcactaaattaacagtacccactcgtcttctccaccctggcggactcacaggcgggccgcgccccaccgtgcggcgacgccatagctgtcgagccgccgagtactccccacagcgctatcctctacacacatgggcagaaataacgagatatctactacgattcggttagtagagctctcactagggattgtcgcgcaggtaacgcagaccacgacgaggtatggcctgcggcgaatccacagagtccggtgagggctcctggtgtccaccacgccaagtcgtcgcaccgttcggccatagagatcttcagcaccctccagcattgccctcaacgccggttccgagggtaggacgaccgtatggccagttcttcgtgtgtatggtacgcccgcgcctatcttcctttatttgatggtcacgaccggagcggaggaggcgaggccccaattgccattagccacggcgaagcttctctctgatgcgcgcgaaggactacccacagccaaggcatcacgagtttcaacggaggtggcggtcttctcctgccatgtgcggcgctccgagcaggcaacgagcgcatggggacagcgtggtgtccat

SEQ ID NO: 72011 - DNA, 1109 bp, Zea Mays
actcatatgactcaatcttctcatttactaggaaagcagctccaaagcaaacactttgcatatgatggttcacacctgtaaaaggtgcaaatgtcatattgtattggtttgtacaatatgttgcatcgaatgacactaagtcaccataatgactgtagttctttttacttgtgatgtaccaatacttgctttgtggcatgtgaacaaggtagttttggctctttgattgattgtacggttggatcgaagaaaaggaattttattaggtgagactagaccatggttatgctcctcaacaaaagaagtgatataataccttctgtcctgattcaacctcacatatatatgcgcgttgcatccaatcttgtctctgagtgcttcttttgtctgtttggtttagcacgtctctttgtgaaaccttccctcaaacacacaaatctcttattctcaaccacatcgcttttcttggcttgagctccaatacgaactgaaaactcgctttcatgtgcatatgtcttgtagaattcttccacttcatcaagagtatcaaataacattccaatgactggtttgagtctctcgtccttgcaataaggtataaaccatgacaattgcgatgagaaatatcaagtattgaagtcgaagtgtgcactttgtgacattcataaatgttgaataggttggaccagtgagaacaattgctcaccgatgttgaactgattggatcctttttaggtgtattgaatcccgcacaagaatcagcaagggaaacaacatcttgagctgctatgtcatccacactgccaccaggattggctacctgtcgagcgtccatggcactgagaaggtccatcaagccatcatggccagggcatgttgatggcggcgctgccatagcacagtgtcctttggtccgacgaagatggtgatgcgacgacattcgacgagtgaagttgcaagcctggacaactgcgagaaggcagcgacaactataggtattggcaatgttggccttgtacgagcatcccgatccttttttattgctaccacaacaagaatactgaaaatccccgtcggctacgttaatcctcgtcggttttgtctcaagc

SEQ ID NO: 72012 - DNA, 362 bp, Zea Mays
aaaggcaatctcaaaccagctttgaagaaactcttaaaaactactatttcatcttttcctggcttcggagtagtttcctctccactaaagcgaatcgactctttcttttcttcattgaaatagcccaattttaacatcttaggtaggtcaccttcggagactgtggattttccaaaatccaggtggctgggtttgctcggcaccgtgctgctataatcatcttcagaatcggtctcttcaacatcagctcgctctgcttcagcagcagggatatcctccggtgttaccaaccaagagcgcttcattgcttccgaaataggaacagtctcagtagcttcagtctcatctccctcacgatcgac

SEQ ID NO: 72013 - DNA, 285 bp, Zea Mays
cccagctctccactctatctttcttgtgcagtagccgatgcgttttgtggcagggttaaggagctatctaatcccccaaggttggttagtctcactgaccaaatctgatagcaaaaccctgttttgtcatgtcaaacaatggcgcctcgggttcaaacttttcgaggggatatcatagataatttggcacgactttggtaattggggtcattagggttgaagcttgaatcttagagagcacctaatgtatttgttggagggctgagttttagttaagggaatttc

SEQ ID NO: 72014 - DNA, 544 bp, Zea Mays
aaagaatgaaacaaagtgctaacacattcagatgagtaatctattctacctttcacgggttatacaatgtttctattgatatattttcatactttctttgtttctcttgaatgaacctctgaagaagagttaattgaagagagaagcgtgtaacttaacaatttgtgttgtcttgtttttgttatcctttaggaataaaaaacaagagaccaacaccccatccttcttatgcaccacaacttcctcttctcccttcaaatgtgatattaggattcatgcttaactttggggactttattttcttacaatgagattactacatacatgataaacacaaaaatgtgttagtctcaatgataacaacttgtagagtaacctctcccttcaaatgtgaatacaagtattgaatagttgtaggagacatgcattagacttttgtggtcaaagtatttggggaaagctatctaaataagctatgtgttgagctcctaaacaatttaactcatataggtttgctcgtgatttcacccttaccatatgatta

SEQ ID NO: 72015 - DNA, 399 bp, Zea Mays
gtatcttccatgcctagctgcttattaggtaagatatggttagagcaagtctagaatgaggtaagaaggatttagggtagaaaaaattttatcccggatggtggatcttgactcatctgatgttctagcttggcttttgaagacttgagttggtgctcattctctcttgacgaggtcgactatatcttctccggtcttggtgtctccatctgagctaaggacatatggttaggatagttgtgagtaggatatactacattaagtaggtcgagctctcgtttgatgttaggttggaatggatggtcatcataaacatgttggttagtttgtttgttcatggccaagtttgtctaaggcaccaatttagtttaaaatgggtttataggagtaggatctaat

SEQ ID NO: 72016 - DNA, 688 bp, Zea Mays
gagatttgcaaatgaaaccatgagatttggacttatttgcaaaaagccccagttaaactctattgagttaagtctgaatttcagtggaataggaccaactttgaagccctatatcttccaaattatgaagattttgccctaggtcaacacatcaagtttgtagatctataaaaggagaacaactttgctatagagattatgccttggtgccatgaaatgttttgagataattaggcccaaagatgggctgtcagactgccttaagtctgaatttaggctgatagtgtgattaggcaatctttggactggaattcaaccatgatctagtgagagtttggctatggtttctatagcaagattgtagctggatcatcagacaacaactttgctactggccgatcaacaagttgtcatgtaaaaacttaaaatctaagccctacaaagtggtctgtcaggcgcactgaatagagactccatggtacagtaactgaacaagatcccaagttcatcccccttcgccgccgatgaccgtcgcgccgcgattcacgccagccgctgtgattcgtgcgccgtgacttgcggataaccgtgggcgagtaaagatcttggcgcctggatcgactcgggctcggtcacagctaagctcaccgtacccacttgctcgtcgatcggtcgaatagacctcgcc

SEQ ID NO: 72017 - DNA, 363 bp, Zea Mays
atctcttgcacactatgcttggcctctaattccaagttgatagtttatcctggattacttgtattgccattgatattgggaacatcactaggatgttgcatttgtccaactatcaatggtgcagttggacatggaattgtaggactcatcattcctacatatgggttccatggcatttgggttggattattagttgggtcattcagaatttggggccaagtaggattagtcatccatgtgttggtaaaaggaatattaggtactatgtcactctcataaaccatgatgctgccaaaactgaggatgccataggggtggtggcattccctaagatacagatgttggtggttgaccatggtgggc

SEQ ID NO: 72018 - DNA, 999 bp, Zea Mays
caccgatccttctaaggttgctgttgtcaccacttggccccaacctacaaattgcaaacaattacgtggctttctgggtctagcgggttactaccgtaagtttgtacggcattttggggtcatcgccaaaacacttaccagccttctcaagaagaacacgccatttgtttggactggagaccatgagcaatcctttcaggctctgaagactgctttgtccacggcaccggtccttgctctgccagattttaccaaacagtttgctatcgagactgacgcttcgggcacgggcattggtgcagttctcacacaggaaggccatcctcttgcgtttgtcagtaaggcactcagtaccaagactcaaggcctctcaacttacgagaaggaatatctggcagttctgttggcagtgaaccagtggagaccttatcttcagcactcagaattcattatcttctcggaccaacgcagtctgtctcacctgtccgagcagaggctccataccccttggcagcagcgcgtcttcactaagcttctcggtcttcagtaccaaattgtgtacaaaaaaggggtggataatggtgcagcggacgcattgtctcgccgcccccaagagggcctcgaagtgttccaggtgtctgctgcttgttcacaatggttgtccaaggtggttcagggttacagtcaggacagcaaagcccagtccttgctcactgaattgtcactccaacctgtgaccgagggtccctactcgctgcatcaagggttgatccgttacaagggccgtgtctggctgggcaacaatatgtctctccaacagcagatcatgtccgccctccacgatagtgctttaggcgggcactcgggttttccagtcacttatcgccgcgtgaagcagttgttctcctggcctggtctcaagaaaacagtcagggattatgtcacctcatgctccatttgccagcaggccaagtcagatcgagccaagtatcctggcct

SEQ ID NO: 72019 - DNA, 328 bp, Zea Mays
gggagttgcaggcttgcagcccatatcttctgtgatgtcaagcaggttttgtacaaagaaagatatacaattttatgacacagtgaacagaaattaagcaactgcatgcggagatggacaatagatgcttcagctgcacgcatttccattacatcaactggccattcttgcatgttcattaacacaaaatacaccatacctctggttttcttgtcagttcttttagaacagcatcaagagtcatccgaagttgcttgaataaaacagcagtctgtgcagcagcagacagcctcaaccatccatctataacaaccactcctgtctggaa

SEQ ID NO: 72020 - DNA, 321 bp, Zea Mays
gttttctggaaattgtaggggctctttaagaaaagtgcccaacttaaggggtacgcgtgaatcacgaccgttcgatcagatatcaacgcgcccgattagattagttctcgtctgaattggtatacgatccgggccactcatcaggcgatcaacggcacgcactcgacggacgaaagggtacgcatcatttaatcgggagcgcttgctctgaaatcaacggccaaggttgcaccatcctggatctaatcacagccctcgcctaaagatcccacggtcctagccaaaccgtgacgcttgatcccatctcagtcgttggttgca

SEQ ID NO: 72021 - DNA, 493 bp, Zea Mays
atttgtaatgttattttactctcacacttctttatcataatctaacttatataatgtaaagcaaaacaaacggtcctttaacctagtgctcggttaaatactagccccatgtctgtacggcttggaggatttgagatgtgcttttggcacaaccatgtggggggcgggcacacatggggtgatcagttgcctgtccaaatccctgttaagtacacagacgcacagcgttagcaggtgaaattatcaagaaagaaagcaaactggcagttgtgcggtgctgtccagatttaagatgacaagttcaccatctgtaatggtgcaagtcgccaagtagaatttgtacacttggcgtacattttaagaggtacaaatgaagggtgcatctaataatctagtaagagtaacgattggtccttaaacttgactactcgagtcccgtgaagattcaaagagagttcattttgtaccatccaactaaaacggcatttcgcag

SEQ ID NO: 72022 - DNA, 864 bp, Zea Mays
gtagctgcattgcttgtgaacgaggaagggagcggatgactgatatttcatgctaacaataacaattgcaccatcatatatatatatatcgatgtagcaatacattcatcctaacattattattatagattccccaagacatatcaacatacataaaaatatacttattagcgactgctcctatatataaaaatgaagcgagacgacgtgtgttttgtggggggaaacgagatcagcaactgagtttggcagaaatgatgcgaaagaaatcctattgccaagacaacaataaggtgttgtttggtttatggacggtaacataaatgacagggataatgattcatagcggtaataattattttcgtttccggcgtatcttattacggttagacttaaaacaaacacgatttaacatatccatcacgttatactcatatgaaccaaacaacagctagctatgtgtgcaccatgtacctagcaagagaatctttagggatttggaggcatcggagacaccagcatgcgcttaacatgttgccaagtctccagagtcgttgtaaagcatctcgattctcgacacaaaaaataataagagcatgggacagcacgcacgcgcgcgcatggagggttgaaacagcaaacagaggtaattaagatctagatgcttcaatggtacttcttgggtctattaaaaaaataaatattcgtgcgatcaatatatctagctcaatttaactatggtattcgtgacaattgattctagtcaattttgatcacgtttaatttattctaaaagcatgcatattctataactaataatataatgatatttattattctatattatgaatgtttatatttttt

SEQ ID NO: 72023 - DNA, 632 bp, Zea Mays
aacacattgtggatgtcagacatggactctggtaattcaagacggtatgctgcgggtcctactctgccaatgatgggataggggccgacaaaccggggtgctagctttccttttgcttggaacctcctgacaccacacatcggagagaccctgaggtagacgaagtctccttcctcaaatctaagttccctccgcctgttgtccgcataactcttctgccgactctgagcttcaagtaatctcctgcggatcagggcaactttctcttctgcctctttgacaaagcaggtccttctagtgcttttcccctacgttggaccacatgagaggggtctggcattttcgtccatacagtgcttcgaatggtgacatcttgatgctggcctgatagctgttgttgtatgagaactctgcgtagggtagactggattcccaacttctatcgaatgctagcacacatgctcttaataaatcttcgaggactttgttaactctttttgtctgcccatctgtctgagggtgataagcgatgctgaaatctagcttggtgcccatagccttctgaaggcttgtccagaatttggaggtgaactgggttcccctgtctgacactatctttcttgggatgccat

SEQ ID NO: 72024 - DNA, 1049 bp, Zea Mays
ataagaagtctaggaaaattggtttcacaattttagtatttttctacatttttctataattgttttagctctggaataaaaggaaaaggaaaaggtagcaacagtagtgggctgatttcagcccacacagcccagtccaaagggaaagacgcgcacgcgcccgcgcccgcggggcagatttgcgcagaggccctcagggtttcggctaattagaaaagacttctattactattttctgtgtcgctgacggattacagaaacaccctcaggtttctaatccttcacaggggaaggtccccgacggcgtcgcgcagaggatgaactccggcgagcacacagaccggccggaggaggctaagaccagcgctcaacttcggactaaaccaaatccatgacctaaagagtatttcccctaacttaattgcactaatgactaactaaggagctctggccacggtgaccgagagcatggcggctagatcgtcgtgttcccggtgattggtggtctcttagtttgaattgatggctcggcaagcatcacagagcaaccagagtgctcaaacaagggagagagagagatgaactaaccggattggggctgaccgcggtgaggttggtttcacagtgttcttgaactggattggggagaacgtgaaattggagcttggtggtgatcagctgggagtaatactaggtgtgggggtgcgcaatgatgttgcgaggctagtcacgggctcaatttataggcagcttcatcggtggcgctcaatttggtcgagcaacgcggcggccggagataagagagaaccatggcgcagtgaattcgtggctaacgccgtggcaacttcaccggcgttgataagacagtggtagggagttacagtgacgcggtgtaaagatagagccacgtggcgcatggccgggaggcggcggtcaccggcgaagccatcggatttcactgcggtgaacgcttgtacggtggccggaatatttcatcgaccggagttatccacggcgatgatctccaagtgttgtccacttaccccgag

SEQ ID NO: 72025 - DNA, 664 bp, Zea Mays
cccccgagactatggcatcaagcgtcatcatagaccaagcaaccaagaggtggacacggtggaaccatccccacgccacttgtggatggagacatggagatcccgattgccttcaatcaacatgatcgtccaggcaagatctagcatcccagaacttacccccttgtcgtcgagcccatcgtcggaacaaaacgcctctccagggtcctcatgcacgggggagcgcccttaacgtcatgtacgtcgaaaccttcgatgccccaggaatcgcacactctgcgctacgctgattcacgacatcttgccgggctttggtgccagtccgctcggacaagttgttctacctgtcacgttcgagaatccctctaacttccgcaccgagcgactagaatttgaggtagtagatttccaaggggcatacaacactattctaggaaggtcgtgctatgtaagattcgacgctgtccccaacgacacatacctcaggatgaagatgcccggcccccatggggtcatcacaacatctacctcattccaagtggcttaccccgtgcgaactgaccagctgtgagcttgcatcaacacaggttgccgcaagggaattggctgaactacagagagacatcaacctgcaagacggacctaacgccccaaagttgtttct

SEQ ID NO: 72026 - DNA, 393 bp, Zea Mays
agacggtggttgggccttcgagttttatttgtcaggttgcactagttatcgctgcttgcagcaagttatcttggcttcttgaagctagttatctgaagattgatcctacgtcgtgaagatcgggcatcatgacgcatcagaggatgtgcatcgattatcgagctctaaatgaggtcacaatcaagaacaagtaccccttacccagaatagaagatctatttgactagctgagaggagccagcgtgttttcaaagatagatcagaggtcaggttatcaccagctcaggattcgaccttcagacattccgaagacgacattcattaccaagtatgggttgtatgagttcactgttatgtcttttggcctaacgaatacaccagccttcttcatga

SEQ ID NO: 72027 - DNA, 522 bp, Zea Mays
gccgtggcaagactaccgccagcctctgcatgggatcgtcggcaaagtgttgcgggagtccaccgaagcactgtgagggtttaacatctcgatgtgggggaaatctttgaccaagacatcgggagtttctcactgttgggtggtgccgtttctttccgtggttggagtatgacgcagttccaccgtgggtaagtaactgtgtgacctgttcatttttgccccccgtgcgtagaccgtactggtagtcggtagggattctccggtgggcgctgccgccataggttgggcgcaccgctgtgacttgtaggcgcgggattgaagattacccgtgactcgttaatctgacgatgaacgatggtgattgaatccagggacctcccccctcgttcgcttttgcttcaaaagacgggggcggtggaatgggaatcgaactatcagggattggtgttggctcgcggtccttggattcacgatccaatggccgatgttggttatgggttaagatgtaatctggtgtgtcag

SEQ ID NO: 72028 - DNA, 393 bp, Zea Mays
ctgctccttccttttttccttgtctagccatgttcttggcctgagtgaacttcttgtttgaactttttttttcttctttaggcgttcattcctcagttggtcatcatctggtacctgaacatccacaggagctgcacaaggacctacatccagaagcatcgaattgctccaaaacatccttaatgaggatgtcaagtttgttatctatcaacaaacaccattccaatgaacttgctacttgccctatgaaactgagaattttttgagtgagataatttttacgatgcatagcatccaacttcggattttcaattacgcttcttccatggttatcctatacatctccatagtatgcttctcatgtccatcgcttcaatatatattgtggtggta

SEQ ID NO: 72029 - DNA, 860 bp, Zea Mays
cggaaatcgtactttgtccaacttgtcatcttatagacatgtgcgggctgctcattcacaagcagaagcaacaatccagcctgtccgtgctgataagccaggcatatcaactgggtgtttgccaagaaatgaaactcttagttttggtgtttataatggtcaatgtaatcgaatgtctcagcatttgagatactctgaagtgcagaataagcttcattctgagtttacaacagacagtaatatgggaaaggcagtcaatcgtcatgggttgaagccacttcagatgtatgtaaagaagacaaacaccacatttggttctgctaacaagccggttggttcaattggtgttcctgaatgtcctgtagggaagaatagaattgagctagacaaagcttctattttagcatcgccaacttctacttggtcccattcatcagctcaaaaacctatagcttctgctcatttgcatcaaatgagagcaccacatgaatccatccttggtaagaagcctaacatatcagttgagttgcatcaagtgaaagtaccacatgaaaccatccttgatgagaagtctagcatatcagttgagttagtgagagtaccacatgagtccatccttagtaaaaagcctagcccatcagctgagcatgcatcaagtagggcgcatgattctgaagtttgtggcatcaattataatccaacatgtcagcaattcaaatcttctgaagcccagaataagctccactcttgctctaatgtcggtgatagcagtgggaggttaggaaatgaatataagaccaataaagagcaaccatatgcagaatgtataaatattttcacaacttcagcaagcaatgaaa

SEQ ID NO: 72030 - DNA, 1375 bp, Zea Mays
acgactgaagctagcattattcactgttcaatcatatttccttgcaggcgaaatttgcctgagagtatacttatcggttagggccaccctttgtgatgacgcacatcaagctccaccgcaacttatcgatgatatatcgtgcagctcacacaggtcaatcgaaactaatgaatcaccattatcagctactgttaacagtctggatatgtcagcctgtgccagcatggatcggacatccctcaaaagttcggatggcttcaaccaaagcatgacggaggtccgaggtcctagaagcacagggccactatcttgtgtcagcatagagcaatcaattcttctggagcctgaagaagatgatggcagtgccatcgttgatacatcctcagtagtggaggtcatgtctcggtacttccggaaaactgctgatgctacacattctgtagcatcagatcctgtgtccctagaccagtttcgaagcacacaaatgaattctgaatgtcgtgaaaatgaagagggttgcacactgcctgaggtcagccttgatgaactgctgaaaaatatggagtccaaagaccaagcttgtgaactgccaggaaacttgcctggtggtgtactaatggaccaatcttacattattgcaccagctgaactaaattctttgctgttttctggaacttcagatttctggccagaagtttctgaacttcaaggaacaagtggattcaacattgagccctggaagcatgacaataatgagaactgtttaaaaagaacaataacttatacaaaagctgctagcaaattagttaaatctgttaaagccactgaagagcagaaatacttgaaggcaacaggaagttcttttgcagttttgtctagtgttagcactcctgatgttccctgtggtaattgtttcaaggtggagatattgtaccgtataatatctggttcccagttgccattagaacagaccacacaaattactgtaagttggcgtctgaactttgttcagagtacgatgctgaaaggaatgatagagaatggagcgaaacaaggccttgcagagggttattcacatttctctgaagtactgtcccggaaagttaaagtagctgaacttgccgatgctaatacgaaagataagattttagcatcactgcagacacagaaagaatcgaactggaaactggttgctcgcttccttggaagctttgcattcatatgctctctcagtacagcactgtatatcactactcatcttcatctagccaagcctaatgtggtgcttggcggtcttgaatattttggcattgaccttccagattccattggagagattgtgttttgtattattttgatcatccaagggcataat

SEQ ID NO: 72031 - DNA, 383 bp, Zea Mays
accatgaatccaaataagccctttaggggtatggaacattgtacctaaactagtataaatatgtacttcgatcgaggggtacctataattctctactcacgaaatgatgatctactgttgagataaaaaatcatacagaggcggttttcataaatgaacagtgtgtgacaattaatttctagagtcggttggcgaccaacaatgctctctgtgctattagagacaatttcttatgtgaaacatctttgtagcaaaattgaatctgttgtttcgcttcgatctaaatccacgtaaggattgggggtgtttaaatcacaagcaaattaaaattcttcttactttttccccaatctcatcccatcgatatggaatgagaataatcg

SEQ ID NO: 72032 - DNA, 644 bp, Zea Mays
atttataaataaggtatctttaacaaatacaaatagttgtaacatccaaaataatccttgtaattgtttatcaagaaaaaatcatgctccaaaaatgaatgcagcaaaataatgtattcaactctttttgtttgaaaaactatccctactctactattctcaagagatggattgaggtgttacaaaacctaccccctaaaaagagtctcacccttgagattaagggtcttccgagcaaagctggggaaactctaatctgagctcatcttctctttcccaagccgcttcatcttctgggtggcggttccactaaactttgcacattccaatcactttactccgagtgattctgagagatgtttccgatattttcactggatattctatatatgttaaatcctctttaacatcaagctcttccaagggtaactgctcctcgggtactcgtaagcacttcttaagttgtgatatgtggaacacttcatgaacatccgacaactacacaggtagttccaaccgatatgcaacctctccttttctttcaggacctagaatgggccgatatagcaaggtgataactttcccttgaccctaaatcaaaccactgatagggaaaaccttgagatacacatagtctcccactt

SEQ ID NO: 72033 - DNA, 499 bp, Zea Mays
gggcaactgggctgtggcctgtgggccggtggcatggggatattttgatgggctagtaaattaagcgggtaacgggtaatacccgcgggctaaattttatatccgtaaattacccgtgggtgagaagtgttgcccatatccttacccgtgggcaagatttcttacccatatccgtgcccatcgggtatgaaacccgcggatacccgtgcccacgggcagaattgccatccctaccgaggcctgcgaccaccatgtgtggccgtggttgggatgaaccttccccatcctccatgtgaccaaaccctaaacctctcttagtgagaggtaaaagaggagggacaggagccgacacttcttcttgtatctcgtccgcggtctgatctgaatcactctcaatgatgaacaacttccttctttgcaccatcttgaacaaacgacacaaggaatgcgacataaagatatacatggagataagacaaaattgagaggaaaacacgac

SEQ ID NO: 72034 - DNA, 459 bp, Zea Mays
caagaccgggatggtgtcgtggatggagaaatgaaaccgttgatgttgtggcacgatgttgatcatatcggaggagtagtgaaacgaacgttgtgtgcgccgaggcctagaggctttttcttccccgtcgcacgggcggagatgctctggcgtggggagaggatgagtcatgatgatagataatccaaagaacaccaatcgttggatgtgagtgagtaagagaaaggtggagttagagtataatatggcatgtttatttctattaagttggttttctaggcgcaggcgctttggtgcatatagtatggtatgtgtctgtggggatcatttgttagggtggctctagatttatttgttggagtggtcctcattgggcacaggaagcccctgatgctaaagtgccccggtcggggcatgggtccctaaaaaggagacatcacgaaagggggagtaagttgc

SEQ ID NO: 72035 - DNA, 696 bp, Zea Mays
ttctcttacatatgacaatgctattaagactatctccagtagcttacccatccccaaacccatacctagattcaaactccactctatgaacattgcagaacagtacagaaacaatgttttgggtaaactatggatcaactgttgtacacggtctaatggtgttacactgtaaataatattcaccgcattagtgtagggcttctaatttcgtaactatagaactttggcccgcaaccataactaatggatttgtctagcagaagtgaacctcatggtcttgtgaccgagaccctctgtcctgtaaccatgaatagatggttctcaatggtatattccataccagaaactacaaattgcacacctactatcccatttggaacctctaaagctaatagttatatgctagaactagttatacaagttttgaatattcccatctaataccacaattagttattagctacctcatagccaaccattagtttattagctgactcaacccacctaaatttattagctagctcaactcacctaacatttatcagctctcgtggaggtagtggcgccatggcaaggaaggccaccctccagttggatgattggatctagctatagatggtcaagcgtgcactcacacgaacactataaaacacgacactattagccacgataccattgtttagtcatcggtctagg

SEQ ID NO: 72036 - DNA, 420 bp, Zea Mays
cgggaagcaacaagtgttcgttttttcttcctgcaagcatagaacaacatttagcattgaagcaaggatagcaaggcagggtcagccaaggaagtttacctcatgtgccatcctctcggaaccaagctgtgcattcagagaagaattaagggaacatgcactatctagaaaagcaaaagtctgggctaggttggcctgactatgagagtacttctcctcaaagtcagagcaccgccgagccagatatgataaagcagttgaaagagaacgcacgattaaagataagtaagcaattaaagcaactagataaatcgtgagttcactaaccagtatttgatgccttcaaattgtctatctgtttttggagcaacagagggttccactgcatcagagacaaagcttgatcgggaatagtagcat

SEQ ID NO: 72037 - DNA, 400 bp, Zea Mays
gagggagaggagacgacactatgtgagatgcgacagtcgcctgaaaccctctccgactttagatcttagaactgggcgaggaaatagagagatagctaggtactgctggtcacttctcacctctctctgtcatctctcgcattaaactcgtggagcgcggtgagcgagcgggaggtgacagcggcgccggagtggacagcgttgaggaagggccacatcgcgggctcgcggcaacaggggagggagagggggagaagttgaggcagcggagcatgcggaggcatgtgactcgagggagccagctgtgcggcgagagagacgatgtgtgagagggtgagggcacggacacacggtatagctcagaaccaaaacgaataatgtttccgggtccgaggtcaag

SEQ ID NO: 72038 - DNA, 365 bp, Zea Mays
agcacacccattagggtcagcagcagatggagcacccccattggggtcagcagcagatggaacacccccattgggatcagcgtcagtaaactcaggcacgggaacttcctcagcagcaggaaccgaaggaccagcatcccgatccaaactagatactcgccgaagacgtctctttttcgttttctgctcatcagcaggagaatcaagttgattggctcggcaagggcgtctcgggcgaacactgacaggcttctgaatatccaaggttataccagcttctgggagaggcgccaccaccaatgtcccagcaggagcagcatcagaagagtcctcagccagcatatcgagcatagcacttatctctg

SEQ ID NO: 72039 - DNA, 305 bp, Zea Mays
gatctgaggtcaggttaccatcagctaaggatccgaccctcggatataccgaagacagcatttatcaccaagtatggactatatgagttcactgtcatgtcatttgttctgacgaatgcgccagcttacttcatgtacttgatgaacaatgtgttcatggactcctcgacaagttcatagtggtgttcattgatgatatccttgtatattcctggaatgagaaagagcatgaagagcacttgaggaaagtactacaaaggctgcgagagcttagcaagtgcgagttctagatcagcgaagtcctg

SEQ ID NO: 72040 - DNA, 491 bp, Zea Mays
gcaatctctccttcagataacctctttcccgaagcatgacgaataataaaatcaagattcttggatagagcttcggcgccaggacatttcgcttcttcgactatttcttgttcagcctcttcctcagttgtagcgggcttcatctcaacagactctgaaggtacagcttcagcctcggtcgtagcagcttcggcgactttcttcgcgagagcaggagttaatgtttttgtggtctctatgacagcgtctagcatgctggccattctccttctcttgggagttgtggcaggagcctttgtcaccttcggcaaatctgcctctaccggtgggctcagaatttttggcagcatcactgtttttccaactctggctccttggccacatcatctttggcttcggctgacccgactgtaggcaccttcggcactacagtcgatccttcggcttcagcctcggcgggagcagcttgattcgcttccacagcagaggaa

SEQ ID NO: 72041 - DNA, 371 bp, Zea Mays
ctgatatagaaaaagtttgtccctctcaatagtacggtcatctattctaaacccagtcaaatcacttctctactcaaccttagactgatgaaatgaaatgtcctataaatataactttgccttgcacattatgtttcatatccatgttggtgatgctacataaacattcaacctccatccagccacttaataaacaaaaatcaacatttggcttgatcttcatgtgaaatgatatgatccacttcatgtcataatgtggccttattggtccatcgacaacaactttgcttgctcttcaccatttacttagtccatttgcgccaagtccttcctcaagcttcttcgccacatgaggtccaccgctccaaagc

SEQ ID NO: 72042 - DNA, 531 bp, Zea Mays
cctaggagtaagcaccgtcatctcctcatccatgaatagcggaaggtagagtccgcctaggaatttctctcaagtagggcgccgctaggcaatttggctctctgcttgatggatgattggtggagccatggcacctgggtcatctccagctatgtctccttcgccgaactggatgctaactaacactggcaccaaagcaaaccgtagaccgaatctatcgccaaaatcatcatgagctcgaatcaactaatgccgttgcaaatcgctagatttcagcgtggttgttgtgatctgggttgggcagcctcgattgggactccgtttctagtgtatataagtacccatacaaccaaagcgccaatgcaccgagcaccaaattcacgccgagcttcatcgaagagagagaaagacgctccgcttgggtggaggcttcgctagttgctgccatcgaagatgctccagtcgcccccgcctccaatggcggcaccgaggatgcgacctgcagcaacatcgcccagcacccgaggtgga

SEQ ID NO: 72043 - DNA, 372 bp, Zea Mays
atcgccctaggatgagtaaacgcgagcacattacactaagtcgagtaagcatgagcatgttgcaccaccttaagtcactgtcgacttaagccgattgctccgttagtagggtatagtggtcaccctaagtcgagtaagcgtgagcatgttgcaccgtcttaagtcactgccgacttaagtcgattgctccgttagtacggtatagtggtcaccttaagttgagtaagcgtgagcatgttgcaccgtcttaagtcacttccgacttaagccgattgctccgttagtagggtatagtggtcaccctaagtcgagtaagcgtgagcatgttgcaccatcttaagtcactgccgacttaagtctattgctccgtta

SEQ ID NO: 72044 - DNA, 638 bp, Zea Mays
tgttttgacacctccagcttctttcgcccttcgtgggaaccctttgccaccttaaactgtggaaacaccacataacagtgcgagcacaagatagcagggggcaagcagggcaacccttcgacgtcgcctggcgccacataaaaaccagaactcccaccagttaccccacttaattttcgcacacggaacaatctcgataacttcaaccaaggtctttccagtcctcagcgtaaaggtgcaggacccaaactgagcaatctttccatctatcttccttttttgccaatgcaaacagtaatttttcgcaaagacttcaacaaatggttccccaccatatgaggacacatcccacacatgctccgccagctccgccatagcattcggtgtcaattgatgaatttgcacctcaaacctccgtaagacctcaactacgaatcgatgtgctggcaagcgaagaccagcagcaaagaaagcctaaaacacagccaactccccctccgactcagggacatcttcagcccctggagcccacccaactccgcttccaaagtaacctagccactgcatctctagcacgaggcccgagtaaatccttgaggtctcgaattcaaccgtatgatcgggctgtaagtccaccg

SEQ ID NO: 72045 - DNA, 454 bp, Zea Mays
atgcattttcgatccaaccatgcggaaaatgatagccagcactgtattaggagtatggtagaaccacgcggttagcgagtgcacctccacatctgttgcatcttacctattttttccactcgctggttcatttaagattcagaagccttacactaattggtcttgcagattgtagccacctttctatttttcagaatcaattgctctcatgattaaaaaagagataagtttggctaattagaaactaaaaagaggcacacctttactgtatgaacaattgaattataagtagcatagatctttctagtaatttatcatccccctccttgtgaccgtataattcagaatatatacaccatcatggtacgaactacattttgcttttaaaaaaataaatcgaaaccaagtgcttggaacatgctttaattatctgacatcaaaactaaaaaaacaa

SEQ ID NO: 72046 - DNA, 809 bp, Zea Mays
tcggcgggtaatgcaaaaggaggaaaaaaaggaagattcaccaggaaaagaaaagaaagaagaaaaagagtgaatgggagaaaggaaattcgcaccggtggatattgtgaaaccaggcgattagggttaggtgagagcgcaatccgatcttgcctgacagtctgggaggaagcgcaagtgcagcaaaagccacggacgagcaaaagttaaacgaccagcaaccctgtcaggcaaaacggcataggagttgagttgagctgggaggagccgtccaaatcggcagcaggaccgtccggctttgcccttggcccactttctagtactgggccacagcccacgggatatgcatgcgggcaagcaaagccagagaagagaaagcgatggcggccctgagccaatgggctcagagctcgtactgggtgtgggtgggtggtgggctggtggcatgggcaggcagggagcagggaccatctgaatccctacagcgtacgtacagtacacacacatgctgcttgctttcttccacttctccgggttactactagtaggtgggaaaagttcaacgggaagcaggcagggtccagggagaataacaaacaacaaaactctggaattgtgcatgatcgcgtaggtcaggtcaggatcagagggctgccacggaaggtagaggacgaaggatatgatgatcccaagcagtgctccacacgtaagcaccactggttgaagaggaggcctctgttgcaggacagtcatgacgagtatatacaatacggcaagctgtctggttttggtttcgtgccgtcgcttgg

SEQ ID NO: 72047 - DNA, 1486 bp, Zea Mays
gcaatattaagagcaaactcgagccccagaggaggattagagctcacgcccaaggcaacacttagtgggacctcggctccagaagcgtgtagcgaattcccagcgcacgggtcactgacctctaaactgatcggaccaacaagagcagtgggaaggcttgtcaacattggctcctcagactgaactggtggtgatccaacatgaacatccatagaagcagtcaaggaggagccaagctcggcaccctcgggggctgggtcatcctcagcaagaccctcgggggctgaagcaccctcaatcgtacccacaggagtcgggtaacccttgcatgtaacatcaggaaccaaggtgtctccatgaattaggccgccctcaaaggtcgaagaagcatgggaaactgtccagattatttcttgcccaactagattactaactgaggggtgtcatccgggacctctgcacggatggcagcacatccagtttcaggaagctccaataaaagatcttctgggataatctcctccagtgcatgatcaatggcagacatcgtcaacctctgaagattaaccagccctgacagagcctgaattgggacatcgtcgctattcttgctaagacatactaagaacaacgttcattttagcctcatgagcagtcatttgcatctggagatgggtctgtctctcctcttcagggagattccggtatgtagtaatgaaggcatcaatatcttcttaagaaggtcacactatatggcctggactgtcgccttggacaggcgggttggatatgaactctgaaaagggcctctacggtaacaaaacgacatagtaaggacattacacatgacaaatacatgaactcataggcaacatcgcttaccacaactagaagattccaggcagagtacgaagggggagcacgagcattcgaagctttgcctcttagcatcgaatcgacctgactcaacccgtcctcctcagatatttgcttgttggtaattcgagtggggtcattaacactagtgtacaggtaagtagggtagactctatccttcaaaggttgaatattcttgaaaacaaagtcaacaacaacagctttagcagtcaagcctatatccctcaatgcacatatctctacaagtagcaccctagacttagcaagctccgaatctgtggggatctctgtccagctaggcattcagacgtcaggcggtctccctgatcgagatttaaaatacgattggtaaacatatcaaacttcataatacaacaaagttgacaaaagatcacaaagaccacaagttcacaattcatgatataacaagttcacaatataacaagttcataaggatcacaaatttataatataaaaagtttacaaagatcacaagttcacaatataacaagttcacagtataacaagttcataaagatcacaagttcacagactcaaagttcacaattcacaatatccactcgatcta

SEQ ID NO: 72048 - DNA, 1028 bp, Zea Mays
gttccgagaagtctgttgaaaatttgatttatttttcttcggataggggcagtctttgacaaagtgtgcagacttcccacaattaaagcagccacttgaggaactgggtagggcagggaaacgagcaccaggggcacttggctgattgttttgggcgggggcaggagtgggacggataaacactggttgtttgaacggatatgtgggtggatgtggagaagaacgattttggttgaagggacgaattaccaaccttgtccgctttttagacccctgagatgatccttcacccccatatctcttggtttttccttgtcccgaattctaagcttccactgacagcgctgtgcttacagccctgctataggtgagatccagacatgtggccatcttgcgctagagtaggtcattcaaccctctcatgaagcaatttttatttttcaaatccgtgtccacttgatcgatagcatattaggagagatgattaaacttgttgagatattgcattactgagtctcccccttgcttcagacgtatgaactcctccagcttcatctatagaaccccttctggaacataatgctccctgaacgcctgtttgaattccgcccacgtgaccagatgtccagcaggctgaatggctaaacaatttgcccaccaagtgctggcagaacctctcaactattgggcggcgaataggggcttctgggttttagtacatcggatcaatccaattttttgctccataacccgtacccatttatctgcttctagaggttctatagctttgacaaaaagcggtggacgggttttagaaaactccaagtatgtggtgtctcgtggcccttgaggttgacctctgcctccatgttgctgaaattgattccacgccaattcacgcaggaaatgtgtgttgtcagcggtagcattgactaaggtagtgatagcctcagccaatgtaggaggtacaggtggtgggtttggagtttcctccatgccgcggaaagttcctgccttgtcatgagcac

SEQ ID NO: 72049 - DNA, 651 bp, Zea Mays
ctcgcctgcaaacgacgcgcctgaaccctagagaaggtgctcccccagctgtcctccaatcggtcgagcgtgcagatttcgccgtgaccgtgtttcagttgactcacgtgaaccctggagccttcaagcaggtttcagctagggtggacgccccaggtacgcgtggcggtggccatctcattttctctgtgcgcgatctcaaaatctgcggcgttggttcatcggttttgcggctcgagcatgcttgatcgagggagggggaacctgacctggattatataggggttcgtacaccaaatcccaacaaccccacgcaccggacgagtccgcagttttcccggcaatttcggaaacacagcactgtgaaaggggattcactgggaaggggataagcctgacttgcggggtccacaaagcagtcactagacacgcacgcggattgagctgagaaactggcgagctcggcccgcctgtcagcgtggtgtgccagcggctgtaacttaggccacgacgtgggagtggtactgggccagaccgcatttggcccaggccgaggtaagctttctttttcttttttttatccctatttctattttcaatttctaagtttcagattcaactcaaatagagttcaagttttaagtcaattta

SEQ ID NO: 72050 - DNA, 516 bp, Zea Mays
tgttttggttcagtttgattgtgtccatccgcttccatcctataaaaccgaccctatccataaaacagatcctatctctacaaccgatcctattcacgaaatagatcctatctctacaatcgatcatgttcacaaaatagatcctatctctacaaccgacaatatccacaaaacatatcctatctctaaaaccgaccatatccacaaaacagatcctatatctaaaccaaccatatccagaaaacaaatcctatctctaaaactgaacctgtgctccatagccgtcgcttcggttcctgccgagttgtgcctttgaaaaccataacttgaggtacctttcataaaacgggcataacttttcgctcggtgctccgtttgagctcaaatgtttacagcagattcttgactccatcctggggtgacccaaactggcctacggcctgtttggttcggtcaaaaaattcaaaaaaatcgggaagataattaaaaaaattgtttaagtgttttcacgaattt

SEQ ID NO: 72051 - DNA, 596 bp, Zea Mays
cttggaacacttattcagcattgctatctgttactgacttgtgtgccacatatatatatttagtcagccttcctagaactccagctttctctcgagcagaacaggtactcctttgcaatcacacccacgctcgttggacagtcacaccggtcaccgtttgccacctgcagtgctggtaagaaccttgtaagagcggggtaagacgcttcataatttgtattccaccaccctgagagatagttatagggttcacattgttgcatttttgtctctgttttgtgctaacaatgataggaccaaagaatcaaatggacaaggataaggggcctaagcttaacgacgatgagtgtgtctctcagatggaattgaaggagatgatgcgcgcgatgactgaagcttttaaaaaataccaggactctgcggcgacatcctatgagcagcttgatcgacgagttgctgaacttgttacacgcatggacgtactggaggctcatccccccaccaactccagccccagctcactctcttgtggatgacgacgacgatgacgacgatgactaacccagtgttcttccaggcaagccccggtgcatgca

SEQ ID NO: 72052 - DNA, 648 bp, Zea Mays
ttcacatacacctagttttaaattattaatcaagagaataatggataaatgtcgattttacccaacctcagcgagtgcagtatagcggagcttctttacagtattggattggaaccaccatgataactaagcaacatttcacacaaaggataaggctaaggggatcggatcaccttgaactgcaccatggtacctaaaacgacctgcaccacatcgagcgcttctctttagatatgattcagtgggatctactaggaactgcaagtacctggtatggcttcccttcagaggcatcgtcattcttatacccaagcagtggaggatttgggtgcaggttggtcggtgactgcaggatgcgtgggtcgacgtcgtctccatggaaggcagggcatggatagcggtgaggatgaggggatgcatgcgggttggtgtcgtctccatggaaggaagggtgtggattgcggcgaggacgaggggatgcacgcgggtcgcgcgccatcttcatggaaggcagggcgtggatatcggcgaggatgaggggtgcgcgcgggtcggtgtcgtctccatggaaggtagggtgtggattgcggcgaggacaaggggatgcacgcgggtcgcgcgtcgtctccatggaaggcagggcgtcgg

SEQ ID NO: 72053 - DNA, 914 bp, Zea Mays
ctttactgcgtgcgcctagtgtccttgcacgtgcaccactgcaccatgcgtcgtcgacacccatcaagtcctcgacgagatactcatgccaaaaataatcataattatcgcgtcaccttgcgatgtcgttgtcgcatctccctgcaagcttgtgttttagccgtggccttgcatatgcacggatgaagaatttcgtggaaaagattgtaagtgcaagaagggtgagaagtttttttatgattttattttccaactcttgttcggtctcatgtagtcaagcgtataagtgtcggcgaaatttctcgtttgcacgtagtagtgtaaacgtgtatctgatttagaaaaatatgtgttgtgtttattgatgtgacgagtaggattagaaatgtcatttatgcgaaggatgtatatataggtagacttgtgtgtgtgtgtcgtggtgcattgtagtagagattacgttaagttgaacggaagtgtctcaagtgcatgtcgtgatatggttgtatttgagatagtaaattacaagtgttgcacgatatgaagttttgatcgggtagatagaaaattaatttggtttgtagagaggtggtgacatgccaatgtagtcatcgcttcctctatgattataagtcgaggtcatgtgtggtgatgttatttatgtggtgaatgcgtattgaaatggtttatgttgtacggtatgagtagaaacgtgaaggatggataatgtgttttggaggagtagcaaatagggttggcaagcatggtagtggttgaatcacttatgttgtagaattgatgctcgacatgttagatctcctaaaatatggtgttttatgtgacttgtgtgttatccaatttaagttgagaaatggttaagaaaagctaattaatctgctcccacccatgttttg

SEQ ID NO: 72054 - DNA, 712 bp, Zea Mays
cgagggacttcaatgccttgcgaagggtcgccaatcattcccacactctgtttccaaactccgatccttctcttgccccgtggtgtagtgggggcaaccctagacaaagactccaccgcggcgggggcaaccctaggcgaagactctgcaacagacaaatctagcgccaaaaaataatctaagtcatcctccaaagagtcatcgttcatcctagcaaatgggctcatcaactcttcacctttcgttgaccacgagtcaacatcagaatcatcaatactaagcactatcaaagtttggcacattaacaatttatcatttccattgtcaccaaaatttgcttgtgcaagcccaagtgccggaacctacgcaacagccgattttaagtatcacacaaaacagaaacaccgttgtaccactcctactctagtctttacacctacacagaagtccccactgccgcagagtcctcagcgccgccttttttgagcgaagtctgctcttcagctcccgcctccacctcgacatcctttcgggccaccaagctctctacgccggcgaggtcctcaacttcttcatccctcattgcctacgaagatagcacataaatgcattagacaatgcaaacatacaaaacacccttgctaagggcacaaacatacctgtgctaacgctcggtcggccctctcgtagacgacgccgaggccgtgaggac

SEQ ID NO: 72055 - DNA, 1005 bp, Zea Mays
caagattaaaaatctttcttggacttttgctaatgtctatggggcagctcaagcggttaataaagataatttcttaagcgagttagctgccacttgctcccactgtagtggtcccattctgctaggtggtgactttaacattttgaggagtagtgatgacaaaaataagccttatgttgccaatagatggacgcttctctttaatgccatcattgatcagcacggtctggttgagctagatctaactgataggaagtttacgtggtccaataatagaaatcctcccacttttgaaaaacttgacagatttctagtgagccctgattgggatttattatacagcaatgctagggttagagggctgaacagatttctttcagaccatgttcctttgatgttaagcactgaggattcaaaaaaacctgttgctacttttagatatgagttgctctggcataaaaaacctgattttagagagttggtttgtagaagttgggagcttccaataaggagtaaaggaagtcttaacatttggaaagagaaagttaagagactcaaaaaataccttaagggttggaatttcaatgaagaagggagtaacaagagaaggagagaagatcttttgaagaaaatcaatgggttagacattaaaaatgaagaaggggggctgtcggataatgaaaaaatggcgaaaaaagattgtgagcttttgcttaataaacttctcttcgaggaagagatgaaaatgaagcagagagctcgtgagaggttaattacggaaggagatgaaaatacaaattattttcatcaaaaagccaatctcaatagaaggagaatcaggattcatgctctgatggataaggagaacttggttgaagaggaggatgagaagaatcggattgctactaacttctataaaaacttgtttggcccttctcctatctctgccatctatgtggaggatagaaacatggataagattagcgatgaggacagatgtatcct

SEQ ID NO: 72056 - DNA, 442 bp, Zea Mays
tgatgttgtttaacacagagtattagggcaacaatgtttttctcgtcccccgcaatggtgcagtacgaggttatttataggtaaccgagggtcggccctgccccgtcaaagacaaatgtaccctcggttacctacgttatccccagaatattctcccttagggggttacaccgggtcattacagtgtaactaattacaaacatgggctgattgactagcagcgctgctcgcgtagcggcctgcaggctagatctcatagcgtggactgactatacaatgcccccttttacaattggcggtagatcgcagcacatggtcttcgcagtccagattatccaccaacggaattgtcgatggtcttcgctctggcctgtcctagcgaaaggagcgctagtgtcttcgcccggactcttcgtgctcttcaaagagcggtcactcttca

SEQ ID NO: 72057 - DNA, 459 bp, Zea Mays
tcgtacgccttctaggttgattcgactcgggcgcgagcttcgttggccttattcctcgccgcctagagatcaccggtggaatgctcacatgtttcctttgcacgtggagaaagcaagacttgcccgtcgacgtcctcgcaagcgactaagaacaaaaaggaagcgagagggtgaaccattactaggtgagcatcttcctaacttatgctcagacacaacttaccaaaaagtttctagtgcatgattgaaaaccaatgaaaatcgacccgcaatgccttttcggtgtcaccactcatcccgtctagctctttatagagggcctagaagtcggcaccctcggtgggaccatccaaaatgaactagtgaaagttgcctagagggggatgaaaaggcaagcgaaaactttttcaacaaaaactaaaaacgaactaggtaaaaccggttccaccagtttgcatg

SEQ ID NO: 72058 - DNA, 1393 bp, Zea Mays
attataaaccaattgttctctaagatgtgaggtcgttttgtttctggtacaatagatctactcttaatttgagtcatatagatcagttatatagatttatccgtaggttgagttataaatcaatagtataagaatatgtatcaatttagcgattctagttatatagtatatcatttgaaagattaaactatgtataaaatatagagacgttattttgaggatagaacactaacggtcatatatgatttttaacatggtaatcggagatgctacttagactcaagaattcagtcaatcataattatgtgactaaactctttagcagcatattttctagtttgttatattgttatcgagaagcttaacaagatgaaccatggcttatggaaaggcaaagattttagccgtggtgtcagcacgtctaaaatatcacattaatggagcatcactagcgccacaagcaccacaagctatgataaaggtacaacaggataacacatatgtcatcatcaccaactctacctataaaacaactgtatgcaactgataaacaagtgcttgcacaccttctctcattcgtggtaaaagatgtcatgacacaggtgacgataagcaccactgcgatgacaacatggcacattataaagggaatatttttctctataatatggcatgctccatcaacacacaaattaccctaatcaatctaaagaaaggctataagttcatcacagaatatgcgacaaacgctcgagcgcttgccaatgtggtgatctttgctgacaaatcatttgaagatgaagaactcatctcctatattctttatagccttgacgagtagtttagctccattatgatgaccctagtgatatagtaagagttgctcacaatgggagaggtctactcctaacttcttgcataagagcaaaggaacacatttctccatggtggtgatcagggtatctttgtgaactcggtaagatgtggttgttgggagtagcgtggacatggttgtgtcgctccatgcagtcacataggctggtcacaaggacatgagttcaatagcaatttgatgcatccacaatcttaggctcacgataacaactcgaataaaatcgacatcgatatcaagcccaaatgtcagttatgctataagagagaacatattgttctcaattgttggcacatgtttggtgataactttgttctaaatgagtgatacgactaatctgctacatcttatgtagtagattccagaactggtacacagacataaaagttataaatcatatcataggagaatttgataagttaggggtccaagataaatacaaagggactaagccatatccacgcgataagtggtacatgtatgaagattagccatattgga

SEQ ID NO: 72059 - DNA, 356 bp, Zea Mays
acaatcaaacaaaatatagagcgaaaccaaaaatgtttacgaaggttgcgcataatgtgacttcaggaccttgaacaacccaccacaatccacgcgagtacaagctctagcgtatctggtgttaacgtgtgtgcgaccatcagggctatggcaacatagcaagcctttgtaataagcgcaacaggcacaattgtggcttggtaatcggggtacacgataagtccatgcaacgtgagcaacaagcgcaattgtggctcgatgatcacggcagacggacagtgcatacagagcatgcgaaaaaatcgcgactcggctatggcagtccgactcaacgagagcggtctgattaaacgaga

SEQ ID NO: 72060 - DNA, 3025 bp, Zea Mays
ctctatctcacctaacctcctctcatttcctgtgagaacctctactactacttagtatagcaattatcttttgatatgacaggccggtattgggccatgtaatcttggaggattaagcccagattgtaatagctataagtactcatacttgtgaaagaagaaagacaggaaatgaataacagaaatccaccacaaactcacctggaaaacttacctggtgtgcttgcccgttgaactcatctgagttcattcccttgtcgcggctcacgtcagggaggcgggcgctccctcggccacgagctgtgacagttggtatcagaggttggagtcctgcggtggagttcaagaggacgcgacggcgccttcggcgagaccatcggtgcagtcgcgcttcgtgttggaagccatggaggagcaccagcgtacgaaccaggagaattggaatcgtgtgttcgcggcgctggaggacttgaccgggcgggtcaaggaagtggagcggacgcaggatcagctgatgacgcaatccgagttggcggctgcagtagcagagcaggcggcaatggagaggaacgagctgtacgccaaggtagaggagacaggcaaggagatgtcgcagctgcgtctggagcagatgggaagggaactgggagatacatcaggaggatcggaagaggaactccctaatcgagatcagaatcgcattcctcaacaaaacagacaggtgaagggggagcaaggaaagggaaacagagaagggcgacacccatttgatgctaacaaagaggtattgcctaaacttccttttcccaagtttggcagtggagatccagtggtttggattgatcagtgtttggattatttcactatctatcgtgttcccgagtcaatctgggtgtcagcagcaaccatgaatttggaacagaatgctgcccagtggtggagatgttataagcttagtcatggaattgggaattggcaggagtttgttgcagctgtgactgaacagtttggtgctgatgcctatccaaaagccttgaggaagttgttggctctgcgtcagactgatagtttggagacttatgtggatgaatttgaacgagccaagtatggagtagtagttcataatccaaggatgggtgaaccattttttgttactcagtttgtgcggggactcaagtttgagatacaaaatgtggttcaagttcaagtacctaccaccatgaatcgggctattctgttggcccgcatgcagcaagaggtgttggaccgcagtaaaactcgaagtatcaagtctgctagtatggtgaggcaacaaccttatcaagtcaggatggaggagaagggtgttcagaagccagtggacttgagtcgagaaaggcagatcagagattttcgaagacttaatgggttgtgctatgcttgtggagaaagatttgaacccgggcatatagcgaagtgtgctaaaagaaatcagggtcagctgaatgcattgactactgaacatttccaaatggaattaactgatgaggtgttgttgcagttggaacaagaggaagaaaaagaggaggcgtgttgtcgtttgtcaatccatgctttatatggcagagacagcagtgatagtatgtgtgtcagatccatagtcaacaaacaagtgatggttatgctcatagattctgggagttctactagctttatcagtgagcacatggtgaagcagttgggtctgactgtggtgccttgccaacctgtgcaggtgaaggttgctagtggggagaagctgctgagtgctactttgattcagaatctggaatggtggtctaatggacatttctatcatacagatatgagggtgttacctttgggagcttttgatgctattctagggtttgattggcttaagcagcacagcccaatggagtgtgattgggagcataagaagttgcagtttctggatgaaggagttcaggtgaaattgattggtgatgaagtgcaagaagttacttctgtgcctgggatatctgtgttgcaggtacagaaatggattaagggcaatgatgtgtgggcctttgtgctagtggaatcggctgctgctaacaaggaaggttctcaacattctgatatccaacttctagttgaggagttcagtgatatatttgccacacctactcaacttcctcctgttagggtttatgatcatcacatatcactggttcctggagctgttccagtcaactctaaaccctacaggtattctccattgcataagaatgagattgagaaacaggtggctgcattattagaggctggatttattactcctagtgtcagtccttttgcttcacctgttttactagtcaaaaaaaaggatgggtcatggagattttgtgtggactataggaagttaaatgacttgaccataaaaaacagatttcccatgccattggtggaagaaattttggaggaattagcaggaactcgttactttaccagtctagacctcacagctgggtatcatcagataagaatgggagagggtgaagagtttaagacagcttttaagacacatttgggacattatcagttcagagtgatgccttttgggctcactaatgctcctgctacatttcaatgcgctatgaactctattctagctccctttcttagaaagtttgctatggtttttctggatgatatactgatctacagtgctacttggtctgaacatctatctcatattcgactggtttttgggaagatgagggaacaccagttttttctgaagaagaccaaatgtgcttttggcaaaactgaattgctttatttggggcatgtgatatctcagcaaggggtggcaactgatccctccaaaactgatgctatgctaagatggcctactcctgcttctgtaacagatttgagaggatttcttggtttgactggctattataggagatttgtgaagaattatgggatgattgctaagccacttaccaacttattgcagaccaagaattttcagtggaat

SEQ ID NO: 72061 - DNA, 435 bp, Zea Mays
ccactaccgattgggcctagtctggttactaagggatgaacatagcaaactcatagagaaccatgagggatacaatgattttagagaggtttagactactggagcataataccctactttctctttgagtggattggattgtctgaggaaatggctaagtgctgaatacaaggtgtctatagaatctgagtgcggaaaatgtatggagttgtgtaaaatttaggaaaagaatgtatgaaaaggatccccgtgcagggggctccctctaccttttatacacaaatggagatggggttataactgacaattgggggtagaaagacggatgtcccacccttgcattaatggaagtctcattaacgttagtttgagttcctgtaggcatgtgtgaggtgttgtagatgcatgccctgcctgtatcaatgacacgagcgt

SEQ ID NO: 72062 - DNA, 353 bp, Zea Mays
ctgggatcttagcgtgtgttaatgtgcattctttatcccgcatcaactttaacttcagctgactgatatgatgcaaagaggattagtatattatcctcctgcagttcaggccaatcggatcagtcccaatgtctgggcgatttgcattgagagactaaacaataatattgggggtgcgatctgaagttttgaattctatggttctgactgcagatcagccagttttctggaactgaagtacatacttgttgagagatatagtgtttaatgtagctaatgtgtcattgacatttctacaagtttatacctggtgataatgctgtcaaggtttgtgcctttgtggtgacagcttt

SEQ ID NO: 72063 - DNA, 741 bp, Zea Mays
ttcggagagcccatataaaaacattgagactaacaatagcattgggtgtcaattgatgaaggtatatctcaaagttctttaaaacttcccctatcatgtcatttaaggggaatcgaaaacctactctgaagaagcttttaaaaacgataacttcgtcctcttttggctctggaactatttcctgcccagcaaaccggacaaccttgctatcagcctccctgaaatagccaagtttcctcatcataaccatgtcatcctctattacagtagatctcctaaactcaatgtggctaggatttgttggactcaggatgatgttatcttcttcactttcattatcactttcgcctccactacaacctgtttagctccggtattggaggcaccttcggcagcaacttcctctgacacaaccagacctgatcgcttcatcacttttgaaattggtgctgtctcggtggtttcggcctcctctccttcatgagataccctagtagtggatctcaccctagccatttgtgttttcaagttctttgagccgaagctgatctctggtgacgaagcgcttgtttgaaaatgcaacgcaggaagctttggctatggttaaaaatttcaacagcacaacgacgtgatagcaatgaatgctgtggtaacttctcaccaacccatctgtttatgtagtgttgtagggggagaaggcgaaccaccataccacttacactggctgagcggtggaccgac

SEQ ID NO: 72064 - DNA, 470 bp, Zea Mays
tctacggtcacgcgagaaaaagaaacacaatagtcggagctacggtcgagaagttattgcgttttcattaacttaccaatttaatagttgatggtaaagcaagtaatttaattaatacaagcgcttctaagcgaggcaaattaacgacgcgcgacaaggcacgcgacgtgcgaaaatggcgcacatgacgcacgaaacatcatgacagcacgagtgaacgatgcgtgaatcagcacgcggccacgagcacatcacgcgcgaacatcgtgtagacagcgcgatgacgcgtgcgaacaacacgtgaattagcacgcgtgaaatagttgtaatacccaaattgtaaaaaaccgtaagaaaggagagttgcttccttaattgttttgcattccactcattacaacatgaaaacatcttatttgagtcaacaaacaactgatagaaatatttaatgcatcatgttgagatttttg

SEQ ID NO: 72065 - DNA, 451 bp, Zea Mays
agcggatgtaaacagcccacgatccaccgcgattctgttgcgccacgagcgcgtggatctcggcgagtctgttgctgcgcgtgagtccgtttcggcggagaagacatagtttaccagaggggcccacatgtaagcgacactagaagccgcgcgcagagaagtgcagtcactgcacgcagggacccatcagtcattcctagagtctgttatttgtgcgcatgatttggctgacgagcgggacccacatgcagccccacacgggcaatatccgcatcacggtcaggctgggccacgcgagcaagcttccttttgggccgagcagagggagaattggcccaagtacaaagacgagtttctccctttcttttctattttattttcaaattccaattttaaatgttcaagccaaattcaaatttttgttttgaatttcagatttccaatatccaac

SEQ ID NO: 72066 - DNA, 1261 bp, Zea Mays
tgatgaaatcaacaaagaactcatgttcaaccatcttaaaggggtagtcatgcataatgattgccttatagaatttagttaggctttcctcaggatcaaacttgaaattttgaataactgtgctattacctgcaccactctgaagatgcaattattgttgccctctagtcaattggtgctttgctttcatatgattccagaagacagttgtgccccttgaggactcaccacgagttttgaacgagcaattcttgcattttgcccaaacttacttctcaatgttgccattatctcccttttttccactatggacttggtgaagtgctcccaaacctcagatgtagcctttttctctctcattttctttgcagcaggctctaatggttcatcgacatttttatcaacatgaataacaagtgttgagcctccaccaacaacaactgttgtgggatctgtagatgtttgcttcatcacaataggtagtggtggcttcggtgctgattgactagtaccaaccagagttccatgagaggcaggtgatgcgcccgtacttgcacaaacactaccgcttccagaagccatcctataccaaacaacaaaagaaatgatctgagcagagaaaataacctggagattaaattcttggttcacacgcaactaatatatgaaccaacataagaaagcacactgtgttaatcaaaatgggggaaataaggactacacttgccaggtgcatgtgatggtggcgaaccggtgatgtagcatagcgccgacgtgatggcctgatgggtgacgaggaaggttgctgggtcggcgaagctcctgcagggacacatcttgacgttgtagaagggcaggaagatgatgtgttgaggtggatgtggtgctgtcacccaccagccaccaccatatggctttctgctagtctaccgctcgaccgtcgcacgagctagggttgtggcttgtgcttgtccgcccagtcgcccacacgctggactaaagacagaagtaggcagaggcaggagtccgtgcggtgctaggccttgtaaacttggacttggccacatgggtctcgtatgtgaccatgagtgagagttgagttgagttgagacatgggcctactgatgagaatggatcagtggagttgagaaatgggcccgataatttccaaatagttggtcggataaatccgagaaaatttccgaatattcgatatccgacggatatcagtcctacaatatctgtatccgctatccgaaca

SEQ ID NO: 72067 - DNA, 771 bp, Zea Mays
caaaaatcatggaaataaggtatattaggtcatatgattcacatatttggagacatgcaaataaaaccataagttttgggcttatttgcaaaaaggacaccctagtgctccaagggattgagttagaaaacggtgaaatagggctgactttagggctctgtagatccaaaaatattaagaatttgcctagggccagtacatcaaatttgtagagctatgaaaggggaataactttgctatagagattaaaccatggtcacatgaagaatttggagaaaaatgagcccaaagttgggctatcagactaccctaagcctaaattcgactgacagtgggattggatgaacttagggctcaattttaagcaagatcttgtgactttttatgggggcacgttgtagcaaagttggagctggtctattaggctacaactttgctacagaacaatggtcttgttgccatgtaaaatcaggaggaaattcgccccaaacttgggctgtcaggctggctgaagaacaatcccatggtacagtaatagataggatcaggttctaatcccctcgccgctgacgagccgcgcgtggattcgtgctatcgccatggtgattcgcgctcggatcagttggataacactgggatccataaatatcacgccgtggatacgctccggccactattttactccggccaccgtacctgagcagaccacggttgagttggatgggttcgccggagctagccactgcgcggtcttgcgccacgtgccttgac

SEQ ID NO: 72068 - DNA, 292 bp, Zea Mays
gtgctctcatacatggatttaaaatatttcctctcacaagtagcaagactaagtaactttcctaattagccaaaacaattgttagctcctccaccttagcagcaagatcattggtggagtgtgataccttagaagcgtagtcatcgtcgatgtccttgttgtcgccaccacccgcatcatcaccaagggccaaggtgcaaaggccttctacagtgtcggcgatgaagcacaacttgttgatcttgtcctcaacgtgcctctcgagatcctcgtcacttgaagaagaggctaa

SEQ ID NO: 72069 - DNA, 1104 bp, Zea Mays
gggaacttaaccctaaatagggcttaaaggggtaaaacctagcccaagctgagaaaacctaaaagccttaaaaaaaggtcgtaaaatattcccaggaacaaacttgaatcacatttatacccctcagataccaaaaaccctaattggaaccctagaaaaccctaaaaccaaaccctaggggcctatgtgcaaaaattgtgcacatttggactaaagtgtaaaaactacaatgtcaagatatataaagtcccatggttcacatttaggatgatttgcaagccaaaccctaagttttggacctaattgcaaaatagacctcaattgagttctatactaagtctgaaaaacagtgttatgggctcaacttttaagctttgtaactttcaaactatagggtttttgccctaggtcaccacatcaaaattgtagcccaatcgtaggggaacaactttgcttaggagtgtgagcatagttgttatgaagaattctgagataaatgagcctgaagttggactgtcagactgcttgaaatctgaaattcagattaacagtgggatgacatgaacttagggcttaattttaagctagatccagtgactttttgtgggaacacattgtagcaaagttatagctggatggtagttctacaactttgctacagatcattagttatgttgccatatgaaattgagagaaaaattgccttcaacagggactgacaggctgtctgaatgagttagtcgccatggtatagtgctccagatggattaggccgccagtagggaatcctcaccgccgatgactccctccgtcgcgattcgtgtcaccggcgactagattcgtgtctggcgttgatgaatggcctcacgaggtaaaaaccgtgccttggacgccactccggtgactcaccgtcgtagcccttctgctttacggctggagcagataagctcgccgatgaaccaccatcgtccgaccttgtgccgcgtgtcccaacctcgccaccgcatcaccgtgactccctctaagcttcccgtcgaccaccggagttactgccacgacgttgaacacgtatccactgcacccgtgttcttcttcacctccggc

SEQ ID NO: 72070 - DNA, 401 bp, Zea Mays
gtagttgtggtgaactggagatatatggcctgcagatgcatgtaggcaatgagagcggttggcttttttcctttaggggagcggcaaggtgaactgcactgcagccactatttctaaagtggcaggaggagatagaacaacacatccatggatagtggggatacataatgttccattgtattgatggatttgatgaagaaggggaagagttttaggcctgtttcagtttgttaccattcttgacacatgagttaactctgagatgaagctgaatcgattcaatctgatggctgcaaattcgaggtgatggggctcattatgagagcagctttatagtaacaaataatttagtggcttccatctatataggttatatagattaatatgagtatatggtttta

SEQ ID NO: 72071 - DNA, 546 bp, Zea Mays
tgaaatcgccctcccgtagccggaactccatactgcggaacgcggccgacgaagccatctgtgtagttcccaatcactcacatttcattttgtgctaatcggggctggggtttgtcaacgggtgatggggcgtgggggggttccggcgtgttgcgcgaccgtggatgggcggcgccgccgtgtagagacgtccgaggacgaagacgcgctcgggccgttagattggcattggacgattacgattagtcctcccaggaaatgagtctggatggttagatcgggatcgggcgacccagattaagtccagcgtacctcttcgtccaactggatcttggccgtagatttataatccgatgcatgtgaatgaatcccgataatatagaattcaagccattgatcttgatcctgcagctcaaatttaataccagcccaacctccccttgatctgttctggaccgtacagatctaatccaacagcccatatccaccgataccctttcgcggcacatttttcttaaagagaccctgggttattgatgattaaac

SEQ ID NO: 72072 - DNA, 1148 bp, Zea Mays
gcaaggcggaggcaataattattttgctggccaacctcggcatgaaggagacaaagaagataaagaaatctaccagggtgacagtggcaccagtcggagtttgcggcgtaaggccagttgatcttgggctcacattattgggccagtggtgtgtgctagtagtttcccctatatgatgtgtctccaaggaagtatgtgttcttggcttagtgtatggtggtctgttattgacagtagtgggtgtttgtgtcataggtgtttctggctttggatatggatttatttcctaggtgttcccgcgctccgacctgcgagcgatcgcctctctcatctcatatcattcaccactgctccttcaaggggacgtcaattttgattcctatcggggttttaggtttgaagcttttttggacaataatgttagggtattttggttacaccagttgaggctgagcttggtgtcctccaacatatcctgcaaactttgagtcgctgctcggggcttaagtttaaccttaataagacataaattttccgattcgttgtcatgcaggtgtgactgagtctttgcccatgtggttcctggcgaagttggcatcattcctgggtagatatcttgggctcccctgcatttgagaaaccttggaaaaattgatgtgcaatcattgttagacaaggtgcgggccaggctttcgggatggaaagggaagctgttatataaggctggacaattgactttggttaaaacagtgctaccagctcggccgatttaccaattggttgtgttcctagaacagaggtcgatttttaagaaaattgacaaaaatcatcgcagtttcttatggaagggagaggaaccataaaatatttatggtgggcattgccttgtcaggtggtcgtcgcgttagtgaagcgccctttgaacctaggtggtaagtatgagaatcgttgatctggagcgttttgcaagagctttacggcttcgttggctttggtttgaatggaaaaaatcaagaaagagcttgggtctgtttggacataccctgtagcaaggttgatcgggatctctttcatgtatctacaatgtacagtggtgacagtgggcaatggggctaaagcttctttttggcgtttgtgttggatcgatg

SEQ ID NO: 72073 - DNA, 488 bp, Zea Mays
cgtgtgtgccaatttctctccaaacctaccactgaacactggtcggtggttaaaaggattttgaggtatcttcacgaaacgattgatatgagcttatgcttcaacaaatctggtgcccctttgcttagtgcattctcggatgcggattgggccggtgatgcggatgatagaagaagtacaggcggttttgctgtattttttggtggcaatcttatttcctggagttcacgcaagcaatcaacagtctctcggtccagtaccgaggccgagtataaagctattgcggatgccactgctgaagtcatatggcttcaagttcttctgaaggagctgggtatcaaactctcccgaccaccggtgctttggtgtgataatattggggccacatatttatctgctaatccaattttccatcgtcggtctaagcatattgaggttgattatcacttcgttcgcgaacgagtcaccaccaaacaacttgatgttcg

SEQ ID NO: 72074 - DNA, 350 bp, Zea Mays
caaatccgtgcagaagtcgcctaagggtgcagccggactagcacaacaagtgcgaaaaaccaaagtctaccgcgaagactagccgcgcagaagtcgcctaaaggtgcagccggactagcacagcaagtgcgaaaaaccgaagtccactgcaaagaccatccgcgcagaagttgcccgagggcacagccggaggaagcataacaaaagcaaaaacgaccacaccaaactgttcgcgccaagaccgactatatgtgcaccagcacagcataacaaaatacactagaccaagtacataacgccttcgcaagcatagccaagtgtgcggggtgagagcacctagaggggggggt

SEQ ID NO: 72075 - DNA, 605 bp, Zea Mays
caaaataaaaactgacatatcgacgttaccggcaggcgccgattaccgattaaccaactggtaagcagaataagtcgactgatttggtgaaccttgtgcgtgacaacccttgcgttgattatcgattaaccagctggtaagctgaataaatcgactgatttggtgaaccttgtgcatgacagcccatcgtgcttatgccagcttgatagaggtcgagccaccttctccgtgtcatcatcactgtggtgctcgtgaaggctggtggagtcgtgccaccgcctacggtgtgcccgcccacttgaggtcgtgctcctagatgaggcagcgcgacatgcactcttagcggattcatgggttagataggattaaatctcttcctattcaattttaaatatgaaggtaactaatctccctcaaacctcttcaatccctatgtaactgaacaagttcttatgaagctgcacaaccgtctccttggtgcgcacccacatggtgtcatctcatcatgtggaaattgttgaataagtacatatattacagattaaatttcgaatgtaaatcatgaacaaaagtaaataaactagcataatgtttccaaagaggct

SEQ ID NO: 72076 - DNA, 682 bp, Zea Mays
cctccaataaggtacgcatgatgttgtcgctcacattggaactaatccgctcaatatcttataatgagtgttttagtgtgttatcctgcaaaagtaatcaacgttgattacatagttgtcatgttatcttgacatgaaaacaaatatgccaagtttgaaccaataccactcggtccaagatcggtgcagcctcgacttgcctacccactctagtggattagtcgtacgctgtgtcttcgtcctcagacaaatcgatgtcgacgtaattgacatctgcccactgcctccttaacttcgtctgagtagcaccttggtaccaagcgtgataccacctgtagtcgatgttgtcgtgcggctcctcattgtcgttgttgttttcttccatgtcttcccaatctaaaatgaaggcatggtggtgtctcatgaagtcagtaatcttcttctattttcgacgatcaaacctgaacgtgaaccacaaaagtcatgtgtacatacaagacaatataattagaataagccataagtttatttgagaaaccacacttacttgtgcaatgccacattagttagaaaatctagaaccagccaatgctggttctttccaaattggctggcaaccctatatggaaggtgacactcaacacaccagaagcaaataagaggacacctcatcctatacaag

SEQ ID NO: 72077 - DNA, 662 bp, Zea Mays
gacttctagataaaaattgagcccgtcggctagctttttgttgcaccaattcggtcaggatttggcggcaacacatacctcgagcacttcgtttcttattaatcaatgacgcgaggggtctcgactctcaaggacttgtactaataggtgccctaggctacaaggtgtctttagaacttatttataccactatataatccaccactttaaataaatctagagccacaccaacaaacgcacccaaaaaccaacacattaaaaataaacggacaagatcctacctagacttctcctttctcttactcactcacatccaatggacgatattcttcggatcatcactcatcccaccctccgaccccacaagcaccgcatggatatgatagttttttctttctttattttctctttctttcctttattttctgtctttcctttctttctttctttcctttattttctttactttctttcttctccgccttcaatcatgtagacgacgtcaactatatacattttttctttattttcactttctttcctttattttttgtggttttttcttctttgatttcattatattttaaaaattttatttaattctcttattttattttttatcgacatgttgtcattagttgtcatgcttcataggaatgtaa

SEQ ID NO: 72078 - DNA, 333 bp, Zea Mays
aaaacagcggatcgaatcctacgcacccgatctagatcggacgcccccgatcgcatcagtccactcgacacctggattcgatctcaatcgccaaacacatatcctacggcggacgccatctctcaccccaaccacccgataagatcggacggtcggcagccttcttccaaatccctcgcccaccaccgtacccagatagtggcggcgatgcaggccccaacggtggcgccattaccggcgatgcgcgccctaatgcccggtaacccaatcatgcatacatgaagctcttcacaatactggtaccgaagcaaacgtatggagggaggacacatc

SEQ ID NO: 72079 - DNA, 725 bp, Zea Mays
agactgacaagtgccaacaaagctagagaggaaatatcgctacttccctcactgcctctatagaaacgactgttcttgcggatcaatgggatttcttctgcttcctgctcttcatcctcatcaaacatgccaccagtagcctatgcattatcactccttttggcatcaaccttgggaatggcgtccgccgggacatcgtcaaggatctgcacagaaggaccagcatcttgatccaagcacgacagtcgccaaagtcgcctcttcttcttcttctcgataggtgcattcggggcggttcactcggcgtgaacgctttgggtgggaaccttcgggtttctgaatctccacttcttcatcaaactcttgccaagtcatgatagccatcggctcggtgtgggtagagtcggatgactccccagccagcaggctaagcacggcatcaatctcggcatcatcagtgctggctggcatctcaaagtgggttagcctctcagcctcgggaagactccaaagtggagcaatcaatgcctcaatgtcctcaggagagggccacactctatgacccaggctaccggcacgagcaggagggttggagataaactcagagaatggcctatttggcggcaggttccatgcagaataggccacaggagcaccagcatttgagactctgcccgtcaagatcatgtccagtctgctcagcagatcttcattgggaatcctcc

SEQ ID NO: 72080 - DNA, 435 bp, Zea Mays
gcaaaccacaacaaattaatctaaacaggtgcctccttcatgtctttccttgcattctttcctttgcatatgatggttcacaccggtaaaaggtgcaaatttcatattgtattggtttgtgctatatgttgcatcaaccgacaataaatcatcaaagtgagtataactctttctacatgtagcatcaacccagaatatatacactaactttccatcctcatccacaacaaaatcatagaagaagaccgaatttgcctctttcttcctctccatttgtgccacaaataactgagcatctgcattctttattttctccctaagtccccgatagtagttctgaagatcccgcttcatacatccaatattatcaaaaccatcgcttacttgtaaaagcctatatgcttgtgatgtaccaatacttgctttatgtcatgt

SEQ ID NO: 72081 - DNA, 342 bp, Zea Mays
tgtggttgactcttcccttgttctggttctgataactttttccttgagtgttattatgaacaggggtattctgatcaactctttgattgttgcttttctgaggagtctgagagttgcgcttaggacaattattggcatagtgcccagtttctccacacttgaagcatccattgggctgaactagggtggttgtactattatttttggccgaggtgttcacgacgcttccttgacgagtctgcgaattaccaccagacctttggttggttcgaaagttgttccactgctggttctgatgttgattgcttctctaaccttgttatccagagcgttgcatttgat

SEQ ID NO: 72082 - DNA, 772 bp, Zea Mays
tgtgtgggtgcttacagcgacatcgtaatcatgccctcggtgggtgtcaacaccctctttcaaagcatcaaataacgagctatagacacaatgccaggtagcagtacgagaaggttggcggtcttaataaacagactactttttggtatctacggaggtcgtggaggacagggacacaccaagggcctagggtcgtctctaaaggcgaggtatgcatcttctaaagttaacatcctcgataggagcagggtgcccctaaccgagaatcataccaaaagtgaaaggaagtggtcatgaatgagggtggttcgagcgagaccaacaagaggtcacctcatcaaggagattccccctacaaagacaatggggaggtcctaaatctattttttgggacacatggtatcagtcgataagcagacttccttattaaaattctttcttctgtttcatgtattcaacagaaagggaaatgtgtcttgagccattgtataaatgttttggtagttaatattgtccaacacaacaatgtgaactaacatgtttgctaagtatatgcatgcaagagtcaactttagagaagcgcagaaattaagttggaggattcaaataaataaggttacatgacttagactagttggattgtcaataagaatatttgtctaagccatgggaatgctcttggatagagtgaaattcatttggagaagaaaacttagaagaaagacaaagtacagttatctaggacacaccggaccagtctagtggcgcatcg

SEQ ID NO: 72083 - DNA, 2028 bp, Zea Mays
ttaaaatttaagcattgcatttcctatttaggtggcgtatcttgcttcaaatccttattcatagtatttatatgatcctcaacttattcgtccgtctttcccattaactcttcattgtctttgccgattctgaaagtgtggctttcctcagatatcagtattgggttcagatacccaatccttttaccggcactagcaccaggcttggtactgtaaaggatctcttgttgatcttgttgcattctacaagttacacgtgcatgtgtcagatattgaaaatttatatggcttactaataataataacacatatatgtggaaatatgagcgacacttatagtgcaaacagagtcacaagttgcacatcgagtttctgaaggttcatcattaaccacatatcctcgaatgcaagaaaggccttttggtccgaaccaataaaagcatggtctggtatatgcacactaatggcgtcaatgccaactgatgatgcacgcatgtaccagtcatgcaaccttttaataccagcagggaccttcctcagtttctcaagagttagtagaggtctgcccgacacatattatttaggcacatttttataatttgccttagttgggatctttatctttgcggccattgccttagccttttctacagactccttgtgcttggccaaatcaacaatacgtgatgtgaggtcccgtgcaatccctttcaaaaatcgagttgtgccagcagtagtagctttactcttctttttctagaatgtgaacaccaattttggtacagggaatttagatttctttgattgtcgtgaatcccttgatggctatggagaaggtggtggtgtcctaaatgttgatgcttgtggtagagacggtggattagaaagaggatgaggagcagcatgggaagattgtggaggtggtcatggatgtacaggtactaaattttgaggaggcagagatggttggggatgagacgacgacggcgttggtggatcaatcaattcaacatcccttcgaggccaaaggatgaaatttttgatggcttgtccaagtctctcgattcctttgggcccaaggatgtctagcatgtcgtcctcagatccttggacgactatcgtcacttctaccctacaagaatcatctggtatgtcgcttccatgaaacttgcgtcctgggatcgcaacgcctgttcctactttcttcgtgcgattattgttaataccatatcttataactagtgtgcatgtcactggccttgttatgtcatcaactggataacagaccttattgtccgttgacgcgacagagcttgggacggttgtacaatcggtggaagccgacggttgagttgctggaattatttacaactgtggagtggtcatctgttgaatagacatcgcactcgccagctgctgcatcaattctgatagaggatttgatagcatttgagacatcaggtctttgaactctttctttgcctcctacttaaaataatctgacaactcttctttgtatcgatcacgtttcttgtacaaaccttcccaccgtggtccaaatccttccttccatccttccttagacgagattcctcgtacatggccaagatgctcagggttaccgagactagccgttaggatgtctccctccctttgtggcttaaatgatccttggttctacttagctgtcattgcatatatgttttttgcagcttctttgacatttggatcatcaaaagatacaccctcctcagtttcccagggttttctagcacagatccaattagcagtcctttcaccaagttgctcggaaagcgtcggcaatcctgcgaccttcttctcagcgtcttcttatctccatttagaaacttgacgcttgtaaccacctgtgcctaagtggtggtggtacttgttcttcttagatagttctaaatttgcctcgcttagatatatgaattcagggctgctcctctgctctagaaatacttcccactgaccttctgagattttatatttttttgtcgggtc

SEQ ID NO: 72084 - DNA, 558 bp, Zea Mays
gggggatagagttccctgcttatttaatagttatgggtaaccaggatacaactatagttgtcatcctaggatgaattgactaaccaagtatcaagctagtcttagctgtgacaagagaacggtgaagttagtgtccttattaggagaagaagtgttagtggagttggtcttgtctggaccaaaaaaaggaagttgtcaccaagtcaccacccatattgaggagattaaaccatcagagactatcaatgtagtatcagaattcccagatgtgtttcttgaggagttaccaggtatgccacctgaaaggaaggttgaatttgccatatagcttataccaggcaccgccctatttccatgagagcctatcgagtgtccggaccagagttggtggaactcaagaagcagattgatgagttgttagagaaaggctacatcagaccaagtacctcgtcttaggcagccctagtgctgtttgtggagaagaaggatggcacgaagaggatgtgcatcgattaccgagccttgaatgaggttactatcaagaacatgtaccccctg

SEQ ID NO: 72085 - DNA, 462 bp, Zea Mays
cgcatgatgtttttgggggaactgctttggatacgtactcgggatctcttggtaatctgcctaagatgccatttcctgggtttgatggcgacagtcctaagttgtggcagtcgcgttgcgaggattactttgctatgtattcagtacaccctagtgtgtggatcaaagtgtctaagatgaattttactgggccagcatcacgatggcttcaatccattgagcatcagttgccatatctcacatggcctgatttctgtcacatgattggggaccgttttggcaaaaatcagcacgaacttcttattaggcagctatttcacattagacaaaattctactgtcactgagtatgttgagagattttttcagctgatagatcaattgcatgcatataatcctcatgatgatcctctttattatactactcgcttcattgatggtcttcgtgatgatattaaatcag

SEQ ID NO: 72086 - DNA, 390 bp, Zea Mays
caacgcgtcgtttttggagctgaggagcgctggaggtggggcctaccccgagagcttcaggctcatctgaagccgctgctggatgccctacggaggctccgggatcatggccttactgcagccagggtcgtcatcgcgttccaccggaggagggttctgtcgttgactgagcgccagctccgccacgacgagatgacgcccaaggctttcgtggagagttcgtggatggcctcggtggcctccccaccgacgaacttcttcggcgggtgaagggaacggtggggaaggtggagtactctgtcatcttcccgatgtgcctagatcagggctatctgtccctggtgagtctttgtttctccctctgtttttggtcttctccttcctatctca

SEQ ID NO: 72087 - DNA, 924 bp, Zea Mays
ctcctaaatatacaaagttttaatcttcttttagcactttctcagcagcttcgttcagtagtctgttgacagcctcgtcaacagcttcgttagcgatttttattatatctaacgcttccttcatggccgggtcaacatcggggtcatatggctccggtggaggtgaaagttcagctacatcataaaaaatgtttgtgaattccgaagctaaaaacaaatcccgaagctcaacctcagttaaggtaactataagtctggcacgctctgcagcttcttcagctcttttggcctcttcttaagtgtcgtgggattctttttcatttttcctaatagttcatcagctatctcacgtccgccctttatccatacttcggagtaaaatttaccgcttaacgaagacgcttcggctgaggaattcttaatgtcgtcgactgagataacaaattctagctgaacaacaccctttgcatggtcatagccaaccttttccaaaattgatacagccccacaagcaccagcaaaagcacaaaaatcccctcgatcgctgagtatctcatcaaaagcttcggcctccccgctgatccactggataaccccatcggggtcatcgcagatgaacttctgctcgaaagagtatgctcccacctatgcaaaactgttctttagattcctggcgcattccaaggatatttcgtagcatctctctttggagtcgcggagctcttcgtcattcttttgttcccttgatttttcaattttgcttatctcatgcttcgccattgcaacttaaaaattttcgatcgcttctgcaatcttcttctttaaatcttcaactttgactttgtgagctttggtttgtgcagtaagtttggcttcgctagatcttagcatgtccactaaggaaagcaatatcttatctttttc

SEQ ID NO: 72088 - DNA, 412 bp, Zea Mays
catgtgcaatgaaattcttggaaactatacaaagaaagaagatcagttaatgactgctcccttcggcacccgcccaaagcaaaggctgaaccgtgtgatggatgctctaaactttgagtatcctgattacgaaaggattgatgaagggaccggaggagtcaagaggaagaggattgtcagcattctaagtaggcaggctatccggtcggttaaagaagaccaagaggctttgaagaagcgaaaaactgtatcggtgccaaaagtatcgactcctaaaaaacggaagcttgccgagatatcctctaagaagacgaagatgcaagatgtgccgaagcagactatgagcccttcttcgtcttctatcgctgaggtctcggagattttgaaggtaatgactgagtctttcccattt

SEQ ID NO: 72089 - DNA, 343 bp, Zea Mays
ttcaaactttgcctctatcatttttcaatcagtatttcctaacctcttgttgtgcatcgggatacctagatatttaaacacgtactcctttcttacagccaaaaatctgttgatattgatgttcctcctctactgccttacgaaaacagaatagctcacttttatggtaattaattttcaaaccgaagacttgctcaaaggctacaaaaagcgatttcagatttgctgctttctctaaatcattatcaaaaaacaacaaggtgtcatctgcgtattgcaaaatagagagccctccatctactaaatgtggcactagaccgtcaacttgaccatctgctttagc

SEQ ID NO: 72090 - DNA, 439 bp, Zea Mays
cgaaaaaccaatttggggggaatcgcgaattgaggagctatggtgaacgtttggaggcaaggagcgatgcactgggcgcgtaacaacatagaggaacacgctgaacgctcaatttatagtgatcaatagcggtggcgcccaatttggggaagacacgctggtggccggagagagagggaggtcactggcgcgagctatcgtgactttcactcaggcaatgactcaggcgatagacgggctatctactgcggtctactgcgacgtggtgaaacgactaacgacgtggcataatcgagggaaacggcggcacttcgtcggcggtcgcgcagacacgtcgtcggtgcaagtgggtacggcgaggctggttctatccattcccccgtggatctttttacgtctatggtaatatcctgcccgagctgagcacgagtcacggcgg

SEQ ID NO: 72091 - DNA, 373 bp, Zea Mays
ggataaaccaataaatgtgaagccaaaaggaagaacaataagaagtgatgaggtaaggactgtaaaattaggcgccaaaggagaaaaaaatgaacagaaggtggaagaagtgcggagttgcagatggtcataatagcagaacttgtctttcagttgaagaaaataaagctcgtttggtaagccttgctaacccaagacaaagagggcgttcgctagggtcaagcaacattaatacgtcgagagctccggaatggaatgaaacaactacttcaaagaagcctgcgatgagtgtagagacgactggtgagtctgatagtgaaatgtaattgtacttgtgttggatggcttgttgattactattaaaaattatgag

SEQ ID NO: 72092 - DNA, 331 bp, Zea Mays
gtcgaaggatgacctcgcagacagccttgcatacaatagtctgaaggtacaaaagttatggacttttagatagattatcttttttgtcttttattctcgtgttgatcctttatctcccttctttttgcagggcttaattcttagcaacgctttgagggcgcagaaaaatgctgaagatgaaagttgtcagatagcgcttagcaaccttcagtcggaggttatcagattgaggaacgaagctgcagaaaaagataaaattccgttttccttggtggacaaagtgaagaaagacgaggcaaaattcaatgcacaatctgaagtccataaagcc

SEQ ID NO: 72093 - DNA, 443 bp, Zea Mays
gtccaccttgatccacgaacggagggcagccaaaggaaggcacgggctaataaagaagcccatgaggtgtgaattgatagcatgatcgcttatccgaaagaatgcccccttcttaaagggggcaatgcttgattaggcctacaaagaaaaaacctcgggaccccacgacaccaccatgaaaagtcgaaaaacaaaaacaagaactattttactattacccccttgagaagcagcaccgaggcacattacactatgaagttagggggctctacacacaacgtcgtacacaaacaacctatgcacaatgactgaccgcctcgtcgaagccctctagcatgttgtccaccccttcatccgaaagggacaaaggagggctgacgacgtcccgaaggccgtaaccggaccaaagctccccgacgagcaatgccactacggttccccgg

SEQ ID NO: 72094 - DNA, 465 bp, Zea Mays
gttcagcgcgccgagctgcaggaggaggaagccgcgtagcatcagcttttatgcacaggaggaggggaaagtccgagtgaatgttgttggttcacgacgagaaatccgggtggagtttggttgaggcgcccgtggaagtcgcacatttggttggagattgtcacgggggagaagataacactgttagctgggacccaccgtcagagccatggccacgttgggagcaagggggagtgaggatggattgcgggccccacatggcagcggttgaaggaatgtgggttagtgcgcacccggttgtccacactgaatgggtgcctgatacgcatagtgtggctgacgttagggccccaccggtccagggagtgcgcacgctaggggagatgggccgcacatggagaacgaggtgtgggccgacgcggaggaatcctgggccgaggagaaaattggcccaagcgcaggtat

SEQ ID NO: 72095 - DNA, 738 bp, Zea Mays
ttttagaaacaatcgactctgtaagtcctgctcccacagggaaggttgccgaagctgacaaaacgcaaccgaaagctgatactaagcaaatagaagtggagactacaataacccaggctgaagccgaggcagagcccacggtacctactaagacgaagcttgccgccaccgagcagaaggccgaagaaataactccagatattaatatagcttttgagaagagtgcggccaaagaggccgaatcccttgcccctgaagcactctccgaagatcttgattatatcattcgacatgcttcgagaaagagattatccgaagaagaaatttttgaagctaaacactatgcctgagaactgaagtatccgaagggggccttagtgtttaatggtacagacgaagatgatttcctgtaatgcctcccagacaacaaagaattatctgtctgccgggagatgaccagaagtatgggtttttcgaagctcgaagctggcctctgtgccatgacgaaggacgatctcgcagatagtcttgcatacaatagtcagaaggtactaaagttgtgaattttaaagcccaactctagaatggagtctttttgttcttatgttaatcctttattctgtcttgcagggcttaatacttagcaacacactaagggcgcaaaagaatgctgaagatgagagttgcactatagctctcaacaaccttcgatcagaggttatcaggctgagaaacgaa

SEQ ID NO: 72096 - DNA, 1099 bp, Zea Mays
tttttctttacaacgtcgggtccacgacggtggacggcgacaagccgagcttcggtgagcttgtactggccggaatacgcaacagctagtcccttcctttgcttgacaccaaattctaccccgggtgacttagattccccaactaatttcactaactgggaccggagtacacctgctcacgttgatggtgaaaaccgagaagaaatcatggtgttcagggcaatccagtacgatctagttcaatcaatcaagcccacacgcaaaaggagactctagagatgctagaacattcaacagaggggcatgaatcaacatgaggcaggctgaccacggtgagagactttcacggcggactttcaactgttttggtggaaatgacaaattgggcggctctggtggatgatagaaggcaagagctggtgctttggatgagcaatgacttaacagagctcactggggcaataatttataggatctatcgacggtggcgtccaattttgcgaaggtgtgctggcggccggagcgagagaagagttactagtgacgatctatcatggtgattgcggagtaataagctatggcggtcactgggtaacgaccacgactcacgacgacgtggtaagatagccaaaggcatggcatgaccaaggaaaacggcggtggccgcggtaatggccgtgcggccacgtcactagtaagtaatgggtgacagagtggctacagggttctaagttcatccaaggcgaagatttttccatggtcgatcataatccatgccacagagggcacgaatcacggtgctgccacgaatctgggcgtgcgggtcaccggtggcgagggggatgaacctgaagatcttttttagtgtactgtaccatggaaaaccccattcatagcctctattagagcactttgcagagctttgacctctaatttctatatggcaactagctaatccttctgtaacaaagttgttaatctacaaactagctataatttgactatagtaatcattcccattcaatcactagatcctactccaattcgacctcaaagtcctgccaatgtcactggtggccataattcagttatcagtgtg

SEQ ID NO: 72097 - DNA, 571 bp, Zea Mays
ggtgggatctaaaaaaacatgctcctcactgctccccatttaatctccaccgaaatcagtccagaatcaaccctctgctccccaccctactctcccgctggaatcactataatcacttcactaaagaatcaatgcgctagggttcgaaaagaaaaaggtattatgcaatactataagaatagccatgattattgcttagaaaataatgatcaaacaatatgtcaatattctagaaagaaaaaacagaattgtcatatgcaatgaattgtgtttcaacatattacctgtacaacaacgaatgcattgcaacaaaacagggtaaggccagccaatacaatcacaccatggtttcatcatacatagttttacaggaaaacaaagacatgcagtgttagtctgatcacatacacaagaaaactgctaatacttgacaaaataattgacattttgtggctcccctttgccatcatttttttgaggtagcatgtttgtgagctatctaatgtagaaaaagcatgtaaaatcagtagtggcctattatagcgcaaggcagtagtgagcagcataattg

SEQ ID NO: 72098 - DNA, 992 bp, Zea Mays
gtgtgtataaccatataaagtccaactatctggtatgtataatattgtcagtgttttgaacctacgctttgacaactaaatttgtgtgtgtgtttcgtggtccagatggggtgctcggtgggtgtaagatttatactagtttgggtagaacgtccctacgtcaagtcttcggcggctcacactatcggcacatttgttgctcaacgctcatagtaggggttacaagcgggcgagaaagggaggagctctcaagtctcttatgtatgggtgaacctaatgactacgagactagagttctaagctaagccttggacatcatggtggttcgcgccttggctccggtctctgtttcttctggtctcgtcgagcatgtgtggtcgttttccgttgaatgtcctcctctttgttctgtggccgacctcctccttttataggccaaggtgggatcgagtaccgatagtttcctcgagaagaagtttttgtgtcatggtaaaattgagcgttctaccttggtaaggttgcacttgtctgtatacgcctcgatcatctaggtgtctctgatcgtgctctttatggcgggcgacatgggcggcgaagagtcctggcaccattattgtcgtcccaatgttgcgtcgacccctagctgccgcaacattggtctcagtgtggctcgtcgtattgtcgggcctgtaggtggctagcgtgctcaggcctaggtttggtaggtcatgagtgggtcacaagttgttggagaaatgatccccaatctctgtgatccgttatttagagagtgtgctaaggaaagagcccctggtcgctggggcccgtaggtcagctggaagaggtggacatgtcaaccttgaaagaacctaccctcggttgaaccccaccgcacagagcccaaggtcaggcgtggcagaatctgacagggcagttcagcgtgtaggaaggtgaaagtcgcctagagggggtgaataggcgaaacctgaaat

SEQ ID NO: 72099 - DNA, 669 bp, Zea Mays
acagcagcacccatgactgatttcagagaatatccgaaatttgtgagctatggtggatggcagaatgtggttggggtgcattgggtttgtaacaagggggcggagcagggagagtcttcaatttaaagggatcggcccggctactcgtgaatttgaacgaagttaagctcacggcggtgacaagatatttttaccaaggcaagttcaacgtgtcgcgcgatggggtaatgaactagggcaataaccggctactctccacgacttactgcgacatggtaagatggcttatggtgtggcgcgatcgagatcaccggtagccacgacagcgtctgccgctcggccacgtcgctaagcaaatgagtgtagccgatgagtgcacaccagagaccatatccaccttactttagatctttttacttctagcagttatccatgcacctccggtcacgaattgtaacaccggtgtgggcatcaccggcgacagatcctgtgaaccaaagatcttttcagtttactgtaccactgaatctcccattgtaaccgcctgatagcctgactttgggggtgttttactccaattttctgcacatcactaggttgatccccaatgcaagggctaaaactttgttgtaatgatcatagtccttaaccccatggataaggcacata

SEQ ID NO: 72100 - DNA, 472 bp, Zea Mays
attttttggttatgtgaccagattcactgcacacaaagcaagtcaggtatgcaaggtttttcttcttcttcttaaaatcagtgttctggttggcctttggtttccagtttgtcttgtttttgtttttcccaccagatttgccttcaaccacgttggcattagaggtaccactatccattggaccagaacggggtacatccttagatcttgccttctcctcaacatcaagagtagcaattagactttcaacagtcattgcctccttcttgtgtttgagagccatggcaaaattcctccaagtaggaggtaatttggcaatgatgtcaccaaccacgaacttgttaggcaagacatagtcaaagtgtgcaagttcccccaccagaagctagatttcatgagccggttccacgactgaacggtgatcgaccatcctgtattcatggtactgctcattaacataaagttcacgtcc

SEQ ID NO: 72101 - DNA, 452 bp, Zea Mays
tgggaggttccgtcacaggggcggtgcatgtgataagctttatggcaaattcaactttcctttcaggtggcatgcctggtaactcttcagggaatacatcggggaattctgacacaatcctaattgcctcaatcggattggactctttctcatctactgataaatggtgataggctccttcttctagttcaggcaagtacagcttagttactacttcctttccggatggggacaccaacttaactgttctcttgtcacaactgacagtggcttggtttctatgcagccaattcatccctaggatgacatctaacccttgagttcccatttctactaggctagcttagcggggaagtctatcccccttatttcaatccttagattcggacagatcctatcggactgaacttttccccaactgaattaactcttaaaggcgggatcattggttc

SEQ ID NO: 72102 - DNA, 432 bp, Zea Mays
gtttatttagataaaatacagggtctcttttgcaattgtgttggccgaaggggtatcacgacatgtgagccgtccgatcacccgctgaaggctcggtttacaccagtgaaggttataacccgatgcgcattgccctccctcagatcacccaccaaggctcatgatttaaaataccgagatataatctaacgccttcaatcactatccgacggtgccagcccaaatagacctcgccggttcgtgtctccaatcttagtcgtgcatcatccgatcgacgacccaatgcactcgagatccgtttcgtccgtcgaccgccagattatgatcctgcggccaagaagtcgtcttctatccacagcgcccaaacctgatggcgacctgataatcacggcggcgtagctcccgccgcgagcgatttccatgatccactgc

SEQ ID NO: 72103 - DNA, 662 bp, Zea Mays
gcggacctgaggatggctgaccacggtggagtgtctcacggcggcgacttcgaccgatttggggaaataccgaattcgggtgctatggtgggtaatcggtggcgaggagcggtgctcggggttcgtaacaagctaatggagcaggccagggcatcaatttatagtgattaacaatggtggatccaaatttggggatgaaagctggcggccggagcaaggtgagtcaccggagttcgcataatgtggcattcactgggcaaaaggttacgaccgtcacctggttatcctcctcaacccgcgacgatgtggtagaatagcttaaggagtgtcgtgatcgaggtaaatggcggcacgacaacgacggtcgcgtggacacatcgccagtgcaagtgggtacggtgaagccggctcaatccactccccctccgatcttttcacgtccgcggtaatatcctgcccgagctgaacacgaatcacggtggacagcacagatcgcagcgcggagattgctagcagcgaagttcattgaatctgatcttgttcagttactataccatcgcgaacacccatcagtgcgtctgacagagcaagttagagggctttgatctccaatttctatgtagtaactcactaatccatctgtagcaaagttgttgtccaat

SEQ ID NO: 72104 - DNA, 439 bp, Zea Mays
gggggttctgttaagctgtggtagttcagtgttggtcaaaaggaatctgaagaagatcacttcgtctctattagtgttgcttgagttttggataaagatcaagtagagataagtaactgaaggtctagaggcctcacatgctgctgggaaaatatctagtttggactaacttgtgagcagtgagcagtgagtgttaatcagttttgtttgttgtctacacttgaatacaaaggaactacttgtgtgtgttgttgaggtgtgtatgaagtgtatggctgaaggctggagatctcaccctcggctagacataatatcaagcctgaaacctctttgagcctatcctcaagtgggatatttgtgggttcccagctgccctctcttatctgcagtaggagcagtgacggtcctcacaaattagaggctcggggcaagatttaat

SEQ ID NO: 72105 - DNA, 469 bp, Zea Mays
tttgcacatctttattaccttatttcttgtaactcgagtcgaagtgtcaagaatcttgaccggatactccgtgtatgtcaaatctccctgaacactgagctcttccattggtaactgttcctcagggacacggagacacttcttaagttgagacacatgaaatacattatgcacatcagatagattatcaggtagctcgagttgataggccatctctccaactcgcctaaaaactcagaatggtccaatatagcgaggtgacaattttcccttgactttgaatctcctcattccacgaagtgatggcactttgaggtacacatgatttctttcctcaaattccagtggtcttctattatcagcgtagctcttttacctggtctgagctaccctcaaattctcccgaattatacggacttgttcttctgcttcttgaataagttcaggtctaagaactgtctttctccag

SEQ ID NO: 72106 - DNA, 599 bp, Zea Mays
ttttttacctaaatccggaagtattcaccaaatcaaatcctatctaaatattgtatccgatattattttggttcaccactttattgctcttttaaactgtaaccctaaaatccgtatttatctatacactttttgttaaaaaggaaaagaaaagaaaaaatctatatcattatcgcccaccgcttaatgtgtttagtgttcttctaatcccagccgtactctattcatcctatcaaaaagtccctagaaacccatgtgcatctcctcccagtttgtgcacgtcgccgcccttgacagttagccggccttatccctctccttaaccaacagccaccgcctctctcctaatccctcacatctccttctccctcgacgcaagggcacatctatccctaattcgtttccacgtgcactcctcgtctcctcctcacggctcgccaccaggcgccgcttctgcctccacacacgtcggcgatctaggcgcctagatccttatatcagcccatgtcaccctcaccttcgctaggaccgtgtgccgcgaggccattgcgcatgtttccctgctcttcttgcacgtattctagcgcgcccacctctcc

SEQ ID NO: 72107 - DNA, 586 bp, Zea Mays
gtggtcggcatggaagcggtgatgcagaagatgctcgacgaaatggcgaacatagaatcacacatcacggacgcgatgtgtgggcactgcgatgacttggagcaccggatggaggaagcataacagaaaaccgaagcccgtctcatttcccttgagatggaccaaggcgagtttgcagggtggaagccaacgctggagaaacatctcgataacctactgtttgaggtgcaacgcgcgaacaagttcatgaaatgcgaggcgttcgaccatgacttcacgcaatcgggtcttctccaccctaacgagtcggcgaccaggcgcacatctgccagggttcagttcgtcgacgggccagatggccaccgtgacgacaacaatcaacgggtacacgagtggggtagaaattttccccacactcatgtcctggtcaacaataacttccataatcccatccctggtcgtgtgaatgatacgttcatttctgggcatgatcgggagtcccaaggtagtctgtcgtgcataaactttccccacttcgatggcgacaaaccccagttgtggaaaacttgctgtgaaaattactttg

SEQ ID NO: 72108 - DNA, 286 bp, Zea Mays
gggagacatcattattttgtagagcattggagtactcattttggaataggtttggaatggcaatatagtgctagttcaaaacacatcatttcagcatgcaatctaaaatgcacttgatctaggtctaatgcatgactacaaaaaatgaccatcttttgcaaatagcaaagctatcttgagattaaattgatttctggttgcatagggacacagatccgcacaagtaaaatatttcccatagttccatttcttaggtagctgcataatgcactatgtagaccctgtt

SEQ ID NO: 72109 - DNA, 434 bp, Zea Mays
gggaggttaccctgtccttaacaagaattaggagatagagaggatgaaaggtggtcggttcagtaaaacgctgaagatcaaagcactgtaaatatctgaagaacacggataagatctgaggcactattgaaccggatgtgctcgagtgatccagtgaaggcagtcgatcatggagagataacttcggacatggcaccatcccgcgaacccagccgtgcgtggccggaggtatcccaccagcggtcgccgtggctcgatcacttccgccgcggtgtcacccatgccttgttttccccttactgtgactcttctctacgtggttgccatgcgtgaacaatgcaatccacgaccgctgatcattagacggaccgtcgtggctataaatagtgccatgaaccacgacgaggcactcacatcttcaccagcgagcttgc

SEQ ID NO: 72110 - DNA, 1048 bp, Zea Mays
gttcaatgtttcaagggtagtgacacaatctccatcgagaaggtccttggttgttgactcgtcgatatttggtgtagctgtggcgtttgttcgtggtgatccatgctttagttcttgcggagtcatggctttggatcagtacattaatcggaaaggagtgaatccggtggccctagattctgttgtgttgagtgcccaaatgacctcaggaagttgctcgccccacttgctctttttcatctagaagtctcttctttatagcgctgaaacttttgccgttggcacgttctactaccccgttggattgtgggtggtagacagatgcgaacactgccttcgtgccaatggaattgcagaattctctgaagtcttgattgtcaaattgtttgtcgttgtttactatcaacttggacggaactccgaagcgacagacaatgttttactagaagaacttctgttttgtcttcgatgttattgttgacacagcccgggctttgatccacttagtgaagtattcgactgcgacaaaagcaaattttaggttgcccgcgctattggcagtggcccaacgatatcgagtccccaacgttgtagtggccaggtgtgtgcgatgagctttgtaaactatgaaggggtgcccgtacgaggtgaaattttttggcatgcttcgcacgagcgaaccactctgttagttgtgcacacaatgactggctagtagaaaccttggcgcatgactttagtagtgagagctctacgtcccgagtgtgatctgcatgttcctctatggacctagcaaagttctatgccttcgacttcagttatgcattttagcataggttggcttattcccttcttgtatagctgtccatcgatcacagtgaagtcacggcatatgtgtctcaaccttttgcctttgctttggtcggaggggtgatagtgaccttgaaggtataaggtgatgggtgcccaccagtcttcggtcattatcagatttacgattttgcgcccatcgaggtcttgtgttatctgtaggccttcggggtttctt

SEQ ID NO: 72111 - DNA, 329 bp, Zea Mays
aacacgagcatggttactacatattgtttaagactttaaatgcagtgcaaaatagagacaattcacaatgtttcacttctcttctaataatcactttcgcatggacttgtgctcatcatatttattttactttcagcctgtagcgttgaaaaaaatgcatacaatctcctaggactgtgaatgcaaaagttcagttctaggggctatgttgcttatttgctcttgccgatctattctagatgattagtgcaggtactaagtgatctggtggagactgtaagactcgttgatcaattctagatgattggtgcaggcacacttgacatctg

SEQ ID NO: 72112 - DNA, 495 bp, Zea Mays
tgtagaacaagtatatgctgatgcatcatgatgcatcggcctgtatcgctgtggctgatgcccctatactttggacctatgcgactgctacatgtctcacatgagtagatttttctgattattagttcataagtatagataaaaagggttccattcctgtaatgctagagccgatggagaatcggctaaaacctaaataaagtttaaatgataagtacacacaaaatgcatgagtccctggtcacggacatttcggcttcaaaggccggatggtccagtctttcacaaaacagttcggtctataagaccggacatctaccatagcgtaaggacagtatcacggatgatccagccctcgagaccggagagtccgccatcacacaaagatcatctggttcctatgtgggagacatgatagaggaatttagagatcttgataaattaggacaggggtttacattggccgatcctttggaggagatcgacatatgagat

SEQ ID NO: 72113 - DNA, 363 bp, Zea Mays
tgagtagaaagagccaagtcaacatgatggtcgctcacctgatgttgtacgagctagcaaaggaattcgacaggctgagtctcggatttctaaacaacattcaaggagtgaccgttgagctagaacccactctagagcaagatattaggaaggttcagaaacacgatgagaagatcaacgagattcgacagctgatcatagatgggaaaggcaaatactttcatgatgacgcagaaggagtggtatggttcaaggatagactgtgcgttcctgacatcaaatcgatccgggaactaaatctcaaggaggctcatgagacagcgtattccatacaccctagcagcgaaaagatgtaccaagact

SEQ ID NO: 72114 - DNA, 1314 bp, Zea Mays
ttcctcgatattattctaaattatagcctaagcttgtctttcaccatggtaaattcttgaaaacgtctgatgcccgcccgccataaggcacgctagacagagggagcccacaaccacctgtggcaaaacacatgcataaagaaatcgtaagcctgcctctagctgccttggcgtttgtgcatcctggcaagccccacctacaccctctgccctaagatagcctagtcgtgcacgccgagctgctatattaaagtgttgggttgtagaccttgaagtgatacctcagtgcagaaatccactccggcaagacctcgtgcacttgcctgagcacacgtcagtcacttgtcacaatcacaactaaatgaatgcccccaccataagccaagttaccctgccaacctcaggatgttgcgactacactgtggcaacgttgccactcacagtacgccggtcaagactccctccattataaatcgtcgttcctctgcctataaatattgatgcccttgccgtggaacctcatagtccagccaccatctcacactcacccccacatccgaacaatgtgtgccttactcttcaaaccaaagaacaagccatcaccgtcaatttgagtcgtaggtgagcacgccatgatcttcgacctcttcctccctcgaagtcattcttaacctatataagttatgaccttatcattgaaaatatgcaaggaaaacctcgcttaaacaattgtcatataataagcacaaccaagtttctagaagcttctacaatattcatgataaaccttaatcataagcaagacaactttctaggaacaactatggataaccacgatgtacatagccttctagaactccctacactaatcatgataagtcatgaagcatagatatttttagacctctctagaactatggtgatgtgtcatggtgaggtgtccccccatgtaaggtggaggtgacacatgcatggtgaggtgtcacttatccatggctcctaggttcctatataaggatgtgccccctctttccatgacataccatcccactcccatccacacacattcaagggcaaggtagaaataaagtagtgttgaagtataggagcccttgcataatcatacgtgtccttgttgtaagtattctgttatgctataaaatttctatttgcttagtgcataagttttgatccatctgaaggagtgctctgcctcccgggatcacaaggcttcatctataggagtgctctgcctcccggaagccagcttcatctgtaggagtgctctgcctcccggaagcaaatatggctggc

SEQ ID NO: 72115 - DNA, 304 bp, Zea Mays
aaaaattgagtagggtatgtgcaacttatccaaacacttaaaccttatgtttatattggtttgctcaaagttgcacttatggccctttaattcagctcatgcggacttgttgccttcaacttccttttgctagaccctgtgctcatgcttatatccaagtggttagtctaatgtggtgtattgaacatttaatcaccaaaacaactataaatggtccaatgtcacatttccctttcaaaaatcatgtaaagtagtcatcatccaaagtaactgcaagcaacggctagcggtagcgacatactca

SEQ ID NO: 72116 - DNA, 600 bp, Zea Mays
caagaatattgcaacgatgttttagcttgaacaagttcatgagcccagaggacccttgtggcatcgtcctcaccgaagacaccaggagtgaaatccccttgctatgcacctttttggagatactcttggggactgactagaagtatgactctgatgtggctaacaactacttaaggcctaagtgctttgagccttcgacctacaaggcgaacatcatttcttcaatgagcctaaggttgtagggtcatgcccctagacctaactttggataatctagccatctaccttcaagagaaggacaagcacttcaaagcccaataaactaatcacaaggccaaacacatcaagcttaagatggataaggagaagatggagcaccaagaggcaagcattgcacataactgcctgtacattattaagctaattcaacaatgacatggggttcctagaccaggatgtttctctcgagtggcatacaacatggaggccaccacttgcgatctatgtgacaagcgtctgacacgcttgaacccaagtactaataagaatatttaggagacctaatgcttccttagcatcaccctcgagaagtagataggg

SEQ ID NO: 72117 - DNA, 373 bp, Zea Mays
aactatttgccaaatgaatccaaacagggcggccatagtacatagattcaaccgaagaaaaccccccatcattttcatcacctaaatttcaacggactgaatttggcacaggttttcttgcactccgtcagcctcattgctggctcgacgtagagtcacgagacgccatctcgcgacctagctagcaacttacttaggcatcttgcattcttgcttatcagatgagtctcccatgctactaatcagtaaccaatactggaatgtggccgtcaaagccatacatacacacgaagatgctttgatatacgaatgctgcagtcagccatactgcccccgccaaagtctgaaagcgtaggagccatgtgcgtgcgcg

SEQ ID NO: 72118 - DNA, 622 bp, Zea Mays
ggtcaagggtcaaaggtgataataggcaaggataaaaaggaagaggtaaatgtgcataaaaaaactaggaatctaggtacaatcaagaatagaaataagataagtcttgcaagaggtaaagtataggatataaccacgggtgagataagtaagagaccacgcttgaactaaggtgggagattggaggttttagataacgaacatagcgtaatcaccaagttaagattgagagatgagaagggtaaaggcaataagaagcaaaagcacaacaaaggatgaggttacaaactcgcgagccaaagaagaggatacgaccaagagaaagaaggtatgagatggaagaggggcgattttaaagggcaggtatgagacaaacatcaatgtaggatatagaggtgtcaagggtgcatatgataataattaaaaagcataacaaatgatatagttaagatatgactcgcgaaataacaaagtggagaaaacaatcaaggataagatcggtaaggttccaacagaagggttgaagtaaagattcattaccgagtggagttacaaggaaacaacgagattactataggtgtgcaaaataaaatgatcactcatggatcattaggaaacaagg

SEQ ID NO: 72119 - DNA, 364 bp, Zea Mays
tctttttggtataattaccaagtatctccattgctcatggtttcaatcatctccaaccattcgttgcaaggtttcttgaattgtttctcaaatttaaagcgataagggagtcgtacaagctcatgttttccccccttctttcttcttcggcatccccgaaccgctggaagttggaaatgttttgtttgccagatattcttgtactaagtccctagtactaatctcggcggccaccactctaaattcaacttcggctacctggcatggggagccaagctgcatatggcacaagggcctagtcattctgaagcttaatttcatgggcctcatgaccatggtcatcaattttccccttctcttctcg

SEQ ID NO: 72120 - DNA, 1424 bp, Zea Mays
cctcggtgtattcttgaaaaaaaataaaactagggtctcagtacagaaactacaatgcatttaccatttcttctatgcctttctttatgattttttccaggagctctgaaagtacaagcaacttgccaaagcttagaagaaatgcatctagttcctctgatatgagtagcatggcttcacaaggtccttcaactaatacaggtcataagatgttcttttgaaacacttgtagtggcactggcacatgattaagaattcatgtccctggattctcaattttcctgttcgctatttatgagcaaactgcaaggtcacaagctctaatcctggctagggcaatataataaaatatttgctccttgctcctaatccacatctgaggcatgggagagcctccacatgagggggttgacgtattaagtgaatttccaccttttcccgccatcttaagcttttgcgttgaactgatcagcgcatgcaactgaataactgtctggggtgtatactcaccctctagtgtttagctcctggtgtattgttgatgttgcttatgtgcttagcatgttaaatggttgtgtggctatatttatgacttgcaagttagattgtcttgatctagaaacatggttgtaacctgtaaagcaccagttgatgagaactagggttatttttgctcccttctgtgcacttcattgctttagtattagatgtctcaatattttaactgaagtgagtgcttatacttttacattatatttttccccggagataatactgtgcatgcaaatagttaaacataagcaaacaagaatatctgaagtgaataataggctggaggaaacatacaactcgttgcagctgttaccttcgtaattcttgctgcattgtcgatttgatttataaatcttttctgttctcttggtgatgttcgataaacaatgcagctcctcttagacgcacaagcagttggacttttgatgacaaaattttagtacaagcgttatacaaggttcttctttcagtatcaaagagctaccctattgtactctatataagagatgtcgagaagttccttcacaagtccccaaaaatgtatctcctgtttgaaaaactattaaacaaacttgatggaccggtgttagtccttggatcaaggattgtagatatggagagtgatgaggagttggactacagattgactgttctgttcccatataatatagaaatcaagccacctgaaaacgaaaaccaccttgtaagttggaaatcccaattagaagaagacatgaagatgattcagtttcaagataaccgaaatcatattatggaagtccttgcagaaaatgatcttgaatgtgacgatttaggctcgatttgcctatctgatactatgtgccttagtaagtatatcgaggagattgtgg

SEQ ID NO: 72121 - DNA, 413 bp, Zea Mays
tcacgatttatgattaaatccacccgagccagaaccctagcacgatcagctgcacgcgattttcacgccgtaattttgggccccgtttgctgttacaaaacagatataggatttacgctaaatttcgtattcatttacgttgttttagctcacgttttacgctggaatctgcccgagtcagaaccctcgcacgatcggctgcacgtgattttcacgccgtaattttaggctctgtttgctgttacaaaacatatataggatttacgataaatttcgtactcatttacgttgttttagctcacgttttacgctggaatcggcccgagccaggacccacgcacgatcggctgcacgcgattttcacgccgtaattttaggcctcgtttgctgttacaaaacatatataggattta

SEQ ID NO: 72122 - DNA, 277 bp, Zea Mays
tgagtctcgggatgcctctataaaagagcaaatggctattattgcaaggttagcatttttatttaagcaacaagtgtacatgttttgtgatttaattggcttctatgtgttgtgatataggtatgtgaacaacaaaggctatgtcatcgaaagatttttgggaattcaacatgtttcagacacttcttcaatagctctaaaggaagctttggactctatgcttctcagtcatggtttatccatacataaaaatacgagggcaaggctatgatggggc

SEQ ID NO: 72123 - DNA, 631 bp, Zea Mays
tggaagctcgatagctgagggatatatccaattgagagatatctacgtactcttaaaggctatgtatagaacaaagcgcaccctagaagctcgatagctgagggatatatattagaggagtgcatgccattttgcagtcgcttcttgcaagacgtggaaaccaagcataattaggtagaccgtcatgaagctactgctatgaatgaaccaccatctagcctaagcatatttgccaacattgactacactaagaaaggattcaccgtcgagtcactttctaggagtgagctacagcgaatgaggcactacattttacaaaattatgttgaggctactccatggataaagtaagatcttatttcaaaatctatattttgatactatgcattggcacgtttcatagaattttagttacctgaatcccccttttaaaatattgtagcaagcatatggatgaactaaaaaattaagtacatagaatgttgatcaaaggcacaaggaacaatttgtaggctggttcgagcgaaaggtgggtgtgagtaatttgttttatttgtaatgtcatccactaactgttgctcagtattatatttgcaaataacataaacataatttgttggctacagatcag

SEQ ID NO: 72124 - DNA, 385 bp, Zea Mays
tgtctagccattctttacaaggcttcttgaattgtttctcaaatttgaagcggtaagcaagtcaaacaagttcatgcttcttccccacttctttcttctttggcattccccagccacttgacgtaggatatgttctattcgccaagtattcttgcaccaattccctggtactgatctactctgctaccactctaaattccactttagccaactgacagggcaaccccagttgcatattacataaaggcctggtcattccgaagtttaaactcagaggactcataaccatggtcatcagcttcttcctctctttctcgtcagccttcacatagaaccactcatttttccaactagtcgaccacttcgtgtggtagctcaggactgg

SEQ ID NO: 72125 - DNA, 914 bp, Zea Mays
agtttatgtaatgttattaagaaagtactgaagaagtctcttttatgtcaagtggtaagtaaaaatgtttagtataatgcgagacttgagtaggtttttagggtcgcaagaatggagtcttgtggacatagaccgcttgagttgattaaggaccatccattgttgacattggtttgagcaactttattgtgataccacatatcctcttatggggaggatgagctgattaccttagttgctccactcttacggacatgatcctagacatgtggtcttgtgtgacttggtagaggatgctagggttgtcccctgtggacctaggtaggcctccacatgagctaagcgtggattcgtatgttcggaactctttggaaaaagttgacaaaagtaccccttgttcacagtggatgagtcgtatggtccctttgttgtgtgggtaaagcgaaagggaaataggcctaaaaaccatttccacacttgttttggtaattgaaaaccatcacaaccaatcgagctaactaatttgctaagttacaaattcaagtactaagaaaatacttcaaggaagatcaaccatcaaaacagcatattacagaccgtccgaggctctagtatggactgtccgggataacgtagatcatcccggacaggaactttttgaaaataccacatgtattttgaaccatccgggccctcctggcagaccatccgcgacacctcgatgaacttcggacaggaactatgccaaatgcacacctttactatgggctgtccgaaggaaagtcgagtatcgtccgacactatgcgcggaccgtccggcctcatgcgcagaccatctgcccgttgaagatcaatccaacccaaaggtgttggatttggtaaaatgatttgtagcgttcacgcggatcgatcgg

SEQ ID NO: 72126 - DNA, 700 bp, Zea Mays
ggctggagtttcaccatgtggaaagagatcgcaatgctgcagcagacgcattgtcgaagctaggatccagtcagactcatgtcccacctggagttttcgtccaagaggtgccacacccgagtatttgctcagatcgggcagaagaatgcaatgttttgagctagccagagtcagactctaatgactggagggagcctattattaagtatataaaaaatgaagaggagccggatgataaagctacagcggaacacatcgcaagtcagtcagcccactacaccttcattggggacacactgtacagaagaggcacagcatgagtcctcatgaagtgcattccttcggtcactggaaaacaactgttagatgagatccatgccggacagtgcgggatacacgcagcatccagaactctagtggggaaggtcttcaggtctcgtttctactggccgacagcaaaaaatgatgcagccgagttagtccagaggtgtgaagcttgtcaattcctatcaaagcagcagcatttaccagcacagcaactgcaaaccataccattgacatggccatttgcgtgctggggactggacatgatcggacccttcaagaaagctcagggaggctacactcacgtgttagtcgccattgacaaattcactaaatggatagaatacaaacccattgcttctctaacttcagccaa

SEQ ID NO: 72127 - DNA, 1146 bp, Zea Mays
ccgaaaacccgaagatgttcatacgaggggtgtttgccaagtaaggcgaagtggggtgtgccgcaagtaagtgtcttggtgggaagaatatttaggagatatgtggcagtaccaagagcagcagcctagaaagtgggagggatgctggcttggaagagaagcgtgcggacgacattattgatggagcgaatgatgcgttcggccttgccattttggggggaagtgtaaggacaagacatgcgtaaaagaactccatgggtggagaaaaaatcgcgagcgttgaggttatcgaattcgcgaccattgtcacattgaacaccctggacggtgacaccaaattgtgtgcgaacataagcgaaaaaatttgtaagggtggaaaaggtgtcagacttaaggcgcaagggaaatgtccacaaatagtgggaatagtcatcaagaatggccagatagtatttatgaccagacacactagtgattggtgaagtccaaagatcacaatgtattaattgaaaatttcgagtggcatgtgatgaagaagaatggaaaggtagacgaacgtgacgtcctagctggcaggcatgacataagggggtatttttattcggggtacaagggatggcagaagactgagctagctgagtgaggactgtagatcctggatgtccaagtcgttgatgccacaatgaagaggtggtagcatgaagggaagatgttgtgctcttgagtgggtagagtgggccggagctatcacaccgaaggatcacgcgccgagtgggaagatccttcacagagcagccaagagggtcaaattccacagaatagttattgtcagtggtgaattggcgaacagaaattaaatctttaatgagagacggtgaaagaaggacaatgttaagacaaaaattgtaaggaagttgagtggtgccagtggaagtgacaggaagaaggttgccattgccaacaacaatgttagagggtagatgattggaagaggagaggtgggaaagtataccagcgtcggaattcatgtggctggaggcacctgtgtcgaagaaccactcttgctgttggggatgttgaagagtggtggtttgaaaattggtggcaagttgttggagatcccaaccaggagggggtgcagcagcg

SEQ ID NO: 72128 - DNA, 381 bp, Zea Mays
tatttattggggtagtgtaaagtttatatgcatacttcctgtatatagaggttgatgctatttatctaatgatagtggtaaggcttagctaatagtatgatttgtgtacggtgagttgcatccgttcacaattctctttctcacatgcttctcttcctttgattttggatatgccattaagtacaagaacaaacaccatttactgctcaaatagaaaacatcatctaactatcaaatttctgcttcaataaaattcacctacaacgtatatgtgttcactcgactgattatccagaagtcatgatgtttcggcgattttgaatttttgtgagaattgtacaccagaatttttgacgccttacctggatggaatcgtgaata

SEQ ID NO: 72129 - DNA, 340 bp, Zea Mays
ttgcaacacatcatcagtccatcatgaagtgattgaagtacgtatggggccacacactcatcttggatgcccatcttcaacctcccgtgcagtcatgcacacaattagcttccccatccccgagtactagtaggagtaggcatgcaatgcaaagtgccaaaaggcagagcgcaaaaactgcacaaggctacaagcaaagcgcacgccctctcatcatctcattcccatggcgacttgtctgaacaacaactaccctagtagcaaatagcagtactaaaatcaccacgcatttccatccctcctgtccgcagaaaagtccgacgacctgcagcgtattcag

SEQ ID NO: 72130 - DNA, 665 bp, Zea Mays
cccatcgccgcaacctccggtggcacgttcggatttagctggtcatacaacacgtgcacttcctagtgtagagcattattatacacttgcagattttctagggctacgcttagctcttccacccgggctcgggcagtcgcctcgcaatcccaggctatagatcgtgaatttacagcccagtcaatagccctatcccgctccataatctcccgctgcaaacgctcaacctctgccgataactcagcgatgcggtgactatcatgcgcacactccctgcctccatggcgtagttccatcgttagacgttcaagtctggcctccagatctcctatgggatcattacttccactaattctcccctcatgtcgaggagccaactgatgacgaggtacaccctgaggtatggtcgcctttcgaagggtagtctttgtgcgtgccatgtctctataagaggggaagattacttagtattgtttaaatatgatgcatgcatgacctacaattatggaatcaactacttgttgatcccatacctcctatatataacctattattttgcactattttacccgacttctcaaaagataagttgctataagaaaggatcgaggtaagaatgaaagaatattcaaaggtaagtattttaaaatcttttgaaccactaa

SEQ ID NO: 72131 - DNA, 745 bp, Zea Mays
ctgttggaggagagtgccttggaggcaggtgccgaggtattcttggggccattcaccgagttagagtaggtaggtcctggtgctttcaactgggggcagttattcttgaagtgactggggtctccgcagtgccaacaggcatttgctggtggttggttgcttgtgaccgagagggcctgaaaggagctctgactctgtcggctgaaacgtgacggagtgggtctagctggtctattgaagcttggtcccttgggtggaaacccgaaggatcgagctctctggtgccggtcttgctgctgagctcggagaacttggaatttcctcttgaggtgacctttttcttcttcctttgccctttccacttgtatggctttattggagaggtgcgagaagctgaggaaatcttggctggcaaggatggtcttgagttctggtcttagtcctttcagaaaacgggccatcctcttggcttctgggctgacatcgtcaggcgcgcagcgagccaattctgtgaatttgtgcacatactcactgacagatcctcctccttgagttagttaccaaaattcatcttccttgagctgaacgatcccctagggtacatggtgctcacggaaagcagtttcaaattctgcccaggtagcatctctgacggtagtgctgaaggtatcccaccatgctagggccatcccggaaagttgatgagcagccaattgaacacgttgattttctgggcacccgatgg

SEQ ID NO: 72132 - DNA, 528 bp, Zea Mays
gggaaattccgcttgcaactcatcttcttgctccgaggtagcttcatcttctgtgtgatgactacactgcaccttgcacattttgatcaccttgtttcttgtggcttgggtcagggtgttgatgatcttgataggatactccatttaggtcaaatcaccatgcacactgagttcttccatgggtagttgttcctctagatctttgagacagttctttaactgtgagacgtgaaacacactttgcacattagataagtgatcaagtagctctagctagtaggccacttgcccaactcgctttacgatccaataaagagaggcgacaacctttgactttgaatctccgcatacccctgattggtgacacttttaggtatacgtgatcaccctcctcatactccaactgtctcctccgggtatcagcatagcacttctgtctagactgtgttgttctcagattttttataatcatctgcacttgtctttcaatttcctgaacaatttctggtccaaacagttggctctctc

SEQ ID NO: 72133 - DNA, 641 bp, Zea Mays
ccctgggtaccgcgcaaggaaggaagaggacatattccaattgggattccccatatatgatcctactaagacttctcccttgtaatcctactagaacttctaacttgtaaccctattaggtctcctgtattgtaactgactagaaaacttgtccatatgtaatcgtactagaacttctaacttgtaatcttgttaggtctcctatattgtaactgattagaaaacttgtccatgtgtaatcctactaagacttctaccttgtaatctactagaacttctaacttgtaatcctattaggtgtcctacattgtaaccgactagaaaacgtgccccttggactatataaaggaggacatggctttctagataggcaacgggacacacaacaaaccttacatctcataatccaatgaacccagccatgaaccctgttcttcgtgactgcgtcgagctccacccccaggccggccatcacgtgcccatcacgtgcccggaccccttgtcttccctcaggctgtgatcacctccctggcaatcgagccccccaattttccctcccctcctattggccctgttggagcaccttccctagccctttccgcgcacccagtggcttcaccaccctctccctctctaccgac

SEQ ID NO: 72134 - DNA, 704 bp, Zea Mays
tcgtaagccttgggatcaccaaccatgagacatcttgttggatcgggaaagtcttctgtgggaggtcctgctccgccatgttggctacttccttgggcttcgcctttttgctgggaggcttggtgataaagcgctttagaacctcacactcgcacagtttttggtggacggggaagttgtggttctaacacggtgcatccattagtttcgggaagtggtcaccgccatgttctacggaagcttcattcccgtcgtgatgggcgatccgtagtggcgacttcattcatgttgtgtcaggcatggttgctcctatgtcgcttgtcggggtgctcctgatgctctttttgtacaccgcatgtgtcgtcggcgtcgtgtggggtcttccgcttgcggaatattgctcctactgcatcatctgtgtcagcaaacttggtcgcgatgtcgaggaggttagtggcagtttttggtcgtccgtcgcttagctcgtgaaccagtacctcgttggtggtgttgtaggtaaaggcactaaccacagtcggtgttagtggcatcaggtagttcgatccacttctaggagaaccactgaatgtagtcccagaggctttcccgctcttctggatgtatcgtttgaggtcccaagagatccttgggtgtttgtaggtgccatggaaatttccatgaaggccttcttgaggtagtcccag

SEQ ID NO: 72135 - DNA, 657 bp, Zea Mays
cgcgggacgctgcccgggatgaccccaacccggcgtcgaacacatcagcacaaacatccatcgcgtcaccatccgccggctctgataacagatcctctggaaccatatcttcaagagtttgatcaaagttcgccagagacaattcttgtagaccaatgagggcagacaaagtaggagaaggaattccactactttccccactagctacgtagcgccgactgttcttccgagtcagaggtatctcatcttcttcctcctcctcattttcatcagcaacacagacagcacacccattgggtccagcgtcagatggatcacacccattggggccagcatcggtaaattcaggcatgggcacttcctcaacagcaggagccgaaggaccagcatcccgatccaagctagatactcgccgaagacgtctctttttctttttatgctcatcggcagcagaatcaagttgattggctcggcaagggcgcttcgggcgaacactgacaggcctctgaatatccaaggctttaccagcttcagggagaggcgccaccaccaatgttccagcaggagcagcatcagaagaatcctcggctaacatatcaagcatggcacttatctctgcatcactgggatccaaaggcacctcaaaatgaacctgcc

SEQ ID NO: 72136 - DNA, 353 bp, Zea Mays
cacagttgctggtaccaggcctgaggttccagcagttgacatcatcgaagaaataactcaaagtttcaacgtcaatagagctaacatgtctattcatcggaccttgccggaagatttcttggtgttttttcccgatgaagatacagtttcaagggtgctcaatggaggaaagatctttagaggcccccagtttgatcttgtgttcaagaggtggacgcgctgtgcgaacgcgtctacgacatctttaccagtgctactggatgtggagattaggggtattccggcacatgcgtggtcaagagctaccgccgaacagctgctgcgtgactcatgtattatcgatgaattacacc

SEQ ID NO: 72137 - DNA, 798 bp, Zea Mays
aagtttaccagattcatcaacgtgagcaagtaaatcaggccaaagacagtaatgagttcacttatgaccagtctggaaaaatgcagagagaccatccatggacaccaaatcaacataacaaagagaggaatggtggaaggagtggctcacctcgaataggcgcagaagagacgacctgcgcgtgtctgcccttctgctacgcagcagatctacaagaacaacatacatcatgagttccaggaaccgagacaagagaaattagcactggaagaaatgaacggacgacggcgacggagtcgagaggagaaagcgcttccgccgggtagcaggccgacggaaagacaaaggcaccagcgaaggggctccacatatgtagtagaaagcagagggatgggcgctacgacgaaggacagaagaacagcgatcctgcgctgttggaaaagcacaggcgacgagacggatttgtgggattttaaaatccgctgaacagccctcacctaatgttatgggcacagcaccgaagcacagcgacgcgcgacgagctggacagaagacctacaccagcgcactgacgtagccaacggcgattctggaaatctaagatctacaacggcgcaccggcctgtagcactatgcttgcgctgttggagaggctgaggcggcgcactcacctggctacagcggcgcaaccccgcagatccggccgcaaccccgcagacccggccgcctgtgacaccccagtgtcacctagggtttctcttaaaaagccaaaccaagaaccattattttatgtgaacc

SEQ ID NO: 72138 - DNA, 498 bp, Zea Mays
ctgacgctgccggtgttttagaggtaaccgccgagcgatagttgatgccactggtgttttagaggtaaccaccgagcgatgtttgacgctgttggcgttttagaggtaaccgccgagcgatagctgatgccactggcgttttagaggtaacggtcgagcaatgtctgacgcttccggcgttttagaggtaaccgtcgagcgatagctgatgccactggcgttttagaggtaaccgccgagcaatgtctgacgctgccagcgttttagagataaccgccgagccatgcctgaagttgtcggtgttttagaggtaaccgccgagtcgtgcctgaagttttgctttctcgagtagtgacttggcactttttagaaatagtgcccgacccgggaaaccccatttatacttgcgccgacgtgcattttttatttctgagccctaacttcaattttctgcctcgaaccactcctctgcttccctgagatctcgttcctgtccgt

SEQ ID NO: 72139 - DNA, 683 bp, Zea Mays
tcatctaggatcatctgcttgaccttagcctgcatattgatgcactggcacttggctgcaagtatttccttttgcttctgtaggtgattgtttttatgcagagtgcgtgcagcttgagctggtcttcagcagagatgcctaggacttcactgtacttgatggtatcgtcagcttccgaggggtgaagcctggcagagggtcccgaggtagtcctttagagttaaaattgcaaacggtgccctccggtgtgggcgggttctcctggtgggctcgcttgctgttgactgctccatcctcaagtgcctcatgagggacaacaccaacaagggatgctttgcccttcctctcaacgagaaaggctgccttcgtcactttgtctagggaggtggtagcctttaaagtttcttttttgggagccatcgcgagaatggtttgtcgaagcacgaacggtgggcaccaaatgttggggccgactgacacgttgtcaggtgggaccaagtaatggaaaataagaatgctttgatgttcagcaacacaccggattagggcaacaatgttgtttagtgtgtcctgtcaaggtacagtgcatgggtatttataggtaaccaggagggcggtctcacccttatcgtcctgtcaaggtacagtgcatgggtatttataggtaaccaggagtgcctaag

SEQ ID NO: 72140 - DNA, 704 bp, Zea Mays
cactttgtcatctagagctaatagggaagagcctcaactcccttgatatgttccttagttcccacacctcttaaatggctggttgggtcctatttatagccccatggagagatgtagttattgcactctcaacattcctctctgcatatcgtcagaccattcgatgcatggtcatcggatcaatgtgtcaaagtttgacgactcttaatggctattatgtcatcagtagctgatatcgaccattcgatcatgctacaccacagtgtatagtccaatgttggtcattgtaccaacttgacgtctcattttcctttctagaacatttctgctaaccatcgtgctccacgtttgttggtccaatgcctatgcataggatggtctaacgctcctctaagcgtgagcagtgggaatgtatggtctgaagcccggtttcactgtggatctaatgctcctctaagcatcaacagtgggatcatatagtctgacgccttctccactattggttaaatgttcggttcgatattcgatccaatgcttttgtcgatatcagctcgagtttgctcggtctatggtctggcaccaccttagggatagttccatgcatatagaaccctttttattctagtttcttcataatcttcacgttcaacttgattccatctagtgccttagacttttgcttgtacttttagatctttaacaag

SEQ ID NO: 72141 - DNA, 392 bp, Zea Mays
aaattaagcaatccagcttttccccgagcctgttggccaagatctttgtcatgaacttagcaaaactgtgaatcaggctaatggggcgaaaatcagcagcaccatgagcgccctccctttttggcaacaatgtgataaaggcagagttgaggaggcgaaggtttctgaagtgaaggatgaaagatcacatttggccacagtttctgaagacaactctgaaatccaacaagattccccgagcattttgtctactgtagacttactccatgcgtgagctgggatgccacaaagttccacatccaccaaaactggcaaggaaacaccagtggaatgagcaaaccgtgaccatttcttgaacttcaactcaaaatccgggcagtgaagcactcttc

SEQ ID NO: 72142 - DNA, 739 bp, Zea Mays
gaacagcacccgcctccaccatgtgggcggccccaaggacgtcacgtgaccagaagaggtgatatactccagaatgccatcagtgggtccggacctccacgagagagcactagacccctgtacactcaacccggacctccgagtgtggtccgggactcccaagtaagcaagccggaccccttgggtggggaccgaacccctttgactgaggtccggaccacctacagcaaggtcccaggacaggggataccctagcctatgtcaaggacaggcaagggtccgatactgacacgtgtcgaggctatgacctgtgcgcttccgctctctgctcaggcggaggcccgatgctgccacgtggcctattgcccgtgacgtaagccagcgggtgaagcctgacgtaaggtctctgggtcgcgctgcctctgcatttattgcggagaagacgcgccgcctgtctatcccactgatagatgatatgctccctcagcatttaatgtgtcctgtccaccccgctggcaggcggcgcccaggccatcctacagatggcatgcctgtccagtccattgtcaaacagtatgcccgtgctgcgaggtgcactgtgtccatcatcacttatatgttaccaggaaagcttcccctacacgccgatactacgcagatctcggatgtcagggcgcaagaagattgctccagcaacggacattagttgcccccaagtattacatccgttatgtttctg

SEQ ID NO: 72143 - DNA, 1165 bp, Zea Mays
gtgttgtctatggagaagacggttccgtctgggctgcagctttaacatgttcacaactagttttctctaaaattgctgcaacccctcgggcaccagcgaaggcgcaaaaatccccgtgatcgctaagaatttcttcaaaagcttcagcttcttcaccgatccattcaatgattccttcggggtcgcctctaataattttttgctccggttggtatgcacccacctttgcaaaactatctttcaatttcttagcacaatccaaggatttctcgtaatacctctccttcgactcccgaagcacatccacattcttttgcaatcttgagctagtccatttgcttatttcttgtttttctatagccacttcaaaatcctcattctttttggcaagctttttctttaagttttaaactttggctttatgagcttcggactgtgcagcaagattggcttcgctaacctttactctgtctaccaaggaaagcagaattttatccttctctgtggcttcattcctcagtctgataacctctgaccaaaggttcccaagggctatttggcagctttcgtcctcagcatttttttgtgcccttaaagcattgctcaagattaagccctacaaaaaaaggggggaggaggatcagcacaaaaataatctgtttaaaagtcaaaacatatgtaccttcagactgttgtaagcgaggctgtctgcaaggtcatccttcgacattgcagagaggccaacttcgagcttcaaaaaccctatgttccttgccatctccaggcaaacagatatttccttgttgtccagaaggaagtacagaaagtcatcttcatcagtgccattatacaccaaggatccttttgggtactttaattccctagcatagtgtttagcttcagcaatctcctcttccgacaactgtttacccgaagcgtgtcgtatgataaagtctagctcttcagtagacgcttcgagagtaggagatttaaccttctcgggtgcgccttctttttccaagaccagagcggtatccaaaggtctttgttcagtatccttcctaatagtttcaacgggacctatttcggcgggaactgagggcccaacttcggcttcaacacgagttgtaatagcttcggtggcctcctttatatttttctcttc

SEQ ID NO: 72144 - DNA, 327 bp, Zea Mays
gggcggtctcctttttaggtgttttcaataaagatatatgagataatgtcaatttgtctggagctgaatcggttgggagttaaatgttagtttgtttggcccctagattttcacttaatttccttgtgactttatgagaaggcaagtgaatgaacctgcagaatcaacttcacccttaacattagtagcaagttagcaaatcgtaggacgtgcatgtatttggggatgattctactatttgtggaaacaagagcactaacctttgcctaatgaatagctcataattgaggatctccttttccctcaaaagaagtgttacgagcagag

SEQ ID NO: 72145 - DNA, 613 bp, Zea Mays
gtggactgaccgaatcgacgccggactttgggtaaggacctgctcctctgattcgccttcatctcaatttcattccgcggctagcatattagagtttggcgcactggggccagggattgacctcctccggtgtgtgctccgccgtgggggctggaccgccgccgtgtcatgtggtcagagggaggacgatgaactctcaccatcagatgttagttggacggtggtgattagaacagacgatacccgttcgctggagtcatctgggccgttcatctggtctcggatggatgtaaacgatgcgcacttattttaaatctaggccagaagttacgaatccgacggtgacatgtgagggcgggggtttagcatggcccgatctaatcctcgccgttcggatctaatccaacggccagaacggcccgataccccttcggcctgtaagttttgcatatgagtcctcaggttcttaaacaattaacccgccgtccatattaggggtgatctgagtcataggatttcttgcgcagtgacccctgagctttctggaattcggggcccagtccagaggacaaataaaaccagagaaatgcatttaaaaatgaatttttagtat

SEQ ID NO: 72146 - DNA, 453 bp, Zea Mays
aaacaatattaatatgaatttatagcaactggaatggatcaaaaataagttaaaatgagttaaatatggattaaacaagtgtatggaattgtttttgtactaagaatcattttaaaatgttatttgtctatttcctggattgcgcaccaattaccagaaaaagcagggtcctggcgcaagagatccaggacacagtgcacagtcacccaggacggtgggttattttataaatactacagggattcttttagaaaaacacctcgctgaaggggtacggggcactgtgatccgtccgatcctaaaccagtggcccagattagaaattgtctaaattgaaccggtatgtgatcaggtccgcacatcacagtaccaaaggtcagcaacgctctacgccatgatccaatactagccctcggatggaacgttaacggcccagaccaatccattgaagcg

SEQ ID NO: 72147 - DNA, 586 bp, Zea Mays
gcgcgtcatgtccgcgccatcggcttctgctgttcaggattcacggtcgagccccctactgtaactcacgctcctagtctcgccgtcgtctcgctgcggcagcgcctcatcgacctcgcccctgtgaccgtgtcgtcgtcctgaggtgagaccgtcaaccccccccccttcgaaccatatgtaaaactccatcgcggtcgcatgattcgtgccgcgcgcaacacgtctattcgcgcatgattcacgggctgtcgcacgtgtcgtcatgcgtcattcacgtgttgtccatgcgcgtcgtcgttcgcgtgagtcgctgtttgcacgctttagtaaagtcatttcgctatatcgtccacgttaaaataattgattacttgtttagttgtgtattagtaaaataacaattcaaccgaacctaattaatgattttaattatgcgtttgtagatacacgttagtgtgcgtacgccaacttaaatgtcgtgtttaacgcgtagttagtatgaatacgacataatttaacagtacacgtgtatcgcgttgtttataagttcattatagggttgaatgtattaagtctcatgcga

SEQ ID NO: 72148 - DNA, 697 bp, Zea Mays
gttaattcaaaacgatcgacttattcagcatgttctttttctgcagttaggagtcttgtttgcataaagtaaagaggaatcgcaccgagggataggtatttatttcccttttacttggctcgataagtatgactgcataggtgcatattatagagataaatttattgccaaaaaagtgaacaacatttggtgccacatcatttcactttgcaggcattgtgagtatgacgtgtgctttgcatgggccagcacctgactcagttcctgtgaaatcatgaatccaccaacggaggtcaaatacctgactgcagccagccagaatgtttacagccacacatgatgatcctatagctggctagaagaagaagaaatatttacagccatccagcataaccttagagctggtttgaagaggatgcaaccggtgcagctgcacaaatggtcagtatatgtttatcctttttaaaaaatcgccattcttattttctcagacaaatctgagttctagtctccacgctttgcatatgtacttcttatacattattatcaggcagacaagagattgtgctgtgtgtggccctctgattcccaaaaaaaaacaccactgagatgcagtccacttgccacaagcaaagaagcttccatttgtgcacattccaacctttgccaaatgctttttgtctcaattggctggcag

SEQ ID NO: 72149 - DNA, 1057 bp, Zea Mays
gcggctggggatgggtctgcggccgcggtaaaaatcttccgtggtgtggcatcaaaacattgaggtggcgctgcgcggttagtcggcggtcaccggaccatcgccgtgtcgataccgcgcgggtaagctcgccagcgcggttacactgccgtgaacctcatccaactccggccatcgacctataaattgagcccgaatcctgcttcttcaccacatcacgcacacaaggacttgagcaatcgactcaatttcaccagaagaactcacacagtccacaaatccattccgccctgttcttcgcgctgccgtgaaggactcctccgtggccagcactcatcgggttagtacctaccaaattgcttcctgttgtagcttgtcttcaaccttctattgctcttggagccggccaattaaactttaccgaagcctacactccagaacaccaaatcgtttcgtagaacgccgccgcgacgccctctctgtcgacccgctttttctactcttgcctagtccaaattcaagcatgtacataacctctggtgaaaccgttaagcttccccaagcttcaattttgtcatccatgccgtcggttgttcggaacacgtttgcccatccgatcatccgcactgtctccgttgaccggttgattcaaagccccactggtgaaattgattgaggggaaatgggcaggaggggtccaatctgaggtctgccgcacgggagccccagttgttgcggtatccggccgacataggctcaccggagttcggccccgtgctgttcgccgtcggggacctcggcctacgaagaaatagaattagaagggggtttttgtaatgtgtcagttacgcaagaaacagtccgatgggcgctgactaagttaattaaaacttcaggggcatttctgcaaaacctgctgggcgggcgcgcgcgggcgcgctttctctagcgcgtgggccaactcaggccagtttaatcccagtcctgtagcacctttttccttttctttttcttctagacttaagaaattcctagaaaattgtagaaaaatgctaaa

SEQ ID NO: 72150 - DNA, 555 bp, Zea Mays
atttgaattgaaatagaaaatagggaaaaaaagaaaaaaaaggaaaggactaaggaccgcatctgggccaatttccccaaacccaacccaattggtcactcccgcgcagccctctcctcaccttccctttggcgtctatgacatgtgggccccacactgtcagctctatctcccttgtcgccatctccgtgaggctcaaacatacagtcgttgatatcgcgtccagggcaacagaagcgtgcgctccctacgcaactcacccgtgaactccgggccgcgggtgtctcctatctcctgactgcgactcggactcgtggctggcaacggaatccgcggacctcgcgcggcagaaaactcccggctcatggggtcttcgtcctcgttcgtttgctggcaaagctcaacaaatcagggagcaaattccgcgcaagattctcgccaaccgaaccacctcgcttcgttccttggtatataaaaacatatcgcgacctcctcccttcccatcctcgctcgtgccatccatgttctctggaatccctgctcagccacgcaaac

SEQ ID NO: 72151 - DNA, 735 bp, Zea Mays
atgccatttgccatggtacagtaccaggctggggatcagatcgctagcgtagcagcttcaccgccgacgaccgatctccgccgcgattcgtgccgccgccgtttcaatttgtgctcggggtaagtggataacacccggagtacgtcgccagggataaactacagccagtaaacaactccggccgccgtaccaagttcaccgcggcggaatccgataagtatgtcgatggccgccgtcttatggccttgcgccgcatgtctaagcctcgccaccgcatcgccgtgacacactttagctccccgttgatcgccagagtgaatgccacggcaggggacactaattcacgtgcgccagtgctcttctccacctctaaccatcgcgtgtcaccgctcaaattcccggccaccgccctcccatagtataaattgaccacgcccacgagctccgtgaggttgttaagcatccaaccaccaagaattaacctcgctcgttcactagagtgtgcgaattttgaactttccccaaatcctcgcaagaacactttaagagagacctcgccgtggtcagctcagctcaggtccgatctcgccctctatgttgttgttccaacacccttccatgctcttgatgctcaccgaatcgcccaattgaattagaccgccgtgaatcgcttagaacgcgttgctcctttgagtttctccgctgtaaccatgggtagtgtgtggtagggctcca

SEQ ID NO: 72152 - DNA, 434 bp, Zea Mays
gagaagatctccatctgccacaacatttaatgctccatgttgtacattatttaatactagatcgctggggccacctgtcaggacctagcacccttgtacgtgccccccttggactataaaagggagggcacatgcgatatgaaggggacaaggactcattcaccctcagcaatacaactcataagtggatgtagggtattacccttcggcgtcctgaaccactctaaactcgtgtgtgttcttgcaccatctcaggctaaccctaggcaacccctttgttcttaggattaggcgggtgctctctaccacctggctagaatttacctctgtctcccataggtcttgtagttcacttacattcaagaaggatcaaacttggtgtttagacacccaaactttattggggtttactactttctcaaccaatgattttt

SEQ ID NO: 72153 - DNA, 590 bp, Zea Mays
gttttttctggtgtactatggcattgagaggatgatacaccagatgtaatacgcgacttatctaaccaagaatcaaaagaaagacggcgcacaacagggctgtggatatcctccatgcctttcatgactgttgcagcgctcccttggccgatgacgggcgtgatgatctgctggtcatggactccatctgtgtcttccggccggcacacgagattggaagacacctgaactccatccgcacctacgtgagaggagtccatggcggcgctgagggaagaatacgatctggaaagagaatagatcgatcgggtgggttgtgttccgtcaggggtgattagtaaaatgattatgggctaagtggccaaggtgggaggggttagatgtaaaagaggcactgaacgttggattagagatgaaggcttcataattaaagtgctcacggcgcacgtaaggcctgtgctcacaggatacgttcccaacgtgcgctaaaatattagtgcataattcattttcgagggctgttgctgcatgcgtggggtcatttttcggagagagaaaagggaaaattctcgttcctttccacgctgtcg

SEQ ID NO: 72154 - DNA, 404 bp, Zea Mays
tgctttacggctatcctccaagacacctgggaattgaatttaccgagtccagtacagtcccttcacttcagcagtggctggctgaaagaaagctgatggtacaattggttcaacaacagttggtgagagcgcaacagtgtcaaaagcagcaggctgatcgccacaggtctgacagaaacttcatggtgggtgatatggtatatttgaaactacaaccttacgtccaatcgtctttggtcaagcgggcaaatcacaaattggcattcaagttttttggtccatatccagtaattgccaaaatcgggtcagtcgcttataaattgggtctcccaccttcttcatctatacacccggtattccatgtttcacttctgaaaaaggctttggggtccaatatgcaagta

SEQ ID NO: 72155 - DNA, 750 bp, Zea Mays
gcacgggtggctttgctatttttttggcggcaacttaatttcatggtcttcacgtaaacactccactgtatctcgctcaagtacagaagctgagtacaaagaagttgccaataccacagctgaaattatctggattcaagttcttctaagggaacttggtatatcacaacctagacctcccagtctttggtgtgataatattggcgccacttacctaactgcaaaccccatatttcatcgtcgcatgaaacatgttgaagttggttatcattttgttcgagaacgtgtggcctctcaacaactagaagttcggattatttcttccaaagatcaagttgctgatatcatgacaaagccgttaccaggtccggcgttcagcaaaatttgtaccaatctgcacttaacttcgtaccgtccagattgagggggtgttaggaataaaagataaggcatgtagggttgtttatctctcctagaatctcgacactattgttgccttcggttgtatcccatgcatgtaatctttttctatataaagagacctgggcgtacctgagatggtgcaaccttccattatcctaacaagtataaacaaaaaatattcgtccaactaatcaaacaacgtgaagtcttagccaatcctttctttatctaatttgatgtgaataaatgtatctgtacgatccttgactagagctgtcatataagacaatgtttggttccagagtaaagagtaggtggaacatagcc

SEQ ID NO: 72156 - DNA, 640 bp, Zea Mays
gcctcagaaagcaccggcatcagtggagtccccctctgagtagggaccataaggcaaattattcaattcgaaaacacagttcaacctggtgttggaaccacgaatatcccagctccttaacgtttcattcttcagcgcatacttaccaacaatcttaacggcctccgactctacttcccgcacgaaagaggctgcatcgtacccacgcagttccacggcgaacgctgggcttcacgccaatctatcacccagggttggcatccggtgcggtgtaatctcgcctagaacccacccatgtgccaagggccacaccccataagcgatgaactcttccaccaagtcgcgcccactgctcaggcgggctgcgtagcgaagggcttcctcatcttgatcctcctccgccacctcaaattgtggaaacgccacgtagcagtgcgagcacaagatggcaggcggcaagctgggcaacccttcgacgtcgcctggtgccacataaaaccagaactcccaccagttaccccacttatttttcgtgcacggaacaatctcgataacttccgccgaggtcttcccagtcctcggcgtaaaggtgcaggacctaaactgagcaattttaccacctgtctgcctcttttgccag

SEQ ID NO: 72157 - DNA, 581 bp, Zea Mays
agcggccgaggcgttgcggctattgttgaagttggagtggttcagtgttcttgtttgtgacatatgttgtgtagatgttagttggtgtaggggatatatagagggaacggttggatacaccctatatattaaaggagaaccttttgagggaggtagtaaaagagattagaaattacatataagggaagaagtataggggatatttttggacagagcttaagatgggcatgtattacatgacgagtaatcctgcgcgatgtgcgagctagtagtgttttggccagaccctatgattggtctccttgatttactttggtgatgtttgtggagacctaaagatgacttagaaatagggatgacaacgggtcgtgtattgtgcgaatataagtgaatacccgaccggcaacacattagctatcatgtaaaattttgtatcgatacccgtactcgtgggtaaaagattatatccatacccgcatctatcaggtaaatactcgtaggtaccgaacgggtatgtgtttatatgataacatgtgaaattttataatcgcatcatacccacgtataatattttatatctg

SEQ ID NO: 72158 - DNA, 815 bp, Zea Mays
gagaaactggcagggccagtccccggatgagaaaaggcacgaagataaccgcctcgtgagtatcctctattgggacaatagctccgctccagattcgccaggaacatagttccttcggcggtagaaccccaatctcaacaagatgtagaaggtcagcctcagaaacgacagaaacatggttaccatcaaaggggagttggctgttgggatcgatcggaggaatgtctggtatggtagtactttgttttcttttcctgggcgccatcatgattttttaaaacagcgcaaaaggatttgtgaactcagaaagctagagagaggtggaggaaaagacaagaactagggttcagagctcaagaggacgtcagcagaagcatgggttgttatactaagtcgggcgcaaaggggcaagccgatatctcgggagagttttggttgcagcaaaacagcttcactcgggcgttacctctaaaatgctaagtgaatcatcagacacaagagcggagtacgcagccgcagatcagcatgaaagaaggttttcattcaccaagagggagatcattacaaaattgagaccgactcatcatgagtcggcctgcctcccctcgatcagcacattatattacattactacttagactacactacactaccagttaaactacattattctactactaaactatactaatatttaagccaacagcattatgccatcggccttaccgtcgccgccgtagccatcgcctttatcgtcgccgtcgctgcctttgtcgttgcctttgctatcgcccttgtcgtcgccatcctcgccg

SEQ ID NO: 72159 - DNA, 327 bp, Zea Mays
gtccataacgatccaatggctgacttcataatgatttaatctataccgtcaactaccagatcaatgacactggtccccagatcgagctgccaggactgagatcaaatctcagccgtttaaaccgagatcgacgatctcccccctgtcttattctcacgatggttagcaggcggcggcgcttctatccccgcggtggaggacctaccggagtcggccaagccaccaccccagagccatgccccccaatccgattggtcctacacggtctacagagggagacgaatcagttgagaagatccctaccaggtttcgtgaagcagatacggg

SEQ ID NO: 72160 - DNA, 554 bp, Zea Mays
tggaaactgacccgctacaaattccaaaggcagaacggcccaacgcccaggcagcccaccccactccccgcactatgctaattaaccttaaggtgcccacgactaaccctaacttgcctctctcaatctcacattctcacgcctctcgccctcttggtctctccgctctcgtcgtctctggaatgtgcgacggctaatggtgcaagtgcgccattcctccgccctccgttgaccgctgaccgatgctgcgatgcctccatcgacctgtcctcctcctccctctcgatcccgatacatggtacctctacattggaggcgacgtcaccgagtcccgacttactggtgctcgggctcgggctcctcctgtcctccccctctctaccttgacctcaaaggcgtcgacgcagttggaccggtgctccggatctgctcctcatcggtgaaggtaaggtaaccctaacttatcttggttattcggatctggtctaatttgctcctgatctacttattcccttgcaagtgtccgtcatgtgttgtcttgatccgtgaggaac

SEQ ID NO: 72161 - DNA, 644 bp, Zea Mays
tgcgtgggtcattaatgtgtcacagtcaaaggggctcgtaagtcatgagcgctatgcagctcgaggtgctcataggtcattagtgggaagcggaccgacgccgcgttgtggctcggtgttaggcgtggtaaaatgtggtcagatatttatgacgagtcagtctagggtcgagcgcgggatccacttaagtggttcccttccgacacactcggcctcccttgtcaggttccgccacacctggccccggactcggtgcctcgtggttcgaccagaggcgggtccttacagggttgacgtttttgcctcttccaattgactaacgggtccaatgaccaggagtcctcccccagtgtgcttgctgactcggtgggtctcggggatcatgaatcatttcccgacactattgatatgaatctttggtttatatgatatgttatgtgtgggtgtaatttatttgattgacttagaagagtttatttgtgtagggataatttggttaggtgagtttacgaagttaaaactgatagattatacaaaggtatagtttaatataatagaatcgtcgtgtagatgctttcttatctttatgacttcattcgattgtgacaaattgtagttacgattacttaaatatatttgctatc

SEQ ID NO: 72162 - DNA, 343 bp, Zea Mays
ctctaaggtcgacgaggcacgggatgacctcaacccagcatcaggcacgtcagcgcaagcctccattgcaccatcatccactgactctgataacaagtcttctgggaccatatcttcgagagtctgatcaaagttggctagggacagttcctgcagaccaatgagggcagacaaagcaggagagggaactccactactttcaccgctggcgatgaactgccgactgtttttccgagtcaaaggagcttcattctcttcctcctcatcatccacattggcaacacaagcagcacccccattggggtcagcaacagatggagcacccacattgggatcagcagca

SEQ ID NO: 72163 - DNA, 720 bp, Zea Mays
gccgccatcaatccgcgcaaatgccgtcgctgggtccctagtgactagcgtaggcgcgcctccattgcccgcgggattaggagactgccggtggagctcttcggacggggcgaaaccatctgtgcaggagggtccttggcagcgatctttcgtgaagcgtcgcctgtgcccagcctctacctcgtctcggcggggtgagttcttgttctgctatctttgctgctatgattttggcacgaggtatcatcagggtatagattgtagtgggctgctcgagtatcacacagaccaccgggatatcgggcggtgggtggcctactgcagggcgccaccgctggagcgttttgctcctcctggttcgcagctagaggtagaagaaggcctgtgcgttgtccgatcgtgtagcggcggccatgattgttggagggtgtccagtcggctgggtgtaggagaaggaacgggcgccgttgttcaaggattgtgcggtcagtgtgggatagaattgatagtgtgctgtggatcataggattcggatccaacgtgtgaggatgatctcgggttcataagtgtctcgggctaatcctggcggtcgagttctgatcgaacggctctagcgcaaggataccctttcgccgagctgtttttcacatgagaccctcagtttattgagaacgaacccgccgtccagtagggaggaagtctgtgtcttgggaagaattg

SEQ ID NO: 72164 - DNA, 435 bp, Zea Mays
gtttagcacaattacatgcacatgaaattcatgatacactgtttcactaaaaagtactaactcaatgaaaagtgttttccatccaagcaaatcactgtgctggagcatttttgcaggaagcctcaaccgcaggagtagtagaagaaggtcggctcacgacaacaggtgcagcaagaacatcggcaacaatgtcttcaggcaccacaacaccaggcctcctcattaggattcgtccggcgcgaacagccttgtccatggctttgtcacacatcgctttcataacaatacgatcatcctctaaggccctgatgttgaggcgagcagcctccagctcttgtatgacaagtttctttgaagcacgcaactccttgatgacagaatccttcaaagacaacagcttaccaagtcgagacactttagtctgggatgccctct

SEQ ID NO: 72165 - DNA, 490 bp, Zea Mays
gcagcagtggaagtaacgaccccatcggagaccttgaagctcgtgtgagtcgacttcaagcagctcttcaacagaggaccgatgcttgggtcgccgacggagatagaatcaatgaactaagaagggacatccgacacttgcaggatcaactcgctgatcgagacttagcacttgactgggccgtacagtctcgtttgctaatgtgtgctaaggaagcaagggctcaggcccgaattaaagaacttagctcgactgtcgatgacctgcaggtttactgcaatacgttgcatgaggaagtccatatactttactcacaattacacccaagtgagcctgcacaacctgaggcggaagctggaccatctcacgttgcgggacgtgcgctgggtggggagttagacctttttgagccccctccttctttgaggttggtggatgtctggactcccacacctgacgatgaggccgccaagactaatggaaagcagga

SEQ ID NO: 72166 - DNA, 427 bp, Zea Mays
tcatgcttctcaggtgaagggttccttcaggtggaaagacgttataagattggttgactattacagaggtcattctattcccttggttggcgatggtaggaacatcctcctgtggcacgatgtttagaacaacctcttcctcaagtcttcgttccctagcctcttctatttcaccaggaaacaaagctgctctatgcaaaattttctcgagaatataactttggaagataattttcacaccccctctcccctcaggttgtccaggaataccacttgttctgcgagattatcgatcagctgcaaactaccagagctgacaaggacatttagatttatttgtaggggaaatgagtgtttagctcctctaagttttacaagcttaccttcaattccattcaacctccaactcctttcatctggatctggc

SEQ ID NO: 72167 - DNA, 451 bp, Zea Mays
ttagaaccctactcctataacacatgattaacctaaattggttccttagaccaagtcggccatgcacaacaacctagtctacatgttgggttgcataacctaccaagcctaacctagaagcaaaacaactacacttgactctacctaccctcatttatcttaagacacctactaagccatctgctctatcaactaagctatttggttacctacaaatctgccataactacatgtccataactttgatggtaacaccaagcctccaagaaggaagagaaattaacctcgtcaaggaaggatatagaagtcaaagcggacctcgagatgaatcaagaactcaacacttcgcctggagtctttcttggcataacaatttcttacccctacttatccttgatctaaccatgactcctcccgcctaacaactggcttggcgcaatttgttaatcac

SEQ ID NO: 72168 - DNA, 342 bp, Zea Mays
tgaaccatcatgacctaaaatcccaaaactaaaagacatgtgttctacctatttagctatatttatatctacaaaagtatcttacctatgcatctcaaaccctagatggtgaataccaggacaggagaaggtgttgatcaacctacatgcatatgtcaaagaaggacaaggattagttcagaatcacagatgaatcccaaaaatcctccacctattgggtcagaagaattctttgctgctcaaacctagctactgcaccagatggccaatgcaatggccaatatgcaagcctagctccataataatcagcagcaaccacaccagccaccaccccgagacaaa

SEQ ID NO: 72169 - DNA, 369 bp, Zea Mays
atgccactattaggatggtggttcccccgctctcgtcgggattcagcacccttaccgctcgccgccccgtggtcgctttgcttatggcacccctgactgcaggacccagatagaattcgagccatagatcgatgaagttggagtctgtaataatgcttaattaagtgtcttagtcttagttttcttatcatatgttttaatgcttgtcgtgatgaacttgtgatgaagttggatctttgtaataattgtcaccaaggtgtgggcattccctgcaacttggtgtagttattgataaagtcagttatttagttgggcaatccagttgtttccactttcctcttttatctgagaagctatgtttggctgttt

SEQ ID NO: 72170 - DNA, 788 bp, Zea Mays
gttttctgagtttgatgactctgggagttcggttgtgtggacggaggagtcttcggatgaggacttggattactttgcggccttggatgtggttgtggcggaggcttctccacgtgttacggatgctgaagttttgcctggtccgagtgctgggcgtaggcggcgaagggcggtggcgaagcgtagagtgagtgaagtggatggtggttggctccgtgtgggcagggttggtaagcgagaattgttatcctcgccggctggggcgagtgtaggtgagggggagttgcgaagtctttttgagggtgaggagcttaggataatgctatttaactatagggagatggaaatcattccgaaggttgaaccaatgtaaggtgtgatgccctcgctgtacgtgtgtaactatagtttgtatgatgaggctgtgcgccttcgcacatccggctatgtccataggggcgttgcgcacttggtctagcacatttattatgtcggtccggcttcacctgtagtcggtctttccacggacagtttcttggtgtagacttttgcacggatgtaatgcgcctgcgattttgcgcgcttgttgtgctagtccggctgcacccttaggcgacttttgcgcggatagtcttttgaagaagacttcgattttgcgcacttgttgtgctagtctagctgcacccttaggcgactttttgcatggatagtcttttgaggaagacttcgattttgcgcacgtgttgtgctagtccggctgcacccttaggcgacttttgcacggatag

SEQ ID NO: 72171 - DNA, 403 bp, Zea Mays
ggggtatggacgtatgaccgagctacgaagacaaacttcaaaatgcatgtttggtatcagtactctgtgcatgacttaccagcgtatgggctattctacgcctggtgtgttcatggtaggttcccatgcccagtttgcaaggaagctcttaggttcatttggttgaaaaagggtggcaagtattcgtccttcgataaacatcaacaatttctccctcctgatcattcattccacctagacatcaagaactttatgaaaggtgtcgtagtgacagaccgcccacctgcaacgatgactggtgccgaaatttgtcaatagatagatggactcgtggccaatacataaggtggttttgtgggatatggtgagcagcatatgtggacacataagtcgggcttgactc

SEQ ID NO: 72172 - DNA, 655 bp, Zea Mays
ctccacaacttcacgagacacctactggtgtaggggaagtcttcttcgatgccctttctcccgtacattgtcgtcgggatgatgttcatatccgtctgttccctcactcgagaacctttgttttcatacacatatcctcctccttcgtattcctaacgatcttccatggatgttcctcctagtaatgatgatcatattattgacactccttccgttgaagcttctaccaccaacgctccttctccaccattcgcttatccataccctcctccatacccatatgactatatatatggtgcttctctatatggatcgtatggtgctcctccattcctctcgcatttagtgttcctcccccatatggtgttccttcttcatatggtgctctcatctattttgtcctccaatagacacaacagtgcccccaagcagcgatagtcatggctttgaactaatctgcttactccggcgctccataattccattgatgaaggaacttaacgacgatggaggttgaaaggctgataagcacacacatatttcaaattctatatatttttaggtccataattgtttttaacttcatatttaggtccatgcgtacctactacacttggtggaccccatttatggcaataataagaagagattatcg

SEQ ID NO: 72173 - DNA, 287 bp, Zea Mays
cggaggaggccaagaccggtgctcagcttcggcctaaaccaaattcatgacctagagaatgtttcccctaagttaattcgaagaatggtaccctactttgctctggccacggcgaccgagggtgttgcagacagatgggtgcgttcccggtgatctaaggctaatcagtgcaaattggtggttcggcaagcatcacagagttatgagaaggctcaaacgagggagaggggaggatgaactgaccggaacggggctggccgcggtgaggttggtttcacggtggcgga

SEQ ID NO: 72174 - DNA, 273 bp, Zea Mays
gcagcatgattaggggaacgactgtaatataatctgttgctctccttgttgattttgcttgattaggaatttagattttggtcaaatcttgttgtccatatagggtactatagaagtatggcaataagccaagtatgtagtggcaatgtagggagtaattgggggatgacatgagctatgtacaagcgcaggatgatgtcattactcttcgctatgtgtgttcggagcttcaattggtcgacttcttcacaagggcacaaatgagagctcagc

SEQ ID NO: 72175 - DNA, 612 bp, Zea Mays
atctcttatcatttgctcatcattttaacatgaatacctttgtcatattgtaaaccttcacttacaagcaaccttctgtgaagggttggttgaaagtgaagttacatatccaccatcatcttcgttcaagaattattatcttcaagataagataatgcttcgaaggacgaaggtccttaatgtttaatatcgtattgccttgttttttatttacaacaattgaaaaagtaaccaatagtaaaaactgattggctggtgtagtaggtttcacacctggtttgagctgcgaaacatggaagacggggtggatcatgaaggacgatggcaactacagcttgtacgccaccaagccaatgtgttgcaagactttgttgggaccaaagtatttatatgacaatttgtgactggcatgaactgcaactgagctctgaatataaggctgtaacttgaggtacaacatatccccaaccgcgaacacacgatcaacccgatttttatcagcttgatgtgtcatcctttgttgtgcctgtagcaggtgctgcctaatagcatgattcatcagctgccgttgggataaccaagacttaatatcgcccatgggtactgtatgtg

SEQ ID NO: 72176 - DNA, 573 bp, Zea Mays
tacataaaagaaagattacatcatatggctagcctattacaaactacaaaagaaaacaaaagtcttcgcctcatgtagtcgtagagagttgcgtgtgtttgtctaaaattggcaagtttaacgtgactttattattgacgagctaacaaaatctcttgcatggttatttgctagcttggttagctccttgccgaagcataatatggatgtattttaattcacgcatatatattttttatgagtatcttgtcatttcttgagctatgacatggcgctgaatttcaataactcagcatgcgaccctttttaattatttgagtatatgtgccttttgggacactgcatatactttatcaaggacagactaaagataattcatctcttaaaatttgcctctttaactaatagtgcattgtatcacccatgcacataatttattttgaagactgaatttgatagtctttattgaataatgcaagaccataaatcgatatattttataatttatggatacttagtgtgtgatgtagcattttatttggattgagaccaggatgtttgtcttattataac

SEQ ID NO: 72177 - DNA, 966 bp, Zea Mays
caggcaaaatactgtgctatctctttcttcatccctctccaccagtatctggctttgaggtctaggtacatcttggtggttcctggttggatggagtaagctgagttgtgagcttcattgagcaggacttcccgtgcctctccttttggtacacacagacggttcttgaaccaaagaactccttattcatctgccctaaggtccggaagttgctttttgcgagctttttccataagccttgttgtctccgtgtccaggcgttgagccttgcatatgaggtcttctagtattggcttgacttccaggctatcgttgtctcccagacatgcatttagttgagctgattccttcttccaatcttctaaaaagttggtcccctttatcccgaaaggttttcggctgagggcgtctgctaccacgttggccttcccggggtggtattggatctcgatgtcataatctttaatcagttcaagccatcttctttgacggaggttgaggtctggctgagtgaagatatacttcagactcttgtgatcggtgaagatttggcatttgttcccaattagatagtgcctccatatttttagggtgtgcactatggctgccaactccaagttgtgggtggggtaattctgctcatgcggcttgagtaagcgggatgcataagcaataactttctcattttgcattaagacacaccctaagccttgccttgaagcatcacagaagatgacgaaatcctggtgtatatctggtagtgtcaaaacgggcgtggtcgtgagcttctccttgatgatctggaaactttcctcacattttggagtccacacaaacttattatcctttttgagaagttcggtcataggccttgctatgccggagaatcccttgataaagcggcggtaataccctgccatttccagaaagcttcgcacttcactgacgttggatggctgtttccat

SEQ ID NO: 72178 - DNA, 1028 bp, Zea Mays
tcatgtggctaagtctgaaaatagttgaacaaggctgactttggagctctgtagttttaaaaatacaaagaatttgcctagggtcaacatatcaaacttgtagagctcctataggagtacaactttgctatagggattaagccttggtgtcatgagaaattttgagataattagatccaaagtcgggctgtcaggcaaccctaagtctgaatcctcactagcagtaaagtaggatgaacttagagctcgatttagagttagattcattgctcgattgagggtagttgctatagcagaattatagttgaaataaagggctacaagtttgctacagatggattggtgagttttcacacaaaaatctgagatctgggcactgtaatcctgtctgtcagatgctctgaatgagatttcccatgatacagtgcactgaaaatatccccagtacactgaatgtcacagccggcgatctccacggctggattcacgccgccgttgtgattcgtgctcaccggtgcccggataatgcttctgggtaaaagatcttcgccataggataacaacggaggctggccaccgtacccccttttgctttgcgtccggctcagataagttcaccggagttggccacccgtcgatcggatgccacatgccttgaagcttcaccacatcgtcgcaagccgctctatatcactggctcgtcgccggtgagtccgccacggtgaaagccactaatcgtttgcgccagtgccccttctcctcttcgcccaccgcgggtctccatcaaattcactggccaccgctcaagcacactataaattgagcacaccctcggctccactaggtagtcaagcgcctaacccagcaacacgtgcctcaaatcatccaccagagctcgccaattcgagatttcccccaaatcggtcccgagcaccgcgcaaagtgatctcaccatggtcagcgtgctccaggtccgctcatgcccccttctctttcgttttagtatccttatgtgtccctgatgcttc

SEQ ID NO: 72179 - DNA, 1342 bp, Zea Mays
caacaatattctaaacccatcaaaacctagtcatattgaattcagaaaatcgactgtaatagaacaggacctggttatgatgaaaaaactaggctactttgggcaggatgccccaagggtggtttgtgacaacatcttcattccgccgcccttactctctccctggggtggcggttttcagagagcgtggtgctcccgaaccttttttgagtttggtgtcacatttgggcaagacccaagcactaatggggacaattgtacatcccttgttggtggcctaggagcctgccatgatgggtgttgttgacatcgggcttccttagccatgagtctcgccatgagcggccatcccttcgttggattgcctcttgggtgcttcagcttcctcgcgccagccgtcggtcacggtggagttgcagcctcctcgccattggggaggttcatgtttgaaggacagggatggtccacacacagtgtctgaggtgtgcgactaccttgtggcggttgagggagtgttttattttccccgagctcgtgcattagtacttcgacaacggctcacccgtttgaggaggcatgggtctcacaccaccgtccgaagtcccactatcgggggagtcaggccggctgggttagagttcggccaactggcttggcctgagcattccataaccaggacaaatgatgtcctcccaacggcccagccaggtctttgggacaatggtcgctaggcggtcatgtcgatggatccatgttggggtccttgactaaaggtgagtatcacactctcccatccctgacttttgatccttttagtctcagcggttcgttgacgggttttcctattttttgtttaccagcgatggtgttggaggagctcacgcgtgctgaggagcgcctccgggtccttagcgctccaatctgtccacggccatcgacctcgtatgtgaccaccttagggtttcttagtcgagggaagtgtccgccagtactccctagatggcgctagtctccggtcgcattcaagaactggaggccaatgcgttttggcttagggtcctctacgcctcggtcgccgctcatcctctcggtgaggactcggtcaagtggggctgagcttgcctcagatgtgtcgtcgattgatcacacaacgagctctaaagacttgagggcattggaaggacccatcacatggcgctcgccctacgatcggtcattttttgagtttcctagagaagggaaagcagaggaataagtttttcgtggggtactgtaaaaacaacgatatgtttaataaacgttgtcacagtgcttggcatcgtgctttttcgttcgtatttgc

SEQ ID NO: 72180 - DNA, 675 bp, Zea Mays
gaggctaccactcatatctagctctggctccttggtgctttaatctctcactctgagtttgacgtggtcgactttctgatctatgagatataggacaccattttggatggtctccgtgctcggcgtcagttgccatacgctcactacctttgccacatatttgctcggctgatctagactcctcagttctaggccacccttgaggcctccatacttcagtttggcttatatcgcccagctcctgaggacacagctccagcaccatttgatccactggcaccagatatcagggttgaggatgaggccatcagacagtttgaggatcagggtgcagatgctgagacttcctctaatgatgatgaggatctgggaattctgccaccacctcatgtgccacctcgttcccatgatcacgaggctggtggctccagtgctgctcctccggctgctcctccagcgatagaccccgctctagctgccatccttcagtcactcactcagcagcaggctcacaaggccgcagagcaagcccgtcaggcagtagagcaggccaggcaagcagccattcagcagcagttgtccgagcggatgttatctatgttccaaactattcaggaccgtcaagacacactccagcagtagcttctagcagacagggcagagcaccgggctttc

SEQ ID NO: 72181 - DNA, 302 bp, Zea Mays
ataattacaatggtggtatgctagaggatcacgaaaacactgcagtatttacaagtagatgcatttggtaggaaaagaacgaaagagaagtagtttcattggtcatagacaacaatcatctcgttctgttatagtgagcagagtgccagatagattagattggtttagtttgatagaaaagagagattagattggtatggttgttttagaaaagagatgttagattgatttggttaggataaagatcacatgcttaggggtcaagcaagagataatgatcatttgcttagttgtcaagtaag

SEQ ID NO: 72182 - DNA, 393 bp, Zea Mays
aggaagttaatgcccaaagacttctccaagaatttgagaacatcaagtttaaagatggagaaacagtggaagatttcgggatgcgcctaaccaatctcgttaggaatcttcgcgttctcggagagcaagtagaagactcccgagtggtgaagaaattcctccgtgtggtgccctctcgttttactcaggtagtagtctccatcgagatgttttgtgatatgaaacagcgcatcgtggatgaactcatggggcgactacgtgcagtagaggatcagctagaagacaaggtcgaacagattgttgacaaagctggccgacttctacttgccgaggaggaatggctggagagaaacaaacatcgtatccgctccaacaacagcaaggagggaggtg

SEQ ID NO: 72183 - DNA, 418 bp, Zea Mays
cttttctaatggatttttgttctcatcccgccctttcttatttccattacctcatatatctatgcttgggtcaaaagcaagttgggcatgtgaaatcatagttgggtattgccagagaaattctccatcggcttgaaattgcacaagacaatcatcctcttacacctgaggagctttggctttgttgtgaagctaaaaaacattgtttggtcgtggcttcccttgagcgtaccatagcccatctccgttctcgcattcgtttcttgaaggacggggatgctaatacctcactcttccatagtcaagcgaagtccagaaagcataaaaactatattcccaagctggtggtcgatgatcatgtctacatttctcaagatgagaagcaggaggtgatgtttgattattttgacggcctcct

SEQ ID NO: 72184 - DNA, 284 bp, Zea Mays
atagaaaaccgagtcgtagcagtaaatgtctccatgatgggccggggcgatggatcataatctcgtagtgttttccatgtggcgctggtaagggaaagacgtggtgaccttatcaccgtccaacgttcaccgctagggaagcagtgtgacgatccatccttggctcgtagtctcgtacgacatcgatattagatgtcaggcggaacgcttctttgacaatgatcggagctccggtgaaggtgaaccgatcaccgtaaactcttaagaccgcgattaactctttg

SEQ ID NO: 72185 - DNA, 610 bp, Zea Mays
ccctacccccttgccttgcggccggcgagaataagctcaccggtgttggctgcctgccgatcttgcgccacgtgcccaggcaccttaccacatcacggttagtcatgttaggcgtatctggtgatcgccggagggaccgccacggtgaaagccactaagcgcttgcgccagtgccctttttcttcttcggccgccgcgcgtcgtcgttcaattcaccgggccaccactcgcgaacattataaattgagcacaccgtcgggtccgtagggaaatcacacaccaagccaccaagtcttgcctccaatcgttcaccagagaccgtgaatttctcatcgcccccaatctctgttttcgccaccgtagaaacgcctcgcgtggccagcttgctccaggttagttcaagctctctggtcatttgttctagcatccttaagtcctcctcaagctcctcgacccctctgattgaactagaccgccctgggtcaccgagaacgcacatgttcatccgttgtccatactgtcaccgtggtcagggcgttttagtgcgccattagtgaaatttatttaggggaaacttcggttaaggcttgaattaggtgccagtcgacgg

SEQ ID NO: 72186 - DNA, 753 bp, Zea Mays
ggaccatacgcctggacgatggtaggccgatgccttggtaatgatggccattgcaagcatgcataatatagatagccaacggtgcctggctaatcgagtcggctcgaggcacgacacagcccgtagtgcctgggcacgacacgacatggttgaaggtgggcccatactggcacgacacgatggctagtgccttgcctgggacgcctcccgggcatgctaggctagcacgggcatgacccgattagcctggaagcacggttaaaccctattcagaaaacccttgtatcacgtctctaatccgcacccctggcctgcctcgttagtcgttcgttctatcactctctctctcttagtctcttgaaccctctcgacctctctgctctctagagattttggggtgatccagacccgcgctaccactgacccgttccaatccgccatcgcctcatctccagtctcttatagggtcctccaggttaggttcccctcctggcctcccctcatcgtagtcatggcttcattaagacgataagctgctgtagtgttctgtcttcttcctctagctgacgtccaacgaggttgacacttgactccagtaagagtaagatggtaagctgtttgttttggacttgtagtgctcttatcacctatggatctagttgtggtggattgtggttgttaaccttaagtttcttctgttgttcttttggatctcttcctctctagttctcccacctttgttcttcttcatgt

SEQ ID NO: 72187 - DNA, 704 bp, Zea Mays
tcgccgcacgcagaggtatggatggattaaaaagcaggtcttgacgcgtcaatgccgctgggactgcgggcatctgcactgttcctaagctagcttatactatagtttacatatatacactatacgtacatcaaaagcctaacttaaaccaaagaagaggcagcggcggcagacaaacacgcttttaatcaaaaggcggagatggcctggtaaataaaaacctggaaaaaaaagtcggggctgggggtgaaaaagagaagacggggaggagcggagaagctggctacgcgggccgggattcagaaaactcgccagcgtccttcctgggtgctcccgcctcgtgtagcttttgttctgctttcgtcggcatcgatcaaagcagtagattccgaaaggctcttagctagctggcccaacaaaaaaggcccagccgcatatgcgcgtgtaccacaaggggggcctgggccatcctgtgctcctttttctctttcttcgactccactccccgtaggtagcttttagagtgtgtttgattgagaaatgaaggagaatgtaaccgctctatttatattttttggatgtttggtttctaacgaaagaagagtggagcaatttctgaaatcttcatatgagaatttacccataaatagttgggaccctcccactccatcaaaacgatcggatgtgagcgttttcctccctct

SEQ ID NO: 72188 - DNA, 338 bp, Zea Mays
gaattactaggttgtgccccacgaaactcatccctagcctcaagccctagttcctaccatggccaccgagcgagggtgagaacgccgccaccgtcgactttgcttcccctcaccgcttgtgctcctattcggtgtccggtggagtcgaattacactctgcgccgtgtctggccgagaagattggtgtggggtgcaacagtacatggtgaatttctcgccggtgctgcctcaacctcacttctccgcccctcgccgcgattgaagccctcctctgcactacgtccggtaagaccgcgcccatatgattcgcgctagttctaagtggcgtttggtcgatc

SEQ ID NO: 72189 - DNA, 315 bp, Zea Mays
attctacagcactacagcagcaagcacctatacaggttgattgatagttttgtttgcttaatctacaggttgtttgagtgattcaaaatgtcgaccccggacactggtgcatcccaagcagcagatccacatcaatctaatgtagctgcttcaggtacacaggatacaatagaaatagataatgatgttcccattggcagtaagagaaagccaaaattgaaatctgaggtttggaaagagtttgacagagtagaaattaatggagtttggaaagcaaaatgcatgtggtgtaagaaatatttaggagggaacaca

SEQ ID NO: 72190 - DNA, 1319 bp, Zea Mays
ttgtagatctatgttaggggtacaattttgattaaaagactaaacactgatgttgtatgaaaatgggagataattgggtccaatgttgggctgtcaatcattcgtgaagcctgaaccttggccaacagtggcatcagatgatcttggagatcgaattgaggggaatttagtggatgtttgtgcaagacctttgtaacaaagttgtagctggtacattgtacaacaactttactatagatggattggtgagttactacatagaaattggagaacaaagccctgtaattctctctgtcaggcgcactgaagagtgtttacgatggtacagtaacctgaataagatcgcgggtttagtgtatctcgccgccggtgacctcgcgctcggattcgcgctggcgctgtgattcgtgcctagtaagcgcggataacgacccctgttgaaaagatctcgccgtggatgaagtcggagcactgtggtcgctctgtcgtcccatccacttgcgccgcgacatggtcgtgcggccgtcgcggtgatgatcgccgttaacccgagcctgccacactattgccttgttaccacatcgtcgttggtcacaataggtagcctgcctgtcctctgagtcgacgcgccagtgaatgccacagtaactcgcgccagtgaacctcccctctctccggctgccagcacatcttctcaaaattgggcgccatcgctgatgcctataaattgataccccagtgtgctccactaggttattacgcatccaaagcactagctctcgcctctgatcgttcaccagagcctcccaatttcgtatttcccccaaattggtcggaacgccgccgtgagacatctcgccgtggccagtcgtctacgggttagttcatgcccttctgtgtgatgttctagcctccctcaagtctcatgttgctcgcaggcctgtttgattgaactagaccacattaaatcgcatagaacaccacgatttgtctccgatattcatcgccgccgtggacagacaaactccggaccaaattagtgcaattagttgagggactagtgtctctaagggtggaattaggtgtcggccaagatagggtgctagtaattgagtgtctcggccggtactggtacgccggaaggcgtgctcaccggcgatcaccatcggggacctgacgttgcgaagaaatagaactctaagggcctaactgtaaatgtcagagacacaagtaaatagtgaaaagggttcttaaccagttattcaaatagtcggggtcctatatgcaaagacaacatcgcgggcgcgtttcgcctggac

SEQ ID NO: 72191 - DNA, 1121 bp, Zea Mays
ggctcgatcacgctggtgagcatcctacaaataccaaacctccgaaagaaacccatgtcaacatccaatgtcacaccgagagatgagcctactccccaaatatgcggatatgtgaacaacttatgcggtaaaccgtcaaattgtacccatacatctctcaggacagtcttaactcgcccccccccgcactgttggccttgaactcaagggttgctttctgagattttgctttcaccggcccccattctatcattctcatcaactccacagctgaaggaaaaacggtcttgaatgttttcggatcaatttgctcaacagcccatggagttccacccggtagaagcctttccaactccattgtcacattagcactgccaatttccccttctatgacttgaattaaagccaccctggaatcactcttgctcttgatcagtttcttgttcgtcgggatgtgaaaaaaaaccaccattgtttattccaaatcccgccggaatagcatgtgtcttaggagcgttaaccaccggacatctagccttgatgtgggtgtttgtgccacaaacctcgcagaagagctccgcagtgcacccactgatcacgtgcccttatgcaaaacatcggtggcaatgcgctttggcattagcctttgctcccagaccctgatcatcctgcccttccttcttcttggtaatttcaatcaacggcactggtttggatttgtcaccccctgatgatgcaccttcggcctgtacctgctgaccggaaacgccaacccccttctcagcgttgaggttctggatggcactcaacgcctgttggagaagggcctccgccttggctgccttatcatccagtccggcgacactcaccgtcgcacctacaacatcattgatagaaggcctcggcaaggagttacctgtccctcttcctaccggaggtggcaaaagatctcctcttcctctgaactgacctcgacctcctcggccatagcctggtctcgcccacgagctgccccgatgcatatagtgattaccaccatagccaggtcggaaattgttcggaccgtcatactggaagccactccttgccaccgctctaccaactccagaggaaccctcctg

SEQ ID NO: 72192 - DNA, 271 bp, Zea Mays
cgtcaaacttctctctaaatctgaaggtatatttcaatcgaactaggccaccttcactggattcagcagtagtctccttcggcatttcccagatatccacaagtggccacaccctataggctatgtgctcttggactatatctcttgtgccaatgaaggcacaaacattgctaaatgccttcttgcatgcttcgacgtcaccttcaatagccaccttcaaccttcgaaggccgaagcgagaccagatggggcgctggatgatttccttgat

SEQ ID NO: 72193 - DNA, 1439 bp, Zea Mays
caaaaatcggaaattctcccattcttatagaacatgtgatggccgatgcagttgatcgttacagtcgttcgttgttgaaatccttctcgggtagacaagatggcccacgcagtgcttttgagttaccccccagcagatcatgatctatgcaggtccagaaatgggggttcttgtctcgaatcatgagatcactggtgccagtgaccgatgttctggttaactcaacatggaatttagatgtgaaaaatgcagtatcatagatccataggccattcattgggggaaagtagccagcctcttgcagatgtagacatctagctgacctgaacgccaccaaccccggtgtcccttctcctgatagactcgcttgtcagcagccacagtgacgcttgatggctcgctcacatagaagtaggtaaggtgcgcctgccactagcatttaccgaactgactgacgtgttttaatgtgccagatctaatagctagttggcaaaaatttaagtaaaattagttgattttagcttagttgaacgagctaattaactaatgggtagttaagggtgcagctaatagttagctagactactagttagaggtgtttagatgtctccaatcaaaagcagctaatctctgaactattatgttagaatatctctagctaattttaatatctaaccattagctctagtgtatttatataacaatcggccgggattctgtatttctattttatgatgatctcggtcaaagtaaaaaaaaagtggcgttttttttcctgtgatgtatgcctactgtattatctcacaagcaattgttttactagtattcacagtttaggtactgttactactatactttagcatctgaattgcctaatactatgtaatgtataatggttgagacttgaactatctcatacatgcataaggattaagagtctaggtgccctctaggtccccagatttgttcggtctgatgtcagttgaaatttgtagtttggtgttttatattgtgaaagcttatcttagtttagtcaaaatcttttttttatcatgattcttaggtccttgtttggcctccaagtttccattccacttattagctagagacatgcgccaacttgtctttaggtttttgctattggttggtagtctacgcttccagaaaacgtgggctcagtaagcaggtagcaccgtagcagctaatataagagggtgtttggtttgtgtcaggtcaaatgtttgaatatcaatttataagtattaaacataggctttaattctgtgcttggaataattctatgtttggaataatgtcacatgtcattgcaaatctcctgggtcagttctaatttctgcagcactaatgctgattagcgtgatttgctgtcacatcacatatctgaaactttcagaatgaacccgctattctttttattt

SEQ ID NO: 72194 - DNA, 535 bp, Zea Mays
agtttgcccatccgtttgtggatgacaagtggttgaaaataacaactttgtgccaagcttagcccacaatgtcttccaaaagtagttgagaaattttgtatcccggtctgaaacaatagtctttggaactccatgtaaacgaacaatctccctaaaaaacaaatcagcaacgtgtgaagcatcatcgctcttatgacaggggataaaatgtgccattttagaaaagcgatctacaacaacaaaaatagaatccctccccctctaagaccgaggtaaccccagaacaaagtccatagatatatcttcccaaggtacatgtggaataggtaatggagtatataaaccatggggattcaggcgggacttagctttcaagcaaacgatgcagcacccaacgtgccgctggacatcacgtcgcatgtgtggccaaaagaaatgatcggagagcatgtccaatgtctttttgacaccaaaatgaccatctagtccaccttcatgtgcatcctgcaaaagaactggtcgaatccaacaagct

SEQ ID NO: 72195 - DNA, 709 bp, Zea Mays
ttgatcgaaccaaaagatcaaaactcaaatgacctaaccttctatagcaattccaaatatgaaaggaagattctaccacaaaacaccgagaagatccaaaagagtgggaaaatcaccatgaaaaactcgtccaaatggggaaatccgacaaacaagatcttccttgtcatccaaaacacgagaaaggctcttcttaaagcacacttcgagatcatcctcaaggagttgtgaaactgagaggacattaaaatggaaattggataccaaagcaatgtccttgagaacaaaactattgttcacctgaatggtgccatgagaaacaacattatctctcgaattattctcgaatgtgatgtactcctacctatcatagggttgaggatggagaactatctagaacttctggtcatgtgacacgaatagcaagaatccatgggccatgtgttctctaggcctccatcctatatcaatagaaagacacgtggtgagaaaatggcacaacactggggttatgaaactgtgaagagtaccagtgttgcagtatttgcccttgaaaagtgttaggaaaaacaccaaacatccctggtcccttagtgtgttagcgatcacaacgagaatgaaactgtggtccacaaaagttatgcgagccaaaacctctcccatgagatctctatccatatggcacatgaccaacacctcaccgggcacg

SEQ ID NO: 72196 - DNA, 521 bp, Zea Mays
atttgcatctccattgaagcctaaggaacagaatgatggaagcaagtccaatcaagtagcaggggacaggatgacgcaggaagggatggtagggggagatcatggcggacaaactcacaggataaggcacaataaactcaatggagaaagaactcgagatcgaaaaaagaaaaggaaaacattaccttgtacagattggacctgctctcgcctcggattcacctcctcgcctcgcgctccgtcaaccacaccggcacacatctgatggtattcatgattcaggccctatgaacgacacctcttgcctttgattcgccgtcccgcctcgcgggctcgaaacctccatcgacggtgatggctatctcgggcaggcgggcgggggtgcatgatggcggctatatcgggtggggcgactcacggttggagcctagacatcgcgcggggacaaggacacaggcacgcggggacgacgatcaagagcaacggagttgatctcgaagaggggcgggtcacggtcgaga

SEQ ID NO: 72197 - DNA, 306 bp, Zea Mays
atttaaagcaactaaaagtaaattatgcattgcacatcaaaatccatcggaatcatgatcaaggagtcttcttcgatccaaagctcgcaatgtggtttttttgttccttggatttcgttttcgtttcggtgcaacaccttcatcagcagtgacatcgtcacaatctccgactagtgacttgagtgcaacaccctcatcgacagtaaaagtggttggcaattattcttgataaacctcatccgcctgatcatcttcgaattgataaccagcagtgcaaggagtatgtaaacattccctagggttcac

SEQ ID NO: 72198 - DNA, 369 bp, Zea Mays
ggatatttacaatactggggaactcatagagtcaccgcagagaagtttatctacacttggatcaatgaagaagggaagatcatgaatcgtagaacctaccaggagcttcatgataatgtatcttacattgcatataagctattgacaagcacaaagcctattatcaagcctggtgatagagttctccttattcatctacctggtttggagtttgttgatgcattctttggatgcatcagagcaggagttataccagtaccagttttgccccctgacccaatgcaaaggggtgggcaagcgcttctgaaagttgagaatgtttctaaggtgtgcaatgctgtggcaattctatccacctcttcataccat

SEQ ID NO: 72199 - DNA, 936 bp, Zea Mays
attcaagcaacaagtcaatctataatctagatatattttctcatgttattagtggtcaatttttaaaggttcgattaaatcttgctaaaagatgtcatacatttatatacagttgtcaatggtatgtttagcatagtgtcagataaagaacctacaggaaaaagcattcctccaactgcatccaaatatggcaacattagcttgcaatccaccttgcaatctttaaatgagtccgtaaatacctgcacttgaataaagtgatctattttggcaaatgcaataatataaaaatgttacagactggaaagcaaatcaaccaatacctccaacaaatagccttttgagtcatctggagcattggatataagacctggaatgcaggttataagtgggctcaaatatatttcgatgaggtccttattgcgaagtgtttttgcctaataaaaacagaaggatgttcaatagataatccaaatccataagataatggcaaaacagtatccgtgcagttaaattgacgagcaaggaacaacctttgcgaacagagaagacacaaaaaggcaaaattcttcagctgaaaacacagtgttatctatccatacattcaagcgcagaaagatttcagcaatccttaaattgaaaatgaaaaatttgtcgtctccctgccatagtgccatgagaaagttcacagtaagtcaaatgcaaaagattcaaccataattttattctaaagcaaaaaaaaatctaaatcagaaaactagctctagataggaacacatcatcagcgacgaagtccagaagaatggtttagtcatgatccaagtgttgtcctagacttatcacttttaccactaacaagcctagaagcaaagcaaacatcagtgcatgaagtctgtgtattcacacacttatagtgcagcaaaaaatgctcaaaca

SEQ ID NO: 72200 - DNA, 1282 bp, Zea Mays
attcagagctggtgaagttggatcccagatcagttataatgctatttggtatgccaaacctaaatattatgtcttgtatgaactccacttccttggctgaggttaaagaggcaataggcttatactctatccattttctgaatttgtcaatggcaaccatcacatgagtatatagcccccctgagatttcttgaagggaccgatcatgtccaacccccagcatgcaaatggccatgttatagggatggtctgcagctgctacgccggtaaatgttgttgctttgacaagaattggcaagcttcacatctctggactaactcggcggcatcactctttgttgttggccaatagaaaccagatctaaaaaacttcccaaccagagttctggacacggcatgtactccgcattgtccggcatggatttcctctaacagttgcttcccaacagtcgagtgaatgcacttcatgaagactcctgttgcacctcttctgtacagtgtgttccctatgagggtgtagtgagctgattgccttgcaatgcgttctgctgtcgccttgtcatccggttcctcttcattttttatgtacctgatgataggctctctccagtcattggggtccaactctggttggctcaaggtgttgcactcttccgtccgatctaagggaatactcaggtgtgatacttcttggacgaagatcccgggcgggacttcggcccgactggatcccagcttcgacaacgcgtctgctgtcgcattgcgatccctttccacgtgatggaattccaacccttcaaatttgtcttctaattttcggacggctgcacagtaacaggagtgcatacttgatagaatcagtcgagcaatcctagtctttatttatctagcttatgaccactagtgaatctccatataccatcaaattcttaatgctcagtgacagggcgatgttcaacccgtggatcagtgcttcatattctgctgcattatttgatgctgggaataataactggagtgcatacttgagttattcacctcaaggagcaatgaagagaattcctgcacctgctccctgcagcttcagtgagccgtcaaagtacattctccatacttcggtagccttagggttgtccgagacctgatgttcagtccactctgatacgaagtcaaccagtgcttgagtctttactgctatgcgaggtcagaactctatgtcatgagctcccagctcacatgcccacttggctacccttctaatagcttctttgttgtggagaat

SEQ ID NO: 72201 - DNA, 695 bp, Zea Mays
aacctctaaaggacagaatttaccctgcctacctgtacagtggggtcaatgatcctacttgaattaccaacagacggatttctgaggaagacgtgttgagctgagttgatttgatgctgagaggcaagatttcgaatgccagtgctcccttatcctattctgcctggaatcttcccccaaagagccccttttccaagtttgtttccaatcctcctgttcaagacgatagtccgggccatagagtgggaccctctccagaagatattgatgccttcattgctttgtaccgaaatctccctgaaggagaaaaacaaacccatctctagatgcaggcgactgctgatgaggctgaggtgaatgctgttctcagtatgctggcgggtgagttgtccgactctacccgtactgagtcggtgagtgctgcaactagacatggccttagcgaagatgaaggagctcacaatcctggaagcgtccgtcgcaaatgattgtgtcgaatgagccatgcagccgcgcctgccgaggggaagaaaagaaagaaaagacttcagtggtcatctggcttggaactgggtgctgagtctactgtcttagtcttcggcggtggcttggcgagcgccaacctcgaggatgatattgaaaattgtgatggtgccagagttggtggttgtgtgcttgatgaggatgaagaggag

SEQ ID NO: 72202 - DNA, 782 bp, Zea Mays
gtgtcatgtgagagcagaaggatgactacgaatgggcagaccgacgcgatgtattccagtcacgccatcgttcgggccccaacaacaggagacataggctttacgggatcaagggaatcgtatgcatggacttgttgcgcaggcagagacaacagagccacgatgaatttctcgtcggcaatgtgagccaccacggtgctgctcggtggcggggactgcgcgcttcgtatcacggtaaaagttctttcctaggtttgcattttcctcctctaggcgtaggaccattcgaatcttgaaccttggcacccaggcctcggactactgcacgccggtagctcgccgccatggatgcatgctttgccgccgcgtccgacctcggggaagaaaagaagtaccagcgttgtagttttttcataaagtggccaagattagatccatggatgggggtgcctctgtcgttggttttctgatgaacggttgtgtttaggtctagctatacctttttggggtttcaatccgtgtcgtccggatctgatcaagcagatgtgatgggattggggattcatagaatttagaccctaggatttagatctggtggccacagtcttgtaccggttcgtttaaagccatgatctaatctgcgtcgtcaccttttaatcggacggctctgtgcgtatgatacctcttcagtagactcttttgcttataagcccctaggttttgagcaatcaacccgtcgtccacccgaatgtctccctgagtcttagttacatttgcactag

SEQ ID NO: 72203 - DNA, 1176 bp, Zea Mays
tgaagtagatagtgatcacaacttgtaaagggataactctctagtcatgtatataaggtcgaggggaaacccctacaaaatcatctcatcacacaccatttcacctcacttcatcaatggcagctgagccatctcaaagctcgcttgtaatcctcatactccagaaatcaatacctagccacaacagaaagtagggtgttacacaattcaaagtggcctgaacctatataaatctatgagcaataccgacatgcctctatatgtaccatcaagtcacaatcaacgatgttgtcctacccaaaagcatcacgtgggtaaccccatggtgcgcagtcgggtcacaaacaccgatagctggcacgccaggtagggggtgcgatgttgaaacacgacaactccatggccatcatcttcaacaccccgatcaccttcaatgctggagagatcttccgcttcggatccatctcctgcattgaagatcaggagggtatcctacactgcatagtggacccatccgggaagtaaacttctccagtggcgccaaaagaggctgaaggattccctaaaacagcaccaacgagaattgcgtcgacgaactcaaaaaacacgagaaccttggttggttttcattccgtgcaagatcgcacctacgtcatgtgagcctagggacattgtgacgcctgtggctcggacgaccaaggccacgcctccatcgcgacgaactctcttatccatgtcgggtgagcctgggacgttgtgatacatgtggctcggacgaccaaggtctttgatggtagaatctttagaagacaaagattcgctaagcactacacctcatcccgggatttctacacctcaccctgggatttgttcagctcgtttctcttgcactctagctcctccatggtgaaacgatgactcctttccaaagtggtaagggaactagaggcatcccaatacaacttgtcaagattatctttcgaaacctatttgtggcggtagcatgaaaaaacttagtgcattcatcacccagaaccacccatctctctgtgtatctttgcctccaatagttgttcttgtactttagaagcttagccatatgatttttgataatttttctcatgtttttctcctgaataaatagaggtctttgctcctctaacttgtccaaaatta

SEQ ID NO: 72204 - DNA, 506 bp, Zea Mays
gcggggtagagctgaacggcagcagcgccactgtctcgcgcgcgtttactggcggctggaggtagaagacgacgcgcctgccgtcggatctgagtagggcggtctggattaaactagggtgcatgtgcattgtcgtgtagaccgtggatctcaacatgcatggcggggattgggtctggcgtatcgtttggggtcagtgtgatccacgccgttagatggaaatgcgatggccacgattgaatctcgggcaataaaatcctgaccatcgatctagacatcagcggtcagctttgcataccggttcggcgggcgtaggatataataagatccgtcggattgagatcgaatggctgatctcatcccgtaccccccctcggccgcacgttttataaaatagacccctgagaactaaagaatcaacccgcagtcctgtctgcaggattctgtgtctcgggttattttgcgctagggcccctgccttcctctgtaatagtgtgcccagtcca

SEQ ID NO: 72205 - DNA, 1086 bp, Zea Mays
aaataaaccaagaagtgtggtataacctacatatatagatgttgccctccggccagcaggttataaataaatggaacctcgctccacgtacagatcccatgtacgacgtatacccgatatatgcattgcaatgcaacttttgcagctaaaaagcttctccatggtactggcgctgatcgtcaagaaagcaatcgagaagaccggcgtgcaagcacgcactcttaggcgcgacgacaaactgtacgcgcctttgtgcagacgcgcgcgcgcgcacatacatgcacgctgcatgcatgcaagctctctctctctctctctctgctagcttgtatggagtacacttgttactccagtatcatttgaactttctgcatgggagtgaagatgtgtctcgagttttttttatttatttcacgtctttttcagcagggagcacatgactttaaaggccaacaaaatcaaggccggccgggctcctctgcaagtacgtacaggcccatatagctacagagctcgccctttgcttcacacacgcgccccacagagtgaggagggttccggccgggacgtacgtgcgtggtccaaggaagaaagaggtgtcagctgcggcggcgacagtgagcaggtgcatggcatgccactgctcacattcatgccatcacacagatgacagacccatgcatgcatatgcgctctgaagcaggtagcaatagcataggcataggggtggtagctgctttgggccaaaatcagcggcgatgcatcgtccatggtggtagtacgtagtactgtactgatttcacgtaccacacgacctggcctgggcacaccatcgtatcatatcaattggaagcacgtacggtacgtgtacgccgcacaataacatgtacgaagactctcgagcacagagcacgtacaggcgtatacgacagatatatgcatgtcgtctaccaataataattcaatacgatcacttgccattttaaacatattccagcccggccgtgccaggccgatggtatgttcgatctaccacacggtggcgtacgtgatagtataatatgttgatgcatatgcatgaatgct

SEQ ID NO: 72206 - DNA, 469 bp, Zea Mays
tgcatagccatggtggaattctgattttacggtatacctacctatatctttaaggcctattcggttcctaaggaatggtcactcgtaaccactcttagccagattatttgtttaatttatatagggtttgatcaactggaacaattctaggttgaattctttctcaaacaaacatgcccttatcgatttagctagagagatgcgaggaaaccttattagtattgtggctttggtggcggcgtagacatagtagagcaaaggaaggcacgtcagaggtggcactgaagcggatgttaacaatggcgtcgcacttcctcttgagtctcgaccatgcctagccgcacaacgtgtgtgacctatgtgacgcacctatgtgacgcccttgatgttgacctaggtcaggatgcacatcatctccttgtccacctcttggaaataacgcacatacgaataagacagttcatcgtgg

SEQ ID NO: 72207 - DNA, 1912 bp, Zea Mays
aagagactgggcttgcatggacaacaccaacggttcaacgtcaagttcatcgttaagcagcctattttcgtacatgggatcatttcatgcagacagtttgggcaagttgaagtcttcaatattccctccgctgttagaaaacagctatgtcagcttctttatcagcagcgacataagttattccagtggcacaatgtagtgtggattggccaatgcgtgggtgagtgagcggtgaatgtcatccgtgaaatagagacattacttatcaaataaagcatggacattgcaaaccgagcaatggagggaactgttacaaagagttggcgcagctggtgcgatgaggcagagacgatggcctcgtgaaagagaaggctccattcgttatcgctctcaagaaggctcctcgcctcacatgcctcgcgaaaggtagcatatattgtgccactaaatgtccttagatcaacataactcattgcaacattaactatcatcaatagcatgcgcaagtagtatagttcattggccgttggatgaacgtagtacatctgtccaattttgtgacaaggtgttcttttccgccacagtcgatccgaagagtgccaagaccactcagtagggaaatcacagtatgttaggtgttggtatccaggatttcttgcattggtgttaaaccactcagttagcatggaactttttgctgcgagggactctaggagagatgctaaggcagcacccggttcataccgaacatagttgttgttgggaaaatggacaacaagacgttcaaccgcaggtattctaaaatgaatgtcgaactccaaaaaatacgccggatggcctcacatatggatatgtatcttgcatcgatatactcttgaatttcattgcgaggagctacctgaggttcaggtgacgcattggttgtctttgccatcacctcaaaatatatctttgctcgatcacttcctttagtaacatacttaaacaagtatttaatcatgtttgattagttacaccactcaacgttgatatgtgcatagtattttttgagtaacgccatgttataaggaacaatgctcctgttatctagcttaaccccattcttaacaatgtatctatcatcatcacgtctcttatagatcatcaatccaaaatcgtcaacgatagtctcggcctggaaggacttagggtagttttttagcatttgtcattcttcatacaagggcatcttttgttgtgttgaccgcatgggccgtgcatcatgaattcatcaaccaatgcatatcccaatgggtcaatcatgaaatcaggtacctcagcatagataaatccatcaatagtggaggcatctaagtcaaaggagtggttgccagccaaacaaggcaatggatgtggggtaggccacgtttctggaactccacagtatatagcgctgtagaaatgtttggtaaacacgaggttttcagatggaaagtgataggttgagggaagaacacctaaagggccacaaacgtcagcatacctgcaagtacagggccaaacgtctttccctccatgatatcagctatgaactcaacaactttcatgtggaaggcacgaacaattacgttggagcgatcgcatggctgttgtccaatttcaaaacaaatggcatccgctatttctttccacttattgttgcatgtgaaggtcacaaacaagtcaggagggccaaagactctacatattgccataccttctaccactagtaaacgacaaaggaacgatcatctagcttccaacgaaatcagcattaaccaaacccttatcaatggcatcagacacaccttgcactatttcgtatcgcaaatctttctggtggtcagctataaattgcaatctagaggcttcgactgtggaatacgcattgacg

SEQ ID NO: 72208 - DNA, 581 bp, Zea Mays
tccaggtttgctacgcgtcgtagacgaatgcacatgccggtgttgccagtaccacacgtactaggtagaaggccccaaccaattgttagcgtttgaagagaccagcagagaagaccttcacgacggttgttgtgcggtatggcgagagtgccatcgcagctcacggttgtcagagcgcagtagatgaagtagttgaggatgagatggcgacactggcaacaaggttgtgctggaagaaggcgtagatgtaggcgtggcgacacatcaaggatcctgaagtttacatggcgggagagccacgacgcgtaggaaggtcctcgacagcgccactgtagcgcgatgacgatgcttgaagttggcaaagaactcgaagacgaacgtggtgcagaccaacgatgggtgtgccgacggagctcgtaggtatcgaacaactcatagaccgtgcgcaggagacatgcaccgacagaattgacaacgatgtagatgcaacggtgggggtcgacgacgaacgacgacgctgctgcccgaagaggtgatacaacgacagggatgacgataagctgcgctgctgctgaggaggc

SEQ ID NO: 72209 - DNA, 956 bp, Zea Mays
ccgttgcatagtacctaattctacccctaacaaccatttcccctcactcaatatcactagcgaggctctaaatcatttcggtccacgtagacagcgcagacaacggaggaacagaggtgttcccagtgatctagggcaacttaattcaatcaaactggtcaagaagcatcaggagaacctaaggatgctgaaacaagagagcagggagcacgaatagacctgtagcacgctgaccacggtgagatcactttgcacggtgctcgggattgatttggggaaaaccgaaattggggcttgctggtgagtaattgggggcacgacttggtggatcagtgcttgattaccctaatgacccatcggtgtgctcaatttatagtgtgcttgagcggtggtgttcaatttggatgaattgcgctagccgccgagagggaatgagtcacggcggcgatctactgtggcaaccgcagagcgactgaactacgacggtcactggatggtcactacggctcataccgatgcgataaacttcctaaggcgtggcgccctcacggtgaatggtgaacacgtcggtgatagccactcggccacgtcgctggtgtgcactgatgaaccatcaagcacacagcacatcccagctcacccgcgacaagatctttcaccccgtgatcattatccacgtttaattcggtgtgaatcacgacgatagcacgaatctgcgcgcgtggtcgccggcggtgaggtctctgagctggcaatctgatcagtatactataccatcgcaaagctttatcagttagcctgacagagcatgtttgggatcaattttgctccatactttatgtggtgactcaaccaatactctgcatcaaagtcgaagcctgataaaccagctctaactttgttacattgtgcacccacaaaaagtcacagaatcttacttaaaattgagccctaag

SEQ ID NO: 72210 - DNA, 490 bp, Zea Mays
ggttccttgcggactaccagcgccaccgttggcctcacacctctgccacctcgtcggaagccaaggggtgtaacatagtaaattgggtttgtgtgctcgttttcgtgcagcaggaagataaaaccaagcgattggcataccatgtgatactcctcgtcgatgaagggcctaaagaatatttgggcatctggtgtatggcagcagcgactaaatctgccatagatgtagtaccgcaacataaagctatagcgaacacggtaagtcttaagaaacagggatgatgcatcaatttttagctacattattgtcatggctgatggactagagggtggatcgacagacatcgttggcgggaactaggtgagatgagttggtgtactcgtgtgggccgtgggccaagttatggttgtaagcgtgagtgtgagttgtaaagggctgacctgttggcttaggccttaaataccgtcacagccagttggcaaaggagaga

SEQ ID NO: 72211 - DNA, 399 bp, Zea Mays
atgtgcataaaaatggagggaaaaccaatagaagaatactagtaatggcattgagtgtgtaaagtgtgagagaaagaagtagagtgggacaatgagaccttcacaacttacgacaatgttacgcccctgtctagtagtgccacaccacgatagtgccagacagagagtgatggtgcatggcaaaaacaagaatgcccatcaatctaagcctcatgcgtccaaagaaattttaggaactcattatgtgttgaaaatcaataaccttggtcaacttgttgctatctacatgggaaacaactcaagcttgaaagtgaaaaatgcatgttggtaccccgaaattgggctacccacttctactttgtcaaggcgaatactcgtgtggttacctataaccgcata

SEQ ID NO: 72212 - DNA, 466 bp, Zea Mays
cggcaatgtaaaatcaatctaatagcatgaatcataaagacaaatatagattgaaactacaaatgtaactagcggatatttctaacaacaacgcttagtacaatatctatcagggtaaggtggtgacaccatgccaccttgacacgatcaagaccacatcagggcaacatggcgttaccttgtaaaactcttgggaaggggtggcgatgcaccgagaggatgagagtcacttgctgcttggtgaatgaatgactttctatttattcatgtttgtatcagttttaatatatagccttgtgggcctgaagtgataaacacttcctaacttacattaccatctaatctgttacttatttttgatataatggtatatttctatatcacacacttattttttcttgtgatcagatacttcttttgtggagccattcggtcagaacaatatcctagacccagctaggattag

SEQ ID NO: 72213 - DNA, 896 bp, Zea Mays
gttgtatgttgcatgggaggactctgaacatcatgaactcatggaggaagctcggactacctgctacggggaatgttttggaatgctccgtctgtcgggatcgcgccacaaaggtcgttgttggagaaatctctgcagaagcacaaaagaagaagaagaatgttaaggcatggctgaactgggttcgccgcaactgctacagtcaccgtagagagcaaaatgcagctgcacagctcacgtagatagtactcacacaattccaagattgggcagcccagcaagctcccttgggatcggccccttcaggcgattgtgatccaaacgcctgccgacagagttgaagaaacgttcacgcaagaacagaaccaatggcaactgatgaaactaaccattgtattcccggactcacaggaactttagggacttggcgttctcgagggctgcgggtatagctcctgagatgctgttttggacaggtccaggctgattaggttcgccaggctaccgaactctgatgggattggtccactgatgctgttcccgaaaatttcactattattcagaatttcaggggtcagtgatactgatatctcgttcactgacatgtacagtacagtggacaggaaaaatttccaggcccgaagcacagcagaaggatcagaagagcaaacatgtatgcagctgatccagttgtcccagctcgggtgccagaggacccaactggttcagtctcccgagatccctgtcgacaaagatgcagtttagagcaaacaaatcgagtagtagtagtagttttgcaaaatgcttgtatacagcagatacaatcataatagaagaaaggaatgcaattctaactatgatgttttcttcaaattaagatctcaaacaaatacaat

SEQ ID NO: 72214 - DNA, 588 bp, Zea Mays
ttggaacgcatctcgaggtctagaaggaaccattagaaaaatggtggtgtatggaagaagtagaggaggcggtaacgtgggttgatgctttcacgagggaggtatttgtagcactagtgcatggaccctactttggagaggagaggcatgctagagaaggtgtggacataagcgagttcaatacctaggcgaaggtaatcatcccgataatgggctctatttttaggtcaagtcatgggggaggcacaagagttttgtaattgagggtgggcaacaaggcgattttctagttgtcgagctcgttgctaagatctatggcaccaaacttgaagttgtggactacaacgccatattaatcgatgatgcaagtagatctataaagtctgacactaagtctcttaatgacgaggcatattaccttagtatcaaagatcacaatgatgacctctgagttaaaatggaaataagacactgcaattctaaatatgaatatttttaaacaaaaaatggccaattcatagcatagaaattactacaatgttccaacaagtcatcatgttttcctaggccattgccataagacaagcc

SEQ ID NO: 72215 - DNA, 489 bp, Zea Mays
gttaactttgtgcggaccgaacgaattggggtatggcgctcgggagggccggattcgctatttccgacgaacccgctgccgtgaggtgacctgcgcgccgtgaatcaacgacggaggatggcgacggtcttctgatcgtagattgaagaggggatgacgcagattaggtattaggatagcgtttcgcccgagtagtggggtctgttcgattccgatctcgcgtccatgggtcgatcacgatcgcttaatggtctaggccattgatctggcatcctacgcctgcgggtgagtgcgggaggtattgatggaccaatctaatctgggccggtcatcgttgatctagcggccaagatcaaatcgtaccccttcgccgagagattttcacttaagcccctggactatttagatttaaacctgccatgcacgcttggatctgcttgtgtcttaggaaatgttgccccaagacccctgtactttgcagaaaatgag

SEQ ID NO: 72216 - DNA, 741 bp, Zea Mays
ggagaatttggatgaaaaatagggtcgttgatgggagtgctagagtggttggtgaaaatccttccatccaagcaaacccatcaacctcaagtcatccaatccttgaagaagtgcttctaccacaagatatgccaaccattgtggaaaatgagcaagaagaggttgctagtgaagaagccattgaacaagatgaaagtgatgatcaaattcagagacattctctagtgcctcatcctcgagtacaccagggcattcagagagatcatcctatggacaacatcctgggtagcatcaggagaggggtaacaactcgatctcatttaggaaatttttgtcaattttactcgtctgtctcctctcttgaaccacttaaggtagaagaagcactaagcaatccagactggatcattgctatgcaagaagagcttaataacttcacaagaaatgaagtctggtccttagtagcaagacccaagcaaaacgtcattggaactaaattggtcttccacaacaagcaagatgaaaacggtgtggtcacaaggaacaaggcacggctggttgctcaaggtttcactcaagtggaaggacttgactttggagaaacctatgcaccaatagcaaggttagagtccataagaatattaattgcctatgctactaaccatgatttcaaattgtatcaaatggatgtcaaaagtgcattcctaaacggaccactgcaagagttggtctatgtggagc

SEQ ID NO: 72217 - DNA, 335 bp, Zea Mays
tccaatattagctgagaaggtttggatatatctatccaacaaagatctctagaggtgtcaatgcttagtgggatcataagacacggtagcaataaggagagagagaaagagacgaaccgaagttaacataggaagaggtcgtaaaaaatatagctaaagatttaacatgtaactaggcatgtacccgtgcgttgctatggaatcaacacattttattaacatacattgagatcaatacattttattaagatacattgagattgtgaatacaaatgtgaatatcgactgcccccaagcgaatgtagacaagtgggttgtcctcggttgcagtcaat

SEQ ID NO: 72218 - DNA, 427 bp, Zea Mays
cggaatagggcatgggcgcaggacagccagcgtatagctgaattgtcagctgacgtcagccgcttgcaatatgagatttcagaatgggattcggccattgattgggccgtcaactcgcgttcgattgcttgggactgcgaagcaaaagctcgagcttgtgtggcagagcttagtgcggccctcgacaacctgcaagtgtactgtactactttacatgaagaagtacatgtattgtatgctcaattgcacccagacgtgccttccgacgctgctgcaatgggagccggaccatcaggaacagcaaatgaaggacctgatggggagttggacctttttaggccccctcctttcgtgaaccttgctgacgaacggtctcctgcagcagggaatgaagcaacaaaggatgatgaagactagaatagtatag

SEQ ID NO: 72219 - DNA, 631 bp, Zea Mays
cttgaatttgagctctctgatagagcattcacctggtcaaatgaacaaatgagccctaccatgactaggatcgataggatcttcgcgacaacagagtggcacgacttgttcccctcggctgacattcagtccatgtgcaccatgacttcagaccattgcccgcttctattgcaaagccactcttcgggtactttctacaaagggtttaggttcgaatccttttggcctcagattgacgggttcaacgaggtagtccatcaagcttggaattctacagtaaacacagacgatgccatcctactgcacgtaaagatggttcgcactgccaaagctcttatggcttggagacgcaatacggttggcaacttcaaagtgaagatggccatcattgagatcacccttactcttctggataaagctcaagagaatagacaactctcctctgaagaattagacttcaggaggactcttaaaagcaagattcttgatattacctccgctcagagggcacgtgcaagacaacactctagaatcacctggatgcggctgggcgatgctaacactaaattctttcacctaacagccaataacagaagacggaaaaatttaatcagatcattatttaaagatg

SEQ ID NO: 72220 - DNA, 414 bp, Zea Mays
tcatttcattaagaagaaagaaagaaagtaacacatacatcaaacgatcgaaaacaaccaaaaccacaagacctttacccctacagctagggactaggcaactaaaaactttggctgttacaacggtgacacctagaccatttgaatacaaaaaccacataggggtaggccatcaagacctacacattcgtagctcgtgcccagaccaggaagtcttgtagtttggaggccccagcccacctccaaagctgacattcctaaacaatccttgtgatcaaagtgagtttgttaggctctgaattcccaaagacacaagaattcctatgcttccatatctcccaggttgttaaaatgataagggaatttagtccatgcctcctttattttggtactaacttgaccaccttcctccac

SEQ ID NO: 72221 - DNA, 481 bp, Zea Mays
gtttatgcgaaaggggaagagacagattggcttaaattatggccatattcaacacaaagaacgcataatgtcattacagactttgcgaaatcgcagaacgttgggtaatggggtcccgacggcaacacaccatgttctcacatgtacccccatccattagcggcagcacacacaacaacagggatgccaaactaacagggtcgtatggaagggaagataccactgccacatctctgcgagaaaggaggcagcaagcgcggcaatagaaccaatgagaaagcagcaagcacgcaacaccatatatgactaactggtcactgcgcactgcgctacgagaaccacatagaaaagacgaactgcttcactgctatagaggtgacagatacataaaccaagtacgcatgtaatagaagggaggtccgtaatgagcacaatcaaggagtgtaatgttacctatttctcaaatgaggtctagtttgaa

SEQ ID NO: 72222 - DNA, 391 bp, Zea Mays
gggaacgatgcctcgttgcctcgaatgaggtttgtcgtcccaaaaattgtggtagctttggccttcctacagaatctggtgattcaacaaggttcttagtggctctcatgttcgttgggtaaaatggtgcttcggtggttctgatcccaatcagtttccttgccctgttgctcccatatacattgggcgtgtcttcaattccctcgtcgatctccttaggtcatgcaccttcgttgttgtgacttctttctggcttgatagttggattgttagcgacccttgtgtgtctccttctcctccctcttttctcattctgtcgagcctaaactatcggacaaaggtgtccttagtaataatcttgatttgcacctgcggcctcggccaagctcgt

SEQ ID NO: 72223 - DNA, 402 bp, Zea Mays
agtacactagccatcctttttctcttgggggttgctgctagacctttttgtgtctttggcacctccactcctaccgaagggcttagaacttctaatgtttttgccccttcaattcttgattcttcaattttgtcaatcttcggcattgcaaccggttcttcaatcctctgcgtaagagcaggtcctttggcttcaatagctgaagaagtctcaccaccaaattcaggcactgtggccggttcaatgtagcgtggccggtgagtaaggaccttcaattttttcctcttcagtgcggactcgcttggagcagccgaagcagcagctttcccagaagttgcaccctttcttttttgcccccgcggcgggtagcgataatcagggtacacaaatccaatagcatca

SEQ ID NO: 72224 - DNA, 840 bp, Zea Mays
ttgtagagctatgttaggagtacaagttttattaagtgactaaacattggtattgtacaaaaagtgcaaataaaaggacttaaagtcgggctgacagttagtctttgaactgaatattagctagcagtgattttaggtgaacattgagatcagatttgatcatggtcccgtgattgttagactatgatttctctagcaagattaaagctggagtatagatcgataactttgttacaggaaggttaacaagttatcacataaaaatttgagatcaagaccctgaaacctgctctgttaggcgcctgaatcaagctcccatggtacagtgacctgacgaagatcgctaagttcagtgtatcgccaccagtgatcccgcgttgtgatcgtcactgttgttgcgattcatgctcagtgaagtatgaataaccatgtagggtgaaaaatctagcactagggatgagcttgggacacttttccgccctggccgtcgtacccacttgcctcacggccggtccatataacctcactggagttggccgcctgccgctcgggtgccacgtgcctaagtgcaataccacgtcgtcgtgacttgccttagcatggccggtcatcgccggtggtcttgccacggtgaagtgtgatggtaaccctgcaccagtaactctgcccctctccgattgctagcgtgccattccaaattcaagagccaccaccctcgggccctataaattaaacgtgccatcagctctgttgggtcatcactaagccaaagcacccgctcctgccttcgattagccaccagagagctccaatttctttctctccccaaatcagttttcc

SEQ ID NO: 72225 - DNA, 743 bp, Zea Mays
atccaaggctccatgggtgttgcacatccattacagtttgccattcctacattctcaagcaacttctttgcataagcttcctcttttaactccaatctcttagctatctagcgcacttcaattccaagataatatgacagtaatcccaagtctatcatccaaaacactctctgcatttctttcttgaattcattaatttgtgtgcctgactccccaacaatcaacaagtcatcaacatacactccaaccacaattctctgaccacctctcttgcatgtgtacgaatcatgatcagtcttgtaccttgtgaagccaagctcacccaaacttttatcgaacttcacattccaagcccgaggaacctgtcacaaaccatagagtgacttatgcagttttagaaccttgccttcctcttcttctgcagtgaacctggggggctgtgtaacatatacctcctcagtcagttcaccattcaagaatgttgacttcacatccatgttgtggactggccacccatgatgagctgctactgccaatagaaccctgacaatctccattctagccactggagcaaaaacttcttcaaagtcaattccttgtttctgcacatatcctttgcccttggctacaagcctcaccttatacttgacaactgctatagattcatcatgcttcaccttgtacacccatttcagactatggcccggtgtccctttggaaggttaaccagcgaccatgtcttc

SEQ ID NO: 72226 - DNA, 753 bp, Zea Mays
aaccacattagtgatacaattagccaaacggttagtcaacactttggtgatgatcttatagcaaacattaagcaaacaaataggtctaaaagctttaatatcaacagcattaggaaccttgggaataagagtcaccacaccataattgagtctttcaatatttagagtcccagcataaaagtcttgaaaaagtttaaacaaatcggttttgattgtgtcccagaactcctgaaaaaattcaacagggatgctatccggaccaggagctctattatgcttcatagagaacacaacttctctaatttcttccatgtcaaaaggtctggtcaagcagcttctgtcaaaatcatctaacatttgcatattcagatcattcaaagaaatatcagtttcttgagaagggccaaataaattctggtaaaaagaagtcgccaattggttaattgcattatcatcctgagcaacaatgtcatcatgagaaagagacacaatcttaagcttcctcctcttgtaattggctaacaaatggaaatattttgaattctcatcaccttccaagatgaatttatcacgagctctctgtttgagcttagctctctcctcatcaactatttttttgagagtcaattccaactcaagtttttccattctttcattctctgaaagaccaatcacctcactaatattatcaaaggtgtcaattttagccagcaattcttttttcatctttttataatgcccttcaacatttat

SEQ ID NO: 72227 - DNA, 628 bp, Zea Mays
tggacctaccgttcatcatcaggaatttctccaagtgaagcaaccaaagcactaacttcttcggcagagggtcgcactctaaggcccaaacctccatcagcagcaggaggatttgacacaaaatgagtaaaggccttggaaggaggcaggttccagaccgagtatgcgacaggggcgccaacatttgataccttgcctctaagtatcatttcaagccggttcaccaagtctatagcaggaattcttctgttggtgacccaggttgagtcagctagacctcggtacagataggccgggtatgccctgtccttcaatggctgaatgttcttgaagacaaaatcagcaaccacaacctctgcagtcagaccccactccttcagcagtccaacttcagccagcaaagcccctgcctcagccacctcctggtccatgggggactcggtccaacttggagtacgaacatccggctgtctccctgaccgtggggggagagaatttctgtggttctcaacaataaaccactccaagcaccatcctttggtactatccttgagtgggatttcaaggtagtcagtcttcctcccacggcgcatctccaaactcgcaccccccaccagctgatgctgcc

SEQ ID NO: 72228 - DNA, 1038 bp, Zea Mays
ggcgggttctattctgtaataacataagggttcaactataaatagtgcagccgaaggggtatcggccagttccgatcgttggattagaaacctacggaacagattagatctacggctccttgaaccggtacccaatgatggccgcaggatccgagatccacggatgtagtacgtccacgtgtttgtcttaatcctatccgcccgatcaaagttctgcggcacgaatttaattcattcaaaggggtatgctaggtttaatctcggccgcctgattactcatccatggcacagattttaaattcctaagatctatttgcattcatttgatatcgcatcaacgaccagcacgtaccctggtcgaacaggtaaactcaactgaatcctagtcgtccaaacaggatctaacggtccaacttcacctatcctgtgatctaatcaacgcttttggatccaaatccaacggtcaccattcattagactctacacaaatcctgtctgcatgatctaaactggatggcctggatcgactgaccgaagcggtacgctccagtacgatctgaaccgtccatcgccctttttacggtgggaaggactctcttccagcccggcacacggctgaccgcagaagacacaccacggtggcgccatgaacagtggatcacgcgcgagcgccaacgaacactaaacctagcacgactatgcgcaaaacggagagggaaggacaacgggtagtaaggaggtaatcgcaccgcagattagtcgcacagatgtccagaccacggcgcacggcggaacgcccaggactccacagcgtcggcgagcaattaaggaatggtcggacgtcttccgccctcccgaggtggttgcgcacaagcggcacaaccaggcgaagctccccagtcgaaccacagggccacggctgcagtgcagcgctcggtcgacggtggcggatctcgcctcctgcgaacgtagcactggcggcggtgattttctggtcgcgatgagggctgacgagatgggcgggatagcgcaacaggg

SEQ ID NO: 72229 - DNA, 319 bp, Zea Mays
cagataacttcggcgctcagcctaaggcacatccagctcagcagatgccaccacttccacctccttatcagcaaggacagtacttacagcctgcaccttcttactttgatccttattttcagcagatgcagcatgggctccggaatcatatggatggacgattttagggcatgatgacacatgtggatggccgctttgatgctatgcaatctcattttgatggccaatattccgctctgcacaatagattctctactgttgacacctagctggatgggatacatttacagtttgctgatctttgaactcatattcaaga

SEQ ID NO: 72230 - DNA, 782 bp, Zea Mays
gtatttttgccccctcctttttcttaggcattccccagccactagaggtcggaaatattctatttgctaagtactcttgtactagatctctagtgctgatttcggcagctaccactctgaattgcacttcggctagctggcatggggagtcaagctgcatgtggcacaagggccgtgtcatccagaagcttaatttcattagactcataaccatattcattagcttctcccttttcttcttgttcgcctttatgtaaaaccattcgcttgtccaaccggtcggccacttggtgcgatagccaatcaccggggccttcgtatcttttcgatatgcaatgttgtagcagccaaagttcttatgaagaccatccgctctggccttcgtctggtagtgcagctcgtgcatccggcagaaagctttggcattagcatccataccctagcttcgaagagcccatatgtagacactaagtctaacgattgcattgggtgtcaactgatgaaggtatatctcaaaattatttaaaacttctcctatcatctcatgcagggggaaccgaagccctgccctgaagaagctcttaaaaacaacaacttcatcctcccttagctgtggaaccacctcctccccggcaaaccagacaagcttgctctcggcttccctaaagtagcccagcttcttcatcataaccatgtcgtctgctgtcacaatagatttcccaaattcactgtggctaggcttcatcgggctcagaatactgttgtcctcctcactttcgttc

SEQ ID NO: 72231 - DNA, 405 bp, Zea Mays
cttcggtagcagacggcgacagaggggttttctctgctgcttcgtctaccttcggttcagtagagggtatctggtcaagctttcgcttcttagaaattgttgccttcagctctggcgttgtttttgctttcttcaaggccttttcatcttcttttacggaccgggcaacttgctaacccttttcttttcacacccccggccccttcgtcaaacctttcataatctggatattcaaagttcaatgcatccattacccggttcagccttcatttcggccaggtaccgaaggcagcagtcattagctggtcctccttcttcgtataattgccaagaatttcattgcacatggtctcgatcatttccatccattcattgcatggtttcttgaactatttctaaaatttg

SEQ ID NO: 72232 - DNA, 276 bp, Zea Mays
caaaaatgctattaaaattttttagggtccaaacgtgttcttttttccgaaaaatggtcaaaatacaaaaaattcggcgttttgggactatggcatgtacctctctatgtaggaggtttggcatgacaagagctcaattctctggtggccccatagatgatgaccatgttgggctctaggccttgtaagcctaggtcatagtcgacgttgttaaggaacgagttctaggaaaacatgggttcacaaccattcttctccgaggacacggaccttgtt

SEQ ID NO: 72233 - DNA, 1257 bp, Zea Mays
tccagtcacaatcagcccaaagatcgacgacatgggagcaaggagcggttggcgtaggcccaagcttgcaatcgcccaccagtctatcgatgttggaagtgggagcacatggctcagcccccatgccgtcgatgtgggagctgggagcgcatgacgcaggcccaagttcatttacgcgattctgagattggaatcgcccctaatgacgacgatgtgcaggtagcaagtgtccctcccatattagttttgtgttctgcggatttaatgtactcctacaatttaagcatagtatttatgctattgtaggcgtgtgtagattctgatgcagagactaaggatgggagtgttgttgaggtacgacataaggtaacacctactgtgattgaggataatacagaccaagataaggcagaccaagatctggagtactacatgagattgtttcaacgtaatttacatgacctgaatcaaaatatacagaatctagagcatgacatacataagtttgatagaatagtgaaacaaaagattacgccagtacccaaaagacatgacacataaccttcctgcgtcaccttgtttacacttgcatgaccatttcctgtaaacaaaagccatgatatcttacctagcttccactagcatgctcactggacaaggagtgaagagtagtctcatataattgtcggtcacaatcaagtctgtttggaagaatgcctaaagcctccagcctctctttgttcatatgggggatcttatacctattacctccacctcccttcattacttcaatcaagcagccttgcaatgtcaggtacactctatttagaagtgtagggtcataatcttcgaattccttgcttacattgtaaattaactcatctagattccttgagaccgtgtttagtgtaagggacagcaaggaagcgaagaagcctaaatcaagacaattcatgccaggtgagtttggaggttgattcatgagtcttatattcagtcatgtttgagctgcagcgattacaaactcgggatcatcatgacgaacatgagtccgttgcattgtcctactgattccattaagttctatgtgcttctgatctaggcaacttgctttgatagctggtagaactttggcaataagaaatgatcgcatagtgtttctgtcaacattgatgcacttagtcactagtgttcctctgtccctattacggcttctcctttgtgctggttcctaatggcatgaaacaaataatcaat

SEQ ID NO: 72234 - DNA, 535 bp, Zea Mays
ctgagtttaattaggaaatgggtgtgtgagcgtggggtttagcctcgccggccatggcgcaccgccgtgggagcttcgctccgccaccggtgtccgcccagttggggcggagatcgtgcaccgtgcgatgcggcgcgggcggttaggatcgtttagttgcgtagcgcttcgggatgcaatctcgatcgtaggatttgatcggtcggattagagtgattctagggtgattgcatctgaaccgtagatcctagattcaagggcctacacagtggatcatttattcgctatgcgcgatctaatcctcgccatcaggatctgatcggacggctgagcaccctcgataccccttcggttgtcacattttcacatgagcccctaaaattattagaaaccaacccgccgtcctggcggctgagatctgtgtcttgggacttttcgcgcattaacccctgcactttcctgtaattgaggctcagtccagtggcgtgttaaaatgaataaatgaattataaaataggtttttatgatataaatg

SEQ ID NO: 72235 - DNA, 749 bp, Zea Mays
gcactgcttctgaaccataaaccatgaagaatggagtatttccatgcagagctcgactaggttgagttctcaagctccaaaccacatatggcagctatctgatccactttcctgcaagcttttcatttttgtcaaacactttcttcctaagcgcttccagtatcattttgttggccctttctacttggccgttggctcttggatgtgctacggatgcatacttaatctgaatgctgcgttgctcacagaagtcaaagaattcagagctgatgaagttggatcctaggtcggtaatgatgctatttggtatcccaaacctgaatattatgtcttgtatgaattctacttccttggctgaggttaaagaggtaatgggcttatactctatccattttgtgaacttgtcaatggcaaccaacatgtgagtatagcctccttgagctttcttgaaaggtccgatcatatctagcccctagcacccaaatggccatgttacaggaatggtctgcagctgttgtgctggtaaatgttgttgctttgataagaattggcaagtttcacatctctggactaattcggtcgcatcacacttcgctgttggtcaatagaaactagatctgaaagccttcctgaccagagttctggatgctgcgtgtactccgcactgtctggcgtggatttcatccaatagctgcttcccagtagtcggggaaatgcacttcatgaggactccagtcgctccccttctg

SEQ ID NO: 72236 - DNA, 522 bp, Zea Mays
atctcaaacgtcttcaaaacttcgaccaacatcttatggagcgtaaagcgaagcccagctttcatgaagctcctgaagactaccacttcatcaccttctggtaggggaacggtgtcttctcctccagccctcactatagacacattgtgaaagtatttgcctttcatcgcttcaatttgaccttgcctaactgtggattttccaaaaacaacgtggcttggtctccatggccgatcttcggcatcttcattctcactctcaacatcgaagctttcactgtcgcttgaatcaccagatagcctagctaacattttgttggtgatcttctctacattggtcctttccatggcttcatagaagccagcgagtgtgggatcaacgcttttcttgttctcagccatttcgatgatggtcacggtagaaagccgaagtcacaaacaattgcactcagagaacaggaaaactaaaataacaactgcaacacgaaagctagatggcacgaaaaatattcgtgacacagcc

SEQ ID NO: 72237 - DNA, 453 bp, Zea Mays
tcggaggaaagcaaataacaacacttggcaatatatcaatgctagtcacctttcgctacattaccaatacaagaactgaagaagttgtgtttgataaaatggacatggaatacccctacaatgtaatcattagtaggaacattgaaagtatttgaataagtgttacatccgtcatacctttgtatgaagatatcgtccaatcaaggtccaatctcaatacatggaagtcaagaggctgcaagaagggttgaagggagctggacagattctaaagctatgcacaacttcaacgaagccaaagctcaagcctggcaaaaatgcataagagataaagcgacttcagtagatgagccgaacgcggtccttctttgcgaggatgtagctgatcgaaaagtgttctttggatcatagctgacgcaataaaaggagagaaacctaaaacagttcctattt

SEQ ID NO: 72238 - DNA, 418 bp, Zea Mays
aaaaatatggtttggaaatttagaattctcaaaaccagggggctatctcacatagtcctcttcagatatacgcattcaaaaaggcacttttgacatacagttgaaaaatcttaaaaccctttgaagcaacaaaggctaaaaggatcaaaatggcctctaaatgggaaataggggcaaagatctcctcataatcaataccctctttctggcaaaacccttggacaaccaacctcaccttgtttctcactaccaacccatcctcactctatttgtttttaaaaacccattttgtacctatgggttggcagtttgtaggaggtggcaccaaacccaaaacatatttctcttaaaattttcaagctcctcatgcatagcatcaacctagttaggatcaaacaaagcatgtctaacatcccgg

SEQ ID NO: 72239 - DNA, 659 bp, Zea Mays
ctggttctccatagcggatcctcttgcggggaggggataacgccatggcatggacttgaacttcagggggaatccttccatcaagatgagcttccaaggctgcgatccttgcgtgtgcatcctccagctccaagtgtaccctagagaggtccagggtagcactatccaggtcggtgttaagacctgccaccacaccagctagggtgttgaggcgatcttctccagctccacctagaacaatgctggtctggctttctccacgaatatgcagaggaagatgcatgtacttcatgttgtgcagctgctgccggtaggtgtggctgagggaccacagagtttgcctagtagcattgctgaccgaagaagcataggtggtagcggcgtcagagactcatgagctgatagagtcctgaaccctctatcacctgcatccatcaccctgacatgaatgcgagtgatgtagtagcaagcccgaggaggctcacacactcgcctggtctcatacaggggtcggacataggttcccaacacatacagaacatcaggttagggaagtgccctgtctcgaacattgaggtataatgttcagtgacaggccataaccccaagtagtggtcctgctgttcatcgttggcttcatcgttgatgttttcttctta

SEQ ID NO: 72240 - DNA, 471 bp, Zea Mays
cactctcatcaagagtgtggctagcaaaaggttcaagtgaacaatatagccaaccaacaacatccaggtgaagcccccttcaacgccatgattacatcccgcaacaaggctgcggcggggcgaggcaagaggcaggggcagcggaagaggcccccaacatcaaaaaaagctctattgtgtcttccatggcgaagacgtaggcattcaactagagatgcctggtaacaaaggaagccaaagatcgcatggctagagcggtccccacaaacaactagcgagccatagtccacacctatcaccagcaataccaccatcacttcaaaaaggaacacccaccccacccccaataccaaccaaactacaaccaaaagaatcccccaaaacccacaactccaataccaagaaaggctaccactcccacccccaccgccaccccaagcaaaccagcaaccccgtcaatcaccgtctcca

SEQ ID NO: 72241 - DNA, 818 bp, Zea Mays
ggatgattggcaacagaaaacatacccatcatcataggctctccttccggtgtggtagccacttgagtatagtagatccacctagttttcctttcgcctttgttttcctgagtgcttgccacatttcccttgccttgagaggtgcttccaaaagccttttggaagtttgatttattttgcttcagatagggacaatccttgatgaaatgcccagacttgccacatttgaagcaattgttagatgaactgggtaaggctgggaaacgagtactaggggtactcggctgaatagtttgtgtaggggcagcagttggatggatgaagataggttgcttgaaaggataggagggtgggcgaggaaaagagcgatttgggttaaagggacggatcacctactttgactgcttctcggatccttgagaggatccctcacccccttcacggccaaacctttttgtctttccctgccttgaactctttgcctccaccgagagtgctatgctcacggccctactgaaagcgagatgtagacaagtggccattttccgctgtagccgatcattcagacctctcatgaaacaattcttcttttttaggtctgtgtcaacttgctctatagcatactgagagagatggttgaatttagcaaggtattgcatcacagaggctcctccttgctttaagcaaacaaactcttccagtttcatctgcagaacatcatctggaatataatgttccctaaacgcttgcttgaactctgcccatgtgacaagatgaccttcaggttgaacacctacaaagtttgcccaccaggtact

SEQ ID NO: 72242 - DNA, 370 bp, Zea Mays
ccggaatgtctcgaaatgttgctgaaagggccgtggacgatggagtagtagatagtgcacgtatagtatagtgggaggggaggtgtgctttcctataaaggctgggctgctgctgcctgatgtgctagtgcatcttcagtagttataaaaacaactctctaaaactaatttagggtgttattaaccaaaaatcacccaccaacagtttcttaaatgaggtctctaaatataccaacttcctatgatatcactatttagtcctgagacttatgaagttgtttcacactctcaatagcctatttcgcatgtgaatcgcaccataaaattacttgtccaccatcgagtttgtgctcatgtacgagtgatcgat

SEQ ID NO: 72243 - DNA, 671 bp, Zea Mays
gcgatgaccagcccagtcccgcagaattgctcggcggagcaattttggcatcccggatccgctcaacgtcgtggggagcccgtttctgccgccactgtcgatatgaatcccctcttgaatactcgcgttgaccttagcttcgtgtaggaattagtcggcggtggagtctgggctccgggccaatggatggctgggggcggcaatggcaccgccgtctgtgcagggcatgccatcggccgacgtcaagaggaaagagaggggtgagttgaaggggataagtcggggccgtccaatcacattccatgcgggggattgggttcccatatacccattcgctccaatatgatcctagccatcgattccatgttgtgcgaccaggattagatatcaggtaccgtttcgaccaatcgggtttgggcgtttggatctagatccaatggtaggtagtgagtgctggatcattaagaagaacgatctaatctgggcgcttgaaagatgatccaatggcccagatcacaccataccccttcgtcgagcccaatttgcatataagccccttagcttcattataatgaaccggtggtcacttagtgttcaaagatcataacaccaaggccctgaacttcgcagaaatgaccctgggctctcaggattttgtacccagtgtccct

SEQ ID NO: 72244 - DNA, 428 bp, Zea Mays
agattgaccactttttggctagattagtggatcaccctcgatcctctctgcgataccttcccctcccacttctcccattctacccagcctaacctctcggcatatggagttttcaatcacaatcatgatttgtgcctacgccccgcctaaccaacgcgggtgccgccgagcttgttttgctgcttgacatcttgtctcaggtatacctatcggacctctacgacgaaagaaagatgatcaattctggggagccttcttttcaaaggaaacatatgagcacatgtgtcggaaggtgtcgcctaggagcttgacgctgtcgtagatctgggggttaaaactacccaacaaagtaaagatttttctgtggctcctatttaagaacatgttaaatacccgaggggatctgtacaagaagaaaattctacccg

SEQ ID NO: 72245 - DNA, 868 bp, Zea Mays
ggaaaatctatgcatagttcttctctttcccaggtagcctcatcttcaccatggtggctccattgcactttgcacattttaatcactttgctccttgtgacatgagtcagtgtatcaagaatcttgatgggatactcagcataagtcagatcatcttgaacactaagatcctctagtggtacctgctcttcaggtaccctgagacacttcttcaattgtgattcatggaagacatcatgtacatccacaagatgatcaggtagctccaattgatatgcaacctctcccactcgctttaggattaagaagggtccaatgaatcgaggggacaacttccctttaactttgaatctcctcatacctcggattggtgacaccttcaaatagacatgatcaccctccttaaactctagcagtcttctccgggtatccgcataacgtttctgccttgactgcgcagttcttaaattctccctaatcatttgcacttgttcttctgcctcttgtataagttcaggaccaaagaactgcctttcaccagtttgatcccaatacagtggagtcctgcattttctgccatatagagcctcaaacggtgacatcttcaaactggcctggtagctattattgtaagagaactcccatatggtaagctcttatcccaactaccaccatgtttaagggcacaagctctcaacatatcctccagcaattggttggttctctcggtctgcccatcagtttgaggatggtaggcagaactgaaattcaactgtgtgtccaagcactcatgcaacttcttccaaaaccaagaagtaaactatgatcctcggtctgacacgatcttcttaggcaccccatgtagaca

SEQ ID NO: 72246 - DNA, 580 bp, Zea Mays
agtttgtggcattcatcatgagaaagtcgaagaggcttataatgtatgtgttgcgctggccacttatgggttcggtccttatggactgatggctgctccatacacatgttggcccatgttctttatgccattcaatctccccctagagtatactttcaatggcaaaacatattcttgtccttgataattcctggacgcccaagaaaaaaatgagtgtgtacatggagcatgattgatgaattgatccatgcttgggagaaaggggtatggacatacggtccagctacaaagaaaaacttcaaaatgcatgtttggtaccactactctctgcatgacttctgacttatgggcttttatctgcctggtgtgttcatggtaagttttcatgcctagtttgcaaggaaggtcttaggttcatttggttgaagaaggctcgcaaatatttgttgttcgataaacatcggtaatttctccatctcttgaccatgcattccaactagacatcaagaacattacaaaacgtgtcatagtgacagacccccacctacaatgatgacaggtgccaaagttcatccataga

SEQ ID NO: 72247 - DNA, 460 bp, Zea Mays
ggattggaggaacttcatgctatggacaaatggtaaaaggtatcatggttggctacacttatggatgcccattgttcatcatttgaggagatggaattgaatgctcaatgcaaagttataacaataggtttttgttttaccggtcaagaggtgcttagagattgataattgaccgggttagtaggctagatagtcgtactatcaagaggggtcaattatcttacttgacatgtctttagtgcctcattgctcatatagttggtgcatttgcatgagggctaacaacgctttggttcgtgaaagaaaaacttattcaaaagcagtttttgaatatgggttgaattgaggtactgcggaccgtccaggctagcatggcggaccgtccgcggggctaacttgaggtgatggatagaaacctggagcttctgtgtttcgtgaagtttttgtactacggactatc

SEQ ID NO: 72248 - DNA, 629 bp, Zea Mays
cagaggcttcacaggggagggggacttcagcgtaggctcggtgagaggtctcggcagccatgcttagcgcggcgcacagtagaacaatagagcacatcgcggcattctccgatgaacagcggcgcggcaactaacagcaaggcacgcatgtggccagcaatcagagaagagcaggggcgaggagaaggtggtgagcgcacctcggcttttatagcaggagaggggagagagaaatgcagccggtttgaaggagattgaatgtcaataatggtggtaacgcttgccatgattatgaggaatcactgcagaacgggctttaatgtgggggaggagaagaaccgttgcgcataggcgagggaggagagtggcttgcggccagattcaatactccattgatgcggattgaagaacagcgttacccacacgaagaaacagtcgcggcggccattaatggagatggagcacggtggaagaaacggtcggcacaagtgggagagagaaggcaagtcacagcgcagcgcggatgcgaggggagaagtcgcggcggtgtggttctgcgcgggatccccggcaggcgacgccggcttctgttcgtagagtcaacaggagaagaaagagccacaaggaag

SEQ ID NO: 72249 - DNA, 694 bp, Zea Mays
gggaaaagtaggtaaagtacaatgctcagattgagatggaaaagaggatattttaaaggccagtataagataaacatcaaggtaagatatataggtgataaggataaaggagataatgatgaaaagcataatccacggacagagttaatgcaagactcgcaaagtgacgagatggagaaaacaatcaaggataagataagtgaggttccgacagaagagttgaagtaaaaattcattaccgaagaaagttacgaggaattaacgagatcacccaggatgtgcaaaataaaatgatcgctcatggatcattaagaaacaagggtggtcaagggcatgttaactgaaatgtcttaagcagacattggggtatgaagataagcatacatgaaaatataagagtatgcaagactccaaggatacgagcatactaagaccaagggaatagaaattgccgatagataatgacttaacaacggaataagaagggatctcaaaagacaggaaggtcatgaaaatataaactgaaatgtttaaataggcaacatagtttttagagttaagtatttgaattaagggataagggtatggaagaatccaaaagatgcaccatgtcaataccaatggaatagatattgtcgaaggttagtaatttaacgatagaaaaggaaagaataccaaaagacaagaaagttat

SEQ ID NO: 72250 - DNA, 1137 bp, Zea Mays
gttcttggttgattggtacaaacccgtatgaccttcatctttatcgtcaaccactttctatggacatcacacatgcgcaccacaaacgaacatggttggtccacccaactcaactgtaaacattactccgtttacaatcacttatcacatactcgaaccacaaatacacatatcaatcttatgtttgcaaaacagttatctagtaccttattctaaacctccagagctagtcaactaataagttgttagcttgttttagctgggttagagcagctaacatctaatagctatggtctattagctgattcgttcttaatctctcatttaattttagttgctggctattagttttagatgtctgaaacatggcctaacacctgtattttccttgccctagcattgatgcttcaatcacaatcgcctcccttcgttgcttttgccaattacatggaagatgcacacgcacagtgcaacactactgctattgttgcatcgggtcctgtactagatgtgcgtagcagaagctttacgcgagtcttcagtctttcaccgttccgcgtagtcgttgccggtttgcagatggactttcgcgtgcaaagaacaaatcgtcagtgagttcccatgtacgctttctctgatctgtgtgtactcccgtccctctcaaacacgtacgtgtatggtggagagactggagacgctattatttctttagttgcttgcgttcaggctcaacctttaattccaaagttcgaacccgtcaaatggttctaattcgtgtattggtccacacgttcaggtcaagtacgcgatgacatgcctgcgtgtggtttggagagacactcctggtttcagtcccgttgctttcgtcccggcgggtacgctatttggagctgtctcagtccagtagctttccttcaggctttcagccaagctcgcttgattcctgcctccaacagtagcaagagtcgaagtcttcgtgagcattgtcacgtcctctagctttctatcctcttcggacgacgactaacttttgatttcacaaaattcgttcgtactgctgtttgttttaatttgtttggcaagatcagatagttcagacgacttcagagttcagactacatagacaccactattgag

SEQ ID NO: 72251 - DNA, 873 bp, Zea Mays
ccaccagcttgatcacgtatgtaggggcaccacaccagcacaaaggaagcactaaagcatcaatccaacaaaaatctggtcacacccatacaaataaatgatgggctttaattagaagttcagaaaatcatatcaaagggaaaataaaaaccacagttacagttagtgacgaactgatgaaggagcattcgtgtacattcaacaacaaggccatgaaggcatcaacagcaaggcaccaatgccaccaacactccaatagttttataaaagaaagaccaacaactagacaagtgaactagtctacataactactaactagtattgggtagcagcatcacagattcatagaactagtaatagcaatcaaagattcacggagcttcaaatgtccatctccatgtcgttatcgatgtaactgtcctccgatcctcctcatcagccaggttctcctcctacaaaattatttactggtcaaggtttacatattgtacagttatttgtttgacaaggactcaaggtttacagcttgtaaaacactgtcaacaaacctcattcgtcaaggtacatatcgtatcgtcaaactcatcaagaattggtcccatcacaaccctgcgatcttaatgtgacattatttcaataattagtaacacaacaataattgacatatatgaaaattatgaactatgaagtatcaacttttacctttactagatgcaatattccggtccttggtacaaactagtgcttcgacgacctcaggctctaaactactgcgaaatttactaacaatgcgcccactagagttgaaagcatattctaaggtgacattagagacttgaacaacaagtatatcacgagcaagtcgcgagagaa

SEQ ID NO: 72252 - DNA, 441 bp, Zea Mays
ttgagaacctcacctcacccctggtctttgcgtgtatcgagctactactttactactgtctctgacagcgcatctgctgggatgaggatgagccatgaacaaagcaacatgcatgcatgtcgatcgacacaatgatatttatgccagaaatctggccaaaaacctcggaacatgctaacgtgattgccaaagttcctggcttgctttttcatgcgcgctgttcatgtgtcatgcatgcatcgcatcgcatccatgtggctaccatgcacaggtgactgcacacaggagccagatgcaggctggtagttcatccgtgcccgtgcgtgatgctgcacgccgggtagggtaggtaggcattgctatttgctcagctcctgtctggctagctaccctactaaaacaagcttgcgttttaagagactgttgttcttgtaaacaaaa

SEQ ID NO: 72253 - DNA, 731 bp, Zea Mays
ctgagactctgcacgtctcttggttctcatggcgatcttctcgggcgtggtcgcggtggcggtccctaggaggcgactgacgctgggcatcatgccgcctctcctaagccgatcggcctggtgctgggctgttcgtagaagctaccaccgactctgtcctggtcacgcggatgcgtgctagtgcaccatggtcttgatcgtactcttcccgctgcctcatctcactttcatgtcggcaatcgcgtgaaagcattgatgttgctctacgcgtctcgccgactgttgatgacgtagcgcatgtctagtgccggatgggcggggggaagaagatggttcatcgcctaggtgtgcatcagtcgataggcttctgcgcctaggtgtgcatcagtcggtatccttggcgatttgagcctgaactccgttgacttcactcaacgtgttcagggctcgagcgaagtcgggcagcagaaattggggaaggagtgggttttcgcgtcggagcttggcatcatgctccgcttgttcccactcgctcttctaggtgtggcaacgatcgcgatgtcatgaattgcggcgttcgtggagcgccctgtcgtcaggagtctctcctgcttcagacgcctcgttcagggaaacaggctaagcaggatcccattccccttcctcatggttacgccgcatgttacggcgcctgttccaacgttagtgtgcctcagtctgcggggatcctc

SEQ ID NO: 72254 - DNA, 1123 bp, Zea Mays
ttagtaattacattgtatccatttaaaccaaattctttaatcattttatttttcatggcaatttgttcatcatcatcattagtgaagtcatcactaaataaagttaccttatctccttttgccatgaggcaagtaggggtgtaggagtcgtcgaagaggttggtgaagagttgtgaggtcgaagtggattgaatggcgacattagccacctcttcttcttcctccgagcttgaactctcttcgtcggagttccattcttcacctatgtgggcttggccatacttcttcttctgaagtatcccttacccttgcctcccttcttcaacttgtcccttttgtaatctttcttggcatcttgttccttcttgtttggacaatccgcaatgaagtgaccggtctggccacattcatagcatgccctcttctttccttttctttgatatttgtcattcttttgtacaaacttcttgaaagtcttgatgaacatagccgtgtcctcatcacttgagctatcttcattgcggtctttgcttgtggtctttgcttttcttggaagaatcttgtcatttgacaacaaggcatgtgagtctcttgttttgattggagcttcttcggactcatgttgttgaatcttggcaaatagttgatgatttgtcatctcctcataatcatcacgatctcgaataattcttgccaaactcttgtccttttctttgtaggctctcatgaatagcctagtgacctttgagtcgcttcaatcttcactacccaacacccttattttattgaccaataccattaaccggtcaaagagtgattgaagagattcacccttagaccagtcatatctagcaagttcgctttccaaagcttcaattatgtgtcttttggctttgggatctccttcatgtgactacttcaaaatattccaaatgtcacgtgcatcttctcttccttgaacttttcggtactcttccggacaaaggcttcctttgattatgctcactgcttgagcattgcgatgcacctcttgcatcatttccgatgtcatctcttctccttgggtaggcttatgcatacctatattgacaatgatagtcgcctagaggggggtgaatagggc

SEQ ID NO: 72255 - DNA, 418 bp, Zea Mays
cgcgaagtaaatcaacgacgtcgccaatgggagcctcccttccaacgaaccgtgagtcatcactttcaaagcgacaaataacaagaaggcactccctagcaaggtggcgcaagttgaggcggttggcctcaacgactaggagatggtgcttgttatcaagcgcttcaagaacacactacaggggctcaaggactactcaaacaagggaaaatcaaagggaagtgtgcctgcttcaagtgtggttattccgatcatttcattgctaactgcccgataatgagaatgaccaggacaaggagaagaacaccaagggaaagaaggtagagaagaaaaggtcgattgaatataccaaaccaatactcaggaacctgcacaagtgtctgcacaaatttagaggaaaaagtgcaaagccaagtgc

SEQ ID NO: 72256 - DNA, 379 bp, Zea Mays
ttcaaacttactataggatccttgggtcaaaacctaatggaatcaaagatatggcgcttccaattcggccccgttccactatgaccattcatgttctcaaacttagtttcagtggctcaacacagttctgacagagcaactttgggttgttgtttctttaatttttgtataacaaccagagaagataattgtaccaaagttactcccctataatccaactttaatcttgctacaaaggtcttagccaattacccattaaatcgagctccaccagatcctgaagttggccctgtatcactagtttttctgaaccacacaaattctcagcctgacagccaaacttcagaaccatttaactcctaattttgtacaataccca

SEQ ID NO: 72257 - DNA, 443 bp, Zea Mays
ggcagtggtaggacgaatgaaaacaggctgtttgaatggataggagggtggacgaggcaaagaatgattctgattaaatggtcggattaccaacctggttcgcttctcaggtccctgattggacctgtcacccccaaatcccttggattttccttggcatgtattcttggcttctaccgtgacaccccagtgtcacctagggttccttctttaagctaaccccaacctattatcacatgtaaacctagtaaaggaatgaacattaaagattaagaacaaagatttataatgagtctcctcaaattctccttaatcttgtcatgaaccttaaaggaagactctcaaaccctaataaatcctaagtgagcaaattaagcataaagggtaattgggagaaatcttggggaaaaaatacaaattttagaaaaaaccaaattacaaag

SEQ ID NO: 72258 - DNA, 606 bp, Zea Mays
tcttgctgccctcaccgacagggcagtaccgtaactggactgcgccgccgcgggcttgtttcacgtcgtagctggtatttccccctgtagcgatccactagatcgctctctcccgtgttagatgcttcctcgactctggatgtattggttcgactcgatggtggggattctgaggcgtcggttgctgttgcaccgacgaggtcaccgaagggtagggcggagctctggcacctgagcgcttccgttaggaagaaatgtcgtgggttccttgattcgtgagtgggcggtctagattggtctggggataacccttcgtagggttaatcaggtccacaggaacatgaccgaacaactgtgatctgttggtcgtgtaccgtttcaatgtgatcgactctagcccttggatcaagatcgagtagagccgacaggatctctattaattaaaagccgcaccatcgatttcggatccaagagtcacgatagtgtaccggatcagtgtagtgaacatctaattgacatcgtagaattccgatccaacgtcctaagttcctagatacctcttcaacggttacactttataaaagagaccctggaaaacggacaaat

SEQ ID NO: 72259 - DNA, 1245 bp, Zea Mays
gcaagttccaacaatcgacaatcacattatcattcccctttttatgtttaatgatgtaaggaaaagtttcaagaaattctacccacttagcatgtctacggttcagatttgtttgactacgaagatgcttaagtgactcatgatcagaatggataacaaattccttagaccacaaataatgtttccatgtttgcaaagatcgtatgagagcatataattctttatcataagtggaataattaagaacagggccattcaatttctcactaaaatatgcaacgggtttacctccttgcatcaaaatagcaccaatgccaactccaattgcatcacattcgagttcaaaagtcttaccaaagtcacgaagttggagtagtggcgcgtgagtaagcttctcttttaaaagagcaaaaggatcctcttgtgactgcccccaattaaatgaaacacccttcttggtcaactcatgtaatggggctgcgatggtgctgaaatccttcacgaaacgacgataaaatcctgcaagtccaagaaaactccgcacttgtgtcaccgtcgatggcgttggccaactctgaatagcatgcaccttagcctcatcaacctcaataccctatggagtgacaacatagccaagaaacgatactcgttcggtgcaaaaggtgcatttctcaaggttagcaaataagcgcgcggcgagcagagcatcaaaaacagcacgtagacggtcaatatgttcagataaacaagtgttgtagatcaagatatcatcaaaataaaccaccacaatttttccaataaatgggcgcaaaacctcgttcatcaaacgcataaaagtactaggggtattagttaatccaaaaggcatcactaaccactcatacaagccgaacttggttttaaaagtagttttccattcatcgcctaatttcattctattttggtggtacccactgtgcaaatcaatcttagaaaatattttaaaaccacttaactcatcaagcatatcatctaatcgaggaatagggtgacggtaccggatagtgatgttgttaatggctctacaatctacacacatgcgccaactgccatctttctttggaaccaaaatgacaggaacagaacaaggactaaggctctcacgtacatactcgtggtccaaaaggtcttggacttggcgctgaatctccttagtctcctcaggatttgcttgatatgtagcacggttgggcaagctcgctccag

SEQ ID NO: 72260 - DNA, 572 bp, Zea Mays
gggacaatcgtcgatctagcctctcgtaagtcttgccaaggttcatgtcaatgaaggcatcatgcactgacttgtggaccgtctcctccatttgctccttcaggagcttgttgtttgcctcaaggtcttggcggctaacacattcatcgaagtctgtagggacctttgcttcttcttcgtcgcctgccatcgaaacacaaaaataggaaacaaacggtgacagttatccctaataatttcactacacgctcctctcagctggaacacaggaacactctctaatgtatcttaccaagctcttacaagtgtctgacaaaatacaagcaaaggatggtacaatcggaggctggttcgtgatacttaccaagaggtagtgaaaccgcgattgcaaggtcaaatctgtattggtcagaagatatagtatgtggagctttaggacaggcacaatacgtatgtgaatgtggaacaaaatcgagtgcagatgagcgaagttcaataaatatccaaagcacaagtcacaattggtggctaagagatgtatccgaggcgtatcacaacaagttggaacaaag

SEQ ID NO: 72261 - DNA, 358 bp, Zea Mays
tttgcgatggtttccggagatggtaaagggggtacggacgaatgagactaggggaaataccctgatggaaaatgacaggcaaaaatcaaaagactgcgccaatacctttggggttgggctaaaagtactagcggggatctcaaaaaggataagaaaaggatattagacaaactagacaagttagataaacatgttgaggtaggtaatctaaaccaacatgaaatatatttaaaacaatatctttagaatcgcttagcacatatgctatgagaggaagaaataaagtgaaggagctgttagaaggcgattcaaacactaaatattttcagttgattgctaatggaaaacattggaaatc

SEQ ID NO: 72262 - DNA, 462 bp, Zea Mays
ttcggacacacgaagtgcttcgcagtgtcctcgtcgatgacagcacgatctccgcaattgcatcgaggcggcgagtccattcttctttctgttgctacctccttctccgcatccgtcattggtggaggattcggtggaggaggtatccaacgcttaaaacactcatgactggtccttccacacaaccaattagcgaaaagaagatatcgagggtcaaatttatcaggaccgtcgatccactggaaaagaaacacctcaggtgctcctaaaaaatggaacaaagcattattacgcatctagtaaacaatattaagtcacaagttataagctacgtacgcgttaaaaccgccacaaaggtagaagcagcgagcagccgtgtctggatgtttggattgacatacccaagccagtctgccacattcacagttaggcacaggaagttcaggaggaacatgagcatcc

SEQ ID NO: 72263 - DNA, 443 bp, Zea Mays
tctaatagtttgctgcaacacacctatgccatggcaataccactagtcaagaaggtacagccatatagaacaagagatacatactaccataactattcccatttcatagaaacaataaccaaccccacagttcacatgcccatacctagattctttatttgtagaaatgccagattgcaaattaattgtgtgacccaagaagagattatactctgaatcttgatgccaaatgcaggacgcgtcacatgtttgcagtcatgtaacctatgcacattgtgtctgacccaactcatctaggactacacaagtccatgtattatctgcttgtgaagtgtgaatcataagccaagatgcaaaattaatcaacagaaggaaacactacattcagtcattcacagcagctaaatgcatattgtgggatctagtttgacactttggctgat

SEQ ID NO: 72264 - DNA, 558 bp, Zea Mays
gttggatgaatttgtccctatattcactcacggacatacttccttgcttaagggatagaaactcatttcttttaatcttcatgagtctagcaagaatatggtaattcctgaattgagtggagaattctgcttaggtgattgtgttggcggcagcatgagcggcacaatacgcatcccaccaatccacagtgggaccagtaagacgacctgatgcgtagagcactttctctctgtccgagcactaagctatgttgagcatcttctctacagactttagccagtcatctgcttctagtgggtccgtggagttagagaaggttggtggtttgtgactcagaaactcctggtgcttatccctgggtggaactagtggtggaggtggaggtagtggtgcttgctgctgttgcgcccttctctcctggcatatctcctctcgctcttggcgcatctcctggcgtatctcctctctttcttggcgcatctcttgacattcatgtcgcatctgtgcgtgcatgtctgccatagtgtccgccatttgctgcattattcgcatctggg

SEQ ID NO: 72265 - DNA, 895 bp, Zea Mays
ctcgagtgctaaagagggccctaggaccaccgctagattaaaggcttatagcgagcccatacttctctcaagacgcctaaagaatctaattcatcatgtgcctgacacttactacatgtttcattagaggagtgttggcaagtgatgtggcaactaggttcctggggcaatcaagagcgcaaggggaggatcaactaggctaagtagagcgacctatcatggtagagtggattcataccatgatttaaatattcctagggtttcatctctagaccttgtcactgtgctttgcgtagggttagttgtgagtcatcgttgccttcttcctggaagtcaaagcagtggcaatagccacttttcatttctactctctctcaaaggaggcacatggtgcctcaggcttggagcccaatattgattcaagaacaaatgaaatataaccaataattctgtgataagattaaatgtaagtttctgtggatttcaagtggggaatgattcccaagtatgccagatggaaccatctcatcacatacaatgagaatctcgctgggcgttaacagcattgggtggtcggttatactctcacaattgtcacatcacatggctcacttatcatatggtccgtgtgatcctttaggttcttcacttgggaatagggagagagatagaggttaatgtatttaattacaagtgtgcaagttttaccttttattttccttacatggcccacaaccttttgcccttttcttcttcctctagtcatcttatttctccaatcatcttcctctatgtagtagcctttcttgtctagtcgttcaatcatcatggtcgcaacctatgaccttgactagttgcctcatggtagagcgctcaatcaagagggtcttgaaaa

SEQ ID NO: 72266 - DNA, 392 bp, Zea Mays
cgcgcattcctcggtcgaatggagctgaacaacatcgtgggtgcgcctggatcggtaaccgaccccacgatctcgtgcgccgattgctgggagctttattctactgaaaaaacctgctccacgccttagaaaagagttatagccaagcctcagttcgaatggttcgtgacttcttgcgttcaagctcgccacggtgagaagacccctccggtgagtcgtcttctatcttcctttcgtaccccatcgtgctatcgttgccatccatgaaatctcgcaccgcagttcgcaaccttatctcgttgtgcgccacccgcagccacgacatcatccttcggcgagcagcctcagccgtggtggtcggaccccccttggtgtgcccctatagcccctgt

SEQ ID NO: 72267 - DNA, 617 bp, Zea Mays
ctgaacttgaggcagcaggaaagcagctggcctctaaggtaatggtctcatagtaacgtcaaatgtctccatacagcagaagttcacatatttgttttagttcaggccttatgaacacataatgacccccaccaaaaaaaaaagaagggaagaaagaaacttgtgatgcagttctgtgctaattgagtcggaaccatttacagtcacaaagcaccatctctctatcaaaacaaagtttttatcttgtttcctgacggttgtttcgcttgtgtcatcacataacaggcagataaattgaggatagaactcgatgtgtggcagcggatgtaccagggcctaagtgacaaattgcgatcctacgatgggcttcaaaggttgcgttgcagtcgccattgcagcagctccagtattgggttcatatgagctaagagaagcaattccagcgttggattcacaatcaagttagaaatggcattagtccctcaaagtctatcttttcgtgactgtagatctggcagtatattatttgttagacctagtaagggtttttggggctagtccccttgtaattaactgcataccctgtgtaaggcagacccatctatacttagtctatt

SEQ ID NO: 72268 - DNA, 314 bp, Zea Mays
gcagtcagtattctcttatgaagtagcgtccaagcaaaaaaacggcacttcggttccactttagccttccaaatggggcagagattcattctgctgaaattggatgcgaattgtattttgtatgcactgctagcactgtactgcccatctgtcgtccatctccaagaaatgttgtcctctgtcccgttgagctcttgcatgctaccaatggcctgccaaagggaggcgaactcactaaactcccctcacccgtgaatggggagcataatcgaatccaagtgttgttagtgagcgctttggcgaccgtgatgttc

SEQ ID NO: 72269 - DNA, 323 bp, Zea Mays
ctagataaccctttcgatttggataacctcagtcaacaagatagtactttccttgaggaggatgtggaaactcatccttgtacttgttcaacaaagtgtctctccatatgcgtgtgtcatgagctgacccaggccatcccgccaccacaaatgtgaacctcatactgaaatcacaaatagccataacattctgactacaatatccatgtcgattcatatgcactgcctgctctgatgatggaacagtgactccgatatgggtaccatcaatggcgcctatacaatttctgaaatgaggccaagatctatgctctcgatttttt

SEQ ID NO: 72270 - DNA, 587 bp, Zea Mays
aaaagagacaacctaaaagtatagttggccaaacgggcggtcagaccctaaactctaaacctaaacccgacacgacacgggcccttcagatgtaaaaaatcattatgtgtacatcaaaataaaaacatttatataatgaggtatatcttgacaaggtaattatttatttctatcattaactattatacaaaaatatcgtcatgcgcaagtttaacaggtctccgtatggaacgaatatgtggaatacttccccatccccgttaacccgtcaggggagaactttccccccaatttacatccccatcctctaatggaggaattccccatgaggaatcaaggatcggagcccatcgccttctttaatccatgctcagaaattgcaggaggagacagccacgaagcaaattccagggtcgtgatgccgagattggttcacagcaccgtagactctaaaccaacatgagtcacgcactgtctctagtagaacttgtatatgcccatgtaaagtattgttttacaatgtagatgatactgtttgtaaagtgaaatttaaaatagaggatgagaaaggagaagagacaacctaa

SEQ ID NO: 72271 - DNA, 571 bp, Zea Mays
aacaagttcgtgctttttgccttcatccttcttcttgggcattccccagccactagaggtcggaaataccctatttgccaagtattctttcactagatctctagtgctgacttcagctgctactactctgaattccacttcggctacctggcatggagagccaagctgcatgtggcacaaaggccttgtcatcccgaagctcaattttagtggactcatgaccatagtcattagcttctcccttcgtttctcgtctgccttcatataaaaccattcacttttccaaccagtcggccacttagtatggtagctgagaaccagagccctcgtatcctttcgatacgcaaagttgtagcaaacgaagttctcatgaagaccatctgctctggccttcgtttggtagtgcagctcgtgcacccggcagaaagcttcggcattaggactcataccctagcttcagagggcccaaatatagacactaagtctaacaattgcattaggtgtcagttgatgtaggtatatttcaaagttctttaaaacctctcctattatatcatgtagagggaaccga

SEQ ID NO: 72272 - DNA, 526 bp, Zea Mays
tttgtatctagtctagagtataagctaaatgttttcagctttcatgcacaaagtgagcagctctgatcccgccaaagaaatcaaaggtgagagtaattttaggaggtgccagagagcccggtaataaacttgatttgaagttggcatgcggccatcgatggaagttcgaaaagacatgtacgtatattttgtagatttgtagcatcttttagacgacaggcgctccgttcatcgtatgtggaaccgggcttttcttttccacacccgtggaataatccccgtcctctgctacaatgacatgggacgctgtgtgtaatttatcacctgttgtactggccggtaccagtgcacacagtactgccttgttcgattattcaccggccgtcaccttatctggccattaataaaccacagtgcaatctcggcttttgctttcgtgtcacatatactcgatcgtaagcgagaagcagtgcaggttaatctcagcatcagccggttaattactactctacaagctctccactcc

SEQ ID NO: 72273 - DNA, 472 bp, Zea Mays
gcaagtatcactgactcaccagaggtatggtacacacacgaatttgaacggagggagcacgggaggtctggtcaacgtgagggcgctctcgggggtgttctacggtggcgatgcgatgttcttgatgccctgctgcagtggtgttcaatcggtcgagccggtgagcttcactagctctagaggatgctaaaacatggctcatagggacacgatataacctgagaagggctagccatggcgaggtgtctcacagcgacgttttggctgattccggggaaatccagaattcaccagctatggttgttgatcgagagtgaggggtggtgcgcttggtgcgtaacgagagggtagagcaaggaggtgcatcaatttatagggatcgatcaccggtgccacgactttgagatgagattgaactctttggcggcgagaccttttactagtctaggctttgtggtgcatagtattgcag

SEQ ID NO: 72274 - DNA, 683 bp, Zea Mays
ccatcatgcattagccacagcccacaggcaaatggagcctcgttcggtgtcgacacgacactagctctccagccaaccccgccgtcgcactcatcctcatcaactgactggcttgctgaaggcagtatagacagtacgtagtcacgacatcaggctctaaccaacaagcacacgttctcatcctctcctgatcgatcctaggagaacattggccttcttggaagctgcaatcagcaatcatgcacgtagctaggaacacaactcgtccgctcgctggtctcttcccgggacgatctctccctgctgacagcagaattcaagtggtaactgtgtagcactaccacgcgcacacacctgacacacgacatgagtagtggcagtggcacacaccaacgctgcagaatccaccacacacacacacacacataccgctagtactggtagtctggtactgcagcagaatctaccagcagcctacaccctcccgtacgagagccaatccgagtgatacgcgattaatgatgatcggtccatcacagtggcctccatgctgccgtgccgttggccccttgctgcatgagccatggccatgctgctgctcctccgctttgctgcctgacgatgtcaattcactgtactgtacaccaacacttcggtctactgcatgtgcgtacgccctctac

SEQ ID NO: 72275 - DNA, 649 bp, Zea Mays
cgtcaaccaaagcctggtattgaaaacaagtgagtgcaaagacaatatttcgcccgaagtatagccagatcaggaaaaaccaagttacctaaagattggagaagaatgaaggaagccccaaatcatgagaaaccagttggtgactcgatgagggaatatcagccgaggcaatctgaagagcatcataggggatcaactcaacatcaccagcaggaatcaaaactctagcattgggtatgccggtctctaaggcgacctcctgacttgaagcatgtgctgctgccatgtaatcagaatgtggaggagaagacccgacgtggacatccatggaggtatgagaaggggagcccgctcggacaccctcgggggctgggtcgcagcctgcatcgcccattggagccggatcaccaccggcagcaccctcgggggctgggttgtagctcgcgctacccacccgagccggatcattgccggcaacaccctcgggggctgggtaatcgctggcgccatccttggggatcgggttctctgcagcagccacctctatggctgaaggattctcagtcacctccatgggaatggagcaacctagaccagcttcttgactctgaagaccacactccaaggtcgacgaggcacgagacgctgc

SEQ ID NO: 72276 - DNA, 499 bp, Zea Mays
ggtgccttgtgtggaagcactattggctagccagcgggaggtagagctgttgtgtgtgggggccgccattattgagaatagggagcgcgagcttgttgcgctccgttctgaggctagccagcttcaaagcgaggcgacacacttgcacacggattgcaatgacacgtggggcgacctggatcatcttttggggagaggtcccaagtctaatgtgtgctccttgagacgagactacatgctaatgaggccgagtcgaccctcagagaggctaacactcgtctagggcaggtgaactcaaatttcttaagagagcgcaatgcagccgaaggtcaacccttctcttggccttgtgtttttgttatctagtgctccgagttgctttagaccatttctttcatagagctccaaaagatgttctctcaagcctagaatgccaagaaggcgatagaagaggtgaaggcggcgatagagggtaaggcccgcgagctctcgctcgccc

SEQ ID NO: 72277 - DNA, 440 bp, Zea Mays
cgaataaatacgggctggttgaatggatatgaaggtgggcaaggcaaagaacaatttggattgaaaggtcggattaccaaccttgttctcttttcaggtccctgatttgatctttcacccgcatatccctttgattttctgtgtcccgcatttttagcttcaacagccagcactgtactgacagccctgctgtatgtgaggtccatacatgttgccattttacgttggagcctgtcatttagtcccctcataaagcaattcttctttttcaagtcggtatccacctggtcaatggcgtactgggataggtggttcaatttattcagatactgcatcatcgtatctccccttgcttcagccggatgaactctttcagtttcatttgtagcactccctccgaaacataatgttcccggaatgccagcttgaactctgcccag

SEQ ID NO: 72278 - DNA, 671 bp, Zea Mays
tacgtatgtatggcggcgggcgttatgggtgagattttttttcttcttcttgggactgttcaaaagcatgtttttgtgggtccagccggccggccatggccatggttcgaaaggggggcatgtgtgggagcaaacaagagacagatatagcagagccgaagcatctctccctgtcgcctcttcttcctcttccggattcaaatgtcgtttgctttgcgctttaaagcttgcctttgcgagctcgcaccccgcaagcaaggtatccgttcgcatcccccctcaataacctaatgatctgtgcgacgcaatgcacgcatgcccatcggcgtcagtccgacgacgactaccacagcgtttccgttccagcgcgcttgccttgccttgccggcgtcactactgtcacagcctaatattgatctgtgcaccgcacggtgtcgcatcgcgttctcacgctctgctgtgttccggccggtgtggacgcgtggcagttgctgatgttcgatgccggcttgtgagtttctgcgaagaaaactcgggcatttgaaaccaccgtgctcactgctcacccagtcacccctgctgcagctagctggtcgacgagctctgcatgcatgcaggccggccggtagttttgtcagaacgcaggatttgttaagctgctgttgcaattc

SEQ ID NO: 72279 - DNA, 514 bp, Zea Mays
aaaacagcacgcaaatctactggaccttttggcgtgcctcaccatcagctagcccctagacatgaaggaagtagtagtggcaacaatgacccaattggagacctggaagccaaggtggaacaacttcggtcagagctacgtcaccggaatagggcatgggcgcaagacaaccagcgtatagctgaattttcagctgacgtcagccgcttgtaatatgagattttagaatgggattcagccattgattgggtcgtcaactcgcatttgatcgcttgggaccgcgaagcaaaagctcgagctcgtgtggcagagcttagtgtggcccttgacagcctgcaagtgtattgtaatactttacatgaagaagtacatgtactgtatgctcgactgcacccggacgtgccttccgacgctgctgcaatgggagctggaccatcgggaacagcaagtgaaggacctgatggggagttggacctttttagtccccctccttccatgaaccttgctgacgaac

SEQ ID NO: 72280 - DNA, 538 bp, Zea Mays
gaacatttgtgctgttgattgtcaattttctatttagggatatttccatggaagtttggtttagttgtggtgagctctttcgcaatccatgttaattatgttgtatggtgggagggaatagatgtagtggttgtgatagttatcttgtttatgtatatgtggagcgtgggctgaaacacagagatagcgagggacatttgaataggccagtgcgtattgttgtgaagccatgttttctggtcctggtgtgattgcgtaagtatgaaatagttacgtcgtgtgaagtctaggttgagatgtagattgtgtgagttattggatggatatatatgcatagtataattaaaaaagagttcttcgatgggaggatataatgtatagaatgtgcttggatggatatatgggcaggcatagtatgcttaaattgattcttgcttgcatgatgtgagatcaggcttaaaatgatttaaaaagttagcatattgcttctatccttatgttggatctaagtgtctcataatgaagaacctaaatttat

SEQ ID NO: 72281 - DNA, 887 bp, Zea Mays
acagtttgaagttttcagtcacctgtcaagcttactgtcaagcttatgttactactatcaagctgttaagatggtaaattgtgacaccttgaatcaagctatcaagctgtccatgttgctatctttgtccatgttactctgtcaagttgttaagatggtaaattgtgtatatttttcaagctatcaagctgatatatgcctatgatactgtcatgttaaattgtgtaacctgtcaagctgtttgtactttttttgtgctggtaaattgtgtaagctgtcaagcttgaatcaagctgtccatgttactatctctgtccctgttgctatctctttccatgttgctatatctgtcaagttggtaaattttgtaaattttcaacctatttactggtaaattgtgtaaattttttaagaattcatttgtccctatcaagctgttaaatataatcaaaagacacgcccagttctgtccatttagctggtaaattgtataaatttttaagttgtttaaatatagacaacagatctctgtaagctgtttaaagatagacaacatattctttttttaaatttttaagctgtttaatcaaaagacatgtccacatctctgtatacgcccagcaccagcagattaaccaaacacaagcccatcaaatcctggctcactaaatatagacaaccaaacatattcccatcaaatcctggctcattcaatacagataaccaaacaaccaaactaattatcacttgcatccatttattcaggctgggctcaacctgcatcaatgtttcaaccaggctctgcccagccaaggaaccaaacacgcccataatgtatcagacgcaattcacttagagcaactccaagagactggccggatcgtttt

SEQ ID NO: 72282 - DNA, 919 bp, Zea Mays
gacaacgccatggcagggacttgggattcaggaggatcccttccttctagttgagcttctagggctgcaatccttgtgtgtgcaccctctagctccaaatgtaccctagagaggtccaaggtagcactgtccaggtcgatgttaagacctgccaccacaccaactagggtgttgaggcaatcttcttcggctctgcctggaataatgttggtctggctttctccacgaagacacataggaagatgcatgtacttcgtgttatgcagctgctgccggtaagtgtggctgagggaccacagagttcgcctagcagcatcgctgaccgatgcagcgtaggtggatagcggcgtcagatactcatgaactgatagagtcctgaaccctctatcacctgcatccatcaccctgacatgaatgcgagtgatgtagtagcaagcccgagggggctcgtatactcacctggtctcatacaagggtcggatgtaggatcccaacgcatgcagaacatcctgcatcaggttaggaaagtgccccgtctcgaacattgatgtataatgttcggtgataggccatatccctacgatgtggtcctgttgttcgccgttggcttcctcgttgacgttctcctcttcttattcttcgtcatgttcatcatcgtcactgaagtcatcttgatcttcgcctcccagagtaggggcttaggctgcaggtgctggcgatgctgaagatgacgatccagctgcgaaggctagtgattctgccaatggggtgggtgtcggcagaaactcctccgagctgtattccagaacaactccgttctccacacgaaggcgaaggagatccacaggatttcctcgactaccgctaggtagacaggagcctgccgtggcagagggatgtagttggtgttgacttggat

SEQ ID NO: 72283 - DNA, 1307 bp, Zea Mays
gtccatctgttttcgaaaccacgacggttggagcgccagatagggagcgttaacgtgccaagagacattttctactccgatcgcccaatcatcagcattcgtcggaggcaagactgttgccctagggagccacatcatgttcagcaccctcaacttccttgccaccatcgtcggcgaactccgccttgatagccttaacacacctatttccataggaccagggctattgcgctccgctaggagcaaggcggagaagcggcgcctcaagagatgcgccgccacccttaagcggtacctcaaccaactcgtgcaattgcaaagcgatgagaggagggaatgtcgtcatcaacctaggtggccatcgttggctgccagctagcatctgtcctcaacttactcgaggacgactcaagcctagctccgactccgactccgactccgacgaaggagtcggaagagcttgcttcatggcaacaccgtcgtgaaatgacaatgacaagggggacaaggaggtccccaatcaagaagaggagtactagcgcaagtgctaagcgcgcatcctcactcatgaggcctccctccgccagcagcaggaagagctcgacgcccttgtacgaaaactcaaccgcgtctatggtgatgtcgagcagagacacatcaaggccaaaaagccccgggcaaggaaggtatgcaaccatcacgctgagagtaccgacagtgcacattattttctcaatctcgggcagaacatggcattagcagtagccatgatgctctgatccatccccgagtcgaacaaactagaggtgagggccatgtacctaaacctccacaactttgtggagagggtcactgtgcagcaagccgagattgatcggcagttccccctcagaacggaaagctatgcccacagacgacctcatcttggagaaggggaacacaacactcccaatccacaaggacgcgtgttcccatgaaggaccgccttgggggcatccgcaacgcctaacacatcctcgacaaccagcatcaggagcatgagggggtagatcagccacgagaaaggaggcacgagcgtagccccaacctgcccgagttagggccgcgcacaggggcgaatttgggccctgggccacctgggccgtggcccatggcgcagcccaaaactcctcttatatatatatatagctttttcagcaaaaaaatctagctcaaaaaaaatttcagcccaaaaatgtggcccaaaagacaacctgcttgcaacgattgagcctgacgctcgtggcctccctcggacgagaacacag

SEQ ID NO: 72284 - DNA, 499 bp, Zea Mays
caggcttctgagcatttaaagttatatcagcctctggaaggggcgccactaccaatgccccagcaggagcagcgtcagaagaatcttcagccagcaaatcaagcatagcatttatctccgcatcactagggttcaggggcacctcaaaatggatctgccgttcatcatcaggaatccccccgagcgaggcaaccaaggcagtgacttcttcagcagagggccgtactctaaggcccaaactaccatcagtaacaggagggttcgacatgaaaagagtgaaggctttaggaggaggcaggttccaggctgagaacgccacttgggcaccaacatttgacactttgcctctaaggatcatctcaagtcggctcaccaagtctgtagagggaattctcctgttagtgacccgagttgagtcggctaggcctcgatacagataagccggatatgccctgtctttcaatggttgaatattcttgaaaacaaagtcaacaaccac

SEQ ID NO: 72285 - DNA, 355 bp, Zea Mays
tcaatttaaataggtgggtcattggtatatctattgataagttgctcgtgatccaggctcgtgatccgtatattcctttcaaacaattgtacattttgcctcgagtgatgatcgtcatgatgaccgtctattttctgtcttatggctagtaacggacgtcaattactcgtcggtttctagttctaatggcgcgactgttactgcctgttgtccttctgactgcgtataaggttgcacattttgtctggaggaatgaccatcatgatgatcgccctttttcttatctggtggatagtaacgggcgttagttactcatcaatttctagttctaatggtgcgaccgttactgttcgtt

SEQ ID NO: 72286 - DNA, 904 bp, Zea Mays
aggcagtgttggcggggcttcctcctttcggtcagtctggcatccttggctcttgaaccgctttcggatcttcttgatgggggtgagcttctttaacttcttagcatagtccatcttcagagtctggtatgcctcacgagtgttggcttcttcgccttccgccatctcgagactaccttgaagagacgccttttcttccttcagttccttgatttgttgctctaggctttccacccaggaatttaggtgggtgcagtgggagaaaaggtcatcatagtggttgtcaagggtgtggagatatctggccaagtagactatggtagggtcatcttcattaggatctctccctggcaaggcctgaagttttttcctccagggaggagtatttttgttgctaggtggaaagtagcgaagaggtgtctcagagacttccctactgtagttttggcatagctggcggagggcttttgggcagcattctagcaagtgtctgagaagcggtgtccaatggcggtgatttggaagggagggtgatttgggtagtttcggctttctcccaggtagactgccatagagaatttctcaatcccgttctcgcggtattctttccaaacgtactccggcttcttgcggatccccatgcgaagcactcaactccgaaggaggtgagggaatccttccacctccgagcagtaggatgtcctaatgacaaaggagccttccatctggtagcaagagaagaaggattgttaatatcgggggaagaagagaaggttcttttagaggttaaaaggtcttttcttttaaggaaagctttttaggtccgggatgcggtctacgaccagtcctatggctctgataccacctgaagcatctcgatcctttgggactcaaatgtaatatg

SEQ ID NO: 72287 - DNA, 1261 bp, Zea Mays
tcatagacccgcacatccaacgtgacccacaagcacgctcagctacgaggtaatgctgctaggaccaccagtcagcgacagcgagccagaaagcgggtggagtggtgtgactggcacgtgggcccgcaccgtcggcatagggatggctcgatcgagtggagtttagttgggccgtcggtcctaaaagattgactgggtcgaaagtgaggttgccagccccactgaggttaaatcttatttttctttttctttcctgattcccttttctccttttggatttccaattttggatttgaatttggttgtgaaattgcgcatatatcaaatatacaaattctattatggtgatgaacaaattatatttatttatgtatgtattttctttatgttatatgacattttcctctcttcctttgttatttcaaattctaatttgtaaactaagccttaattcacatattgaacattattgtattcccattgatgtgatcactaattttagtaaatgcacacatacaaataactccagcatgatgcatgatgtattttaaatgttattggataattactcacttcgaatgaggttgttctcatgttctagtaaatagagacaaaacacatagaataattttctcctttaatatggtttacaagtttgggtattacacctcaggacatatgggcttcgagtccattaccgatcaggggttcaaaagttggccccttggaagggcttcataaccaccccagatcatagagttagggatgactatgggtacgtccgtacatggccatggcttaggttgcaacctgaggtaccctaagacatattcgagacctctgggagcgatttgtgatggtatcccatcgtagggaggcatcgagacctcggaccccatcaaacgggtttgggactaggtgaatcacatgcaggtactttttggggggcgtgtcttcggaccgctagccgacccccatcgaatggagctcggactacccggtaacagctcaacagaaatgtcatgttagttgcccatcgtgggtggcatgtcacgttccccctcttccttctcactgagaggcgacgaagaggcgtatggaccaagaagtcaaggtacccctcgattgtcccttcgccccacgtaaaggctcaggggttgcccttgcaaactacatcaaattcactaggagtgccaacaggtcagcagggcgctagggaactcccctcgtgcccaagccacgacccgagatcaaattaaac

SEQ ID NO: 72288 - DNA, 479 bp, Zea Mays
tcaggctgtagtgagtggtgtcagtttcaactaactgaatttgggttcaatgggatgtgctccacttttgggcaccataactttgaatatatgcatttttggcctgggaattctatagcaacgtgaaagagctatgcttggtgaaccactttgatgtagtgaggtaggtctgtccttatgtagaaatgagagaaaatgggaggtgaatttggtgctgtagtcgaactgaagaagttcagagcagtccaaaacatctgaaaatatctcagtccactaaataatacattatgggtgacttttcagtaagaaacaattaaaacaatctatcctaggtgatatacattatcatgggtgatatacgtggctttctctgatagagagtctaaatactaaaaataacctgcaaaaagaccaaactaaataatacattatgggttattgctataggtaagactgaacgagaagtgacgttgatattt

SEQ ID NO: 72289 - DNA, 844 bp, Zea Mays
acagagatatggtatgatacgcagttggacgaagttgaataagatcagcagcgtgtacaacggcatgaccctaacagaatgtaggtaaattgtattcatgaagtaaaggtcttgcgataagtttgatccttttaataagagattcagctaaaccattttgagtatgtacataaggcacagaatgttcaatgtgtattccttgggccatacaataatcattgaatgctctagaagagaatccagccgcattatctaggcggattttctggatttgatgttaaggataatgtgctttcaatcgaatgacttgtgtcatgattttagcaaaagcatggttacgtgtagacagaaggcacacgtgtgaccatcgtgtagatgcgtcaattaataccatgaagtatctgaacggtccagataatggttgtatgggtccacaaatgtcaccttgaattcgttcaaggaacttgagtggttcatcatgaatcttagaggagatggtcttaagattagctttcccgttgcacatgatgtacataaaaaacatatggtttagggaatttagcagactttaaatcatgaccgatgcaattacctgtgattttctgcatcatccctattccagggtgaccaagacgtgcatgccaggtcttgaatgaatcaacattctgaaaaatcactttgtacgtaacatgaggtactcgttttatgtatgtgtggtacaatccggatggaagtgaaggtattctttccagaatgctagcgccatattcagaaggtttggaaatgaggagaaattcctcattattttctgtatgagtagaaatatgtaaaccacttttccgaa

SEQ ID NO: 72290 - DNA, 524 bp, Zea Mays
aaactgaacaggttgaggtaagaaagattatggcaaagaaaagactttatccaaaatgtttaagtcgtgattcatctcgagattcgctttgactgtcatatccttccttgttgatgttgatcttttcttctccagtcttgatctcattgattcgaggttagtgtatatcatcggggtcggaggaatatggttaagatagatatggatgaaatggactacatgatgtaggtctaaaagtttgtttgatgttagatgggaatagacagattatgcaatccatcgcgactatcggttggatcagatttcatgcatgtggccaagttagtttaaggcactagtgtagttttaagtgcgtgaggggtatggccttatcttttgtacccgcattaagtaacttactctagattagatcataatggattggatgaaatctagattagattagataagatctacttaatttattttggaatagatcctgtttgttacactattatgaaataagtaaggtggttgggataagt

SEQ ID NO: 72291 - DNA, 976 bp, Zea Mays
gcctacgcgcttgggaaacgtggtgaggtggcggagcggcctcgagttcgctttatgacgggtgggccctcgcgtcccctcgactcccgtccgatggcagaaccgtgcaccaacactattgtggacgcctacactactgtcttaagaagcagtatagatatatttcactatataatctatcagtttaaattttacaaaaccttcccaaccaaattaccacacacataacattcattaaatccaccaaacaaattgtatctagacttagcacaccatgaaaaccaatggcttaaatcgctagataaccctctctcccttaatcacttaaatctaatgaacgatattatttggatcatccttcatccctccccactccatcatctccccgcgccccctacacctcactcgcgtcgccgtcgccgccgttaatttctcgtctcattgggatcgtagcgttagcacgagctatatgttattatatacaaatgcgggagcaacctagctcaaccaagacgtctacatcgttgttttctccttcaccgtcctatcagacatcaccgacacactgcgggaaagctcggttgtctgataaaaccaaaattaaaaaatagttgttgccaagaatcaaacatgggacatccgtgtaatcgttcttattactcagctcaaccaagacgtccacgtcgttgttttctccttcaatatccgaccagaacatcaccggcgcgcagcaagggagctgagttgtccgataaaaccaattttcttttaagaaaatagcggttgctaagaatcaaacctggtgtaacagatggaattacccaccactacactacaacttggttcaaatgatttttttagtgtttcgtctatgtacaatcatcaccaagatcacagccacaacgttcatgtctttctcattttttcattgaacgtccgatcacgtatcataagctactaaaatcctctgtagcta

SEQ ID NO: 72292 - DNA, 890 bp, Zea Mays
agcagataggagagatgaccctctaactcggcaccgtctattgacagaaaggcaggaagatccaaaagccggtgtgccctctaggcaatctgagcagacaactgcgccatgaagaacgactcgtgagtcctagtgctgaagagtggcacaactgttgggtccctctaagctggcaaccaagaatccacgggtacgtgtctgaaccaacatacccaggcagctgtggctcgctgaagatcaagtagacgaggatcagtggaaagcaatctgaccttggtctcgtcatgctccttgaagtgaggtagaggaataggcggagcgaaggcgggagtgggagcagtggaagctagagtagtggaggtggtggacacaatgggtgtgtggatgactcgtgagcaacatgagttggtgaagtgtgaggtggagtggaaactaggccggaaggagtggggcgagcagtgaggagcgaggctgggacacgaggcgatgaacatggtaggaaatctgatcaaaagaaatccgtagctgacctccctgttcagcctgatctattgctgctgctgctgcaagtgctgcatgggcggctctgtccagatgcctcttctttctgccctcttgctgctcaagatagacagtcttgcccttgacctatctgaaggggcaaggagggtcctcgtcatctcctccccctaacaatgtgacattcttcatccgcaccatcctgaactgactactgcaagatagagagaaaagataagcgagagtatatagcagtagataaggcctcaaatagagtgatagctacctgggaacttctcgagagagaaaagaatcgggaaggccaggagacatgcaggcgggtaggcaaagtcactaaaatgacagaagag

SEQ ID NO: 72293 - DNA, 1682 bp, Zea Mays
ggcagattgcgtagaaatccctacccactaacaatctgcctacagggtggtatagatgcagggaaaaatcaggcgactcccttcacggaattgagagatgaagctggtgtcacatactcacatccgcagggatgggtcacgttgcagacacttcctaatgaagtccttgtagtgctgcaaaaggtaatcaggtattggaagaacttccttgctgttcccaatcttgaacatagcagaaatctgttggcaaataaaagggaaacattcctgaatcgtaattatgattaagttactaattaaaagaagtctatataatggcacatcttatttgtgctctaagtaaacggtacaattcagtatcttgaggaaattgcccattgtcttgagccgtgttcattgaaaagaataaaataggggaaacagtgtggcacagtgtggattatttagcatattaaactaattcagtaattaatttgtttgttgttttctttctttttttgagaaaatgcattttttagtaatttggaatactggtggctggatggtttctggtaggttgcgaagggtgtaggcatacaaagtaatagtacggggacctagacctatgaaacagagatttaggcgccagccatatcacacgaacaaaggtaggagaacaggggaaacaggaaactagatttatccattcttgtagttttccaaatacacgtgacctatatatataatgacaagttacgagtccatcatctcatacaactttaactgattctaatccaatttgctaatatatctaactaaaatcgactaatgtatctcctaaacaaaagaacctagggctctgactccttgtacttgagaaagtgggtaatgtatcaactttaacttgtatgtgctatatcctggtcctgggctgcctccttgtccttccagcatcaatagcatacatgacatcaaccaagtacttgaactacaataaatgcaaaagcaattgaagttctaaccacttcatcctaaaccaagggctaaggattttgacctaaaaaagtataaaatgggtaagtcaatttcacactattatgttttttttaaaaaaatataagataaaggtaaagactgtaggtgcacccagaaggcataaagaaatcagctacatctcaaataaattaagttatgaactattgatgtagctgatgtagactagattagtaaagtgaaatgttgattgctgatgtaggcaacaatagtcaatagtaagtgcatatggttaactctgtatatataggattttgaccaactaataggatttatcaaagaaataacgagtcctacacattttgttattattggtcctacacattttgtacgcaaactattttgctcatacaactggttacatatcataaatattcatgcaactcgagtaatctgcaatggtgtgcaattggtgaaacacaatggtattttccaccttgtactccatcttcttagggcagttgaagtctgtaacatatcaaagcatatattttttagtatgcttcttcatgcttggagtaagtcatttttatctataggtgtggttggtgcaaggtgattcttcactgtgacagcaacgccaacagcgaactgggaggtgttgcggctctgcacaacccttggttagccttactcaacctttgcatccc

SEQ ID NO: 72294 - DNA, 273 bp, Zea Mays
ccgccgcaagaagttgtacgtcatgtacgatgggagctgggaactcacctcccgcaggaacgtcaagtccctacgtcgtgaggtcctaccggcaactccaggggtcccgaaggctgccccacatcaacgatggaggagcaccaccatctccttcggggcacccgactgcctcgacaacatgacaggggccggcatactgccactcatcaccgctcctgtcatcgccaacatgcgactacaccatgtgttgattgacggcggggcaggcctcaa

SEQ ID NO: 72295 - DNA, 586 bp, Zea Mays
tcaaggaattaaaagaagaaaaggcgtccctccaagagagtctcgaaatagcagagggcgaagaggccaacactcgcgaggcctaccaaactctaaagatggactacgtgaagaagttaaagaagctcgcccccgccaagaagatctggaagcggacaaagagccgaggatgccaggctgaccgaaaagaggaagccccaccaacactgcctccctccagggtagaaaacttgtcagacgttgaggagatgtccctagctagccttgacgatcttcttagggaatttggggacaccttagaaagggagtttggaagcaccatagaaaacgcccgtgcgtagcgcgatctgtgacaattgcatgcttgtaatgaacttgagtgatgaataaaataatgtgtttgaaaaaagtatggcatatgcatagtagtaatcctttctccccctggtagatggcttcggatataaccacgcctaccgcctcagggattggagcaaggtctcccctaggtgctgaagaagaagtcggtggagaagggagtgaaacccacctccccgcacctccagagctgccattagatttagcc

SEQ ID NO: 72296 - DNA, 358 bp, Zea Mays
gcagtacctggagaagaagaaaaaccggtgatagttcaaaaggaactgagaccgtgtccaggaaatcaaggacaacacacgtgggaggggaagaagcctcggaaaagggaaaagaggcttcatcaaagaccacgtggcacaagatgattatgtgattggattgatgatcgagacaaaggtagcccttgtggtgaggggaatacccgagaaaaacgtagagggtggagcgaggggaaagtttgtggggggctgtggctgacaggttgggataacaagtgcaaccaaaaacacggagatgctcatatgaaggatgtttaccaaatagatagaagtgaggcgtggaatagttgagggtttt

SEQ ID NO: 72297 - DNA, 511 bp, Zea Mays
cggagtgcgtactccggcgaactcacaccggtcgtgatacacaataatcagcgccctaacatggtctatgcctaattcataccttggcaactaactgggaatcactaatttaacccgaatgctgccctaaagcttggttgacgtacacccgcggagatggagtctttcccatcgtgttcctgacgatatagtttagcaacatccaaattaagggcacggtaagctttagcgacgtaccagagctcaagaatggcagctaggaaggcgggtgaagggacaggacagtgggtcgacggaggggtgctcacggcgatgcggaaaccggaattgggggaagtttgaaattcgcgagctatgttgactaatcggaggcgagagctggtgtgttctgagtttgtaataagttggcgaagcaggccagggcatcaatttatagcagctcgaagcggtggctctgaatttgggtggagagaggagcacgactgtgacaaaacattgtactggcgggtcc

SEQ ID NO: 72298 - DNA, 352 bp, Zea Mays
tcgaaatagcagaaggtgaagaggccaacactcgtgaagcctaccaaaccctgaagatggattacgataagaagttaaagaagctcgccccactaagaagatccggaagcggaccaagagccaaggatgccagacagaacgaaaagaggaagccccaccaacactgcctccctccaggatagaaaacttgtcagacgttaaggatatgtccctagctagccttgacgaccttctcagggaatttggggacaccttagaaagggagtttggaagcaccttagaaagcgctcgcgtgtagtgtgatttgtggtaactgtatgcttgtaatgaacttgtgtgatgaataaaataa

SEQ ID NO: 72299 - DNA, 451 bp, Zea Mays
gtctctctctgctctgctctaggtgttgttttacgccttgctacatgttgcagctgttcttggcttcttgccacagtatatgcaaatcgtcagcttgacttcgtgtcaaaaatcgattttttatcatggtattctagccttgctctatcgggtttggttgaacgggatcccgtacttcactatctaaatagtaaatcacaggatatatatacagaattttagagaagaggatctttccatgaacagtttcgctttcgtatatctgccattaatggatatctcatatactccacacgtaaaccaactccaagcttagtttagcaattagcatcctgccttactgactttggtcgccgtcgccgtcgccctccttaattccaaaaagtccttgcacccagccaattgtactcaccaaacaaaacaacctgcatctttcttctttggagtttcc

SEQ ID NO: 72300 - DNA, 1372 bp, Zea Mays
gacgacggcggaaaccgaggataatccaaggtgttctaggcaatttaaggcggtctagttcaatcgaatgggtcggtgagcttcaggggacatgaggaaagctagaacaccaattaagaaagcttgaactgacctgcagaagggtggccacgacgaggtgttcacgcggtggtattttggctgatttgggggaaatctgaaattggcgagctctggtgagcatttggaggcacggcttggtggcttgggtgcttgactaccttacggacccgaaggcacgctcaatttataggctccaggggcggtggcgcgtgaatttggaatggtgcggtggcggccgtagaaggagagttgcactcgtgcgagcgattagtggctgcaaccgtggcaacctcaccggcgatcactggataggtgagtacgagtcacggtggcgtggttaaagtgccgaggaacgtggcacaagaccgcgaggtgtctaactccggtgagggttgattcaaagcgatcggggcagagcagacacggcgggcgggcggaacagtgtcttaagctcatccgtggtggagatattttcaccgcaagatgttatccgggcaccggtgagcacgaatcacctcgccggcgtgaatccaggcgctggggtcgccggcggcaaggtgcactgcacctacaatcttgttcagtctactgtaccatcagagctcttatcaaggtgcctgacagagcatgtttgggatcaattttgctccatattttatgtggtgacccaaccaatactctgcatcaaagtagaagcctgataaaccagctctaactttgttacattatgcacctacaaaaagtcacagaatcttactcaaaatcgagctctaagttcatccaacttcactgttactgaaagttcagacttaaagtgacctggcagcccgattttggatcaaaatttctcaaaatttttaatggcaccaaggcttaatccctatagcaaagttgttctcctatagtagctctacaaatttgctatattgactttgagcaaaaacttcaagaatccagagatgcagggctccaaagtcagccttgttcaactgttttcagacttaaccattggagcactaggatggcatttttgcaaataagcccaaaactcatggtttcttttgcaaatcttcaaacatgtgaactatatgacttaagataccctaactccatggtttttgcacttaggtccaaagtgtgcacatgtttacagataaccccctagggtttcagttcagggttttctaggggtctatttagggttttggcacttctagggtttggatgccacttatgttcattaatggtgacattttatgattgttattaa

SEQ ID NO: 72301 - DNA, 653 bp, Zea Mays
ataactcttgccacaactaactgagaaagattttgtcacgattagagataattgactgaggcaacccatgatgtttgtagatatgatcatgaaacaccctggccacagacagagccgtgaatgggtggtgcaagggcaagaaattagcatattttgtgaaggtatcgaccaccaccaaaatgcatgtataattctgggaccgaggaagagcttcaataaaatccatcgagataatttgccataaagcaatcgggacgggtaatggttgtaacagccccggtaacttggctcgatccgcctttgcctgttggcacatggtacagtgactgacaaactgttgtacaacatgcttcatgccctaccaagcaaagagctgcttaagccgagcatatgtcactggcattctagaatgtcctccgactgctgaacagtgaaatgctgccaaaagcttctgttgcaaatccaaatcagcaccaacccagattcgattcttgtatcgaagtattccatccttccaagagtggtgtggaaccgctgttgagtctacaaccaatttggtgatgagctcctgagcaatcttgtcctgcatataagatgatgccacttctgcaatccattgtggagtagcagaggataccgcaagacataaagct

SEQ ID NO: 72302 - DNA, 470 bp, Zea Mays
gaaaaattcagcaaacaagaaaactaatagtacagattcggattcatctgactatctccttgatgatgatgatcaaggagatactgatgatgatgacactgaatctgatgagcagccacaacccttggcaattaaggtgctcctactatcttcaaagtagtggatggcaacaatgtacatgaaccaacagatgctaatgatgacataccaaatagccctactacacctggacttgctgatcatttcagcagagctgcagaggaagacatggcatctgctgctcatgacagtacaggtgatgctgaaggcaatgtagcgagagatgaagaaactgaaggcaagttatagttttttcaatcaaatatggcatctattttgctgatttgcatgaaactaaacaatttcattattcaataaatgtgaattctattttgtagctcctgcacaacgagcaccaaggagacccaggg

SEQ ID NO: 72303 - DNA, 350 bp, Zea Mays
gtctagacctgttcctaggcaagatccattagatccctatggataggttaagataaccccgcatgggataagtactctcgcccgtgcttatctggtcacgtgggcgcggaccgtccggtcatgcctaggtgccaaatatggtgtcaaacacatgccttcctaccatttggtggagcttgatgaaccaaaagcacctggtactatcaggcttttttagggaacagtagattccgcagcttgccttgttcccgaagtatgaactctagcccgatgtaagtcaccagatttggttatcagataatataactatttgataaactctaatgcacaaaggtcgttttgaattgcat

SEQ ID NO: 72304 - DNA, 632 bp, Zea Mays
caggatcgcaggttcttttcggtaaattccaggggctcttgtgctaatttgccacagcaaagggtatgggccaaccggggccatccgttaaatgatcaagggcccagattagatcctgatccaaggtgaaccggtatcctttgacgaccgcaggatcagcgatgcacggtgtggatttaaacatccgagccccgaaccggtacacgatgaagtccttaggatctaaaatctatggatccaatttcatgaagcaagatctaattccacccatccgatattagatcgacggtaggtactcatccaagcgaaagggtatgtgtgatatgatcgcagccgtcaatctcggatcaacggctgatgcaccttcttccacctacattgtggcccggtggcaccgttttctgcccacggtggaacctcgccgtcgcaaggtcttcacccgctgcggcccgcgatttactgccccaactaccgctacacgatgtcaagatgagaacgaattaagagagtaagttcttaccagccaggttgtcgaggtgaggacgacccacggtaaggcatgcgttgatggctctggcgagaaatcaccggcgacccgatggttctccccttcggagatggccacgtgcagc

SEQ ID NO: 72305 - DNA, 602 bp, Zea Mays
acaaggataggatataggttgtccgttcgcatcagctcgttttcacccaatcacccctctaccatttttagcgatcaaagtttcaaaactgaagacaaccaatactgcgcgctctccaatatctaaaccagccctgcatgtgtatttggataaaacaaaggcagcaggatctctgacaacaaaatgacgagtggccccaaatgggcctagctaacccagagaggattggaatctcctgtaaactgatgcgaagaaactcgacccaaaacatctagacttattcttcataccaaaactcctacaaactgtactccacgaatccagccaaaggatgtcagatgctccatgctttctgtgtatcagaggctccttacctgagatccaaacaaagtctaggattagaaatttaagtctctaaccacaggtaatgtgggtcagttgaaaagggtgcattaaggttcataaaggaaccagcatatgaataaagctgacaaatgtgtccctttcaaaactaaaggtagccccattaacatatggtgcagaagatccttcaaagacttggaagactttgacctggtgtccaccagtatatgagagactat

SEQ ID NO: 72306 - DNA, 458 bp, Zea Mays
attctctggtccaacctatgctacacgatgagtatgacagcacgagacaatgggtagcgtgctcaccggggttagagatgaaggcgcagctatccatggtgaagggcggatctggggtggcggttctctacggcgaggaattctgccgataccaggcaccaatctgagcggcgcgacttcactcccttatccaatagccggagacaaccccacggtgtagtttcaagttgcagtggtcggcaaattgagcgcccttcccttgcggcggcgctacactctccctcctttcctgtttagcggtggtgcttgggtgccccaggctcgagacgacgcggatatgctccaggaactaaatgggggtgtggatggtggtcgaggtggggttgataagctagccggctccgagggaatcgtgacggacgttgcgcgcgagcaaaggtaggggagaaccggtcgta

SEQ ID NO: 72307 - DNA, 643 bp, Zea Mays
ctttattattaactgcacatgcactagatcgaacggcgcgcgtacgtatatataattatatgcatgcgcagtcgttattggagtacatacgaaagtcaaggtctagctatttgttaattagaaacacatgcatgtataatgccaacggaatgtagctagcgtgtaccaaaacagctatagctagcgtgtgtactcgtctgtgtgcaagtgacagtgtaactgcagtacgtacgtgtatattcatatatatatacatccgttcgtatcgcgtacatgtacgtacacagctatagctagcgtgtgaccttctcctcctccttattgcatgcatgcatgcacaactgttggtgtggccattgccatgacagatggacatcaagcaacagttgactctcacacacaccatgcattatatgccatcgccattctctctctgctcgtgtagttacgttagttgtggacaggtaccgtacgtaccctggtatagtaacagtgtgtagagagcatgcacgcggcagctgcagtgtctagacgacagaggtacgtagtagtagtgatatatatgcagtaccctgtacacaagtataaagagtcatgggatgggttgctctccttcttcagaaaagaaagcctcgtcgcatgc

SEQ ID NO: 72308 - DNA, 289 bp, Zea Mays
aggggatatcgacggaccgtgtgctggacgtgcggaggctgctggggtcgaacgtggaaacgtgccacctgacaaactattcactctcccatgtggtaataatgctcgcctctcgcactctcgttccctcaactgcctacagtactagcagcaggcacggctaattctctggctgcgcggtatggtcgtgttgcaattgcattgcaggcgcgcgggcaccggctggaggacggcgtggaggtcgtggcgctcaagccctgcgctctccggatcgtcgaaggtgagtggg

SEQ ID NO: 72309 - DNA, 487 bp, Zea Mays
ggaagataaagatagagagcatcttggggttgtattggccaagtgttgtggttattcttgggccttgctcacatatggttgctagagaacacatccaagtgtgtgagtgtgattcctagtgtattgcattgagagattgcattgagtggcactaggtgatcgagttgcaagccggttatgcttgttactcttggaggttgccacctcctagatggtttgtaggttgtggctccataaaagcctatgtgaagttgtgcgtggctctaaagaatgctttgtaaggggtaacatgcccaccccataggatgtgctacactagtagagctaggtgtgaagagcgtgaaacggtcagatcaaatcaagtgctagaactcatatgtgaggactccatgtgggagagtgtgacttgtgggtcaccactagcaagaggatcagcggcaacttagggcttgcctcatgggagcaagtggttggcaagccaccgaac

SEQ ID NO: 72310 - DNA, 352 bp, Zea Mays
aatacccatacggtccagatctacaatcaaaggcatgaccactttcgagacaccagtcctgctaagtgcatcagccaccacatttgcctttcctggatgatattgaattgtcagatcataatcctttatcaactcaagccaccgacgctgcctcaaattcagctctttctgagtgaaaatgtacttgagactcttatgatcgatgtaaatgtcacaagactcaccataaagataatgcctccacaatttcagggaaaacacaacagcggccaactcgaggtcatgggtaggataattcctctcatgtttcttcaactgcctagagccataagaaatcaccatgccttcctac

SEQ ID NO: 72311 - DNA, 695 bp, Zea Mays
ttgattcacgccacggttcgccccttaaatcccggtgtgacagtgagggataacattacctctttccctagatccagtgtgccatgttgtctcccgtttatgatctaatgttgtagtccatgacaaggaggtgaaaggatcacaatgctagaattcctattcactatcagtttaaaatcaactttcactgctagatttcatttgacattgcatggttggtagtatcatgttagacatttctattgtctactacttgccaacaatgatgcacattttcaccaaaaaataccaacgacactagatcttccatcacatccatagtgttgggtcccgacacatgggcccaagcatttagaagtaggtgaaacaaacaatgcacaacaaaacggaaagctaggaagttgggatgtcttgtcaagtgtcccccatccataatttggacaagggtatttatagggtaactgaggggctagggtctaaagtacatacttatccttggttacctgctacattcctaatatatactatacaatagggtaattacaaaacaatgatacaccttgcttagttacaccagacactatacccatgtaggaggatgattgcagggactagaggatgcgaccgagactggccccagctcaacacaacctcctcgcactcagcccccttcagcccaagtcaagtatgcattc

SEQ ID NO: 72312 - DNA, 465 bp, Zea Mays
ggcagggtagctagtagctcagtaggcatctggaacggcatccccatcctggccatattcttataattaagttacacacacagcgtcagttcattagtagtaaacatgagaggcacagcttggctgctccgctcagctcagctcagctccagggaataaattctggacggatatggtggcacatccaaatcaggcgcgcgcgggcggcgacatcatcagggcaagtgcacatgaccgaagaagcgactacagctcacgaatcgcgcgcatactcattgacgcagccacggaaaaaaaatagagaggattaactgattaacccacggtgcgccacacataaaacgagagaaaccgagagggtctgttcgtttcgctctcaatccacgtagatcagctgtgattgagcgagttcaaatctcaatcaagtcaaaatatttcataattccttttgaatcgcaatgaatc

SEQ ID NO: 72313 - DNA, 744 bp, Zea Mays
cagggattcagattcgttgctggttccctctttttctaacggtaacggagcttttacagcatccgaaggttctggttcagtatccttttcaacaagctccgcaggccctgtttctgcgggaactgagggtccagcttcagcttcaacccgagttatgacagctttggcagtttcctttgtatttttctcacccatgctaggtacttctgtagagacaggagttagtacctttgtcgattccatgacaacatctagtacactagccattctcctccttttcggagttatcaaagtagttttttgaatcttcgacaattctgcctctagcagtgaaaaagtttttgtctgctccgctgctgtcttcagaattggctcttcggctgatcccactatggcttcggcagtagcgggatgatttggttcagcggcagaagaagacccttcagcaggcttcggcaccttggccgtttcagagtgcctgggccggtgtgtcaagactttaaccttttttcccttcggcgtggcagagattgccgaagcagcaccctttattttcttttcctgctttcgcgagtgataacaatagtctgggtacacaaaaccaattacatcaaaaaccatgtttaatcacttcttgcctcgtcctccgaaggccaatgtcatggcatcgtcttcgggccttgtgtaggccccgagcaattcgtcactagttgcctcaatacaatccaaccaatcatcgttcgg

SEQ ID NO: 72314 - DNA, 323 bp, Zea Mays
aagggaccctacacaatcataaacgtcgacggagacgccgtcgacttgttcagtgggtgctggcatgggggaatgtttcgaggtctttgcagcagatctagcagagacatgcgatcccgatggctcagcgcacgacattgtggctgagaccgcagagtactcagtagacctcgttaccgaggataagttggggaaggatttaattccaatgaaagttggtacgggtagcacgaaacagtgggttgtgtgggaggcgagtgcggtgtgtgactgtgaggatgttgaactggctctcatggcatgggtgttacttatattccctt

SEQ ID NO: 72315 - DNA, 552 bp, Zea Mays
ggcatttggtactgtctgcttctttattggtacaagagatttggttcaagagcacatagcatacagagtatggccgctcatagagagctaggaaatgctgaaggagaccatcaccgaatctagtgaaagtgaactggtccggctgaagtgcgcattcagatacggagataaattcgatgaaccgaacgatgactggctaaaatgcatcgaagttaccagtgattaactgcttggatcatattccaaggcggaagacaatgcactatccatagccttcgaaggtcagggaaaaaagagattgaatagagtttttgatgccattggttttgtctaccccgactaccgatatccactgcgaggtcagggaaagaagaggaaaactgctgcttcggccactccagtcgagcctgcgccgaagggcaaaaagttaaaggtccttacccaccggccacgctatattgaaccggtcgtggtgcctgagtttggcggggagacttcttcagctgctgaaccaagagagcccattcctcctacccagaaggctggagagcc

SEQ ID NO: 72316 - DNA, 428 bp, Zea Mays
cttgcgcaaatattacattattaagcattttccatcaatgcttgcgcaatggcatcacatacacctcccatatcttcttcatccacaacatcacttgtactagcacccatgtatccatcaacataagtctcattcgatgcaattctatcaaaatcttcatcacttgaattactatctctaataaaattatgcaacgccatacaagcaattatgatctttttttgcttctccattgagtaccttggcacatttagaagaatacactgtttcattttcgaaactccaaatgaacgttcaatgacgtttctaagtgatgagtgagcatggttgaacacctccttcaatcaaatcggttgactgctattttgaaattctagaacgtggtacctttgacctttgtacggtgctagataaccctttcgatttgg

SEQ ID NO: 72317 - DNA, 392 bp, Zea Mays
gcgggagcactggtggccgccaccagtatctgacgatcgttgagcttctgctgccttttgttctcttgtgacccgtgtccaccgaagatgacgttgacttctccatcgacgtgcgggaacgctctgcctcctcccccttcctgctgctgaggttgtcgaggttctccgggtcctcctcgtggtgggggaggtggtagaggttggaagggtcggccattcccggcggagtgcttgaagtctctgaagttctagagggtatgacgcatattcttgtggtacgggcattgggcgttgaggatgtcatccaatgttcgttcgcctccacggggtgccctcgggcacgagagacgggtggtctagcggcctggacttcttcgcgaggcctctactcc

SEQ ID NO: 72318 - DNA, 399 bp, Zea Mays
gaggcgtagatttaatagatccagcattgaatcgtaaccgcacgattgtgatcaacgatccagatcagatcacgcaaagggttatactcgactccaaatctggttcgttaaccagcagatcaacagactggccgacgcttctcccaccccggccaacaggacaaggccgcgcacggctctgtcgcgacggacacgctgtagaacggtaatccgacccggctgcggttattttccacaaacgaaacgggctatgcggagagaagatgatggcgatagggttcaaggtctctcaccagtggttgggcacgcgaagctagctgcccacacggcatggagggtccgcggcggagcactatcgctggtgagcaattccgggactcagcggcgccctacactttc

SEQ ID NO: 72319 - DNA, 501 bp, Zea Mays
agaccattcacgatggcgatgagaactctcgagtaaagttagatctaccttctgggaggaaccacatcgaggaggagaggttatagggttccttcgggattggcagtccacccaaagcacctctagacgacgtaaagccaaagagaggtgaatataggaattggagagctacaactagggctacgctacatctactcctaggaaagtgatgataaataagttaatgaattgattcgattggattgtgtgtgtctcaattggacatacccctcatatatataggggtggaggtctagacccatttgtaaccgcttcccaacatatcccctcgtgattacatggataagcatgcgcgtgataaggtctatcagctaaattaatctaatcgtgaaccgtccgagatacacccgcagaccgtccgaggtgcggattgtctggatcgcatggccggaccgtccgaccatatctaggtgccaaatttggtgctcaacacatgtcccc

SEQ ID NO: 72320 - DNA, 1519 bp, Zea Mays
cagacaaattatgttccaaacaaatatatgcgggaatcctaagtcatggatctctctcttttagtaatcaaatttcttatattctaagttacatattattcaagttgcctcacagtgtgtattgtaaccagtttattaattgtttcattagaatatatttgtatgcatgtattttttttaccggacacaaagaacaacgtcaaacaatctgtcatcatatagacttttagcgacacagttgctgttgatacaacaattacgtcaccaaaaatatgtgcgacgagaaagacatgtctgtcggcaataacaaacacattaccgatagatagtcagttggtattgctatgtctctcggtaaagattattgccgacatgacttttggcgacacacattgtctgtcaacaaaactcattgccagcagactgtgtgacgctattcaggtgtattaccatcagacagtctgtgggcaataatgtgtcatggtgtagtgagaccttctcaaatacatcgtgttaagttagcaaaggcgaggttttaaatgaggcggagccttgtaataaagtagcgaaaatcccccaaccaatgccatggcctaaaggctccttaaagctaacagtcagcaccaaaggcagtcactgccacgacaggtagggcccgttcacggtgtgcgacaagatggatctgggtgaaaaaatcgcctctgggtgcaaaaccgcctcagggcaacaccagattaaaataaaatgccatgtgcaaaacccgctcagggcaatgctagattaaaataaaatctaagcaaagatgcctcagtgctcaaatgccgcctccaggtgcaaaaccagctcagggcaatgccaaatttaaataaaatctaggcgacgacacctctaggcaaaaaagccgccagagggcaacaccagattaaaataaaatctaggcgaagacaccttcgggcgcaaaaagccacctcctggtgcgaaaacacccaatgtgcaactaacacgacgccatattaaataaaatctcgacgaacacacccccatgcacacaccatactaaataaaatcattgcaaaaatgcctctgcatgcaaaatagatgcccacggacgacccttgatcaaaacaaaacatttacaacaataatcagaggtatgaagtctcttaggagcacagaaatgaattacagccaaataacacctgcgacgtgggggcgcccatgaacatagagaaatgagtctactctaaggttggcacctgtccccaatcggcaaaggggggagagggcaagatttcacttttatttttgtctatcggagacaaccgcaagcgttaccagaatacattcagtacaaattgctcttagccttgacaatcatcattacatattcacgaggccccgcaatcaaggactcgggggatcctccttcggtataagaccagcctccctatattcacgcaacatgatctcgagctcccagccctcactaaatagcccaagggcagacacaacatcaaaa

SEQ ID NO: 72321 - DNA, 367 bp, Zea Mays
tgcctgtgcctgcgagggcgctgtgtactttgtgtggcatggttggctatgctgtgctggtgtgattatagtcggtcttagcgcggatggtttgatgctgtcgcttctgtttttgctgtactggtctgaccgcgccctgaggcggcttcggcgcggagtctttgtgagagacatcggaatttctcgcacttgttgtgctaagtgcggctgcacccttaggcgacgtctgcgcggagggtcttcgcgatagacgtcggtatttttcgcacttgttgtgctaagtccggctgcacccttaggcgacttctgcgcggatagtcttcgcgatagacatcggaattgtttcgcacttgttgtgctaagtccg

SEQ ID NO: 72322 - DNA, 647 bp, Zea Mays
cggaagaagaaggacgactcgaagcatcgggcgcagccttgacatcggcgacaatatcgtcaggcaccacgacgccgggcctcctcatcaggatacgtctagcacgaatggctttgtcaatagccttgtcgcgctgagccttcaagacggtgcaattgtcctctaaagctttaacagccagtcgagcggcctctagctcctgcgcgacaagcttcttggaagcacgcagatccttgatggtggaatccttggtcgataacagttgtccaagtcgcagaacctcatcttgggatacttgcagctcgtggcggtgatgatccaggtcagatatggtgaaggagttactagcgtcagggtacaacctgttcagattgtcacgagaggccgcgagtgcccgtttctcctcctacgaacaaaaagcaacattcagtaccaagccaacaatagcattgaaaggtcaaccaaggaagtttacctcatgcatcatttttttagacaccgacagtgtggctcacgagatctggtctaccctggagaaattccatgagggataatgttcatatgaaaacaagactctttgagacctaccatcgagagtacgaaaactttatgctgtttactagagagatgttttcttagttccagat

SEQ ID NO: 72323 - DNA, 558 bp, Zea Mays
cctatacatcattcacaaccttacaaatgcaggaatttctatactttgaacgtttgtacttttgggccaaaactcaccagccgatccgtggctgtctggctgcagagctggtcagggttgttagggtctggtcctttgtggccctcctggtagacctcaatgtcactaggcttttggccactcgtagcttcctgtataaacaaaaacattcataagcaatcgtactatttgctgatcgacatagctagatcaaacttatcattcttttagcttttcatagcatgtcgtcaccaccaaacttgtggttaggattggttccttgacattgcctgtgatgcgctgacgctttctggaagccttcggaagcccaatatcgacaccaagcatagtacacattaggaacgagtgccatccatggaaccatcacctgcacacacaatgttacatattatatcaatcacaacaatcaataaaaagggtaaaacaaattgaatactaacctcatgatattgatcctcaatcaaatatatctttgaggaccattcctttttattcaag

SEQ ID NO: 72324 - DNA, 695 bp, Zea Mays
gtcgtcggggcaccaacgcggggatatgaccctcggggatagatgaattgcgcgccagagccattcttcctctgtcgtatcgcgcagcaacgggggcagggttctacgcgtcgccaactccagtaataccctaccccatggactcatctcaatacccgctacgcgtatctccgtcgagatcaaagttcaaggtacgggtcacaggattggggcgcggtggcaatggcgccgccgtatactacacggccccgccgttgtcaggttcgagtgaagaagaaacgcgtgcgccgtagatccacggatgttcggctggtagtctgtatggggggagggaatcatcacaatcgttggtagctagggcaacggtttagatcataacatgacttaccccatcgtcgcgttagatctgagtcgtcgatcctgtatcatgtgcatcaggttagatctggtttacttaaaatctcgatcattgatctgttgataggcggtcgtgatcgcgtaccattttcacaatgtcgagagatcacgataccctttcactctggcacgtttggaagggtaatgcactcttaggcaatttctataaatgttttggtgattagatgctcaacacaaattgattttaaaggtgatgaataaagcaagaatcaaggtatgactctagcctttctgaattgtttttgatactaacatat

SEQ ID NO: 72325 - DNA, 442 bp, Zea Mays
gcccggtggtcattttggtgtctatccatcagtgttgtgtgctagctggaggaagggtgccacgtacgatcagtgctccgtatacgcattctgaccggtgctcttgaaatgtcgtccctactgttgtatatgaaaggcgcgcggcaccagtagaggagcactgttgggtagtatatatatgtactattcccgattcggtccgtggcatcaggcagcactgtagcagactagcaggcaaggcatgcgcatccgaatgtattacggagtgttatgcacatagtaacattttgtactgcgtaccctcgggttctggggtttctcagtctcacgtgacttttagggcagccggtgtggagtgtggacgcggacaacgtggctatagtgaacttgtctgtcgccgaccaggacaattactgctactctgggatacatcgcctcaagc

SEQ ID NO: 72326 - DNA, 959 bp, Zea Mays
cattttttctaatagcttagttggctatctctcggccacctcccaaccagactttgaaataaaattttccgctcagcgcagtggctttggttgaagggttcttaatgtcattggttgagatcgagaattatgacagaataatagtctttgcatgctcatagccagctttctcaagaagtgaaacggctcctcgaaaaccgacgaaggcacaaaaatctcctctatcactaagaatctcatcaaaagcttcggcttcgccgctaatccaccggataaccccgtcaggatcaccacgaataaaattatgttccatagagaaggcgccaactttggcaaaactatttttcaacttattgcaacagtccatagcgacattgtagcattcctctttcgcttcacgaagctcctcgacatttttctgaacccttaactgttcagtatcagatatttcgcattttgtttgctcgacattaaaattttcagtcaattcatcgagcttcttctccaatccttgcacttcagatctatgcagtcccacctaaatagatagtgcatattctaagtcagcaatgtgcttcgcatctttctcttgcttcttttcaaactccttgattttctgatctgctttggaaagactagacagtctagcgtcgctagactttaacctctcaaccatggagagtaggattttatccttcttaagagcttcattcctaagcgttataacttccgaacgtaggtttccaaaagctatatgagtgctttcgtcctctgcttccttctgggctttcaaagctttgctcaagataagaccctcacaaacaaaaaaaatacaaatattaataagtattaccacaaatcatttgctaaaaactcgcctaacaaaaattagtaaatgcagaaacaaaaatatacaaaccttcaagctattataagcaaggttgtctgcaagttggtcc

SEQ ID NO: 72327 - DNA, 294 bp, Zea Mays
cagactggtcagctttggtcctagcgggcttatagtggaaaaaggcaaaggttgagtcaataccttgagagttcggctgtagcctagggatgaagtggaagtactcccttgtaattgtgcagttgttttcttggctttcttcttgaaagtggtggccttatccgaaggtggctcttcgtcgctgttagtctcaacatccttcatgttttcatcgctaggcttactttgttttcctttcttactagccttcttgctagatgaatttacactcgtctttcttttttctctagcttc

SEQ ID NO: 72328 - DNA, 970 bp, Zea Mays
gctgaagctgagggaatcacagttggagagggaagtggtaatgaagacgaagaagattacaccatcttgatcccagaaaaacctagtcaccttgactttggtagatctactgtgacggcagatgatatggttataatgaaaaaattgggttactttggagaaaccgagagtaggcttgtttgttttgctggcgaagaagtggttccagagccgaaggatgatgaagttattgtgtttaaaagcttcttcagagcggggcttcggttccctctctatgatataataggataggttttgaagaattttgaaatataccttcatcaattgacacccaatgcaagtgttagactcagtgtctacatctgggacctccgaagccaggggatgagtcctaatgcccaagctttctaccaggtgcacgagctgcattaccagacgaaggccagggcagatggccttcatgaaaattttggctgctacaattttgcatatcgaaaggatataaaggcaccagttcttagctaccgcaccaagtggccaactggttggaagtgtgaatggttttacatgaaagtagacgagaaaaagagggagaagctaatgagtatggttatgagtccactgacttcaagcttcggaatgacgaggcccttgtgccacatgcaacttggctccccatgccaagtagccgaagtggagtttagagtggtagcggccgaggtcggtactagggatttggtgcaagagttcttggcaaacagggtattcctgacctctagtggttgggggatgaccaagaagaaggatgtgagcaagaagcacgaacttgttcggctcccctaccggttcaagtttcagaaagagttcaagaagccatgccaagagtggttggaaatgattgaaactatgtgcaacgaaatccttggtaattataccaagaaggaggaccaactaatgactgttgccttcg

SEQ ID NO: 72329 - DNA, 680 bp, Zea Mays
atgggtaatagtggaggatgtcctcatcagaacctaaccgaaccctttccttttggcgcaagagcatcaatggtgctacccatggccaaagcggcaccacggcgacaagggtctccggcgagcaattaacaactcccgagggtattaactaatgaatcatggggtgctacaagtcctaggcagctagaggattcaatcgggagcatctcaccggttattactgtcggtgcaagtctagccacggcgtggggaggattggggtagaggccgaactccagtgagtgatttcttaggtccacgaggttccttgaccaaggattaacatgcctgagatctcgcgttgtctggtagtcccacgcgacacctccccgggtcccgaatcatggtgagcgtgggatgcgggagtggcggtccgatctcctccctacaccagcgatgggagcacgaggtgtagtcgcagcttgagaagacgagacaacatcgatacttatacccagggggaggaacacggaggttgggacgacctggattcttcccgtgatccacggcacaagcccccccggcgaccatgcgattctgttgcgcaccaaatccaggaggaagaagcaggtgggggtgaccgacagagccgacccacaagttagtgggggtgagccagggcgtgtagggaggcagaccac

SEQ ID NO: 72330 - DNA, 375 bp, Zea Mays
gtcaaagctgaacaccaaagaccagctggactactgcacccgctaaaggtacccaaatggaagtgggaagaaattggtatggatttcattaccgggttgcctcgcacctcgaagggctacgattctatatgggtgatcgtggacagattgaccaaagtggctcacttcattctggtcaaggttacttataaaggttctcagttggaagaattatatatggctcggattgtgtgtttacacggggtaccgaagaagatcgtttctgatagaggatcacaatttacctcaagattttggaaaagctttcatgagaacatggatacgaagttgaacttcagttcgacctatcatcctcaaactaatggccaaactgag

SEQ ID NO: 72331 - DNA, 425 bp, Zea Mays
gctttccctgcactctatctacgcgtttatatgccgccaacaaccggtcattgccagtttttgtgttgcggttcgtaattatatttggacggggctttggcggacaatttaatggtactactacattagtgcatgatttttgtgagacatagattcgtattgaagcatgcctgtttataattatgatgttatatacatatcacataaggacataatagtggagtaattattgaataaatgtttccccactctcgaacacgtaggagttattatatgttggataaaggcatcaagcctcgtcctaacgagatggaaatatggaatacgcctgagatttcaaacgaagacaggatatccttttcttgctaaacaatacgtgttttttgtaatcgtgtctctcagtgtttacttctcttgagttcaac

SEQ ID NO: 72332 - DNA, 310 bp, Zea Mays
atggcacatgatattgtacgatttatttattacagtattctacaatttgtttcctatatcatatacaatacaatcaactcatacaagaatctaagatctactttagaatgcaggaatttcacaggaatcatatatgaatttcgcagaaatcagttcattttcacagaaaacataggaaacggaaatttcaatccaaaggaggcctaactctattatgtggaggagttaccataagttctattatctcatactccgtacacaacaacactgcaagcgcgactaaagccatgactcatgaaaaaatccaagg

SEQ ID NO: 72333 - DNA, 854 bp, Zea Mays
accaacaactgaaatacttcggctttatgtaagcagcagcatcatatcacaactatccatatgcataataattcggttgcactcctccataatataaagacgcatatggagcaaaatgatgccataaaggataaccgaacataccttgggacgacgtatatggcatagctgaagaatatggacgatgcaatgaccaatagctttgttgagctggggcaaacctttcacccaaatgttttgtacttgctttctttcttgtgtttgcctttgctccacttcttccaaaaacatcatccttatctggatcttgagaactcccattagctgcccacgtcatgcctcctatctccagctcttgtgcactgagtttttctagcctcttgtgccagattgataatccgagtgggcttctcggttgtttgggcacattgggcttctcaagttcagatttagtacttggactatcgctagcgaatttctctattgtttgggtactactagccgaagtatctaatacttcctccggctctgtaatgcatgaatttagatctaaacttttggcttttctattatccttcttcgctacataaacttgcttgaccattcgatccttattttgagctctagaccaattcttataaataaaacggtctttgtcgtatgatcgttcctcaaaatcagaattgaaatgagatgaatattcagttatgtggtctaaaatatgaagaagaataagcatttgaatcataccagccctaagatggataaggatgaaagtacgaaggagctaaaccatattgcattggtattggcggcccaaaaggaggatatgttgctgatgcatgaaactcttc

SEQ ID NO: 72334 - DNA, 913 bp, Zea Mays
cggaggaagggaggggatcttgaaatactccactttccgaccagagcatagctgaatgatagccgagccgatgtacaactgatcgccgtgacccaaggacacctgcgcactgaagaaatactaccacaacctccagtgggggtcaatccccatgaacacttcacatagtgtgatgaagcatgctatgtgaaggatggtgttgggatggacattctggaccttcaggtgatagtgatggaggagcccacgcataaaggatgaaggggtaggccaaactcgcactcataaaaggatgcaagcacgaccacttcatcgtccctaggacgaggcacttcaccatcaccttccagcctccaccctgagacatcttttttgggaggaaccttttttctctaggccgtgaagatgactctcccgaatcatgcaggatgggaacgatgccatgcgcacgggaagtaaaaggatgggcacaaggttgtgaggaggcaaagcgattgagagggctagctcacggcacaaaaatacagtaagagtaaccaaccccgagcaccctcccaatctacttatgcgtaagtgcagggggcaaggatggcacccaaaaagtgggggccacctcaaacaacacgaagggattcacccctttcgacgaagggtcaccttgggagtcgggcaagggaaactgtgtgccttgtaggatcccgtcacctaggacagagcgctagaaggacgtgccatagaagttgcaccagtaactggtggggtggttagccagacagaaacgccacctaggcacgatgtagcaagcagaccattttgagtcccatcaagccgtccacgccgagcagagtcatgatgaccaccctgctttaccgtgccaccgcagtaactacatcacaccaaccaggtaaaaccg

SEQ ID NO: 72335 - DNA, 720 bp, Zea Mays
aattttcgtgcagcgtgtcagtggttagtgagcagtttcagcagtcaggatgatgcggacgaagaatgtcaccccatcaggggaggagatgaccaagaccctcctcgtcccttcagacatgataagggcaaggacgtctatcttgagcagtagggaggcaataagaagaggaagttagatcgggctactcgagcagcagtagaagttgagagagcagagcagggaggacagttgaggatagactctgatcagatcgccttttgggtccgtcgcctctcgtcttggactcgctctacacttgctcgatttgacccctcagctccagtccccactaccactccaccttcctccattaccctaggttctaccactcctgagcctaccaccacacctcctatgcctacagcctccaccacacctgcttccaccgctcttgctccctctgccactccactagttcctccaccccgttttcgagagcgagatgagacagaggtgcggccacttgctgagtaccctcgactgtttgaccttcagagggccactgctgccatagttcgccgcttttgtcacgtgccagtggagtcctggcttctagcttagagagatctagcatcagctcctcttttcaataccaagacttaggagtccttctaccatgctcatttgacagctcagatagctttgtgggctcaccgccaccttgacctaacaacatta

SEQ ID NO: 72336 - DNA, 564 bp, Zea Mays
tgagtctctaacgccgctatccacctacgctgctttggtcagcaatgcttctcaaagagctttgtggtccctcaaccacacctatcggcagcagttgcatgacacggcatacaggcaccttcccttacgtcctcatggtgagagccagacaagcgtggttccaggtgaagctagagaagatcacctcaacacccttgtaggtgtggtggcaggtcttaacaccgacctggacagtgcgacccttgatctctcaagtgtacatgagaagcttgaagatgctcgtgcaaggattgcagcactcaaggctcaacttgaaggaatagatccacctgaagctcacgtccctaccatagctgtgtcctcgccccgcaagagaattcgctatggagcccccagatctattacgaggccactctagagttttataagtcataatgtaataagttcgatttcacgttagacgatgaaaatctttatgatggtgttattataataataacaatgtgatggtgatgctagaataatgtttgattttgatttttatttgagtgcaatgatcttatg

SEQ ID NO: 72337 - DNA, 476 bp, Zea Mays
ggctgttaaggctgaaaggccaaaaattggagaaatgaccaaaatgccagagattttgagccctccaacggaggcaacagtgccgaaggtacaaaagggttctgccacaactcctaagaggagaaggatggcgaatgtgctggatgttgtgttagaaacaacaaaaaccttgagtcctgctcctccaaggaaagttgtcgaagcttccaaggcgcaacccgaagctgattctaagcaagcagaaatcgaagctgcaacaattcaagctgaaaccgaagctgggccttcagtgcccaccgagatggagcatgttgaccctaaggaaaaatcaacagagcggattgcaactgaaaaaatcgaagctcctagtcccgaagcgttgaacaaaagtattgaatacattattcgtcatgcttcgggaaaggtactatcccaagaagagatgttagaagcgcaacactatgcccaaaaattga

SEQ ID NO: 72338 - DNA, 521 bp, Zea Mays
tttaaatattagtatagatagcagtagtagtagcaataagtagtagtggattagagtagtattagaatagcgtagtgtaagtagtagagtaatgtaatgtaatgtggtgaccatgggtggaggaggccgactcataatgagtcggcttcaagtttgtgttgaatccctccttcatgaatgaagaacgcagttatttcgcttaaccatcattgcatgctttttgttcgtgtccttgaaggcttgccgacattttagaggtaatgcccgagtgacgactgtgattcttacttttctgagttatgatctggcattttagaggtaatgcccgacttacggagccaacttatactcatgctgacgtgtcttcttgagttccaaaccctaaatatcacttttctcctcagccgcttctctgctttctgaattctcgagcctacccactccgccagagagattgcgatggcccctaagaggaagagacagagtgttgttgctttgatcatgccgcccatcgatcccaa

SEQ ID NO: 72339 - DNA, 1048 bp, Zea Mays
atcaaagacaaaacttgatcgaggacatgggtgccacaagatttcaactgggccgacatagaattgaggacattttgcaagctcaaaagttaggaagagaacccgtttgccaacataaataacgcaaggcaaagatcagctcacctggaggttagaaaggaataagggaaatcccagaaccagaggcatcggtgcactatctgatgatggaatgttgatagagataatgttgaaagcatcactcagggaggcctcagctccgacagcagacatcggattcctagcatccgggtcacggacctctaaggtgaccggaccgacgagagcagtaggcgaactcatcaccacaggttccttagattggaccggtggcgatccaacatgaacatccatggaggcagccgaagaggaaccaggctcagcacccttgggggttgggtcatcctcagcaccaccctcgggggctgggttatcttcagcggcacctttggaagctgaagcaccctcggtcgtacccaccggagctgggtgaccctggcctgcaacgtcaagagccagtgtatccccgtgagctagactgccctccaaggtcgaagaagcgtgagaaattgtctgggttatttcttgcccgacaggattaccagccaaaaggatgtcatccgtaatctctgtacgggcgatagaactttcagtctcaggaggctccaacaaaaggtcttcaggaataatttcctctagtgcatgatcaatggcagacatcgtcaacccctggagactaactagtctctataaagcctgcattggagcgtcattgctgctatggttgcggttgttcttgcgaatcaaagggacaacttcttcctcctcttcatcctcatcaagcacacgaccaccaactctgacaccaccacaatcttcaatttcatcctaaaggttggcactcgctgggtcaccgacgaggactgaggtagtaggatcagcacccagttccaagcctgatgaccgccgaagttttttctttcttttcttccccttggcaggcatggct

SEQ ID NO: 72340 - DNA, 600 bp, Zea Mays
aaatagtggcacgttagcagaagtctagtcgcaaagataacttcaaagaccacaacttcatctcgtggcttcaatgtggtgtctaacccgggtgcgcacctagcccatgtagagaagtaacacaatagctccatcttcttcacactacccaccctagtccgtgaacacccaaaaactggtgataccgtgacgaacgatgaggcctccaaggacgaggacctgataaccagaacaatgtcaagaacacaagcaagaacaggaagaacacaaccaaaactatgttgattacgagttggggtctcataagccgatgaacggcgacaccattcaatgacagaatgaacataagcaaaacctaaccctaatggtcgcggcggctactgataaaataaggtttagatgtgtgcaagtcctctagacacacccttagtaggctccaatacgttacacgggccaacaacccaaaagacgatgtcgtagcaccaaaatagaatttggacaatgacatgtttcgatgattcccattgacctagaaagaattttgagtcagcttcagttgggttggaaatcttatctccttaatttcaaatccatataaat

SEQ ID NO: 72341 - DNA, 464 bp, Zea Mays
cggcgacagagtttgttacatgtatgtactgtgtcgtccgtgaacgtccgcaggaatggatccaaaggctgcgcacccgtgtgcactgtacatcagtacacgcctcccaatgaaagttgggccacacgtgcaacccaacaagcatgttaacaaaaggatcgtgttctgtcggtctccattgtagctagtttcccacaaggaccgtgtcgactgggagatcgttgacagcatattatagcattagtggtgattttgttgatttgcccgtgatgtgtatatggatatgtgctctagtattcaatttgcgtgcacctttcatgatacggactgagtgaaagagaccgtcactggctacagctgagaaaatgggcgctgcgtgccgaagtgccagacttccagctccatccaggagtaacagacaatgggccggagtatttaactcgttgttgattagctaaaacaac

SEQ ID NO: 72342 - DNA, 493 bp, Zea Mays
cgggttgaatatattagagagcagggactcttatgcaaataggacacgacaaatggtttaatctaaccacatccgcccgatcttacttgggtggcccagattaggttgcatgtttatgtgaatcgttatgaactatcgtccattggatcatcaatccaccgccaagaccctactcatgcctcacaccgtgcgattgtcgatcaacagacgacatccaaccgagcgaaccgttaagcgcggatctaatctcatccctccatataggatctgatgaccatcgtcctttcctctcctcgacgaccacctaggcggtggcacggcatgacacatgacagaggctcaccggcgcgcatccaacctagcacagtagtggtcaaacgccaacgtaggaacatgatacatgaagtggaaagggtactgaatataggggtgggtatctcaccacaattccccgagtagaacgccctgcactcgacgcggtgtgggtccacga

SEQ ID NO: 72343 - DNA, 446 bp, Zea Mays
gtgggattaaagcaggaatcaacgctcctcgatgccaattgttgtgccatattgattcacagagaaacggaagtcgtaactactccaaagatggagattttaagcaagagccggacacaagaatcagaatggttgcgagaggaggggagagggcggacgactgttgatggcgtgttccactacagggaaggcgagtagacggggagggaggcgaggtggtgtccagaccgtatgaggagacgagcaggcgcgacctgctgcggatgatggcggtgctgccatgtccgttcgtttccagaagctgtgtgagattggagaggagagagcaatagaggtgggtcccacatggcattgaaatatagagaggcgagaggtatgaatggaggcatgtacgggacccgactgggcctgtcctggttggccggctagatatgcgtggttttttt

SEQ ID NO: 72344 - DNA, 411 bp, Zea Mays
attactgcatcatgggtaaaagcacataatcttccaataactaccatgtcaacccccattcaaattgactcagccggtggtagatttcgaactgatggcatttgtttgaatgtaagtgtggaaataagggggatagcgtttcccgctaacctcatagtaatgggtactcagggaatagatgtcatcctagggatgaattggctagataagtatcatgcagttatcagttgtgataagaggacaatcaagttggtgtccccactaggagaggaagtggtgaccgagttagtcccgcctgagccgaagaaaggaagttgttatcagatggttgtcgaaagcagtgaagcagacccgattgagagtgtcaaggttgtgtccgagttcccagatgtgtttccaaaggacttatca

SEQ ID NO: 72345 - DNA, 558 bp, Zea Mays
ctaattcccgtcggccgtttgacctagccgacgggagtcacttaactcccgtcggctacacagcatccgacgggagttacttaacacacgtgggctacaataaaaaccgacgggagttattgcggtcgacatgagttattgcggttcctgttgtggcaagataaaagccaaataagtcatccagagtgagcaaagcttgatccctaaagaaatgggcaacgactcaacacgaccgagcgagaaaatggctagacctcaagaagagtaatgaaggggctcaacaccactagccaacagccaaaaccaaattagagcacaaaatcagcataaaagctaaaatcaaagctagttcctctagaaagaggcaaaggatcaacacaactagcgagacctcctgaatggctcaaatactcccccgacaaaattgtctctccctaaaccatatctaaaaacctcatagaaagcaagacttcatcatcaaaagattgtatacacgaagaagttcccaaaatcttccacaaatgcacatctccaagaggtaccaccaaaaacggaaac

SEQ ID NO: 72346 - DNA, 400 bp, Zea Mays
tacacatgagttctcaaattgtttcttgatatgtcacagtataagttttctcctacagaagataggattcaatgatgacatgccacaaaaaatagttgtgattttgtccatcctactgcactgtatgttagtaccatttcaacagtatatttaaccataagaaataggttaatcccacagcagactttaatactatatgctaaataaagtgttatctttctggatcatctagtctttgaaacacatgcagagcttggtctaaatattctttgcggtagcatgtaatagaaatcattgacttgggtgtttgacatagcaagcacttgatggttttaagttactaatgttcaatttttctgagtatccatattaatgcagaaggccatagttcatttccttg

SEQ ID NO: 72347 - DNA, 582 bp, Zea Mays
taagcactctgtcctagggttaatcacatatcaagtcacatcagtacaacttgtttgaaatttttacctagtgaatgcattctaggtttaacaaacacatgatatgcaaatgctcataatgttatgctcaagttttagtaacagtaacacctgaggtgttacattatcggtggtgtgcactagaagaaaatgtgccactttcttcaatcggttcactatgacccagtttgaatcacgatgtcgagaggtgttgggcagacccacaatgaaatccatgctgatgtcatcccatttccatgaaggtattgataggggttgcaaggcaccagctgattttaagtgccttgcctttatcctctgacacgtgtcacattccgctacatattgggctatctcccttttcatcctggtccaccaatacaggggcttcagatcatggtacatcttggtgcttcccgggtgcatggagaatttggagagatgagcctcatccaagattttcttcttgaggtccctatttttaggaaccaccaatctgtcttcaaaccatagtatccccttgctgtgttagcgaaagcactt

SEQ ID NO: 72348 - DNA, 363 bp, Zea Mays
tatgaacccattattgaagccaataaaaacgcatacaatacaagggagtattgtttaagcaagagttagtcaagattaatttgcccctagaatatcttgtatcctttctatttcttaggaacacacctaatccctcgaggcagtctccaaactttttttagatttaataagtgtatgactaggataactaagagggtaaggataaggggaagaggaagaggaagagaaatcataccttaggggaccaaggtggattgtggcgctcaggtcatagaggtgtccagagtccgagtgctggcatctaatgtcccctttggtttttctcctccttgcgggttaggcacttggggtggtgtcttggtg

SEQ ID NO: 72349 - DNA, 651 bp, Zea Mays
cctaggtgtaccgtgtatcgtgaatgacgcgcctcttaaagaatgtattcattgacttaagccttttttgtggtacacaaagataaccacaaaaccgaacagctccaatgccatccaaaacaaaactacacatctttcctttagcaatgcataccccgtataacaattgatcatgttgttccttcaaaaccttcataggtatagtagattctagaactactcttgtctctgactcaaacactcccacatagcaatatgagacattcattacctgaaactccacaatcatgtagtttagtgttgggtggcatgggcttgtgacttaatgcatcaccatatttgttttgctaggtgtactcaactcaagtcatcgcctctgcctcaatttaagtcctttttggggaagatgtactttagatttatgtcatccatgtaaatatcataaggctcaccatatctttaagacaaagacaactgcaacaagctccagatcataagtgggataattctcctcatgctttcttacctatcttggcacataggcaatcaccttcccatcctacataagaacacaccgaacacctacttgggaggcatcatagtacatagtaaagcactttcccacctctagaagggtaagaacaagggcag

SEQ ID NO: 72350 - DNA, 1612 bp, Zea Mays
gtcacttgaaaaggtccaaagaacttgtaactgagtttgtgatgtgcacgaggcatgactgaggcttgcacataaggttgtagcttcatgtatacccaatcccaaactgcaaaggagcgctcagagcgacgtttatctgcctgacgctgcattcgaagctgagcgcggaccaagtgctggaggatcaaatcctgcattgtggatcgctcatgcagccattctgatagtggactgggaacaacagcgccatgtggaataccaaaagaatgcggtttgcgaccatagagtacttcaaatggtgaagagcctagggatgagtggaagcttgtgttgtacccgaattcagccgagggaagccacgcagaccactttttaggacaggcacttacaaagcagcgtaggaatgtttcgaggcactgattggctctttcagtttgaccatcggattgggggtgataagatgaactcatgcgaagctcagcacctgctaacttgaataggactgccaaaactggctagtaaaaactgggtcgcgatctgatataacagccattggaaacccatgaagatggtacacctgagacaggaataactgtgcgacagaagcagcggtgtagggatgggataatggcaggaaatgggcaaacttagtaaacttgtcgaccaccaccaggatgcaatcagcagtgccggagcgagggaggccttcaacgaagtccaatgaaactgtgtgccaagctgtgtgtgggaccggcaagggttggagcttgcccggataagcagacctgtccggtttcgcttgcaaacaaatctggcactgttgcacaaattcatggactgattgtcgcagtttggcccaagcaaacatactcttaactcgacgatatgtaacaggtgccccagagtgaccaccaacaggagagcaatgaagggctgtcaggatccgagttttaagttggtcatcagcgcccacccaaatgcgtcctttgtatttcaggagtccatcgaccagagtaaaatgaggcacaacactaggagctattgccaacttggacagcaatgactgagccgcagtgtcttgactataactgctctggacatccaacaaccattggggaaccaccactaaaacagcgtgacattcaggatctatacggcgagatagagcatcaacaacacgatttttagtacctgggcggtattggatccggtattgtaatcccagcagcttggtgaacaccttatgctgccaaggtgtatgaagacgttgttcattcaactacgtgaggcttttatggtcagtcaggataacaaattcatggtgctgtaaataggatctccattactggacaaccaagataacagcgaggtatcctttttcataggtggacaatccgcgtgatttagggcccaaggccttactaagaaatgcgaggggatggccttctggatgagtacggcgcccacaccaacaacactagcatcaatttcaatgaaaaaggtggcaacaaaatctggcagcgctaacactggtgactgagaaagtgcagtttgcaatgtacggaatgcgacagcatggtcactggtccaaacaaatagagccccttttttc

SEQ ID NO: 72351 - DNA, 795 bp, Zea Mays
ggaaatctcagagatcttatgctagtgtggtgaaagctaagagagctccgatcgttgctgtgaagatgcaaccaagaggagctggtcggcgtggagctgcgcgcgggtatggtcggggttctggccgcgatcacgtctggaggcgtatcgaagatggtgatgttcaaaatcaaagaggtggtcgcaatattgaggaggcgaatatgaaagaggggggtgataccttgaatcaaggtaacccatctccctgggaaagtcaagttaacagatctgaagaaaagaatgaagatagttgggaaaggaaatccccatcctatgggagaagatggtcctaaagattcgcatgtgaaaaaagaggtaactcgcagttttaatctggatagatctggatgtgctttttgtcactttaaaaatcatcttactaaggattgtcgacatcgctttccttgtgacatttgtggttgtgatgatcatgttgtgtttgattgcaaaaaatgcttgccttggaattttggtccagaactttgtgcgacacaagttgaggatcagagttttttctatattgaagaaaaagtggataatcggatgattaaagaaaaatccagcactgctattatcactgttgttcaagggaatgttagtgaaaaacagattgaattagaattcatgaacatgttaggcaagaatttatggaggtggtctgctagatctgtgggagacaataagtttgttatgagatttccagatcctaaaatgataggggatcttggatactttagacctttaggcatgaga

SEQ ID NO: 72352 - DNA, 298 bp, Zea Mays
tgactgaacgagttaaacgtgtgtccttgtataggcacaccacgaaccatgatggaacaattacctaagatctagtgacctgtaaggtttaatctgccattttgccacttatgtgcttcggcttgtaggattggaatttggaactagtggctttgttgtgtttggttgtttgcgttctcctgcacttcccttctaagttctaacatgtttctctggtgtacaattgtttgtcttcattactggtgtcctctgtgttcccccaagttgtgacatattgtgaatgacatgtagtgtggcg

SEQ ID NO: 72353 - DNA, 393 bp, Zea Mays
aaaggcaattggttgttggggtcgatggggggaatcactgcagcggatgaactcgaggcctttcttttgggcgccatctcaactctactggcaaacagagcgggagccaaattgcagagaggatctagaggcaggaaagcaagaactagggcacggaaagcagaggcgactgaaagcgcagtatatgcgggatattcccgagtcagataccgtttccaaaagcgcccagtcagcacccgacagttacttctaaaacaccggcgtgccacgttgtcacccggcagctacttctaaaaccccggtgtgccacatcgtcactcggctattatcctcaaagtggtcgacacggcccgttctaactcggccgttatttctaaaacgctgacgttatca

SEQ ID NO: 72354 - DNA, 783 bp, Zea Mays
ggttatcagcagaatcatcaaggaagcatcatgaacacaccgaccaaaaacaacatcacaactactccagtccaacctaatgtctgtttcaagtgtggcgaacttggccactatgctaacaactgcccaaggcgcaatcaatagacaccctagaggaacagcaaccaaagagctgatcagaatacacctgctcgtggatctgcacagaacaagaccccacagaacccgagtaagggaagagttaatcacgtgacaacagaatcagttcccgaggatgtcgacgtgttgtatggtatgtttctgattaactccatacttgcatcagttttatttgattctggagcatctcactcttcgtaacaaagtcatttgtgaaaaagcatcatatattaaactatcctttgaataggaaactattaattcgatcaccatgaggtgaactttgagccactgactcatgccctcagactaagattgaaattagaggaataagctttcaagtagagctgataatcttggaattgagtggaatcaatgtgatacttggaatagactacttaacgaagtatgatggagtaatatcttgtgctaagaggatggttacattaaccagtccacaaggagaaagaattgaagtcaatgtcagtatgccagcgacagcagaagccatggtaactcaactggaggagaaatctttggaacacatcagaatagtgtgtgaatatccaaacgtatttccggaagaattactaggtatgccacctgatcgtgatatagagtttt

SEQ ID NO: 72355 - DNA, 580 bp, Zea Mays
gaccaatcgctcgctgtcgtcgggtagacggggatttccgccgtgcgccgtggtcggatcgcccagaagcttaatcggcggtatggctaccattttcatattcgtcgtatctccctctccgtttcgcacaagatcgcgctaggattaggactcctcggagcgttcacggtttgtagccggcgtgccgccgcaacagtgccacatcacggccgcgctcgtgctggggaagaagccctctgagccgttcatctcagaccaagggtcaagattagaatgaggggcggtgtagtgtgggctgttgatctcactgtggacggctgcgattggatcctggccttccagcgcgggcgtgggatgttagccgtagatctcggatcctaggatcacagaagcataccggttcggtattaggtgatctaatctaggccatagaatttaaatcgtgcggctacgatacaacgataccccttcggctgggtttcttgcataagagaccctgttctttattagaatcaacccgcagtgcacgactgggcggctctgtgtcttggacacatttacgctaacaaccccagtttcc

SEQ ID NO: 72356 - DNA, 530 bp, Zea Mays
caaccctctggcaataagacccacaaggcagggggactaacccagtaccactgagcaacgtcagcgcaacaagacagatcaccaccaaaccacgcccgggtcatgggaactgtgccgaagggacctctatcaaacacgacccccaatacgttctcagatgtgccccactgaccggtgggaccggtcaacccccgtcgcagggacctcagcatcagagcctctatagtgaccgaaatactagaaagaataggatagtacgccataccggatgtatgcctatgtattcttaaggatgacacgaaagggatgtcagaatatcaagttgtactgaagacggtcctgaaccccaccacaagtccgctctatgggacccaccaagcaccaccagttttcatcagaatggcaacatgagcccatatggcgataggacaataccgaacgcataacaaaagtacgacaacgctcgacccatgtggatgatatcagaggagctacgccaaagcagccaactgaaatcctccatagataga

SEQ ID NO: 72357 - DNA, 477 bp, Zea Mays
ggattcatatctttgatttataaatatgcaacatataaatctcatatcgaataatatattcctgatgaatgatcactctcctgtgtagggagaatatctcctagttgagattatagtttccagatggaatctttccagaagaaacaaagtctgtgttgaacactaaagtttgataacccctataaagggataaagacccatacatacccgaaaaggaataagatgaggtaccaaaggacttgaagttcaccgaataagcacatgtgcattccatgagttttactcatggtaatttccactagatgtggaattgcggtatcctctaaagccacgatggcagaaacctataaggtttaggtgttactggcaaaatatccccattgcgccagaatgacagactataacgatgtatctgatcgatgaaaaatctctgatggattacgatctttgatggacttttgttacaccatcatagat

SEQ ID NO: 72358 - DNA, 398 bp, Zea Mays
ctcaggtgagtcgtggctaactgtccagccagggtttggtctcgggtgagtcgtgattgtgtctcccgtcgggggttggcttctggcgagtcgtgactgcctgtctcaccagaggatggcctcgggctagtcgtggttgcctgtcctgcctgggcttggccccgggcgagtcgtgactgcctctcccacccgagggttgcctcgggcggactacctgttctgtcttgccttggcctcgggcgagttgtaactttgtatcccaccggggttggcctcaggcgagctgtaactgtgtatcccacccgggggttggcgttgggcgagtcgtgactgtctgtcccgcccgtagatgacctcaagcgagtcgttattgcctgtcccgcctaggcttggcctcg

SEQ ID NO: 72359 - DNA, 585 bp, Zea Mays
gctgcccctcgcggtgactttgtattggtcgaatgccgaagaccgtcgatgcggtcttttttcgacgtgatttttgcgggggatttttcgcgtgtatattacatggctctgcctcgttaaaaacctcaccccccgggaggaaaagagtgcgggccggaataaaaactgtcttgcgaattacaagggcgggctggccctgaggagtcaaacaaaaaatttgcgaagattgtcaatgttccaagaatgttctaagtcttcgtcggatggcgttgtgagcctgtacgcgctgggggacgccttcgtcttgacaatgaaagggccctcccatttggctctagcttgccccgggactctgtccgagctatccggacgaggacgaggtctccttagctgaattccctcgggatgactgagtggtcgcgccatgcttttgtttgagcttggtatttgtttagagcctgtagggcgaagacgcggtctccatcgatgaggtccttcgaagtaggttcgtctacgtcggggacggctgacgcgactgtccgtggtgacccatgttttatttcttgcggagtcatggcctccgat

SEQ ID NO: 72360 - DNA, 471 bp, Zea Mays
tttttaaataaaaagctagactgtagggcaacggtgcagtagtactttacacagtgtgcatgatgtaccattggaacaatattaatctgtttagtgatgatgcgtgatgcaagttgttcttttagcctaaggcatcagaatctgtactgtgcgtattagtttctcccccaattatcattcctttttacgatagatgcttccgtaaagtgtgtaaagtgaagtttctagttatgtctgctgttattacactagtggattgcgttgcgtggtaacattgtatgaaagtgagattgttacaatgagtataagaagtttatgtagaagaaggaaatctgacgggttagggtaagtggaatagattgtacctcctttttcttcattggtatcatcttttaatgagctgataatattgtctttgtatgatgtagcacaattttgtacatacagataaattggaaagctataacagag

SEQ ID NO: 72361 - DNA, 730 bp, Zea Mays
ctccgggttcgctgccagcgagagttgatctcaacaaagttagagaggcaaagagatttgccgtccttgaagcgcagcatgagggatgccttggaagctataaaagcttcgattccctctttgggaattaccttgttcctgtcataccaacgaacgatttctttcatcaggccgggaccaaatgatgaacaagaatggctatttgtaacgaacagaatgactactaaattttgcaatttcctttaagagcgcgacctgatacagcattactaagctatcaacggaagataacacgaagaccaagttttgtgtgtggtgttgtacgtaggccccctaacttgcaagatctcaaaaggtaaagattatcctgcacagttgcagatctaagtagtgaaaaagtttttgcattatggggagcatatgtcagtgtgtgttagctttctttttttttcccttctagtgcgaatttgtcaagacatattttccatgaatctatttatcactcaaaaaaacgttcggctgccatcacctacacagaatagttgagatgcagaacatggacttaggccttagggcctagggagttctaacgtgcatttgaagttcgaaattagaaagttcaccacatagaggttccagattggaaattgaagtcatggctttgataatgttcctcccactttctttaaaatgtttatttacatgggcaatcattaatactagaatggag

SEQ ID NO: 72362 - DNA, 333 bp, Zea Mays
gtgatcatagctatgtctttcaattggtaatatcttagtttaggtaatttatgcctttaaaatgttgttcttttgtgcacctaagaaaccttcttaatcatgacatgcttagatatttcgctttatatacatgattgtgttgatcttcaattggtatatgcaatgatagttaaatatgaagcatgtacaggttgagtaaatgttagacttccttgaatattgaattggcttaggtgccactgaggcatgcattgttgaatttagtcagcctttcatttagccttaaattggtgttaagtggttttacaattgatattcaaattggcatccttg

SEQ ID NO: 72363 - DNA, 531 bp, Zea Mays
gtcgaatcggtgggtataaggcttccgatacaattgccctatacctgacacactaaacatcccggctacctcgtctctgatcctctccgccatgtctggcgaccatccattgagtttgtgggtggaaatctcaggttgcctgacatcactctgtcggctttcctcccaggggtgtttgaggtgtgtgttaggtgtcctattaatgtcaccagctcctgccttatacctctcaggctctcttgtagccgaacagtattcaaccctatgtccatgaggtggtatggcatgattataatgtgtggctggtggggcaccataatgtggttgcgaggaatgtgggaactgtgtgtattgcgcagctctcggctctgcgtacgcatatccggacggtccgacgtaagaggtcggatggtccgcgaccgggcccaaatggtccgaaggtatatccagattgtccaaccgtatatggtgctacgtgggtagtctcgtacccagatcgtctgtcgtaaagaactagacggtccgcgatcg

SEQ ID NO: 72364 - DNA, 365 bp, Zea Mays
ccgaagctgagggtggggtttgttcaatagcttccattatattcatcatacgccgctacttttgcccccccccccccccgtttttccccttggcatccgaagcgatttcctttgactgcaagaggctagtcagatccaacctcagaggacttagaagtgcaaatgggaaaggttcagtcattaccttcaaaatctccgagacttcagcagcagaatacgaagaagggctcataatctgcttcggcacatcttgtaccttcgtctctttagtagatatcttgacaagtttccgtttcttaggagccaattctggtcttctttaactgaccggatggcctgcctattcaaaatgctgacaattctct

SEQ ID NO: 72365 - DNA, 449 bp, Zea Mays
ccgatatagaatgctactatttaatgggtatatatctgttgccatctctagacgtagttggaatgtggtcaagtaggagcctatagtgcacccggaagctgcaacgcagtcgagcaggatccaccagccgtcacctggccactatggcaacactatgagggtttgtttgatccaactattggtgaatctgtgcttgattttggttcaattgattccaaattgttgaattttggatatctagttggcgttgagatctcacgctcgttcagtcgttctgcaaggtgccgcgtgcacgtggcccatcgcgtggtcttcatgttattggctggcagccacgccatcgcgatcatgttgtatcctcgcttcgcacgagtatttctacctccatctccacctcgtcgcatggccttccgagcatgcatagccaccatgtcgtatcctcctggctc

SEQ ID NO: 72366 - DNA, 305 bp, Zea Mays
aaaatattccggccaccctacatgcgttcaccgcggcggaattggataagaacgccggtgatcaccgtcgctcggccttacaccacgtatccgagcacctctatcgcgtcaccgtgactctttacagccgttagatcatcgccagtgagcttgccacgacgatggacacggattcacgtgcgccagtgcccttcctctcctccgaccgccgcgcgtccttcttcaaattcctggccaccgtcgaggccctctataaattgatggccgaggtagctgtgctatgtcatcgtgaagccttagcaccc

SEQ ID NO: 72367 - DNA, 508 bp, Zea Mays
ccggcccattcatcaagcttctcataatatgggtattcgaagttcagtgcatccattactcggttcagccttcgtttcggtcgagtaccgaaggcagcagtcattagctggtcctccttcttcgtagaattgccaaggatctcattgcacattgtctcgatcatttctagccactcattgcatggtttcttgaactgtttctcaaatttgaatccataagggagccgaacaagctcatacttttcccccttcctttttcttcggcatcccccaaccgctagaggttggaaacgttctattcgccaagtattcctgcactagatccctagtgctaatctcggcagctactactctaaattcaacttcggacagctggcatggggagccaagttgcatgtggcacaagggccttgtcattccgaagcttaatctcattggactcatgaccatagtcatcagtttctcccccttcttctcagaagctttgacatagaaccactcatttgtc

SEQ ID NO: 72368 - DNA, 313 bp, Zea Mays
aaatccctccctccctgtctcgaatttgttgctattcttccgcatccgcccgggattcgcggcagcccgagctcctcgctcagggttataagacccggctcccgcatcctctgttctccccatagacattcgtggcgaccaaaagatagttgcgcagagagaagaatcgtcgttgttgaacctaggcttgcagcggtggtcaggggggccgtggaggtggtcgcttgaacctatcgctcgttcatggagcttatccgagcgggattgtgcaaggattgcagggaatcgctcaccgtgaatgggggagcagaac

SEQ ID NO: 72369 - DNA, 277 bp, Zea Mays
gttggtttaatctcaagccgcagagtacccaacactacttactcaatcagagactttttgtgcaaaagtaaagcatacaatggctctgaatcggagccgtgctagaaacgctaggtaaacaagggatgcggtgtcttcgttcctccccgcgtgagagcactaggctttagctactgtgtttggaaaatttccattgatctctgcgactctgccacagctttcggcgtcgtgccgcactacgaccgccagtaatatctaacgcgcgttctatttgtat

SEQ ID NO: 72370 - DNA, 583 bp, Zea Mays
tgcgttcccagtgatctaaggtagcttagctcaatcgagttggtcgaggagtatcaggggcacataagaacactaaagcgaaagcgtagagggtatgagcggacctgagacgagctgaccacggcgaggtcacaccgctcggtgttcttgagtgatttgggggaaatccccaaattgaggagttctagtggatgattcaaggcacgggttgctctactgggtgcacaattacttagcggagcaggcggggtcggtaatttataggctcccatagcggtggcgtccaatttcacgaagttgcgctggcggccggagaggaagaaggttactagcgcggtgattcgtggcctattagcatggcaagctccccgacgatcaccgggcatgcacgatgtgattcactgcgacgtggtcaagcgttttagcatgtggcgcacggcggtaatcggccaacggcggcgaggtctatccgaccgatagacgagcaagtgggtacggtgagcttagctgtgaccgagcccgagtcgatccaggcgccaagatctttactcgcccacggttatccgcaagtcacggcgcatga

SEQ ID NO: 72371 - DNA, 466 bp, Zea Mays
ggttggcaacaaggaacatacccatcattaccggctcgccctccggtgttgttgccacttgagtataatatatccgtcctgttttcttgacatttttgcctgttgaagtactagccatgttcccctttccttgattggagtttccagagttctgctaattgttgaatttattctgctttgggtatggactgtcctttataaagtgtctggactttccacagttaaagcaccagtggaagaactaggaagagcggagaaacgagtaccaggggcactcagctgatttgtagaagcgggcgcagaggtaggacaaatgaaaacatgctgcttgaatggataggagggtgggcgaggcgaagaacgattctgattaaaaggtcggattaccaacctggttcgcttctcaggtccctgattagacctgtcacctccaaatccctttgcctttccatggcttgtgtgcttg

SEQ ID NO: 72372 - DNA, 339 bp, Zea Mays
cttatatagtaggaaatgttttgttccggtggttattctgaagctacacacgaacatcgcctctctcgaagtcgacccagacatgacatttttgctgttgtgtgtggcctgctacccaaccagcagagcactcatcctcatggctcacgctcactgagatcgtctggcagcaaatgcatatagacgcgatagacaaggttcccttcaccgtgatggagccctgcctccagcgtccaaccacgagcatcgcggcatgctgagtattgctcctcgacgcagtgtacagttgcaaccccatggcagattgttccaacaaccaagtttcggctgatttcctcg

SEQ ID NO: 72373 - DNA, 407 bp, Zea Mays
tatagagctacaactttgatacaaatggattaagtagttactacatgaaaaacaaagatcctagcttctgaaatcgatctgtcggatgctctgatggaaggctgatggtacagtgactgaataagatcacaggttcagcccccctcaccgtcggtgatcttgcgcccgtattcgcaccgacgtcacgattcacgcctggttgaacgcggataacgatcctcggtgaaaattcgagcgctggggatgagcttgggacactgttccgccctggccgccgtacccacttgcctcacggccggtccagataacctcgccggagttggccgcctaccgctcacgttccacgtgcctaggtgctctaccacgtcgcagtgaatcaccttagcttgtccattcatcgtcggagg

SEQ ID NO: 72374 - DNA, 380 bp, Zea Mays
gctcaaagagacgacgacgtggtacatagagtcacgagttgcagcagcgaaatggagattcagacgaaagcgccacagagtgacgacttcgtcatcccttttgcggccttgttggccaagcggatcgcccaaacgcaacgacccttttccggcaacagggcgcttctagagtcctggacggacgttttttccatgcaccgacttgaacagcggcaacagagtcttcgcgaaagagggaggacaactgatgttctacgtcgttcaaagttgaatccgacggtccatattttcctgccaacgtggataggctgaaaggccacgttttggaccggctttgtaatatagtaaatacctcaatattgtatagaagagcatgcttg

SEQ ID NO: 72375 - DNA, 463 bp, Zea Mays
tgacgccgtgcgggtccacgtgcagcctgtaagggaagagcgggtggccgcgtagccgtcgtcgccataccaatagtcatctctctcgctcccatgcctcaccagtgacaggcatggctgaaacaacaccacgctctatgctgcacgacggtgagtactttcctccctttttaatattttattccctctctcctcaattcatgttcgccttattaggtcctggaaccgatagcttctctaacccgtctttgtcgttgttcgccactttggtttgggcacccaccgtcgtcatgggagcgtgtggtctgctcctgctgcccgccgccccgtagacattgtctgtgactccgtaagtccatgtttgctctactagaccccctcatgtcgtctgcatctgcattagggtcggctccattggtgcttgctgcattagggtgtttgctctttgcaagaactgtgttac

SEQ ID NO: 72376 - DNA, 432 bp, Zea Mays
tagaccctgtaggtcccgagcatgtatcaaaggatggctagtgtcagatggcgggtcctgcgggtgtactactaatgctccctagccaaagttgtgtgcaggcccaggtctcagtcgaggctacctcctgggggccattgccaactctttcttaggtatgttggtctgcaacctcgacaaattgagcctgcatcacagggaggagaggtaccaaggaggaatcggttacaccacacacaacagggacaagtggtacacaaataagtgctaatactgcttgataaatagtactcaaaagtaccttacaaaaagcaaaagtattacatccgccttcaagcggagtcctagctccatctctactctacaggtatgaactacctccacaccagtacggtcgcgtgggtagctagccccgagcggctcgccagcggc

SEQ ID NO: 72377 - DNA, 276 bp, Zea Mays
cggggatgcgccaagcaactgactgggttgactatcctgcttcctcctctgccgaaagtaagtaatgatggggcctctctgagataggcgactcgacgttcgcgcatccaccaaggctgacacgtgccttcccatgtcgaatgtggcccgagacggagatctcgggggtgacccctgaattgcctgctccttcacgcatccacccataaagcaacaaactgccggagccctcaagggtgaagagggggaagatggaactggcaggggggagcgaac

SEQ ID NO: 72378 - DNA, 282 bp, Zea Mays
gagtagttactgccttgcttatgtcacccagaatctggtcaacggggtgatgtcgttggattgttgctcggatttgagttggaggaacccgtggtgcttcttcctccatcacttgttcttcctgtgctcccccttgatcttgtccctcttcttgaggtacctgttcaccgtcttgagttggaggatgcaccattatggaaaaagatggctgatcttgctcttgttgttcctgtggtcgcacatcacctatcgccatcgtgcgcattgcgaccgtcggaacat

SEQ ID NO: 72379 - DNA, 318 bp, Zea Mays
ctcgggggtgtgttatttctctaatgaatcatgctgctaccaggcgagctagctcggcctgtatggcttctctcttatcgggctaaagcggtggagattttgccagatcggcttcgcttgaggatacacctttggtttgtgctcagccaactctatagggactctcggcatgtccgcgggttgccatgcgaacacatcttggttgtcttatagaaaatagatgagcatgtcttcctatttggtggtgagggtagagctgatgaccgccatcttgcgttcgttggagaagccgaggtttgctttcttggtttctttggg

SEQ ID NO: 72380 - DNA, 400 bp, Zea Mays
attgaattgtcagtcaaattaaatgaatcgcagggttaattactaattagtgctccctctccctaaaaaaacggaatttgaagtggcgggacagaaatcaaacaggggcatgcacgccatggcatccacgcactacggtgcacgcaaagagtgcagacgagtcacatggaaaaagttccaaggctggaagaggaaggaggaaacaaatgggcgccgacgcccctgcacactgcagcgctgcgcacagcacaaatgccctgcggtagcagtacccagcacgacgaagtagagtatggttaggtcatgctcccccatctttcattccatcaatgatagacaccgccctcgactctcacctcacgcacacggcaggcacgcagagacgcaggacgcgcggacc

SEQ ID NO: 72381 - DNA, 1048 bp, Zea Mays
caatagtgtatattggtgtaccacgtacatacagtatacaatatagtaacaaatcaaatgtgcaaacaagcattgcacttattcgttgcgttacatgagagacaagccgttatgcagtcaaatacagaggaaagccacacacaagtccaaataccactgtgcagagagggagacgcatgtagaacaagctacccaccaatgcacaggcacacactcaatcgacgccacaagcagaatataaatgcacacacacggatacaaaccgtgggagcgagggactcgatgatgaaccttgagttctccctcccgcgccaacccttgtccttcctgatgtgtgtaggcaatctgtaacgctatcctcttttcccgcgcttcttgctgctcagtacttctggctccccgggaggtttgtagtgtgtataatggatcctatctccgtctctatgtttgtcgatatcttctttcaccttgtcaggtagggagtgcccgatgagctcaagtttcttcaacctcgtaaggttctcgatgctggagaaagtcttcatttcggcgaaggcccacacgagcttctcgagctgaggagaagacccagcctcgaatttgatcccggtgaccgtagggcatctcacaacaagaacattgagtcttgggaactcgtccttgttgacgtcgagttggcttccatcgtaggatccatgtgagagcaccaagcagcgtatgttttccatccttgcgagtgcccgcagatcaccttgcttcagcattgtaccgtgaagagtcaccttggacacttgtttggcactggaaagcaattcgggaagcaacacctggttggtggaggtggtggtttgggtaggattggcagcgctagcagtggtggtagtgcgggaaggggcagggttacggattgtgggggtggaggaggggacatggtcggtggcgacagcggaagcggcagttggggcagagggtgcaggataaggggctgttgcggtggaggggacgggggcgttggtgacaccagcagcagtagcagggtcagtcttgt

SEQ ID NO: 72382 - DNA, 286 bp, Zea Mays
gttcaaaacaggtccttaacgtactattactccgagtctttcactttgtagaacatctcttggccttttcttctcgtcatcgcaagctccatggtcaccagaacagtgccccgcgggaagaaacggtggtgttgcttaccagcggtggtagagttcacaacgaggggttggggaggtatgggaggttctgacggtcacgttgatggtcacgacatgcctggaggtggcagcaatcactctggccactagcccagtatcatacccggatttaagggataaagccggg

SEQ ID NO: 72383 - DNA, 1085 bp, Zea Mays
gatctgctggccgctgacatccaggcccactcatccgattcacgctcgctcttgactcacactagatcgtgggtcccagccgtaagctctacccctcccctttcttcgctgcttttgttcttctccccgtctcgcacggcgctagctcaccacacctccctggcgggcgcaattacctccctatcagaccgacgctatgggcggactggaggagactcggaccacgcatataaaacccctctcggcctctgttgagcatacctaggtcgccaccatcgagacccacttcaagctgtgagatccgccgtcgtcgttcatcaccagtgtcctctcccaacgcccgtgaagcgatccctggggtcctgaagcaagtgtggatcatgcacatgggcataattgggtgtgggaagctgcggagcggcggggatttttcgccgttgttacaccgctgccacggaccgcgctttgccgtgaattgcacgcatgtgcgctcgattcttgatatgagtcccttgcccgtatttgcctttagttccgcaacgagtagaattgtttgattcgaagttagtgcgcctttgttgaggtttcatctcgccggcaatggcgtcaccgtcactgttgtgcgatcccagccgctctgctcggctgtggtggggaagacgttcgtggtctgtccatttgttgatgagcgcctaggattagatctggcataggatggccctcgccaccgatcctacaacgaacgactgcgattagaagtcaagttaccctttcacgactttatcgggtgacggttagatcgggatcctatggctatgattggaacctgacattccaacgcgggcgtgggttggtggccattgatctcgtgatccacggctcgggtgtgtaggcgggttttgatctaatctcggccttcaatactcgatcggacggctaggatccgaagataccccttcggtcgcaagttttgcaaaagagcccttcgagtattagaaaaccaacccgccgtctgttgagggactctctgagtcttagaattatttgcaccgtagcccctgtacttctttgtatttgaggccccg

SEQ ID NO: 72384 - DNA, 597 bp, Zea Mays
cacaaatgttggcaaggtgttcttcagaccgtaaggcattacgacatagcagtaaagcccatccactgttacaaaagcggtatgcttcctatcttccctagacatttggatttgatggaaaccagagtaagcatctaagaaagacaaaaggtcatacccggagatagaatccacgatttgatctattcgcggaactggatacgggtccttgggacaagccttattaaggttggtgtagtcgatgcacatccggagcttcgcattcgccttggggacgatgactgggtcggccagccacactgggtgatgaacctcttcgatgaagccggcgtctagcagctttcggacctcctttcggatgaagtcctgtcgctcgacggactgtctgcgaggcttctgactcactggtctgacatcacggttgatcttcagatggtgctcgatcacctccctggggatcccaggcatctgcgacggcacccacgcgaacacgtcggcatttgcctagaggaaggcgatgagcgcgagttcctatttctcctccagatcacccgcaatgcgagtggtctgagaggaacccgcgttgagctagacagc

SEQ ID NO: 72385 - DNA, 503 bp, Zea Mays
caggccacgagcagcagcaacactgcgacaggcaatcgagaaaccaaggaggaagccattgctctcgagcagtagtagtgtgctgatcaagtgtgcttccactatgggaattgaagcagagacgcggggaaatacggccggccccctatatatataaccgcaacgcagagttgggggctttcaccggccgtgtgggaactgggaaagaatatacgtgagctatctagccgctttttacctgtgatgaaatgaaacgcttttttcgagatgaataggtcggcgattgttcaggctcggatcggaggctctccttgtgattggttgactgggtgcgcagcgccagtctctggctagcccggaccacgggatacgcaggatatgcgcgtttccgcgcatgcaggtaattaagccaaaaaaaggctatgttgcatgtgcgggtacaggctgccaccctcatctccggttaaccaaacagatgctgcacaaagttaatgggacgccac

SEQ ID NO: 72386 - DNA, 612 bp, Zea Mays
ctgaagaagccaccaaccattttgagaaactgcttgaggccccatgtcgaaccactgctacccggcccgacatgcctacaaaaattgtgtgttgctaaggaagttcctgagcaaggaaaaaccacccgagaaggggggcaagctctagcaggatggcgagtaggagaaagtgggggccgctttcctcgacaaaactaggtgtttgctaatctttggtgggtctgactactacatgtcaagaaggcacataagtcaaaacgacgtgaggtactccaggctcaggaagcatccccgaccttccttgactggtccgaccactccattagctatgaccactctaaccacctagagcacatcccctgtcccgggcgatacactcgcgttgtcagtcccattgtcgaattagtgtggatgaaaaaggtgttgatggatggagggagctggctcaatatcctctactttgccacgcttgatgttaagggcctcgatcgaggacgccatcgaccgataggagggccattccatggggtcgtacaaggaaggagggtgaccccgctcgacgaattgatctccttgtcaccttcgggatgccgaccaacttcaggactgaaa

SEQ ID NO: 72387 - DNA, 406 bp, Zea Mays
tagaaatgggggcggtgccagggataagctctatggcaaattcgatttttctctcgggtggcatgcccgttagttcctcgggaaacacatctggaaagtacgacacaaccctgatagcctcgagcgggttggcctccttgctatcaaccgaaatctggtgacaatcacctttcgctgttttaggcatccttagctcagccactaccttctctccgggcggggacttaaatgttacggttctcttgtcacagctaacactcgcctcatacttcattaaccaattcatccctaggatgacatctaccccaggggtgtttattactattaggtcactggggaaccctattccccttatttccacacttacattttagcatatcttatctgcttgcactttaccaccgac

SEQ ID NO: 72388 - DNA, 880 bp, Zea Mays
gagacagggaccggggaagcttcacaggttgagaacaaactgaaggtggacggttggcgacgctaaccgcggtgacagtggtgttcatagacggcgaacccaccattccagacgaaaaaggcagtagaattgaaaggacaactccgcgagcatcattgataccagacagttatggaacataaaccaagtgtacgagaaggcggactttgatagtggcgtggtcactaggttaggagagaacggcgtgcagcgagctccgaccagttaaacgacgacgagacacaagataatttggtcacgagggcgtgaactagtgaaacgtacgacgaactttactaagggtcgagaaacggcaaggaaatgcactaagtcgaagtgcacgacgactgaaagaagagaggaaaaaaggactctgcaattatcagccaccaaaagttcaagaactaagatttagaagggtccaaagttgagaggaattcagcaaaactgaactctgcaccaaactcaccccccatcgttgaccccattaatccacacgattcaaaacaataaggccaaccttgattaataaaacttgttcacagagcatatctctacaagtttgctgcagcagccctaggccaaagaatcatggattaagtgttataatgctccaaattgggtgaaaacactaaaattcagattcagctagctgaaacaaaaactgaattcaacacctgacagagagtttgaacaaagtttactccaaattatgtgcagcaccaaatcaaacttatttaagaaaactttttcactattgtatggtcatccacttttctatagaaaccatagtccataactccatagattagccacaagaaagctccaaagttgagcaaaa

SEQ ID NO: 72389 - DNA, 885 bp, Zea Mays
gtgatgttcttttctacacattgaattatacggaaaaacaatttatttgtttaccaccttttttcctttattgatttaacttattgagattaagttagagtaaattaaaaaaaaataagtgcatatcgatcttgccagaatacttcatggtttttactagaagttactttgaactctatgatttagtttgaaattaggcacctaattcaccatccatcctccaatctctggcgctcaaggggccttgcactagtgataatctttacatagtccgcttattaggttttattctctctctctggccgatcattggtttgtgttgttttgtgtttttcgaatctaagaatagtttgcatcgcctattaccaatgtctactttgacatcaaccttgactcatcagcctcatcttcgtctttggttttgtggtttggcatggcctgtgacattttagtgaatgtctccatgcaccacttctacacatcttcagatgcatgactcaaacaattagtttgtcatccagtccactttctggagcatctcaaccacaactcccaccatacataaccctaagcaccaccctaacgtgtttagtgcccctcataagtattaacggtcaggatggcagactagatggggttgatagtcttttctaaaacttaatgcgtagtgaatatctaaaacaaattcaaaattgaacttatcggtctaatcaagactacaacccctctatctattacttgcatcttgtaaatatcttagataaacaactaagggtatcggactaggtagagcccacctaaatagttgtcgggctaaacagagctcacctaaacaactcttgttggcaagaccacacaaacctacacaactagtaattaatcaat

SEQ ID NO: 72390 - DNA, 410 bp, Zea Mays
caaactagtataaagttattgtgtcctctttgcacaccatctatactagatgcgaaaatcacatagattactagctggtggtttcagtacaccaatagttggcacgccaagtacgggatcatttgtgcatcatgacactttttcaccacacagccgcggatggctagctatgttgtttgctaggtactgagcacagacatgcattttagtacctcgacttcatcatcaccctcaaatgggagttggcgagggtggagaccaccatcgaatgtcgccaccccgctaacatcgactccacctcctaggtgtgtcagcagctgaagatccacaccgaggaagcctaggatcttggggaataggatgcttacaaacccaggagcagggcacgtatggcacatgctccacacatt

SEQ ID NO: 72391 - DNA, 601 bp, Zea Mays
agggaaccaattctgaagctgaatttgtggtcttcatgggaataaaatgcgcagacttagtcaagcgatccactaccacccatatagcatccctgccccgaggagaacgagataagcccaccacaaaatccatggtgatatgctcccacttccactctggaatttccaatggcttcagtaaacctgcaggcctcttatgctcggccttcacgcgctgacatacttcacaggcgacacatacttagaaacgtcaatcttcatccacttccaccagaagtgttgcttcaaatccctgtacattttggtttcgccagggtgaacagtgtaaggcgttttatgagcttctctcaagatatccatcttcacctctgatttctgaggcacacaaaggcggcccttgaaacgaaccaaatcattctcatcaatggtgaactcctgaggtttaccatcgccaaccctctttcgagcttcctgcaataaacgatcctgctactgagccgcacgcactctctccatgagggaagattgaataagcatccgagtctcctcactagcggtgccgacatagcacaaagcgattctcaaacggtccagatcagcg

SEQ ID NO: 72392 - DNA, 663 bp, Zea Mays
caagaatccatgagcccctgtacatatgactggagtgcgagttgttttcaaatattcatagactcttttgaaatattgacaagcgaaggggtatcatcgcatgagaaccacacgatccgcaacccacgaatcagattaactcgctgccctcattgattcgacatggagcgatggccgttagatccaaaatccacggaccaaagatcacccacaccacgagttagcttcagccttccgatccccgatcgacgacccagaatctacatttaatctggagtgcccattgccggatcaacgacccaagcacacatcggtacactctaatccacatcgcatgccacggatccaacgacccttaagtatcttcctccttgcgccctcctatcaccgtttctctctcttcatggccgcccgacgccagcgtgtaatgatccagctgcgttgagcccaaaacctcacaccaaaatcctctacccgatgcctaagacacaacaaatttgatggaggcatactcaccggagatcccagggcgcagcgatactcgtccacaccaatgagcagatccatggggaacgcttccccaagcaaggagttgtgatggctacaagggtctccacacctggtttcgccactactatctgctacatgagcaagcgatgctcc

SEQ ID NO: 72393 - DNA, 409 bp, Zea Mays
gattttctaggacttcaatggtgttgtcccggatttccacctgctgctccaaatcttggatgcggttgctcatctattcaacctgtagatccttctccactaattctgaagacaggtcgaccacgaagtcctccctatcgtcgagggtgatctttgcaatttgagtgagtccagtgaggtgtgtcatggcatcactttgcagggtctgtaggtggtacaatgcaatcttgcactagacggtgattctcccaacctggtcgggatgcatggcccacacatctttgacgtggctcactctgttacaccacatcgggtcatccctcttctcagcggggaagagtccaagtgggtgaatcatcatctccagcgggtggtatccacagaaggtggttagagccttcagtgccgc

SEQ ID NO: 72394 - DNA, 526 bp, Zea Mays
tcgagtgagagaaagcaggtgggtggtggctcatgaaatctctgtgtttatcccaagcttgggtgcattctgatgctgtggattatgttgattttgcagaatctgctgtaccgaggcagtaaggccttggagaagttgcatctgtgtggccatgaacaattccattgttgggttgggtggtggtggtgccaactgttgaccagtacgctgctcgtgagtctgttggggacctgagcgagtgttcaccatctggtatgttagaaagtgcatcccttttagataagtgaagaatagaggaagattttaggggaatagcttttgaactcaggttaagcttatttgttaatttttaatgttcttatggccatcattccataagatcattgcactcaaacaaaaaatccaaaatcaaacattatgaagcatcacaatcacctttttgttattataataacatcatcataaagagtttcatcgtctaacgcaaatccaaacttattacattatgacttataaaactctagag

SEQ ID NO: 72395 - DNA, 574 bp, Zea Mays
cacctactacctctgcccttgccacgtgtggcctcctcacccctgcatgtgccccgtgcggccctggctcactttgtcgttcccacacgcgtttactaacggcgtgtgtattctaatcctccgaccccctccatcgagccagctcgtgcctcggcccactctcgtgatgagccgtagatgcatcatccagtcgctattcaccgtgacccacactatgttcacccgatggtgacacattgatcggtcagtgttctttgacctattgactagttggtgctcatgaccgatgctgctcccgctccctcacctgtcccctcctctgtccgcgctgcgatcgtgatccccattggcgtcacactatggaggaatatatgaccctgctagccaaccacacttgggacttggtgccacctccccttgtcaccaacgtggtcaccatcaagttgatattctgccacaagctcaagtctggcggctccttggatcgatacaaggctcgttgggtccttcagggtttcactcagtgccccgtagtggactacgatgatacctccaagcctgccaccattctgat

SEQ ID NO: 72396 - DNA, 441 bp, Zea Mays
ggcactagaagaacccggcactctggctcaattattggcctccttggatgcagggacagatatcatctcatgcaattccagcgccaactccctcttcttatggtgaccagcatcccccaccttagttcttgaggattctacatccacacttttatctagcttacatgaaaccttatcctgaggctctggtgccttgccccccattaagtttgcatcatcttatccaaaatccatgtcgtccatatccatcggtttagggttatccttgttcatattttcctctacccaaaattgcagctcatataaatggtccctgatcacctcatccacgaattgaggaatgaggttcggatcaagaactaaaatttgaagccgacgtacagcaaacttattagtgaatttcatgtcaactgcctttgtcacccccaaattgaacccaac

SEQ ID NO: 72397 - DNA, 474 bp, Zea Mays
cttgttctgtgcgcatgcgtcgttatcttgtgctcggcttcggtgtgtgtgtgcattgttgttagggatattctaggggctgtgtttccacaaggtcgtctgaggaccagccgaggtttagtacatttccatcttttcaatggctcgactgtttttgcctgataccccagagttgccaacaagtagtacaaagtgcagtgaaggtggcatcattttttggttctgtatatatgtctgcgatggtatctgctgctcatgctctaactaggacatcatactgcatatgtacattgtgcaaaatgcgctaccatgttgtcctaaaagattgttattacaccacattttatgctttggccatgttgtttggataattttcttggatggctaactgctgtgctatgaggttgagtgccaatgtcccattgattttaattcctggagcaacatggcttaagactattctacaattttata

SEQ ID NO: 72398 - DNA, 600 bp, Zea Mays
ctaaaccatcttatctatctcgctgtgcgtgcgtgcgttcatgcacgcgtgcaggagactgccgggatctgtggagggacgaagagcagggtcgcgtcaaactcaaaccaaaactgaaactggggaggatttggcaaacgcagggagtcaagaacgcaccgcgtgctctccttgcaagctgttgcacatgccctcgatctgatgagcaacacaacaccttgcaagggggttggttcgggcattgactctcttgctctgtcctcccgtcgtcgacctgccactctctcctcggtccatggccgggctgtagtagaagctcgtccgtcagacagctagctaggagcttagaccatgcatgcatgcatatgtagcttgtaactgggattcttccattgtaacgtgcctgtacctctgcctctgtgcatgcacggagcgaggttgtacgtctatggagattgcagaagtctaaaaccggttaatttgatttttttttccaccgtcggagattcattgcttctgtgttttttttacgttcagcatttttttagtatcattgttgcaatattgaaatgcatgtttatactcgtatttacatatttc

SEQ ID NO: 72399 - DNA, 524 bp, Zea Mays
aaaagatccaaattgttcgaagctttaagaatgctttaggacacctgcttcgactttgcaactcgatgttcttcgcgactgcatgaaattttcaactcagtcagagcagtttcaaaagatgcgaatcattttgccgacaacattccaaaggcacttgaatatgttgaaaaagagatcaatgatttcgatgaagttatggtgggacacaacgacttttgcactctagtggctgcccgaggaactgctgcaatttttgcaaaagctgaatgcaatcacttgaaaaatgtcaataaacctaccttcaatatttctccgactgaccttgataatattcctagtgaagcccgaagtgtgggtaacaaaatcattacccaaatttggacgaaaggcggccgagaaattgctggaacgaagctcgagcacttcttgacgaagtatgaaaatatctttacttctgcttccttctttcttgttgctactgagtattcatatgatgctatttttaggctaacgtcggcagagaa

SEQ ID NO: 72400 - DNA, 599 bp, Zea Mays
tgatgaatgttgtcttcggtatatccgaaggtcggattctaagctgatggtagcctgacctcagatctatctttgagaacacactagctcatctcaactgatcgaataaatcttcaattctaggcagggggtacttattctttatagtaacctcattcaaggatctgtagtcaatgcacatcctctttgttccatccttcttctccacaaatagcattgtggctgcccaaggcgaggtacttggtctgatataacctttctctaacaactcatcaatttgcttcttgagttccaccaactctggtccggacacacgataagctctcttggaaataggggcggtgcctggtataagctctatggaaaattcaaccttcctttcaggtggcataccctataactcctcatgaaacacatctggaaattctgacactacattgatagcctctgatggtttaatctcctcaatatgagtggtgacttggtgacaactccctttccttggtcctgacaagaccaactctactaacacttcttctcctgatagggatactaacttcactgttctcttatcacaactaagactggcttgatacttg

SEQ ID NO: 72401 - DNA, 762 bp, Zea Mays
aagacttggaagcatcggcattgtggttgagtgtagagcgatgcaatgcaaggcggtccggggctgatcgatgaagctttctctcctgtctcggagagagcgaagtctgtcgggcacacaggtctggtgctgcatttttcaattcaaggccgagtgtctgtacctgactttaccaacttggaactcaactagcacgagtccgctcccggcaaccgaactctgcacgcaaaggaaaggctcctcgatcgtcctacacagcgcctttgggattgcaattagctagcaaatagttgccatcatgccctactcattgacagctgacgtccaatccatgcatgaaagaaccaccggccggcctcctcacacctcaatatgtacatccattcggctactagtactgctcccgtctgttttcagatattttaaccttttttttaaaccaaaccatctcaattctgattaaaattacataaacaatcacaaaaaatgagataaaatgtatatactataaaaatatagttaataaatattctaataatagttttccaatatcataaactaatttgatcaaacttaatatgctttggctctctaaggatgttagaatgacttataattattcagaatgaagagagtagcaaattagaacaggccacatgatcctacatatgaatctgacacttcacatttttttctgcacacttcatcagaacaggccatgttctatatagatacaaaatatagacacttcaaacacaaaag

SEQ ID NO: 72402 - DNA, 607 bp, Zea Mays
gcgacatcgatatataccacgttgatacacatagacagcttgctgacattttgactaaaccccttgatcagtctacatttgctcatttgcgagagtaattgggtgtttgcttccctttttgatcgagggctctcttttgttttttctttcttctacttttcatgtagtttatagcccttttgcttttttatttctgtatcatatctgtatttgcatctcatgtatcattttgagcttcatctatataactgttagaatgtaactatgctcttagtagtatgtcctctgtgtacatgatgatgttatggcatgctcagactccttttgctcatgttgatacaatgttgttgagctaaacctgcttttataattgtgaacttgactattacttgctaaatccaaaaattgttcaccgttgagatcagcacctagcatgtgtaggatgtgttgagatcttaagtcattcaatgtctattagcatgtgtaggatgtgttgagatcttgactattagcatgtttttgctgtcactagtatgctaggtggctatgtctcatgccttaagtcattcaatgtcttgattcattaagtctatgtgttggaacttgc

SEQ ID NO: 72403 - DNA, 889 bp, Zea Mays
ctgtgaaggcgtgttaacaaagcaaaagccaaaatccgcaggatatcataggatgggttaggtcctatatagactgtgaaccggtgctccatctccttgaagcgagagagggcatgtgaaccccgctctggaaacacagaggatcgagttggaagtctatgagtgcctccgtgatggtgtcgaggttgctatctagaagagactcgaggacggggacctaaccagttgtccctcgggagtcaccacaaagttgaggctcctgaagcgtatgattgccgcgaggattactcaacgttgtgactagccatccagtacctaataatgaggataaagaaaacgtgcgagagcacttatatcacgtgtggttattctagcaggctcatagttaccctcataaactcgcgagaaactattggacctcgcaaaggaatgtgtagttgcagaatctattatttcccggaagaggccggcagtaccaggttcttttggctcaccaagatttaccaaaaggcaggggcatgtgttgagcactagatttggcaccttggcacggtcggacggtccgtgattagattagttcaagcgtgagtcctcatctcgtgcgtggttgtcgtaacaaactctcgagaaactgttggatcttacatatgaacggatccagacctcctctatataaatgaaggggcacggtcgattgagaacacgcacaatccaatcgaatcaatccaattaccttattttaccttatgcattagttctagatgtagcgtaaccctagttgtagttttccaactcatatcttcacctctcttcgcctctacgtcgcctagagatgcttttggtggcccaccgatcccaaaggaactctatgacctctcctccccgatag

SEQ ID NO: 72404 - DNA, 708 bp, Zea Mays
atccgagttcatcccgaatgcaagttacttcttagagagactataacatgcaactatacattcttcaatgcatggctgcaggtccggtatcttgatcaaggggccgggtgaatactggagtgggtggaatgctcctgcaagatactacatactcgctgtgctcctgcaggataccacacactgtgtatgtctgtgtcgtccgacgacgtacgacgtccaacgccggccatgtacacaagtactacgtgagcaactgagcatgcaggcgagctagtgacccgtcatgcattcacgcatgcatggaacttgggttcccggacggccggcctactacgcacacactagctagctaggtgcgaagcttcatgtctgtagctgctgggcgacctgtcctctccattcctctcctctgcctctgacctctcgatctttccctatcaatgcgaatgctgctgctgcatgcatcaaataaagaagcagaaggatcgctagcagctagctagcgtggataccgaggcgggacgagacgacgcacggccatggctagctctgcatgcatgacgatccagctgagtggagctgctgtagtacgtacagtaccattcaagtcaagcagaagctgcttgctttcgtccatgcgtcgagattcaagagcaataaagcttcggcagcagaagcttctgcttgctgcctatgggcgtggctata

SEQ ID NO: 72405 - DNA, 690 bp, Zea Mays
ctccgacgtaggtcatcgacggggcgtcggcaagcatcagctggtacatggaacatgtgcagcgagcagtagagaaactatgggaggggttcaatggggtgtcagttttatagccgaaagatggggagacgagtggtcgtcggtggagcgcagaaagacggacgtcattgatggcatagcagcactaggaagggagagggacaagcgtgcgtagtggccagtggggaagaaacggatgactaattaaagaggagagtagagcgattacaaccattaatggtgtgaagaggaataatcaacgtcgtggtgggagagagagatgggaaggatagatgatgcactgatgagggcaggagaagggtcgcgggcggcttctccactcatgggggaaggcgatgtgtcaaggtgccaagccggcactgctctaaatcacgagcagagacatgggagacgcggggaagatgaacagtgtgctgacgtgtgggccccaatgtgaagtggatgttggcttgagggattgttgtttgagctggctgctatcctgcatcgaccgagcgacatctagcacggagaaaagaaagaaagaaatataaaaatggctgccctggttctgtccggaaaagagtgaggagagagaagagaaggtggggtggggcccaccagtcataggtagaaaggagagggagggag

SEQ ID NO: 72406 - DNA, 506 bp, Zea Mays
tgcacatctctatttatttggtaatattggttttacaccgaataagagatagacgaagggagaagagtgagggagtaagcaattgaccaaatggccaatagtccccctccacattgcccttcccctcttacatacgagaggtagatattttagttctttccagcttggtggatttcgcaagaacaaatggacaatctctaaaaactacaaccggagcataaactttcacacattaaagtggttcctatagcatatgctgattccctaacatttaatgtaattaatttgacatgtatagatgatattgttagctcgagcatggtaattaacgggtaaataatcttgcagaagagacgatagtctctatgtttaatggatatagcaccttcaacaagtggctagcacatcatcacaagctttttagagctccaatatttgtaattaaatcttgcggataagaggagggtctccatatatatggtagttgccatacctttgttagatgc

SEQ ID NO: 72407 - DNA, 470 bp, Zea Mays
aacctgactagggtgaacaagttctccccaacctagattggcccctttatgatcactaatgtctatagactagggtatgtagacttggcaatagaggaaggcacccaattgcccaacccatgaaatgtagagaacccctatgagttttatccttgaaaagacactttggcaatatgctaggggccaagcattgaccatatcgccctatggcaagcaatccaatgtacttccttttcaaatatattatgttgctacttatgtgtttctcttgttgtgggctattcttgtttagcaaaatgacttttaggaatctaatgtacagtcatatccaacacacagagaccactccaagggattcgagcaagggccatggcagtcatacatctataatacctcttagtacaattatttaaacaacatgacttttaggaataacaaaatcttagaccttcaaacacaaaatagcctct

SEQ ID NO: 72408 - DNA, 350 bp, Zea Mays
gacgattggacgcaacggcggccacccataggtcgtaggtgtggaagaagatatgggggcaaagcttcatagcaatggcggccacgcgcgctaggggcctaaatgcaaatatgccggcgccaggggcttggcctgcatatcaaccaaagcactgagctactaatcatcaatgaaactaaaatgcaaaggaactaagaaagcggcaagaaacaaatgatgagttgcagtatgggagggctgtaactgcagaacctaaatactagcaaaggatcagcaggggaaaaatatgctagcaagacattggcttaccagcaggcaggcgctcaagagttcatgtcccctgcgttcag

SEQ ID NO: 72409 - DNA, 610 bp, Zea Mays
attcggtatccaaaacctgaatattatatcttgtatgaactccactgccttggctgaagtcagagaagcaatgagtttgtattctatccatttggtgaatttgtcaatggcgaccagcacgtgagtgtatcctccctgagcttttttgaagggtccaatcatgtccagtccccaacacgcaaatggccatgttacgggtatggtttgtagttgctgtgctggtaaatgttgctgctttgataagaattggcaagcttcacacctctggactaactcggctgcatcactctttgctgtcggccagtagaaaccagatcagaagacctttccaaccagagtcctagatgttgcgtgtatcccgcactgtccgacgtggatctcatctagcagttgcttcccagtagccgaaagaatgcacttcatgaggactcctgttgcaccccttatgtacagtgcatccccaatgagggtgtagtgagctgactgccttgcgatgcgttctgctgcagctttgtcatccggttcctcttcatttttttatatatctaatgatgggctccctccagtcattagagtctgactctggctggctcaaaacgttacactcttc

SEQ ID NO: 72410 - DNA, 752 bp, Zea Mays
tggggagccgtattctagttttgtcgctagcataacttctttgccgaaggccaagaaaaaggtgtgcaacccatcgccctggatggtgtggtctgtaggctccagagtactaggggcaactcggttgccatcaccaggtgaactttttagcctattgaaaatttgcggtttgaggccttgcaggattaggccgttcgcgcgttcaacctgcccatttgacctcaggtgcgccaccactgcccagttgacgcgaatgttgaagtcatcgtagaaatgtaggaatgattctcccgtaaactaggttccgttatcagggatgatggagttaggcaccctgaactgatagacgatgtcataaaagaaagtggcggcctcgcaattggtttggccttgatccatttgctgaatttatccaccgccacaagcaggtgggtgcagccttcgggtgctttcttgaagggaccaaccaagtacaacccctaaaccgcgaacgaccaggtgatgtgtatggtctagagggcatgacccctaaaccgcgaacgaccaggtgatgggtatggtctagagggcatgagctagcatatgtgtttgtcacgtgtagtacggcgtcggccatggccattggccaatagaatccttgcctgaatgccttgtcgacgagcgagcgtggggctgcatggtgcctgctcgttcctctttgcacttcggtgagcaactaatgttcctctttgaataggatgcacttttgcttg

SEQ ID NO: 72411 - DNA, 322 bp, Zea Mays
taacagcagatcttcagtcggttgactcggcgcggcagttttagcactggtggtgttgtcaggaatttcttcagtgcgtctagagcttcctgagcctctgaagtccactggaacttatctaccttcttgagcaacttgtagaatggtaggcctttttctcccaaccttgatatgaatctgcttagggctgccatgcatccggtaagtctttgtactttcttctgtgatcgtggtgcttccattatcatgatagcctcgatcttttctggattggcctcaattccccggtggctgacaataaacccgagcaattttcctgctg

SEQ ID NO: 72412 - DNA, 285 bp, Zea Mays
caacccttaccaacttcaacaaataattttaattcaatggtgaaacatccacactagattaatgtataagaagatcaaacacctcacctcacaacaccacgaaacaagtagttctattgaaacaaaactcctaatcttcctaaaccttattcttgccatcatgaaaagataatcatgtaatctaacattctctacaccccacaaaagggagaaagtctatagaactaatggagcaataaagccgacaagaagccaataatattctgcgcggcacagttcatcgaa

SEQ ID NO: 72413 - DNA, 425 bp, Zea Mays
gttggggtatttgaggttggaattattcttgtttaattcatgtacatcctcactaactaatgtgccgctaatgctaaagtattaagaggttaagagaaatgggaagatcagtaaaccagtaatctactaatctccttttcagaaacttggggaaatagcgctatgtatttaactaaaatgacactatcaaaccataggtcattggtctaatctaagtgtcactacagtttttacataagttagttcactggagaatagacttatccgccttcagtaatgcatttgttgtgttcttcccactaatactggtactaagctttttgttatgctgatgtcataattaacgatagggtggtcacttggtcactgcgtgtgggccacgaaattttgtcatgcagatgtaagtgaaaacttcgtcacgtaga

SEQ ID NO: 72414 - DNA, 407 bp, Zea Mays
aagacagaagagctatgcatcaacccagagaagattactggagtttaaggtgggtgatcacgtgtatatgaaagtgtcactgatcctgggtatgaggagatttaaagttaaaggaaagttgtcccctcgcttcattggacctttctttatcttaaagcgagtgggagaagttgcatatcaactagaactacttgatcacctggcagatgtacatgatgtgttccatgtatctcagctgaagaagtgcctcagggtacctgaggagcagctaccaatggaggatcttagtgttcaagatgatctgacttatgctgagtatcccatcaagattcttgatacactgactcgtgtcacgagaaataaggttataaagatgtgcaaagtgcaatggagtcaccacggagaag

SEQ ID NO: 72415 - DNA, 548 bp, Zea Mays
ttgcaaatggacaactaatttcttgcactcatggcctccctcactgcaaagtgcacatacaaggacacaccatccaaatcaatctctaggttcttcctccgacttgctatgattttatactaggtatggactcgttatcctttcatagtcccatggaggtccattggcaggagaagtggatatcctttcagtttgagcacagggaaatagtgttgcaaggtctctgttcatatgtatccaccctggaacagatttcagtacctcaaacttttgatttggaaatgattgatgatcttcggtgcacactccaattgcaacaggtccatcaagtatcatctaaggatagtctccctgcagaaatccagcacctcattgaggattttgcatctctgtttgaggtttagccccctttcgatctcattgccacacaatacctctagttcaaggagcaacacctttccgtttatgtctttatcgttacaaccctgcttgaaaagatgagattgaacgccaaattgttgaccttcttcacaatggtatgatccaac

SEQ ID NO: 72416 - DNA, 372 bp, Zea Mays
ggataggctcgccggagttagccacctcgcgaccttgcgccacgtgccctggcgtcttaccacgtcgcagtagttcgcgttatgcatatccggtgatcgacggtgagctcgccacggtgaaagccactaatcgcttgcgccagtgcatccccttctctccgatcgccaccgcgcaatcgcaaattcacgggccaccactcaagggccctataaattgagcacaccctcgactccgctgtgtaattgtgcactcaacacacccactcgtgcctccaattactcagcagagcccccgaatcgctcagtttccccaaatcagttttccaccaccgtgaacaagctctcaccgtggccagtgcacttcaggtccgg

SEQ ID NO: 72417 - DNA, 452 bp, Zea Mays
catagctcttggctggtgtcctaggcggtcgatccatgacgacgacttctccttcaccggtcgaggggtgatggttcctccagcgcttgtctgggtgttccctgcgctctctcctttcgcgcgctgggttcgccagcgttgtgggggccctttcccttacagaaaatagaccctatcacgtcttctctgtcaagaacttggtcgctatgtcgagcaaatctgtggttgtcctcgtccttcctcgttcgagctcgtggatgaatgcctcgttagtggtgtcgtaggtgaaggcactcactatatcggcatcggtggcatcagggagctcatttctcttttaagagaacctctggatgtaatcccggaggctctccccattcttctgggtgcacgtctttaggtcctaggtgctccctggtcacttgtatgtgccttggaagtttccgacgaag

SEQ ID NO: 72418 - DNA, 1079 bp, Zea Mays
tctgcttatagaaagaaactccaagtaaagctcgagaagatttatagaaaggttctctaaggcatcagaaccgttcaagagatatatgcaggagtaattaaacggatactagatattaaagtgaaagcatgaggccgtgttcccaaatactttctgaatatcacagaaaattagaatggaaggaaggtaacatgttcttcacgctgatctctattgctatacaaatgtaaattccttgggttttactttccttggtctgcaagttgtctttggacaagtcaaggtccctgagatgtgaacaaatccacggctttccttggtctgacctctatggctatacaagtcaagaagtgcgcttggttcacgaagtccttaaaaactttcttttagcgcacagttcttttgggacaactaagacccattgtaatatgttttgtatccaacatttgtacattccaacttcttaacgctgcaaatatattcatgttgttacctcactcagttgaacaaacggtttggcagcatatttcaccccatctatctactatcttccttctattacttttcttagttttgtttcagttgcatcacttcactcctcaaactgtattccctcatctatgctattggaatttgtcattgcatcaatgtcatattttgtcagatgccagccagggaagtgatgtatactgcctgaattgaaactattatcaatttagatccctaactgcaacttttgtgcttgctataaaatattaccagactcctctatcaagtatcagtgtcctctcagtagcaaaagaccgggccagattataggtcacatcatgacattttttttgcataagtacttacacgacaagatattattttgttgcataataataaaaaagttgaacacatcaagtcagaacgttatattcaccacagccacctaatctattttaaaaactctgcaaaattttaagcataaacttctatactctgtacgtgcttccatgtatattaatagatctatatattgcttatagaaaaactatattattactttgtgtactgtttatatatgtcaaataaat

SEQ ID NO: 72419 - DNA, 424 bp, Zea Mays
gatttggatatcatgctctgaaatctataaggttcaaaagatctctgttaaggattataacacttgtacactcttgtagtatgatgaagctaggcggaatcggaaatcatccttaactaatcttatattagaaatcaaaatgttgtgttagctctttatcttaatgtcatgcaagcctcttatgtagtctgtctcactaactcttttaccctctgactagatgatgaaccccaatagaaatgaagtaaatgatgccaacgacaaaattcctaccttaacaactatgaacgagaaaaatgagtcacaaagatatttgatgaatggaatgaagaacaataaaaggaataaaaaatgtttggatacatgattagtccacctcaaccacaagcaaaaggcacgaaacacatggatacccaaacaaaag

SEQ ID NO: 72420 - DNA, 620 bp, Zea Mays
gagagaaggttggcgtaggttttaagtgcaagtattgtacagaaacaaagagcggagggatggtacccgattgaaggagcatctcgcacatagagggaagaatgtcaagaaatgtctccctatttctctagacataaaggcatacttccaacatgacatagataagtcaaaggaaaaaacatgtctaggttcaggcaacaactgagggtagatgaggcagcacaaacccattttggttaatcaaatgacgatgagtatgaggatgaactttaggtggttttgcatcagtcacgtatggagcacagatttagtcagagggctggtgcaaggtatgacaggggtggtggatctggatcctccagccaaagggtatatcgagggccacttgataggatgatgggaaggagtagggaacaagtacctgagcgtgttaaagactacaatcttgctcaatcctctggaccaaagcaacagaggatagatactggtccctaaacaagtaagggaaggagctcgaaagagattcttggtagggcttgggcaaaggcttgtcatgccattggcatcccgggtcaaaaggtcgataacccatattttagggccgcaattatggagtccca

SEQ ID NO: 72421 - DNA, 712 bp, Zea Mays
tcgaatagcttttgcttgtggatacaccttcggtttgtgcttggccaattctatgggaactccagggatgtctgcgggctgccatgtaaacatgtctcggttgtcctacaggaattgaacgggcgcatcttcgtatttggcgatgaggctagagctgatggttgtcgtcttgtgtgcgtcagggaggccaaggtcgtccttcttggttccttcaaatagttgtatggaagtggtaggggttgcttctttcaccgggatcatgaggtcatcccctggcggcgtgtcggtgttcgtcatcggttgtcgaggtgccaccgaggggccagcggtgagggccatttggatggcccccggtagcactctactgctccttggaagtcggcctagttggtgatgatgccctagggcccgggcatcttgagcaccatataagggtagtgggggtggccatgaacttggccagccccggcctcctgatgatggcattgtagccgcattcgatctaagccacctcaaagtgtaggaacatggttccgtttttatcacgggcacctaaggtcactgacatgtagaggtggtccaactggtactctcctttggttgggacgatgccaaagaatggggtgtctgacttaatgaggttagtagtcgggatcctgaaggcctagagcgtcctagggaaggtgacattgatgctgccaccatcgtccac

SEQ ID NO: 72422 - DNA, 381 bp, Zea Mays
ctcccatatgcgtgcaaaacaaaagaacatcttaagggttggaatgttgtgtataaggtatcaccgcacggtaaattacctgttccaaatgatgaagattataacttaaacccggacacatatgacagagagtcctttcaagaagatgggctagaagggcaatttgagatagacttaaccgaagctatcagaatggaagtagatattgaaatggttgttgatgaggaggatgatgaggtgcaaaacgagaatgacctagaaatacttgaaagcaatgacattaatgatgaacttgcgcctttagatggtgttgactatgaaatggttgatagtgatgatgagacttatgatccagctaaccccgacccatatgaaggttat

SEQ ID NO: 72423 - DNA, 355 bp, Zea Mays
ctgaaaggctagtcatttgcatcgtgtttggttagtggaatgctgccgtgcagaattgtccgatccagaaaccgaacctcctcaagttgtttggtttgtgtcatggattcacttcgtttgtcaacctgtagtactagttagtaataccacagtgagacgagttcatcccgcaaaaaatgtcagaccaacccattctgattgaacccatgccgcatgaaccaaatccgcaaaccaaacgcactgttggcagtccgaaacaatagaaacgtgctgaaataagcgaaggctgccacaggggctaagccactgcgtcgctttgagaggtcaaagactactctctctgcgacatcagatg

SEQ ID NO: 72424 - DNA, 1513 bp, Zea Mays
gccgacgatgtcgtcgagcaggttctcgccggcgctgcaggcgtccgacctcaacgacttcatcgccccatcgcaggactgcatcatctccctcaacaagaacacctcctcctcctcccgccgcccccaggtactggcacagctctctcctccaggtttcgttgtttaccctagtattcgtgtccggggcgagtgctggttgggtgcagtttgagttcactcgccatacttgtttcgaaccctgatatggtgttatgtgcgaccattggacatagcatcttcagatgatcagaaatcgcatgtccatctctcacgtgcgcgcacgcacacaaaaagccctcatgttcattttgtaatgccaaggtggtcctctgtaggcattaaggataccaaataccttgatctcaaagttttacaatgaaatgttagcctaatactatctcccctttttttaccaaacttgagcagaacaacacccctacttgttacagaatagactcctggcagcatagcttcgccataatttgcatctatgcaaaaacgaccatttgtatgattcaggaaagaaatttctagctttatttatttttatcagaacaattaggatgagtgtcacagcctagtcaatgaaaccggctgcatttgctgagaacctacaactttgaaagtgcataggatatacccatgttcatttctgctaacaattagctttacatctgcatcgttggaacttcatgggtcagttcatcatctacagcctttccagcaaacccttgcccatattcctgacacagaaattttacagaacaaacagaaagaaactacagtgagctcaaaacctccagaagaagcagtcaagatttcactaaaagactgtctggcatgcaggtttttcttttattttctttttttactcttttgatcagttgtcaataagtaacctgatcaatttcaatcaatgctgactgattcatctttgtcttagtggttgtataacatcggcagagacggttatgctggagaagcaaagcttgggtgacttcattgatcgtataaactctgataaagctgttattgtatctgtatctccccagtcaagagcatcactagctgcattctttggtctttctcagtcacaggtaacaacatgggcttgccatatccattcccctgtcagaatcatggtagatacgctcttacaagtgtttaccgtgagttatttattttcaataaactattgcaaggttacacacttgcacttcaattatgagaactaaagcagaatgtaactcctttaaattcaggttctcagaaaactgacttctttgttcaagtcgattggtgtaaaggctgtttttgacacaagctcgagtcgagatctatctcttattgaagcatgcaatgaatttgtttcacggtatcagagaagtcaaccatctagtggccaagaagctggagccaatcttccactgatttcatctgcatgtccgggtaaaatatttgttgggaactt

SEQ ID NO: 72425 - DNA, 796 bp, Zea Mays
atggtttctgcaataatttttagagttttgatttaaattaggaaaatacccaaaacatattaatctagagaaaaatagaaatacttctacactaggcttaaggaaatttgtggagatgcatacccaacatacacactgtttaaaaatactaaacaccccagtatacaagaataactcaagattgtctattaaaaactatatctgtccaaaacttagaaaattaagaaagacagtggaaaataataaacagaggatgaacatatttttcctagtatacttaagtgataaagaatataggaaaaatacagagcaccctagtccagagctaatccaaggttaattattttattaggcactaagaaatcaagaaaagccataattaaaagagttagaaccatttcaaaaatggtaagaaactttcactaaactcctaaatgctagaacaccactacagaaataataaacccccaacccatcacaataagtgagttaaacaattaaaacatagatttggcccatgttctaattaaatcatgaggaagcctaaaattgtgcaacagtgggcaaacaaatttttacccaattacttatgaagtagaccaccagagaaaaatatgaaacccaattaaaagggtaaggtaacacacattagcccctaccccatggaaaagatcatataatccaagaatttctaccaccctctcccctaagcaaaatgtgccaaattctagaatgattgctcttgcacaaagaagaagataggaaaattagaaatttgttgtttgacatttttcaa

SEQ ID NO: 72426 - DNA, 1074 bp, Zea Mays
acataatttttttattatcacatatctctccattggtttcataccgtgctaatttatttaatattgttgtggattcgtccacacaaaaataaatttctaggttaggatggggtcagcatattgttgtcgcgacggctttgttcttagtgagccttaggaagaaagtttagagtagtttggagagaactcctatatctagtatggtgttgatgtctttgttggtttcgtgagttataatgcagagcatttggctctcgtgcttgtgtgaggaacgttacaaactaagttcacataccttctacatggcggccttgtccccatgtatagccaaggagcaagagacatgttgttatatggatgtttttatgggatgtgttactcttgtctttggacgcatcactctacaagtgccttcctaaggtatgccgcgatgaatacgtctgcttcatcatccctaagctgacccagccatccttaagttgggcgaactgtgggggtggttgggtcatgtatgtgtccaagttcctgtcatggggtacacctctacaatcagtgcgggtatttttccttgtagttttctccctcttgcttctagattgtttagctctgttgacttttttcacctaagtcagagtgattgggtaatgagccatcagagtcctttgcattgttcctgctcctatcttgcgctagaggcatgtgctaaaaagttagagggtcacaaatggtgtagccttatatgatcccttttattctgctcagtctgtaagggaagtgtgacgagtctaggaagtgcgactagcctaggagaaactcgactggcatgttcaagcttgggattgactagtcgaggatggaatcgatttgggaggatctgggtcatgagggaccttggccatggttgagtttgatttggtcggggtaaccaatttggttctagcatggtgagaaggtctatgtcgggggaattttagtcgggttgctactactgggatttggttgagatgacatgaccaaggacatgtctagatatcgttcatgttagagctttttattccttttgattgatttctt

SEQ ID NO: 72427 - DNA, 1711 bp, Zea Mays
ggaggatgtgtcaaagaaatttgtcatgccaagggaggaaacccataccctcaatgtgaagaaggtcgctttgaaatctatgagtaaggattgacttctcaagattgtttagttcctgtttgcatcatttttttgggatttatgatttattttcattttattcgtacaggccatgcatggaaggatttcaagtggaaactaaatataaattatgtcaagaaggacaaaactccatttgaggactatccagaactcaagaaagagtggtggccaaactttgtggagtgggttacctctgatgactatattgctcttggagaaaagggcaagaaaagccaaagcatgaatccgtcaaaaactaggtcgccaaagctatactgtacaaaagagaaaatgggcaaaggaagatgcacaagcattaactgagggtaaatctattccatttcaagacatgccagatggccatcataaggattgggcaagtgcgaggaatccttctggcgacgtgaagataacagagtcgcatccaatcataaagaaaattgtaatgttcctctccacacataacatgtccatttaattttcttaccctatttgattcacacataaaactgtttttcaggtagatctaaatgaaaagtcagtagctggtacctttacaccattggataatatggacatacttgcaacaacaatagggagtaatcatccaggaaggacaacaggggtgagtgcttatgtgggtttagggatgggtcttgctcaaggtgatggccctcgtaagaagaaacgtagaacaacgtaagaatatgtcaagaggattgtggatgagtatgagaccaagtttgagaaactgacagccctgtgtcagagtatggagcgtcgattaaacaattctgagagttgctcattatcgaaatttgttgatacaccagaccatgtaacacatcatttagttgactcattacaagtaacttcatctacttgcagcacatatttgtggtgatacaatgatgttactctggtgtctgttattaatttttccttcaatatgtagcattgttttgcatatcattttcccactgtcatgaatccatgatagatatagcaacatatgacttactagataacaaaatcaatgtgccactaatattctgcattttcccttaattcttcctatgtttaacatttcaggaggcgatgaaatgcaagttggtggcgcagataggtctgcattctgttgtggtcgctagagggcaggcttaccctccaaaggatgttgtaactgtccatgggattgagcggcgagatgaccacacaaaatgcaggttgattttgtgtttgaaaacttcttggattttccgctccctaaaccaatcgctggtggtgatatgttcactcttggggaagccaaaaattcatttgtgttatggcctaagtcaggcatacaactagcagaggtacactttgctaacttcaacctgatgaactttttatatttattcgcaacttggttaatgtcatgtacttgtttctgaattttacataggaaacaacagttcatgcaaagcctcaacaagtcccacacacatcgcctcaggtacttcatcacacacctgaaaaggataaaatgccaacaccaacaatgggtaccgaggatatagatgtcacacatagtgcctccaatgtcagcaagaagaggaaacataag

SEQ ID NO: 72428 - DNA, 519 bp, Zea Mays
tcactactgtgaatatgtcattttttgcaaacatgttattttattcaacaaaccagttcattacaagcacgacaacaaccataggtccccaaactcctgagaagctcatcaaggctagctagggacacttccttgaaattggaaagattttctatccctagggaaggaaatggtggcggggactcctccttcaagttagtctggcatccttggcttttgaaacacttctggatcatcttgactgaggtgaacctcttcagtttcctagcatagtccatctttagggttatgtatgcctcacgagtgttggcttccttgccttctaccaactcaagactgttttggagggctgcattttcttccttcaattccttgatccgctgctctaggatttccacccgggagtttaggtgggtgcaatgggagaaaaggtcatcaaagtgggtgtcaagggtgtggagatatccggccatgtagatcacggtgggatcatcctcattatgctctcttcctaacaaa

SEQ ID NO: 72429 - DNA, 333 bp, Zea Mays
gtgagttcgccacgacgaaagacaccaatcacgcgcgccagtgacttcctgtttctccgaccgctgcacatcttcgtccaaatccccggccaccgcttaagcccgttataaattgagtgcactgcgagctccatagggtaatcacccatccatagcacccacgcttgcctccaatcgttcaccagagactgtgaattgctcattgcccccaatctccgtttctgccaccgtagaaacacctcaccgaggccagcttgctccaggtcggttcatactctctggtcgttcgttttagtatccttaagttctcctaatgctgctcgacccctccaa

SEQ ID NO: 72430 - DNA, 582 bp, Zea Mays
tgtcccaagctcacctgtgacaaagatcttttcacgaccgagcgtaatccacttacccgaggcacgaatcgcggcgaccggcgcgaattcgagcgcacggttcaccggcgacgaggggagctgcacctaggatctatgtcagttactgtaccatcagaatgttattcagaacacctgacagagcagattgcagcgcccaaacctcaaaattccatgtaataacttgctaatccacctttaacaaagttgtagtcctatagtccaactacaattcgactatagtaaccatccccaaccgatcactagatcctactctaattcgacttcaaagtcctgctaatgtcacgggtggccataattcagttatcactgtgactgacagctcaactttgagctcattttactccaaattttatatgtgctcaaggcttagctgataggaacgggggtgcccgatcttccgtcaggtgaagataaccatcgatttggtggagatgtcacacaaacgatccggcttccaatcaacacgactagaatcccgcaatcgcagcaccacttctcctctggtttcaaccacgcgct

SEQ ID NO: 72431 - DNA, 407 bp, Zea Mays
atcataatttttttcatcactactaatgctatacagtgtataaaaacacaataattttggttatataaataaaaagaggcgttcattggaagtttgttgctgaactaggaccaccagactaccttgtattctttttgcgtacatatttcctgaattaggaccctagcaccatgtgcattaacaacgcaaatgagtaaggaagtttgttgctcgctgttatggacaacaggacatacattaggaattatttctatttaaattgtgggtatctcatgcttttttgtgtagatttctaacataaccaagttgttccttcgtcatggtttcaggtcttagctctattttggaccaatcagtctaaaaacagaagggttatatctacactacaggaaacgcctaaattttcg

SEQ ID NO: 72432 - DNA, 288 bp, Zea Mays
ccgctgatggagttgagatgttctgcactacttttccaccccgaatccggatggcacccgtaccgtagtgcttgtatgccttctttccctttcttctacttgtacctacatgctactacaggtgtactacgtattttgctccccccacttggttttgcaagcaagaccagcgtaaaagcagaggagactgtcagattcctctttcgctttattctcccgcccagcctcacacacacgtagttagtgttgggctactcacacatgacacaacttcgcctccctccaaat

SEQ ID NO: 72433 - DNA, 2013 bp, Zea Mays
aaaactagtggctataaatgaatgggatgctcctgaatcaaaaagtacagtagcgggagtaaattcgacaaggaactcaccgagcactactcccggagcttgctgggcctcttgagcattgacgtggttaagtcgtgctctgccctgatactgggtcctgctttgctgactgttggaggtgagtgccttggaggcaggtgccaaggtattcttggggccattcaccgagttggagtaggtaggtccgggtgccttcaactgggagcagttattcttgaagtgactggggtctccatagtgccaacagacatttgctggcggttggttgtttgcaaccgagggggcctgaaaaggaactctgactctgctggctgaaacgtgacggagtgggtccagctggtctattgaagcttggtcccttgggtggaagctcgaaggatcgagctctctggtgtcggtcttgctgctgagctcggagaacttggaatttcctcttgaggtgacttttttcttcttcttttgctctttccacttgtatggctttgttggagaggtgcgagaagctgaggaaatcttggctggcgaggatggtcttgagttctggtcttagccctttcaaaaaacaggccatcatcttggtttctgtgctgacatcgtcaggcgcgtaacgagccaactctgtgaatttgtgcacgtactcactgacagatcttccaccttgagtagttcccggaattcatcttccttgagctgaacgatcccctggggtacatggtgctcacggaaagcagtttcaaattctgcccaggtagcgtccctgacggccgtgctgaaggtatcccaccatgctagggccatcccagaaagttgatgagcagccaaatgaacatgttgattttcggggcatccgatggcttccaatttcctcttgatcgtgcgcagctagtcgtcggcatcgaggggattgctggatccagcgaatgtgggaggcttgagtctcagaaattctcccatcctgtcctgtggtcttccaccacctgggcgttgattctccagacttctagtgaggacttcaatgagtcggggttgattggctagaacttgggccaaatctagtggtagttccggaggtgcggggaggtgggtctcactcccttctccgccagcttctccttccgctcctaggggaaaccctgctccaatcccggaggcggtaggcgtggttttatccgaagccatctgccagggaaaagagttactactatgcacatgtcaatttttttaacaagttactttattcattacacaagttcattacgacatacaactaccataagttcattacacgcgagtgctatctagggtactcccgaactccttctctaaagtgtccccaaattccttgagaaggtcatcaaggctagctagggacatttcctcggtgtcggacgagttctctatcctggtaggaggtagggctggaggggcttcttccttctgctcagtctggcatccttggcttctagtcttcttgcagattttctttgcgggggcgagcttctttagcttcttgtcgtaatccatcttcagggttcggtaggcttcacgggtgttggtttcctcgccttctgctatctcgagactctcttggagggacgccttttcccttgtaagttccctgacttgttgctccaggcttttcacccgggagtttaggtgagtgcagtgggaggcaaggtcatcatattggttatcgagagtgtggaggtatccagccatgtagacgatggtggggtcatcctcggtagggtctctccctgacagggcctgaagtcttttcctccaggcgggggtatttttgttgctgggtgggaagtagcgaaggggggtttcaaagactattctgctgtagttctggcatagctatcggagggcttttcgggcaacattctggcaagtatctaggaagcggtgtccagtgaaagtgacctggaaagaagggtggtttgggta

SEQ ID NO: 72434 - DNA, 1203 bp, Zea Mays
agaatttttattggcttttcttggtactgaagatctttctgaatctggattgtctcttcttcaatgtgactttctggtacttgcaggcatctgcggagctaggacacatgaaacacattgtggatatcacacatggattcttgtaattcaagacggtatgctgcgggtcccactctgccaatgatgggataggggccgacgaatcatggtgctagctttcctttctcttggaaccttttgacaccacgcatcggggagaccttgaggtagacgaagtctccttcttcaaatctgagttctctccacctgttgtccgcataacttttctgccgactctgagcttcaagtaatcgtttgcggatcagggcaactttctcttcagcctctttaacaaaggtaggtccttctagtgtcttttcccctacgttggaccacatgagaggggtctggcactttcgtccatacaatgcttcgaacggtgacatcttaatgctgacctgatggctgttgttatacgagaactctgcataaggtaaactggactcccagtttctgtcgaacgttaacacacaggctcttaataaatcttcgaggaccttgttgaccctttctgtctgaccatctgactgggggtgataggcggtgctgaagtctagcttggtgcccatagcttgctgaaggctcatccaaaatttggaggtgaactgggttcccctgtctgacactatcttccttggaatgccatggagtctgactatctctttaagataaatccgggcaagggtagctcctccaaaggtagttttcactgggataaagtgggctaccttggtaagacagtctattattacccagatagagtcattccctttttgcgtccggggtagtccggttacaaaatccatgcctatttcctcccacttccattcaggcactgggaggggttgcaataggcctacaggtttctggtgctcggcttttgttcgttggcaagtgtcacatcgggccacatactgtgctatctctttcttcatccctctcgaccagcatctggttttgaggtctaggtacatcttggtggttcctgggtagatggagtaggctgagttgtgagcttcatcgagcaggacttcccgtgtttctccttttggtacacatagacggttcttgaaccaaaggactccttgttcatctgtcctgagg

SEQ ID NO: 72435 - DNA, 568 bp, Zea Mays
gtgtctgtcctgtttctggaaagagagacatgtcttccatatattatcacgtctaatctgctgatggaaagcaagggatggaatctaatgattcgtggtgatatggtacttaacaggatgggcgcgtgtaacatctgggccgagttttggacttttggtagtgtacaagtacaacacatccttgttatcttttgtgcgcagtcgaaccttggaggccgggctcaacgtatgggccgagttttgtgatttgtcttgccccattaagaaatgttttggatcccgagcgtggccacgcggaaagtccgtgtgacggtatgggccgcccgttttgtctaagactgactctagatgtgtctgacggtgactgatgatgtggtcgtgacgcaagatcttcgtttcttttgttctcacctatttttaggccggcagctagctgccaccgcgcccctccttggcaagctgctcgctgtcgtcgatcgcgtgccaaaggcatgcgcctttctggtctgatcctgagcgttctcccttctcctgtgtgacgcatcaagcatcatgcatccgatccgat

SEQ ID NO: 72436 - DNA, 945 bp, Zea Mays
cctcgatcgtcatggagacaatatcagcacgtggaggcacatggaccgcagcattgcaaagggcgagggtgttgtccaaggcagcaagggtaggagcagtggtgacggagaagggtgtgtcgccggtgccatcacgggtcaagactgcccggaggagaggggcatacagacggccacgcggggggcgctaacattaggaaagaaggtcgcaaccgcgagtgaggggcaccgacggtggacagcgcggctgcaccacacgagctatgtgggaaagaggcggtggcggtgaaaaggtcgtggcacgctggttggccaagccaggttgcagaggaggcacaatccgtggtagggtaaggagcccccgacggcttgaagagcccacgcgtagggaggaatcctggtgttagacagctgaatccctaccatatacaggacctgcgtctggctctgtagtcagctggacctagtaggacctagtaggcaggatcctaattggggctttccatccttgaggagatcttgtgtatgggtttccttttgcccaagatcgcctcaccccctatagattgtaacatctatgtctctcatttatcaatctactgttgcacacagatacaatctcttttagcaggcgccacagtcagacgtcttcgatcctcctggccaatggactggtcaatggggcatccctccacccatcctcctcgctttggctcaaggctgggatcaacaggctctagcagccaacttccagaccacaacacttaaacagcctccacaacaagagtagttcttcgacacaggcacgaatatccattccacctcctcctctccttcatgcctgacgaccgtcgcccctacaccgcctcacgtggctactcctgccacaccacacgctacatctccacgcgctgcacctgccgccagtgcgcctccttctggcac

SEQ ID NO: 72437 - DNA, 401 bp, Zea Mays
ttggaaaattggcccaaaaaccacaggttttcaagcagttttcctaaccctagagctagcacatagaaagagctcttacttgagtttgagctctctcactcaagtcgatagtagacatagcaagggctagctagagtactcctcacatgctagcttaaacatcatatgagcatgtgatctttgtctacacttgcatctaaacatccgccatacatggaatgtagggtattatgctcaggcggccaaaactactctacattatgcatgtgcattctaccatgttggcgccctgatttagtggtcgaagatctaagcccccctctattttctctagcacccttggtactttggtgtatcatcccgacgacacctttagtctccggtgcttatatatggttttc

SEQ ID NO: 72438 - DNA, 999 bp, Zea Mays
caatgttagtgtacctgcggtacatggaccaaaaattgatccatttcttatatgatgtaataactcattgagtttcatatggtaaacacgaacaatgatgtcagatctttccgaaggggtttgaccaggctaagatagactttcaagtatctcttgccaatttggattgcatgtgaacgtgaggaaaaaatctggtggtccatgaactcgacaaatagcaatgtcgtcatgataattttggatcatgtagcgtctacctcctgtgtgtgatgctggtaatattatagttttttccatctcttcaccgctgatgcatccacgactaactgcatctgtgataccttgaatgctttccatccgtagattcttttgattattgattatatagttgagtctattttcatcaatacatgctttagcatctactttggcttgacttgataacattgcataacacaaataaggatttggttgattttttctataatggaactggtagcaataatattcttgcatagttaaatgttttcgtgcattttgtccgctggatgtggcaccattgtacaaaactccaacctggaaacttctctcgccaaagggaaaaagcagtgggtattgtagagccatatatgctgggtgtagtgaagatattcgctttagctctttgttctgagtctcaataataatatcacgtttgaatgtgtctaatgtgaaatctctgacaaccagcatagctaattcatctgttgttggcaagttatattggataggatcaccttcctttgctccgataagtctgatagtgaattcttcattcggattatccgccaaacgatctcttgccattctgaatttcttcacgaatgggttatgatcatcaagcattttaattaaatttcttattattacaggatcgaaattgtcttgggttctgtcaccactgtctaaagcatttattctgttttggacttcgtttgtggtgtcgtaaatatacaattg

SEQ ID NO: 72439 - DNA, 391 bp, Zea Mays
tggggtatgagaagatttaaagtcaaagggaagttgtcacctcgctttattggacccttcaaaatattaaagtgagttggggaaatggcctaccaactggagttaccaagtcacctggcagatgtacatggtgtgtttcatgtgtcacggttgaagaagtgcctcaaagtcctagaggaacagttgcctatgcaagaactcagtgtgcagggtgatctgacctatacagagtatcctatcaatatcatcgataccctgacccgagtcaccaggaacaaagtgctcaagatgtgcaaggtgaagtggagtcatcatccagaaagagtccacatgtcaacaaaggagagagactttgagattttcggcctcctaacaagggggagattttttg

SEQ ID NO: 72440 - DNA, 339 bp, Zea Mays
catgtgtccactttgaggtcctatgatagcccttggaggtttgaggtgctaccaacaccttctgtatgttagggatctttgccaaatgactatcggatatctatgggtcaccaacctcgacctcgtaggagatggacctagaagatgtaaacgtgcatgttgctaccaccttcataggtaagtttagtaggatatacagaaaggttatctctatatgagagaaggggagtgtcatgaaatttgtggtatgggccttcaggggcaacatgtccacgtctaggctggtgaaatattttaatgtgtacccttatgcacataacattccatctaccatatcag

SEQ ID NO: 72441 - DNA, 274 bp, Zea Mays
cgatacgactccatgaatatgataagaacgggctagttttgccttagtgagtggactttgatggttatgtaacctctctcctctcttgcactataaaggggatggggtgagcaatgatttgggattcgatttaggaacatcacacgagattcagaccaattctatcagattcggacatccttgctcaagaattcatccaggaggcaagcataaaggtggattaggacagttataactagaatccccaccatagatataaggtgagagggagcca

SEQ ID NO: 72442 - DNA, 3362 bp, Zea Mays
cccaaaaccaagccatataaatgatatactccgtatataatacaaaatacatgaaagagtagagagtaaacaaaaagaaattgtgaagcagcttccaagccgcgtgctcagctctgcgcttccacctacgctgccgctataaatacactgccgcgtttctttctcgttcctctattctcccatcttcgcagcccagtctcccaagcagaagagtgtcagcagtgcagtaaatgaacaaccgtgcaccggataaggaataggagcaattgggctacgtcgttcgtcaaggcccatgaaggacaatgtcgtcgtctatgggccggaattggttaactagtgggagccgggaggcttatatatgagggagtggctaccaggtgaggcatgtaagaagatacttagaactttcttcattcccaagtcttacctctcttcctcctccgacctgctcctactattcctctatgaacaacttcgactataataatttgagaacgacaagtaaatttttctttgtataatatttaattattcacccgaaaatataccttttaattatacacgaactaaactacaagtaaattttactccgtaaattatttaattcctccttccataaaagataccttgtaattctacacgagtagactaggagcactacgtgacagggtttgatacaccaaaaatcccaacaatccaaggaagcactatactcaatcccccataaaattccaaaacaaaaaaccaagccatataaatgatatactccgtatataatacaaaatacatgaaagagcagagagtaaacaaaaagaaattgtgaagcagcttccatgccgcgtgctcagctctgtccttccacctacgctgccgctataaataccctgtcgtgtttctttctcgttcctctcttctcccatcttcccagttcagtctcctagacagaaaagtttcagtagtgccgtaaaggaacaactgtgtaccgtacaaggaacaggagcaattgggctgtatcgttcgtcaaggcctaggaaggacaatgtcgtcgtctatgggccgggatgggttaactagtgggcgtagagaggcttatgtatgaaggaatggctgccaagtgaggcatgtaagaagatacgcagaactttcttccttcccaaatcttacctctcttcctcctcctacctgctcctgttattcctctctgaacaacttcggctgtaataatttaagaacgacaagttaattttcctttgtataatatttaattattcacccgtaaagataccttttaattatacacaaactaaactacacgtaaatattactccgtaaattatttaattcctccttccataaaagataccttgtaattctacacgagtagaccaggagcactacgtgaaagggtttcatacaccaaaaatcccaacaatcccagcaagcactatactcaatcccccataaaattccaaaacccaaaaccaagctatataaatgatatactccgtatataatacaaaataaatgaaagagcagagagtaaacaaaaagaaattgcgaagcagcttccaagccgtgtgctcagctatgtccttccaactacgctgtcgctataaatacccaatcgcatttctttctcgttcctctcttctcccatttccccagtccagtctcccaggcagaagagtgtcagtaatgcagtaaaggaacaaccatgtaccagacaaggaacatgagcaattgggctaagtcgctcgtcaaggcctaggaacgacaatgtcgtcgtctatgggccggaatgggttaactagtgggcaccgagaggctaatgtatgagggaatggatgccaggtgaggcatgtaagaagatacgcaaaactatcttccttaccaagtcttacctctcttcctcctcctacctgctcctgctattcttctctgaacaacgtcggctgtaataatttgaaaacgacaagtaaatttttctttctataatatttaattatttacccgtaaagataccttttaattatacacgaactaaactacacgtaaattttaatccgtaaattatttaattcctccttccataaaagataccttgtaattctacacgagtagactaggagcactacatgacaggatttcatataccaaaaatcccaacaatcccaacaagcactatactcaatcccccataaaatttcaaaacccaaaaccaagccatataaatgatatactccgtacataatacaaaatacatgaaagagcagagagtaaacaaaaagaaattgtgaagcatcttccaagccgcgtgctcagctctgcccttccacctacactgccgctataaataccctgtcgcgtttctttctcgttcctctcttctcccatcttccgagtccagtctcccaagctgaagagtgtcagcagtgcagtaaaggaacaaccgtgtcccggacaaggaacaggagcaattgggttgcatcgttcgtcaaggccaggaaagacaatgtcgtcgtctatgggccggaatgcgttaactagtgggcgccgggaggcttatgtatgaggaaatggctgccgagtgaggcatgtaagaagatacgcagaagtttcttccttcccaagtctacctctcttcctcctcctacctgctcctactattcctctctaaagaacttcggttgtaataatttgagaacgacaagtaaattttcctttgtataatatttaattattcacccgtaaagataccttttaattatacatgaactaaactacacgtaaattttactccgtaaattatttaattcctcattccataaaagataccttgtaattctacacgagtagaccaggagcactacatgacaggatttcatacaccaaaaatcccaacaatcccagcaagcactatactcaatcccccataaaatttcaaaacccaaaaccaagccatataaatgatatactccgtacataatacaaaatacatgaaagagcagagagtaaacaaaaagaaattgcgaagcagcttccaagccacgtgctcagctctgcccttccacctacactgccgctataaataccctgccgcgtttctttctcgttcctctcttctcccatcttatgagtccagtctcccaagctgaagagtgtcagcagtgcagtaaaggaacaaccgtgtaccggacaaggaataggagcaattgggttgcatcgttcgtcaaggcccaggaaggacaatgtcgtcgtctatgggtggaatgcgttaactagtgggcgtcgggaggcttatgtatgagggaatggctgccgagtgaggcatgtaagaagatacgcagaagtttcttccttcc

SEQ ID NO: 72443 - DNA, 1061 bp, Zea Mays
atttttaaccatttcattctggtatatgccagaggttcatgatgtcaattctggtcgcattattgaagtgtttaaaatgtaaattaatgctctgtaatctatatcactaaatagaccttctcacttttgtgactcaagtttatttgaaagtattaaaaagttaatctgtgaattaatcgaactagaaccttaatctatcgccttagaccaactcggtcatctcatcaaattggtaaaattattcactttatacatattgttgtttcttcagtcacgttgcagtgaattttttcatccccaatatgatgcagaacatcatcgccactcaccgttactgactgatgagaagaggtcgtgttcagttctcagatgccggtgtccatcagtccatgagacacgaagaagatctggccgacacactaaggcttcatctgtgaaggcaacatgtggacttttcaggcggaggagctggcagttcttgtttctgattgctcagggacgaattgcacttgatctgaagatgaggttacaagcttcgcacttggattttttcccacattcttcaggagtataaatatcctcttggttgactctgctgtagtttttagttctgtgaatttgtttgttgtgaaatctatatattatgggatgttcaaatgatttgagtcatgaaaggcgtttttattgggatgaatgctcgaggtaatttggatatcagcttggctgcatagtaaatcatttgttctatttttttcttataacgatatgaatattggtggtcttacactatgcttttaggacatccattttattttaaccttttttatgacttggtgtggtctgtgcaggcaagaggagggctctaatccctctcctgatgtaggctacatcagtgaaatattgaagcttatacctgaagaggtgcacgatcttgatgttgtactctttatctagatttgatttgacggaacattagtacaatacttccaaaatataaattttgcataagtttgatagttcttctgcttattttttttattgaaattgcagtttggaccaag

SEQ ID NO: 72444 - DNA, 489 bp, Zea Mays
cgacggtccaagtcgtaccacagaagtggtcgcgcatgtgtgcccaagttgccatcacccggatgctattagatttccagaaactaacttgtgaggacccctggtgtctgctagctgctctccaactccaacctgtcaatcaattcccagacggacaagctgagctcacagctcaagctcaacaacgatggccggccgggtcaccatggaactgatcctctacagtacaggcatgggaaaatggaggaggagagcagggcagtgaggccacagaatcagaggctgattagtgttggtgagctccaatccaacagcatatgaccagcgagcagaacatagggatgtcctgtgggcttgcccagggacagacgcatgcaagccatgtgactgtccggagagagagccggtgatactggaacagaggatccgatcctgccccccttcttttgcctctccctctctcacacacacagtctcacctatatgtgg

SEQ ID NO: 72445 - DNA, 915 bp, Zea Mays
aaaacccatgccaaatcatgtcaaatgatcttgccttgggttcaaatttttctagggcgtgccttggttattttggcaccactttgtcaattagggcacatggttttgggatttagaactatatgaacgtgtagtttgttggaggggctgaatttcaattgagggaaatcctgatttttcttctacttctcactttgttttgacatgtttggggattttgccagcccttttttgggtaccactcttactaaattttgttagttatttaatgagctacaacctttactaatggcccaaatcatgataatgtgatccaaatggttttcttatccatttctttttgatgcacctattgatcttaagtaggtgttcatagggtttggttacttcctctactttgattaacatgagatggttaaggtagaccttttatggtgtttatcacttagttagggttctaatccaagagtagggtgacttttgtgcaaagaaagacacatgtgatactaggtttaaaagtgtgcgttaagttaaaccctagagctaacacctattgtgttacaccttcgaccaagccaatgctcctaccatcaaagctgcattatttcccaaatttctttggtgctctcctaggcctacgatgtagcaacattggcaactttagcttctttattagtctttcagatgacttcatccatttccctcttctagagggtcttgaaagcgtctatcatttaggcctcacatattgcatcctccaaatgggcctccatctaggaaatgagggcctactcctccttaaacctttttccactctgcaactattgatgcccgaacctcttcggtggccaaccaaacttgatctagagtgatgtctagggccaatggttgacctaaagatggtccaatgattga

SEQ ID NO: 72446 - DNA, 361 bp, Zea Mays
caatattacttacatgtctctgcagaatcactggtgtgtcatgttcatgatcaccaatagtacgcatagtattaaggtgttgtcctccttgatttactgtcatcctcgatgcctcaaatatggtctgatcatcaacccccggggccctcaaagctactggtggagtaattgcatctacagcagtagctgattgtgtatgcgtacttgcttctgaggtaaactggttccctccttgttgttcttcctgcaccattgttacgatatccaagcattgatttggtcgatgaacagacgtcgacgtcgtatactcacttattgactcgttaccccatggcgccgccatcttccagagcaattacgc

SEQ ID NO: 72447 - DNA, 924 bp, Zea Mays
gtgtacttgaaaatatctagattgcataaaaatatatatgaaactttaattactatctaaatcacattctatgagagatataattatttatattcttattttcagttaagaaaccgtgtgttttagttcttacataggaaaccatatttaacgattatagcaaccattatttaaatcatccaatggaaacattgaaaaatggcacatatctataaaactaacaaaaatagtttattcatatctgatatacacattttacaaatgacttatagcagtagggttgcatttcttattacctatagacttcaggggtagcgtgaaataaaacaggatctaatttaaatctttttgaacagcagaaaactctggcgcgaaatagacaaaataccagggctaggtagcataagaactatcatgtaccttgtttacggcaacagagacgttggcgaatgcgagttagggaaactggcctcccgatagcgaacgacgagttggggcagtggaacacgcggaggagagcgcgagttacccagtgagctgctcgtcggcgacaggagggagcagagggctccggtgacgacggacgacagcgatcggcgtggttcaccgtggcagagagttttaggtacggggaagagtcggcgtgtctaggaacggctcgaccagggtgcgggctcgtgatttatagccccgaaacggagccaaacggcgccaagggggacgacaaggggtgtactcgccattgatggtgagcggcggttacaggaagaaacgctagtgctagtggggagaaaaggaaggggcacgggaatggggaataaatggcggcgcgacgaattgctccacaaatgcagggcacgcaggaaggcggaggggtgtctgtagcatccattcgaatggcgacggcgtccacatcagctgaac

SEQ ID NO: 72448 - DNA, 538 bp, Zea Mays
ggattcttgataccatttgagaattactagttgaagcatgaggagggaccgaatgacttgaagtatcttgatcatgagcatccacaacttcatcattttgttggctttggtaattttcttcatttaggggtgaagaggatggaatgacaaccacactattatcatcatcatcttcttttggctttatttcaccaatagccattgttttcatagcatttctcaattgagttccaccaccatcatcaagattatcgttttcatctcgagacccatttgtttcatcaaactcaacatcatattcttcttcaataataccatgagtcttgttgaaaactctataagccttgctatttgattaatatgcaagtagaaaaccctcatcacatttcttctcaaatttagagagtcggcttccctttctcaaaatatagcatttgcaaccgaatactctaaaatatgagatatttggctttctaccaatgagcaattcatagggagttttcttcaagagcttgtgacaatatagcctatttgatgc

SEQ ID NO: 72449 - DNA, 317 bp, Zea Mays
cgaagaggtatgggccaatctcggccattggattagatttgcacggcacagattaaatccctagggtaacgaaacgatatgctctatagcttcttggatcacagatcaatggctcacattaatttgcgcacagggatgcatcatggccatctatcaacaactcaacggtctagctcgccccagacgaagcggtagccatagatataatccggcccctctattcccagatcaacggctggcgtgcatcttcctccttgggcctcaccatggcaacgcaagcgctctggacagcggcgcccgcgggaccttgccaccag

SEQ ID NO: 72450 - DNA, 358 bp, Zea Mays
attttttctgtaatcagtactagtattcatatactaaacgggggctaggtcctgacacgtgggcctaaacactgagtaccaggttagggcaacggtgtataacaaaaatgggaagctgaattgcttagatgttaagtgtgtcctatccataggttagacatggtatttataggataactaagtggcttgtgcctaaaatacatgcatgcctttgttacctactacattcccaaaatatactgcagaccgggttaattatagaatagtgccggcctagacctagttacactgatggtcgtacctgtgggggacagatatccccgggtccactggaagggtaaaagacctcacgagaggc

SEQ ID NO: 72451 - DNA, 446 bp, Zea Mays
aggattcctgacaaagttcaagtaatgattccagtacatagctgattgtgaggcgggaatcatggtagattgggaagaagtatttcctgtatgcatgggtgcccacattgttgtcggaccttgagcagggtttggaaaattcaggtttcccataaagttacaatccataccactctgctgcatgtaacccgttggccacaaagggggtggaggaggaaactgctggccaattgatgaatttgacatgggctgagaagaagtggcattgtttgatgggtccattctagtaagtgtggagaggggacaaattaagtcagatggtaacaagttacgaaaatgtgcagaaacagttcaacaaatgatttagaaaacaagcatacaactcagcaacagttataataaaaggttcccatcgacggttacagtactaaaccaagcacatcaca

SEQ ID NO: 72452 - DNA, 374 bp, Zea Mays
tttggattgaccaatgcacctgcatacttcatgtacttaatgaattcagtattcatgcctaaattggacaagtttatggtggtcttcattgacgacatcttagtgtacacaaggagtgaggaggagcatgtcggccacctgcacatggtacttcaatgtctgcgagaccaccgactatacacaaaattctcaaagtgtgatttctaggtgaaggaaattaaattcttgggagataccgtctcacaagaaggtattgtcgacgatccaaacaaggtgcatgaggtaatgaattggaaggctcctaccgtcgtccgccagattcagagttttctaggattggttggatactatcgccgattcattctgaatttctc

SEQ ID NO: 72453 - DNA, 533 bp, Zea Mays
ctaatatcttgaatgtcgaagcgtggattgaagtattgcacacattgcacatttttagtatacctttgatcattgaattttctttggtattgtcattacattgttcatattatgcttatgtcaaggttcgagttgtagaaaatcatccccagacctcacaagtccacgtgtagtgatgcacgcatttaggcggaggatagtctataacttgacctttttgacactagctatgtttttgagttaatcatgtgtgtagtcttaaggttttaaagggaaatggtgcatttgaacaaagaagggtgcttccactgcactttggtatcaaatatttttgtcttaattcatttgaatttcattgcttccatttcttcattctcgatatttgatgtggcaatgggacggctatgtgtatttctctgtttttggtgcttgatgccaaagggaaagaaattataggccaaagcaaatggaccgaccaccacttgaatttttaaagtgggttgtctttttgaacttgtcttttgatccaaaac

SEQ ID NO: 72454 - DNA, 625 bp, Zea Mays
ccttgcctttggcatttttgtccttcatcaatatgctagtcagatctgatcctagcggacttaacatatgaaaaggtagggggcgagtcattacctctaggatttccatcatcctaatagatgaagccaaagtagtttcggtaattttccttagtagctccaaaggatttctctcaactcgatcaaccttcattgtatttcatttcttgggggcaggggatcgaggtctgagtgagaagattccttgtcgtcatcattttttctcttttgtttggatgtgacctctttccttttcttcctttctttggcagatctctctgtttgtctcatcataatactaacagtttgtttcctattcacctcggaagcttcttcttcagaaatttttgaataatatggataatcgaactgcaaagcgtccatgactctgttgacccatcgcttttcttggttaccaaatgcagcagtcattagctagtattccttattcgtaaaagtccccaaaatctcattccatatcatctcaattgtttttgaccattcggcgcaaggttctttaaatacatcccgaaccttgaatcggtatggtagtctaacaagctttgtcttgtccaccacatctttc

SEQ ID NO: 72455 - DNA, 625 bp, Zea Mays
agttcccctcggtcagctccacgacctccacttctttgacttcaatgcgctggattatggagatatatggtgccgcgtccgagtcagttcccctctcgctcccttcctgcactttgccgaggtccgcaagctcccttgccccttcgtccttcctgcatcgggagccggaggacctcgcctactctctccctccatcggtgcgacagttgtctcggccgagcctgagtcgagtggagcaagtggtatctagaagcactcgcgacagctgctggtaggacgcaaatgcaaggattcagacacaaggattcagacacgctgctaggtctattttgttcctacccccaattttcatacttttagtgctacaggtctgttctgttgtattcatctcaagcagttcatgctcatgttcacccaatcttgcctagagaataaacaaaagaaagttttcattctcactcaagcaggatatttgtttgcgtgacatttctgcacataaaagcaacctttgaaagagaagccataaaaaactttctgttacaagaaagatgagtaatgcacctctaactcctccagatcaatatccggttcaagtgcaggtcgaacagaagatcttaaacctgcc

SEQ ID NO: 72456 - DNA, 379 bp, Zea Mays
gcatgatctagtgagtgtttggctatgattgctataacaagattgtagctggtttattaggctataactttgatacagtgagttgatttagtcattacataaaatctggagcaaatcagtgccaaatctgctctgacaggcagactgaatgagcttcacgatggtacagtgaccagattggatcaccagctcagagacctcgccgcaggcgaccacacgcgtggattcatgctatcgccgtgattcacgctgaattaaacacggataacgatcacggggtgaaagatctcgccgtggatgggctggaatgtactgtgtgcgtgatggttcatcagtgcacaccaactacgtggccaagcggcaatcaccggcgtgttcg

SEQ ID NO: 72457 - DNA, 925 bp, Zea Mays
tcatcggatgggggtgattttgggagcccgttttcgtggattgaggagtcttctgatgaagatttagattattttgctgcattggttgtggccacgacggagtccttgccgcagcctgaagtgcgcgaagggtttgctcccccggctggggcgatagccgaagagcaccgccgacaaaaggtggtgttgaagcacaatgttggtgagatgtcacgaaatgggaggcgtcgacagatggggatggaatgatcccgtcttcgactagatcggggcaaacaacgagatttgctatcttcgacgtccgggacgtgtattggggagggggatctgcggaatctttttgagggcgaagagttgaagatgatgttgtttaacttccaagaggcaggccttactccaaaggctgagccgatgtagcatgtttgctgccctcgctctcgtgttgcggtagtgagtgaaaacgctgccctcccccggctcgcaatagagagggagggcaacaagacatgatttgtattatttatgcaatgtggccggcgggcccctcgctatgtgtatgtaaactatgatgacaccacgtgctgcgcttgttgtgaggttgtcccgacttgtaatcatgctggtgtggcgcgtaaatgggatggggacctcgctttccacggcgatgttgaacgcttatgacgcatacctggctgcgcccttaggtggttttttttcgaccgtgtcagatagtagagacttcgcacctttaaggtggtcgtaatagactttgctccattagggtgatgttgcgcatttatgcatgtccggctgcacccttaggcgacttttgctcggatttgtctcatggtaaagactttgcacccttagggtgatgtcgcgcacttattttgcgtatcctgctgcaccctttgtaacacccctg

SEQ ID NO: 72458 - DNA, 301 bp, Zea Mays
cgttacaaccatgggatactgaaccatttggaggctgaagcagtccaggaaacaccagacatgatagtgggtatgtttccaatcgaatcccatcttgcagaaatgctatttgatactagagcaacacattcatttattactgcatcatgggtagaagcgcataatcttacaataactaccatgtcaacaccaattcaaattgactcggccagtggaaaagttcgagtcgatagtgtatgcttgaatgtaagtgtggaaataagggggatagagttccccgctaacctcatagtaatgggta

SEQ ID NO: 72459 - DNA, 372 bp, Zea Mays
cttccatttggggtagagcttttgtcggtccttgggtttggatcggaggtgccacgacttagagaatgcaggtatgcagtgttttttcgcaccttcacatggccttttatttctagacaagaattgagttttgagatggttttgttatgttaaactcagtccagtcaattggttcaaataagttgctaatttgtctgaggatgaagcattgaagccaaatgtttccattatctaaaaaggaatggtacggccattttaagtgttagtcaatcccaatttagatcatgtctggtagtatttaccgataataattatggcttactttatcccaaaatgggaattactcaagcacagatcaacatcaaattgcat

SEQ ID NO: 72460 - DNA, 1297 bp, Zea Mays
actcccaatggctgtggactgcaatcttcggcttcacagccaacaatgtttcctctggaacctccagggatgaaagattctctgtctgatatgttctcaggtttaaatgtgtctcctttggaaacaattcgagcttcttgggatgaagagtccaactgcatttatcaagcgaaaaactgaacgaacaaaagcatccatcctccaaggaaaagaagcagggccctgcatcaatttcattatccatgtatttcaccgggagcatagtgatggataagttaggagcacgatcattgtcagtagtagtgacactgatgcaataagcattgatggatccatttccctctgacaagccaaggaataaagagccatgtggggtggcgcgaccaacgaatggtagccccttggtgtcaattttgtgccactcgactgaattggtgtcaaatgcatatgtgccccaaagttgattgaatgataccagtatgtaggtgtcgaccaccacataagacgtgataagtacaactggcagcatggtataaacaaatggggtaatcttccaagggaagcaaggtggatgtggtagctcaatccaggagcatccctccaggtgggagcggtcgtcaacaatgacaactttggctttggaaagatcgagtacctcgaaccagggtgggaaatcggggtctgtgaaccagcagagagtcttgcacagagcataaaccttgtcccccattgttgttaggacagggcaccactttgtagaattgagagtcggcccgtgaatgaccttcttcgtcttggtgtcgaagatgacggtgtcacccggatcacccccgaccctaatgatccacgcgcggtgcactgaccgtagggacgtgaaggtcataccgccagcaacggtggtcagacgggtaactcggtgcaggctcttccgcttcacccgcgaaggaaaggaagtggcgacgcccatcttgtacacgacgtagggcatggaattcctagaccaatcccagtggcatgccacaaggtaggcagatcagacctggccttcatacaactcatcgctgacgatcctcgtcgggtcgagatgttctgtttcttgcatcagcggatcgccgtcaccgccgcacacgatctctagatcccccatctgaatctgatccggatcttcgcttccttccagctccactgatggcttgacccttccatgacggtcgcccgtctttctcttcctgtggcccatccttccttaaggtctctgctgtcgccgagaggccgccggaggaggtggtggtagtta

SEQ ID NO: 72461 - DNA, 481 bp, Zea Mays
atccgaaaggaggtccggaagctgctagatgccgactttattgaagaggtccatcacctagtgtggctggccaacccagtcatcgtccccaaggcaaatgggaagcttcggatgtgcatcgactacaccagccttgacaaggcttgtcccaaagacccgtatccacttctgcgaatagatcaaatcgtggattccacctccgggtgcgaccttttgtctttcttagatgcttactctagtttccatcaaatccagatgtctagggaagataggaagcataccgcttttgtaacagtggatgggctttactgctatgtcgtgatgccctacggtctgaaaaacgccttgccaacatttgtgtgggcgatgagtaagacttttggggacctgagcagggacaaggtggaagtatacgttgatgacatcgtagtcaagaccaagagagggtcgaccctagtggaagacttgaccctggttttcg

SEQ ID NO: 72462 - DNA, 668 bp, Zea Mays
caaactacgggtgaacagaagtgttcctagtgatctagcgcagtttagttcaattgaatgggtcgaggagcatcagtggcatgtaagagtgctaaaacaagagagcagaggacaagattggacctgaatcaagctagccacgacaaggaccttttcacggtggcggaaacccaatttgggggaaatgagcaattcgtggtctctggtgaacaattggaggcaagtgctggtgctttggatgggtaattaccctatggagctcatggcgtgctcaatttatagagactgggagcggtggtgtttaatttggaagaattgtgctggcggccgagaggggggaatgagttacggcgacgatctaccgtggcaactgcaaagcgactgaactacgacggtggatggtcactacggctcataccgacgcgataaacttcctaaggcgtggctccctcatggtgaatggcgaacacaccggtgacagccgctcggccatgtcgccggtgtgcactaatgaaccatcatgcacacagtacttccaagctcatccgaggcaagatctttcaccccgtgatcgttatccgcatttaattcgggcgtgaatcgcgtcgatagcatgaatccgcgcgcgtggtcaccgacggtgaggcacatgaacatggcgatctgat

SEQ ID NO: 72463 - DNA, 927 bp, Zea Mays
gaattatgatggttcttctttaatttacatcttcggtggtggtaagaacaaatgctttgactgatttgtatgttggtgtcgaaatggcacgagcagaagcttatatcctgtacatagctgcattgctctctggtaattgtgattttctcattgtacccgtttcatgtggccgtgttcaacgcctgcagattgtgtagttcgatttagaagaagctgctagtcgtatttaagccgcagattgtgtttgccgcatgcttatctgaaaataagctcgagagtatagtagcagtttgttcaataataacatctaatgttttcttacattaattactcacattaaggcacatgttaattattttccatttatcgctcctgagtcatttatacataacggcaaagcttattgcctaagctagtgtgccatatcgtcctcgatcctagtcatgcactccctcaactccaaattataagacattttaacatttctatatgcattagttttactatgtgtagaatatttgacgtctaagaggggaagagtaaattagacaacttattttacaatctaaggtctttaacttttatctagtcaaagtatttgcaacttataaactacaacttaggtttcaaacttatcaattagcctaacaactaaactagtgaggtaaagaaaaaaaacaaggtacacaatttaaatgtagaagcttaaaggtgaaaaagatggaaacttcaatccatgactgatatttttattgatatatcgaaaagtgcgcaaaattttctgtaattctcatgtgagagtcaagctctcggttgggtaactctataataacccgaggtctttctcatacacaagtggatctctagtgtagcctctcctagatacttctcttcgtcttcactatcgggtttctagccaaaaccgat

SEQ ID NO: 72464 - DNA, 1765 bp, Zea Mays
gttgagctatcctgggacgaagtctcttttgatgttgcgatcagtctattggttcccgtaaattgttattgcgtcgagaggtcttggaattttcatgcatagataaaggccgtgaattgctgcttcaagtttgttgatggaccctctccctattatggcattgtatggatagaccatgtcgactatgtcgaaggtcacatgctctgatcttgtgttggggtttgtgccgatgaagagggggagctctatcttgccaagtggaaatgtcccctttcctctgaaaccatagagtggattgtcggcaggctgaagtaggatgtggttgatgcccatttggtcgaaggcatgtaggaagatgatgtcgacttggctcccattgtcaacgaggacttcgtgcagctcctagcctgccactttgcaactgatgacaagtgcgtccgtatggggcgcgctgcgaaggtcgacgtctcttgcattgaaggttaatggtacatgagaccacttcgtctgaacgacgggtcctgtgattgcgacatggttgacccttcgatagtgatccctttttgtcgtttgttctcgaagtctgagctagaccctctggtgatcatgtaaatcactcccctaaaggctgggtccgtgaagtcttcttgctttggtggtgggggcgtggtaggtgttgatttgggtgccgtggtgggggtggcaaagctaatctttcttgatgttgaaggcgttgttgctgtgggaagagattaggtttttgctgctaggggtagtatgggtgatcattttgatattgatgctggttgtactattgcggttgataggtatgagcactaactctttggttgtctgccagggtggccctagccattcggtcctttgttgctttggtctcggggcagtctctgtttgggtgtgctgagtcttcgccatggaagacacagtagaatcttctcgattgctgacagttcagcctcggcctttgcacctggtcacgttgccaccgtggccttgttgcgggggatagtcttgacgacaaggggggttctctcctggttgctgctggttttgcgatgttgtgcacctggagttgagcacgctcatgctgtgctggatcctgctgtggaggtctgatccatgtcctgctgaactacggagtctccttaggcttttgctaagactcaacttttcttcgatggagttcttctgatcgggcatatttttcgaaaactgctacaactcctgcaagttggttggtgggtctcttatgcagaggctatataagatgcctactcgaaggccgttgattgcatagtggatgactatattgtcatcgaccgatggcagttgtgatttcaacaggagaaactttttgtaatattcacgaggactttccttctcttgctgcctccaaagcgagagttctgccagtgcgtctgtttcaggtttgtaaccttgaaagttcaataggaatttgtagtggagtatctttcttgaatcaattgataatggcggcaaccttgaataccatgtgagagctgggccctcgagggctatgatgaatgacgagctaatctcttgctggccaccttgctcaccaacaaccttattccgtgtgccatcccacacgcaggtttgttttgagcagattaacacaacgctccatcaggccaggttcaactctaaaccaaactgaaaatctcaactgatagagaaacaaacaaactgaactcaggattatagcaatatttcaccccctaat

SEQ ID NO: 72465 - DNA, 465 bp, Zea Mays
ttaggagagtgtatataaaaacagggcgtgtgaaaggaggaagaaaaggctggcagctgaatgtaatcatgagcttatcatttactgacccaagtcaacgagttaaaatctgaacgcgcaggaaatgaggtcgagatgcccttggtttccatgctgcactgcagagccctgcacctgatgcctggagccgcatgcatgactgtactgtctgcccgtgatcccgtctgccctccacgtctcctccgtttccaacaaattgccggagtagcctacagagcctgctgattccgacaagcttcgctgacacaactcataaagaacaatcaggcacgcatcacgcagtaacttgggaatgctaaagatagatatagatatacctgatggagctagcgtctacagttggatcacatgcgatcttcgttcctagctaggcatgatgactcagtccccagcgttagattaact

SEQ ID NO: 72466 - DNA, 505 bp, Zea Mays
cgccgccttgttttgcatcgtaccatatgcgctggactactctcaaaggtactccagtttcacgcgaaacaaccttagtgacccctctatctaacttaccgacactagttcgctctaaaagcatgccatagatagattgcttcaattcattactgtatgcgttcctcctcctaatatctccaccttgatcaacatggtgcacacgaggtccttctagttgtgcgtcacttgagccctcagcatggggttcatgctggacgtcctcctgcctagaagttgcatgaacacgccttgtgagttctagactcgcccaactacggttggtgtgaacagggtcatcgcgttgcccacgcccaacaatgaaaccaactccacgccctcgaccagccagaccaagcctagcacgaacacgacctgctactgcatctgccgatggatcactcatttgttttcaacacaacaagaattcatatggatttcagattttgggaacgccatgcttact

SEQ ID NO: 72467 - DNA, 876 bp, Zea Mays
cgaaagccaaagccacgactccctcaccccgcaggcccgcacttcccccagtctactctcttttcagtttctctctccccactttccccatttttaccgcacatctctccttcctcggcgtctcgcacaccccagcaccttcgtctcccctcccctcccccaacaatcggaaccggataggaagttcggcttcctcccggacgactcggcgcaaggtcgcagcttttctctcgatttttcgcgcttccccgttttgacgcttgcttcgcatggggattctggagatctttggggcggttcgctgctgagatggttcgcctcatcacgcgctgctgtgactcccaacaggtaggctccgctagacctctttctagccttctcttggtgcacggaacagctggggagtggggagtacgagtcactagccttctcttggcggctgagagcgtgagctcggtggagttctgatctagcggaagatgggatttttgcggggctgacttgtgttgggtttcttttgttgcgcgatttggtggtgtgggcttcattccttccatatatgtagcatctgttttgtatgttgcttccgatttggtgggattccatatctcgcactagtgaattagtgatgacttgcttgactagtttcttgactggtttcctgttctatttctcattgttgcttcagttcttccgatccgaggagcccctgttatgaacggcatgccgatctctgcgtcctctgcggcaagcgtcgacagtggcgcggtggcggccggcacgcccatgaagaatgcaacggcggcggacgctctcgccgagatggcgagacatcttaccgtcgacacggaagacaccttcgcgggcctgctggag

SEQ ID NO: 72468 - DNA, 800 bp, Zea Mays
tcgcagaagctagaggctgctcgtcgcgatgtggaggctgcccgtcgtgatatcaaggtcttggaggacaaccgtgctatcatgaaggcatggtgtgacaaagtgatggataaggcagtccgcgttagccggattctgatgaaaaggcctagcgttgtggtgcctgatgacattgtagttgatgtactcgctgcatcgggtacttcgagtaatccatctgcttctggtgaccctgcggacaaggttcctcgcaaggattctcctgcacagtaaccaaaaagtgaaagtgaacatttattagtccaaacagaaaacaacttttcattgagacgatattttttgtggttttttactctccctttttgttgagtgtgaatagggtatagtatgtgtcgtgagatttttgctgcttaattgatcatgtcgcaccgacttaaggcgtttccaacttaagtcgattgctctgttagcagggtataataatcaccctaagttatgtatgtgtgagcatatcgcaccgacttaaggtatttctgacttaagccatttgctccgttagcagagtatagtaaccaccctaagtcatgtatgcgtgagcatgtcacaccgacttaaggtgtttccgacttaagccgattgctccattagcagggtatagtaatcaccctaagttatgtatgcgtgagtatgtcacaccgacttaaggcgttcccgacttaagtcaattgctccgttagcagggtatagtaatcaccctaagtcatgtatgcgtgagcatatcacaccgacttaaggcgttt

SEQ ID NO: 72469 - DNA, 803 bp, Zea Mays
acgcggaatgcctctgtatcagccaattctcctaactgttctacgaactggcctatgtgctcgtgtgtgcttttaccttgctcacccgaaaattttgcaacttcaggtatccttgttccctgggagtatgggtggtaatcaaatcggctgtcatagtgttttcgatatgactgcccccagagatcatgctaactctgaacttatctcagaacgtcctagctatctcctcccttactacatcaatagcggccggtggtagtccaccatgtccaacataggtgtgattgtttggatattagtatgttgttttcctacccactggtttgggttttgtggtgcattaatgcttgccctatgcggatcatatgactggtcattccattctggcattctaggagggaccagaaagtactcactcccacgtgtttgtgatattatattacggtgctagcgcgctataggatgtgacaggaggtttagctgggatggacgtgcatgtggataataaacatcctcatagggttctatgtactctgtgtcggactgtctggttagatatgcggaccttccggctacgtgcgcggactgtccagacatatggccggaccgtccggtaatgtatttggactgtctactttatacgcggatggtctgaatgggtcatttagggcttgcacagtacgtggcgactcaggtgcggatctcggtaattcgattctaaaaactggaccggccaccgctggcccggatggtccgcgctcacgcgcggatggtccggccatgcgtagatcaacggatttacc

SEQ ID NO: 72470 - DNA, 561 bp, Zea Mays
ggctgaaaggttcaaaactgatattttcaacaggaagctggaacctaagacccctttgttgtccaccccactaaactcagtttgtgcatatgagtagagtccagaaaaggggtgaagatctttttctcccccggcaactgatcccagcttcagtcactgtccaatgttcagagcatttccccccttcctttatggctgacaactcactcgatattaccagcaggagtgggacccctaaaacttgagtcatgcacttcatccaccatacaaacatagcccaacacatttttctgggactggctcacaggtgcaatacaaatatccagactgcccaggaattcagataataagaagagcagataaagactcactgcccccaaaacagtccaaaactttgatatttctcaatggagctgaggtctctagccccttggctaagcacctcgaccctatctccacccaaacacacaagtgacactagctgggagagtgatcttcttcagtttgccaatcaaaaactgaatccaattcactaacactgctgcttcctttgcccacttc

SEQ ID NO: 72471 - DNA, 481 bp, Zea Mays
ctcaacgcacgccgtgaccgcgtctttagcctccccttcatggcgctcgtcgtgcatgtcgcacacgatgccaggaaaataggcacgtcgtgcagcagctactatggcgaggggaaatctgcatggagtcaatatatttgtgcaatggaaaccagaaaatgtgttgcgccagttagcagacaaaagaccaattctccactaacctctgtttcttctcttttctggtggtgaccacgcgccgacgttgctgctcgagattgtgccggcaagcatcgccgtcaagctgcagcgccaacaatctggtatcagagctgtggttgtatgcaatacgacggatcggtgagtcctccgcgagaaccggcgaagaagaagcgagttattcctcgttgtcaagtgtcgaacaccatgagtgatgcatcgacctccggaggtggcgtgaaagagagctctctgatgtggcctctccgcacgcgcgacaatt

SEQ ID NO: 72472 - DNA, 807 bp, Zea Mays
gaagaggtgagcatgtattagtcacatagtcataagtatatgaaatgtgaataaatacatacacagagaaatatggcacagaaaacgagagatatggcgatcgagaggtcaaacgacgtgaaaacggtgtttgaacgataaaagtgccataggaggtttggaattcgaattgaggcacagaatgacgtggaattgagccgatacttcacgaataggtttatatgggtgaatatgagtgaagtgtgtgcttggtttgaatttaggcgaagaaaatgagattagggcactcggctcggaaacgatcgctcaaaaacggggaatttggtgaaattaaagcctggaatatcggatgggcgtgaaatttggcgactatgttactggaggtattgtgaaggtgcctgaaaaatttgggttcaattggagcatttttggctggtttgggcatttcactgaacacgtggtgtgcggagttttagggtttcggtgaaaagactatgtgaggtgggaaaaccctcccgaaggagctagtaacctgcaagaatgctcaggaagcacaaagggacacttcctaccagtaggaatcacaggaattcacaagaattggaaaaaggcacttaaggggaggaggagtattcactgcccagagaaatgaagagagaaagagagggaaagagggagcagatgattctcaccagagagggatgcacgagcactggaggtcgccggaggatcgccgccggggaggggaggtcgccggcgagggaggaaatcgccagagacagcgagcagaggcagagaacagagaag

SEQ ID NO: 72473 - DNA, 562 bp, Zea Mays
ggaagttcagggtctctggagtaaaattacttagactatgtaaacagccacaagggactgcgggttgtttcacataaaacacagggtctcttttgtaaaatgggtcagccgaaggggtatcgcgagtctacaaccgtccgattagaaacgaacagcccaggtttgctctgttattaattgaactagtgcgcatccaggaccaaccgatcccgatccgacgactcacgacgatttctcccaaatctaatcggggacgttgattacgaatccaacggcgcatacttgactaccctgagatctaatcgtgaccgttgaatacgatccaacggcccgagcggcttcttcttcctccctctgactacggccggccacagcggcgcccgcactatgtctcgacacccaggcgcagccgaccacgcgccatggccgacgctctatcgctcacagagaagggaagtaaaagaaagaaagaaaaaatagagctcaccggaggctagtgcgtttaggaggaattgcccgccaccgttggccagcggcccggcaccaggatgaacacctgcga

SEQ ID NO: 72474 - DNA, 586 bp, Zea Mays
gtatttataaccttcaaccactcaaatagccgttgaagtaaatgggcaaaagcagtctggcgggtggtgcaccgaacagtgaacactacatgtccagtgcacactagacaacctatagtgcatggcaggcgacagttctgagtgggcaggtgaccattgtgttgatgtcagacagtatagtgcacaccaaacagttcggtgctcttgcctcacaaaaatcgcgaagctactgagttcgccggctaccttctataaatatcactagatagtttcgtgcttccttctggcgctgggctgcttattagacagaggctcgtacacctgacccagcaactttgtcgttcgaatattccagcatcgctggaagcttgaagacaatgcctcgggctatggttgatgtcgctgctgttgctaccccctagggatggttgtgctcaggaagcaggggtttgctgacaggagtctgggcactaagaacatgagggctgccctacacccaccccttcatggtcttctaacacttggcagaggaatcgaagctaccgataggatcgaatacaagggtccccttgctgcgacgcagtct

SEQ ID NO: 72475 - DNA, 1011 bp, Zea Mays
cctgagggagaggaggaggagataaggagctcggccgtagcagcccgatgggtggcgatgtgacctcctgatcagcggtgaccgcactacgacaaaaggagaagggagaaaatatcaaggctgagaagggggtcggggaactcagaggaggaaacttacctcggctcatggcccatggagcacgacatcctagcggcccaagatccatcggccgacccgggcacccggcagaaggtgtgttcaaggaagaggccaaagagaaagggaaattgagggtgactaatcagcgaacgactactcgagacttataaagagagagaagtgtctcactccaccccgagggacgacaagtcaccatgaaagcagcccaagtccctaggaggaataaaacaccatgatcactcgaaaggcgaaaggacaaagcgttgttgaacccttcatcagccccgaagggagatactctcaccctctagggctggggctactgtcagggataagttgcctgacccctaggcccatcggtcagcgaacacactagggagaggcctctagcaactagggtcctctgttcagtcggaggagataggtaacgtctaccctggaggcacccgccctagacgaacctcgcagcaccgagcttggggttgggcatggtggaacctaacagggggccaggcacggcaaagggaaaccactcgagtagatcctgcgtctagcccgagaccgacccatcataagtgattggccacattaactatgtctagcgatgagccacgatggaggcgcccgtatgcctcccactcttgacctatgaagccctcaggtagtagtgctctcatgacctacaaacccctcggactgcggcacatttatggcatgtgccaccccggtctgctacgcacatatgacctatcagactaggcttgagtgcacagaccgctggtagcatgaaacacggcaagacgcaccgagccctaggctacgaagactaggggtcgccatagcccaaat

SEQ ID NO: 72476 - DNA, 378 bp, Zea Mays
ggcactgttgcctctgtcgaagggctcaaaatctctggcatttttgttatttcttcaatttttgacccttcaaccttatcagccatcgtctcaactagcttaattgaaagtaacttcggcattatagccggctcttcagtcctctgcacaggaggaacagtttcttttgttttggcagctgaagaggccccttcaccaaattcaggtatcacggccgattcaatataacgcgaccggtgagtcagaaccttcatatttttgcccttcggctcggctgtgatagccgaagcggcaacctttccagaagcagcaatctttctttttaccccttgccctcgcagcgggtaacaatagtcagggtatacgaagccaatagca

SEQ ID NO: 72477 - DNA, 493 bp, Zea Mays
tgctgttcggcggagtcaatgaagggaaattgagatgccttcggaatcgaaccgaggcaaaggtcgttaggactttctcaaagaatgttggcctgccgaagattgaggcggacctctgcaggtaccgacgacagcatgtcgccggtagcctattctatgctaattttaaggtaaaattcgtaactttttattattttttgaattaagatgttttctgacgaaggttgttttgccagagtatactactaagtaaagtgctgaggatgcaacaagatctcaaagacgagaaaaacgaagctacaattaaagatctagaaaataaagtcaaagatcacgaagctgctttggagataaaagacttcgtcatccactctatggagggttcactagcagaagctcaggccaaaattgacagattaaacagcgaattactcataaaatcagaaaaatctgagcaagaaaagaagaatcttgaaacgagtctcaaaactga

SEQ ID NO: 72478 - DNA, 1357 bp, Zea Mays
tttgctgatggcgcatgtcttgacaacatgtttatgcaatgtttcattgagtgtgtccgcgatgactggtctaaacatattcctccactcaatgctcaccagctcattctagatgttaatgttggggtatgacttctacatttatacctcttttttaaatgcatagcatatatggaaattacataatacttctctatcctagtaggctatattgaactttgaggagcaggagcaacatagtaagtctcctcgtccatttgacccttcagttttggagagttacctattgaagacactgccttcattcaagcatctggatgactacaaatcagttaatttctgttccttcacccatcacactctcacttcattttgctgcatttaaattttaatccaatcatccatatcaaccttagtgtattcaacatttgttatttccattttgtgtgcatgtagataatggtacccatgctacgatctggacattgtatgttgttaatcttcagattggacgcatacatgtgttagattccaacccatatggaccagagatgggtgggccaggttaataatgagtaggctcaatctagctattcaaaatgctcgaccaagatcagctctccctgtttttttgaagtaccctattgaactcatgaataactgcccaacaatgaaattggggtctaatgattgtggattctttgtcatgagatatatgcagcactacgactacatggttggagctattaatgcagtcattgatccggtacataatacatagatagtatttttgttgttatgacataatgtatgtatagttatgtctaactcaccttttccttatatttgtttgcaggataattcagaggacattcgctctcttgtactgcattacctaatattccatcgactaaacagaaacagctctgtggtttcccatctggatagattcaagttctctcagtagtagcctagtatagtttactctcttaatattagtatgaacatgatggtctgatggcttttggtggcttcaagttatctcaatactagcttagtttagggtagtgtcactgaatggtgttgacgtaaatattggtctgttggcttatgttaggattcaaataatacttatgtccatatgcagctcttagcaaactcttatatatatcgtaccagatatgttttagatggttatatttatatatgatagttctgcactttatcatttgtcttatggtttttatatcttcttcagtgatgttcttcaatgcatcggatgttttattccgttatctactgtatgcgcctgattatccagtgccaatgcgctgcctttctaagttcatttatgcag

SEQ ID NO: 72479 - DNA, 301 bp, Zea Mays
tcagcattataatgacccgaaaaagatggtatagaaaatttaatcttagcataagggtcgtcagaagcacaattgttattaccttgctggcagtgtggcataccttctgtgttttgatgaagacgaagacgtaggcgcaaatctctggtggccgcttcatcataattaccttcttcatcaaacaccgcatcatcgggaagacgtggacgaggaggtggtggtggcggtgcttgttgttgcgtctccaacacagcaagtctgtcgacgatctaggacaatcgtcgatccagcctctcgtatg

SEQ ID NO: 72480 - DNA, 456 bp, Zea Mays
ccttagactgccaatgatacttctatatcttgtttgatcaacttcagttcctcttgcaccggatgtgagctttgttcgttgttccatgggagtgtctgtaggattacatcctgtcatattacactgatcaacgatctttgctgcataagagctctggcagattgtaatctcactctccaattgtctgacctccatacctaaatagtaactgagcaagcctaagtcactcatgctgaaagtatgcttcatctgctgcttgaaaattgtgatttctgtcacagagggcccacagataataagatcatcaacataaactcctaccaccaacaaagaatgaccaatccctttcctgtacacaacatgttccaccttacatttctcaaaacccagaagagttaactcagagtcaagtctggcattccaagctcttggagcttgtttcaagccatataaagc

SEQ ID NO: 72481 - DNA, 740 bp, Zea Mays
ttctttgcagggcagatgcgtggtcgagtttgacctgtacttctcaagtattggggagacaaggatgctgatatgagaatgtataagtaggctgccacactgtactatattatataataccataaagcgtgccaaagaaagatgatagttactataaataattgatgagtggttgtgtgcatatgtcgtctcatatctgaaggtgatcaaattgttagtgctcgtgcatgtgctgattgaaactgaaacaactgttggcagtgatgatatgatgttaagatttacctagagatagcttgttaagatttgctcttcatataagaatatctcatgtaatttgctcttctctataatctgtccctattttactctctctttcatgcttctcctcttgatataccattgaacataaagacaaacaaccttaagaacactaatattttgttgaatactttatatactattgacctgttgcaacgcacgtgcatctaactagtaacacaacaacacaacaagaccttgagaacctacgaaatctggttgcatctcaactgatcctctagatctctgttactcttagtatcgtcgcagagtaatgtagtgtcacattctgaccaattctcttgatctgcccctctgatttccactgatactcttagagcttgtttagtttcgttgtaaggtattgtaatgtcgcatcctgatcgattctttatcgtagggtaatgtagtgtcgcatc

SEQ ID NO: 72482 - DNA, 594 bp, Zea Mays
gtcgttggcacgctcgacgacgctgttggattgcgggtggtataccgaggcaaagacaggcttggtgccgatggagaaacagaaatcccagaagtcctggctgtcaaactgtttgctgttgtcgactgtgagctcaggcaggactcagaatcggcaaacaatgttttcccagaagaacttttgggcggtctttgacgttattgtggataccgccctggcctcgatccacttggtgtagtactcgacggcgatgaaggtgaatttgaggttcccttgagccgtaggcagtggtccgacaatattcagcccccagcgttgaagtggccatgtgtgggcgatcagcttggtgaactgcgaagggttgctcgagcggggagaaaacttttggcatgcttcgcaagacctcgtgacacgattcgcagtacagattatcgcgggccagtaaaatccttgatggattaccttggccatgagggccctggccctgagtgggacccacaagttccgctgtggacttcgcgaaggatttgagtgccctcggtttcggtcacacattttagcatgggctgactgatccctttttgtatagctggc

SEQ ID NO: 72483 - DNA, 436 bp, Zea Mays
cgacccactataagtggacggccgcattaactacgcctgacaccaggacgcagtagagagtcggtccgcctcccactcatggcatgcacagccccttggcttacagcgcactcatgacctacacagccccttggtcaagtggtgcactcatgacctacaagctcctcggcccgcgaagcactcatgacctatcaagcctaggcatgagagcgtgaaccattgataggggcccgcaacaagacgagccacgtcgagacctaggctacggaggctaggggttggcatggcgcaatggtagtaatgatgtcaccaaggcccgcgtcgcctacgccatccgtcataatgagcacgaatagagacaacaaggcgcatacggccaagcagcctcgctaaggtaaggcactcagttttaccatggtataatggctccttccct

SEQ ID NO: 72484 - DNA, 1417 bp, Zea Mays
agcgtacttagaatatttatccaccactactcagatgctattggcattagatgagcgggacaatccttcaatgaaatccaaagacactacctaccatgcctgatcgagaactagttgtggtcgcagaagaccgagatatttcaaacggtcgggtttggattgttaacagactgaacaaccagctacatagtccttcaccatgcctttcatgttgggccatgcgaacaattgtcgaatacgatggtaagtcactggaagtttgtagtggccatctaaaggactgtaatgcagagcagaaaggactttgtgttgtagcgatagattagtacccaaccatatgcgacctttatacctaagaacaccagcctagagacgataaagaggatgactgtcaggttgcaatgccaactctgaaagcaactgttgggccttgctatcgtttgagtaacccaggatgacttcagacatccactgagacgaactgtaggacatagtgtagactgtcgcatctcgatgaggactgcgtgataaagcatctgcatcaccgttctcaatccctttcttgtacatgattttgtattgaagacccagtagcttggtgaaggccttttgttgctagagtgtattgagcttctattcagacaagtgagataaactttgttggtctgtatatatgatgaactcatcatgttgtaagtaagtgcgccactgatccatagccattaaaatagcgagatattccttctcatacatggataagccccgattcttgacccctagcgccttattgacgaatgcaagaggatgaccttgctggcttaacacaacacctataccatggcttgaggcatctgtttcaatgacaaaggaatattgaaatttggtaactataatactggtgtggatgataaagtgagtttgagtgtggagcaagcatgttcatggtcatgcttccacacatataaggtatgctttttcaacagttgagttaggggcttggcaatgactgcaaaatgtctgacaaatttgcggtagtagcctatgaggcctaggaacccacaaagttctttgcagatcgttggagtgggccaagaggatatactacaaagccacctttgctgggtcggttgcaaccccctgtgctgaaatgacatgaccgaggtaagcaatctctagacgagcgaaggcacacttcgacaacttgatctgccactgatcatcccgcaagagctgaaacatggattgtaaatgctgaatgtgattagtctaggtttagctataaaccaatatgtcatcaaaaaatactagtgcatagtggctaaggataggggcaagatttatgttcattgcaccctggaatgtcgccggaggtcctgataaaccgaaggccatgacccaaaacttgaagtgaccatgg

SEQ ID NO: 72485 - DNA, 833 bp, Zea Mays
atggcttgtgcccaagaaactcaccacactcagggtccatactggtgactagagaaatgaaatgaccctatcaaccatccattccttaactgcattgcttccctcacggttggcgcgtaggacatgtccttggcaccatattagtctgggtagcttccatgttcacgacgctcccactttaccggtggcattctgatagatatcccatgctcccccttatagtctagaaatgatgtgatagctaacaaaagtagcatggatgtccttgtatattacgaatcactcatattgctctgagcttgtcatccactctaagtatcaaattcaacttttaagcaccagcaccacaataacataatcctccagaaggttctttcataatgagcacatgaagcaacagaaaatgaatagtctggtcatgcttggcaatttaccatttcaagactagaacatgcaatcccgaccaaggtgggagcagggcatcaagatcagcatggtaccaggaaagggagattcatgagcccgacgaacttgccagccagattcgtgaagcagttagtgaggtcagggcatggcaggttaaaaaggcccttcccttctattatccaaattcccagcgattgtgagtttcttgggtatcagccatgaggaaaatgaagtgccttgtggatcatttgtgtgccgaggagatccaacaccgggttggtgagctttggaaggcagccttgactgagtttgtgtctgtactatttacttgatgaatgtcctaataatttcagagtgatgagtaaaagctgggcctagtagctggttctgaacttctagtattccac

SEQ ID NO: 72486 - DNA, 1053 bp, Zea Mays
cgacgggttgaatccttaattctacgagggctcttacgcaaaactcccacggcgaaggggtatccgtgattctaagctgttggatcgccaaccaccggacccgattagactttccccttaatgaacccgcataccacgtcgaccattagatctaggatcaatggccagtgactcgtccacgcccatgcgagaccagatcaacggttgagatgagcccgacccaaaagggcatgtgtgcacaaatccaggccactatcttttgatccaagggcccagagatgcccaatcccagatctaatcctaacccttggtcagagatggacggctaggagggcttctcccacctcgcaaccagccaccgagcggcggcgccctttgccacacggcggaacacgacggcgagatccccccatcaacccaattcgcgtgaggtttgcccaattggtggccgctacacgtagcagggatcaagacgaacatcctagaacactccattccccaaatgaggccgacggtgaccgcgcccatgcctccaagcggatcccgcgaccacaacaactccggtgactaaatttccgctgccatctaccctcccgattcacggattatgcattaagggggaaacggatgaaggttagggccttatcttaccagaggggaagtcgcggcgagagaggttcgcggagtcgtcgggtacccaaccggaggtgtccgcggtgagcaattcactagttgtagagagtcgctcgcccaggtgacctcaactccacttagtacggtgaccaatcgatattccagggtgcagggtggagatcgattttcactacggccgaggatagctagcggcggggcttggttgatgagaaaagggggttctgggcacgtggcttatagcttccttcccccagctgcggacggtcagcccggcgcccgatttctacggagtcggttgcgcgcggtagttgagctcggcgcggatttggggaagaagagcggaagaagatgagccgcacgcggcgaagggacgcggcagagaagctcgccatggggagg

SEQ ID NO: 72487 - DNA, 817 bp, Zea Mays
agaaaatatcccaagcccctggagcccatgagacagcagaaggacgatggaaaagttgccctcaaggacctgcactcggacagacactgagtccaaaattgggtgaggtggaaccaaaagagggtcgggcgatccgagcggaagccactcgtgtgaaattccacgtctggtccgggactgaccaccataagtgactgatcgtattaaacgttgagccacatcaagagagtcagttctctttccgctcatgacctacgggcccctaggtctgcagtccactcatgacctatcaatcataggtctaagtgcactggtcatccacgtgacccgcaatacaacgagccacgtcgagccccagtctacgaaagctagggtcatcgtggcgcagaggcagtaatgatgacgccagagctccccgccgtccacacgtagtcggtcttaaagagcacgattagagaagctcaaacgaccgaggcatatgccgacaagcacgattttaccaaggtataatgtcccattttgccacgatgcagtagctccttccctgagaagctaccggtaaccaccccaccttggcctataaaagggggaaggtcgaccgagaatgaagacacacacacgcagggagccacataggactatgaaggccgaagctaaggagcacactgccacgacgtcccaggcttagctaggtagcgagcaccagattcgtagtccttagacctcaccacgcataagagtcttgggagcctcttccctctctcgtctgcttgtaatctctattagagcattgagcaacaaggtgccagaagcgctc

SEQ ID NO: 72488 - DNA, 588 bp, Zea Mays
agtggcccgacgatgtccagcccccatcgctgaagtggccaggtgtgtgcgatgagcttggtaaactgtgaaggggcgcctaagcgaggggagaatttttggcatgcttcacatgacctggtgactcggttggtcgtgcatattatcgcgggccaatagaatcattggcgaatcaccttggctgcgtgggccctaggtcctgagtgtgacccacaggttccgctgtggacttcgcggatgatctctaggtcttcgatttcggttatgcatttcagcataggctggctgataccctttttgtatagctggccctcgactattgtgaagtccctgcttctgtgtttcagccttttggcctctttgcgatcgaatggatggtaatggccctggaggtatagtgttattggggcccaccagtgttcgaccattatgaggttgatgattcggtggccatcggcgtcttgcgttatctgtaatccttcgggattacggacggctggtgtgctgatgatatggtaaaacacgtcggagggcagggcctcgcccttggctgctgctttgtgcaatgcatcaacctcttcgttcttg

SEQ ID NO: 72489 - DNA, 482 bp, Zea Mays
caagttcttgaaagctgctgcagaggttgcgaaaacttctacaaagaaaagaaaacgactgaatcaagacgtccatccctgacttatagcgatgactaattcctccttggtattgcatctctgtgtgcctctgcaacttatcgctatccatttcctttttcccaataaaaactgctcttacacgacggcatttgaggtcagctttttggttgctcatttagcgatgctaggttccctagcgacttcctatcttagtgggtgctttggtcgactaagcgatttccctgaactaacgaggcaactgtgatgacgcagttagatgtattgcctttgaattgcttcatcgctctgaatccagcttggctggaggagtgcaggtgcaattgtttggtggccacgggtggtgatgacatcaaggaatatcagatactcagtttttgcttgtagttgtatgtagatatgcaaaaggaagatgtgaaatc

SEQ ID NO: 72490 - DNA, 673 bp, Zea Mays
acggcggctgtcatgccagcgggcatcgcgcgaggggggcacagatgagcaagcggaggcatggtgatgtctcggtgtaggccctcgctgcgctcttaaggagtagtatagatatggtgtcgacatgtggttatttagaccaacccagatttgagcgtaaaaagtctcaagtttgagtgtaaataatgtatgatacaacctaaatgttgattcactcccaacaacaacctacgtgtccacgtaaccaccataaataaagggatttgattaggggagttgattaggggatttaataagttgagatgattaggaaatttgattttttatggcagccacggacaccataaatcaatagatttcctttttcgttgtgctcatgaaaaatatgcatgtgtacactggtgggcgcactccaggttcgagcgtaaaatgcttcacataactccttagttttgaccgtaaataccgagtcaatgtggaagacgtttacaactatgatgtgttagattcattttcgtaaaaatcctaaagtttgagcataaaatagtgttagatacagcttaaacggtgattcaatcccaatcaacaaccaccacgtctacgcagcaaccataaatcaagggatttgattatgagatttaattaggggcgataattgagggatttgaatttt

SEQ ID NO: 72491 - DNA, 602 bp, Zea Mays
tcagaccgtccgcgtatgacgccagacagtccgaatatatgtcagacggtctggccacatggccggacggtccgcgcacggagccggacggtccacatatttaaccggacggtctggcacagagttttttgtgaaggagggatatccaactccgtatctgtcccagctagactccccatctcaccatacgacacaccagcaccataatataatctaccaaacccgtgagagtgagtacttttcggtccctagaaggccagaaaggaatggccagtcctatgagcctcatagggcatgtattaacgcgccgcaaaacccaaaccaatggggacgaaaacaacataccaacatccaaacaaactcacccatattggaccaaagagccggtggtctcccaccggctgccatcgatatagtaagagaggaaataactgtggtgttccgagataagctcggagttagtatagtcccccaggggtattcatatcggagaccttataatagccagtttgaccgtctcccatacccacaggggaccagaatacccgaattcgcaaagttttcgggtgaccaaggaaagagcacgcgtgagcacatagacc

SEQ ID NO: 72492 - DNA, 617 bp, Zea Mays
gtccgcagttcatcggtgcctgggacccctactctgcaattcctggtacgtgatgctcatacgtattcaccttgacccactgtaccatctgcgtgtattggaacataggattaggtttcaattcaccagatgtctatcaccggtgaggggcgcggccgcaggaagaatcgccgccgtggtggatttcggcagaggtaggagacgtgacctggtccgtcgatctgtggcgaacgaataggattagatcaacgataccggttcggctaaatgataggcgccgctggatcgtgatcgtgtgcacatgatgagtggacgacattttaaaccaggatcgtagatttcccctctgaacggttcagattagtgcggcacgtatcccttcgcctcattcggtctgcgccgttgatctcgatcgaacggtgtaagacagatctggggtgcatagaatatccgtcgttgatctcagattcaacgtatagatttacttaccgattcgtttaaattttgatctaatccagaccctcggcgttggatctagcggccaggaaccgtgcataccccttcgaccgcgacaattttgcacataagaccctctgttttaggaaaactaacccgcc

SEQ ID NO: 72493 - DNA, 468 bp, Zea Mays
aaccctagcttcttctgagcttcagatccaagaaaggtacggtatgaccagtactgcctcggtcgaagcaatgcacacacagccacacacggactttctagcacgcatccactgcgtcacaatagcacacactgtggtacgtgtctagaaatgagctcacacacagtggctagctggttgagcttgatgatagtagagcttccgtggagagtagcttggctggttgctacttctgtactacatgctccatgcactagagactctagagtaaagcctcatggcgtccactaggagggttttatagagagagaactgcagtgcaagtgcaatagctagttcagaaaacactaccagtggtggctactgcggtactgcctacagtgccaatttctattttctagaagaaaatgattaaaaatagaggaaaattgaaaaaaagagcacattgctttatttttttagttgcag

SEQ ID NO: 72494 - DNA, 547 bp, Zea Mays
gtgtttgtttgtcacctgctttacgttggtaactctaacaagttcagtttgcacaaaactctctctacctctatctatattacccctatataacccatcgtccggattcaattttgcaaaaaaaacacacccaaccaaatcaccccatcacactcataacctcctctaaaatcactgataaacgaattacatccacacataatttgcccccctcaaatttatcaggcttatctcgtgccgtaaggcagttaggaacaatctaataagttcctagacttatcgtgccccagctctcagctcagaatgcattctgagagcttcatttccgacaagcacaagtacgtttctcacgcgtgatcatcaggctttctgagacgtactcgaattcgtatcctcctcctcatctctctctctctcgtgctatatatgtcagtgtatcactgtcacgtaaaagcctgtttgttacggacacgaaactgtatggttcgttatgattatggacagcttttcagatccctgcgtgcatttgcactgcaccccacttttc

SEQ ID NO: 72495 - DNA, 275 bp, Zea Mays
ttctctgactgctcatcgatctgcttcttaagctcaaccaactctggcttagatactttgtaagctctcttaaagatgggggcggttctaggaagaagctctatggcaaactcaacttttcgctcaggtggcatgcctggtaggtcctttgggaacacatctgggaactcggacacaaccttgataatctcaagtgggtctgcttcactgctatcaatagccatctgataacaacttcctttccttggcttaggcgggactaactcggtcaccac

SEQ ID NO: 72496 - DNA, 534 bp, Zea Mays
gctttttcagaaggaaaaggagccctcgataaggaagaaggtagctgggccgaaaaaatgaagaattgttactgtggcagaagttattgaagggacaccaccgcaagcttcggctccgaaggcaccagttgttgagagcacaacagcgaccaaaattgcacctgctgaagctgtatctgccgaagctgccacggtcgaagatgtacatttagaaagcacaatttctaacattgataagatacttctggacatggccacagaagaagctgccgcagccactgaagaagccgtggctacagtacctgagaaggggaagaaaatagctgaagatgcttcggaagaggaaattttcaacttccaaaatctagttggacaagagttgacgaaggctgagaaagaagagttaaaagaatatgccatatcctgtggatatcaaccaggtgcactactcttcggtggtgttgacgatgaaaagttaggctgcgtccgagatcaaaccggagcgaaggttatcggtactctatcaaagagtat

SEQ ID NO: 72497 - DNA, 371 bp, Zea Mays
cttaagtggaccatttaagcacataaatggcatttgggaaaagacttgggagaaaaatacaaattttggtaaaaaccaaataacaaagttttagtacactaaataaccaacaaaatatagtaagaaagttttgccatttgattttttcaaaatccctaaatcagcccctgaactaatgcacttgggaaaaattcagaaattcagaaatctgaatttcagcccctttccaaagatcgaccgcgttctctggttttcaaaacttaaatcaaacaagtacaaatagcaaagtggcgccaaatttcctggaacacaccatgacaaagtttggaaacctctctcaaccgtttgacacgatcttgacatggatttac

SEQ ID NO: 72498 - DNA, 457 bp, Zea Mays
tacaaatccagctggattaacctagagtgcctctatctgctgctgggaagggccctaccgaggatgtatggccaagctcgcgctcgtgctggtggcctgaatctgtgagagggtgggagtagcggtggagtcgattgcaccattgacaatccagtaatgtccatgtcacttgcctcctctgaccctcatcacgacaacttcgccaaagtcctcgatggttggattgtagtctggcccatggacctcccgtgccatcacgaggtgtactcagtgagacaattgtgggcagtcgggttgctgtacgcctcgggcccatccttgtatcgtaacctcacaagatattaggcccacctacagctgtccttgtcccacggaccttagacagtcatgcagatgcacccaatagcttgacaggaccttctgcctgcatcttcttccacatctcccaagagcgtac

SEQ ID NO: 72499 - DNA, 1338 bp, Zea Mays
cctagagtagggtacttaaccttaaaaggggtcagaagggtaaaacaaaatccaaatagagaaaaccctaaagcttaagtgaaatagtcatgaaatgttactaagaatggacctaaattacattcacacccctgaaataccaaaaaccctaataaggaccctggaaaaccctaaacctaaaccctagggggttaagtgcaaaattagtgcacttttggactaaagtgtaaaaactatgatgttaaggcatataaagtcatttggttcacaatcatgaagatttgcaagctaaaccatgaattttggacctatttgcaaaaagaccccatgggtgttctagggctaagtctgaaaatcagtgatattgactccactttggagttctatatcttccaaaatagtgagaatttaccctaggtcaccacatcaaatttgtaaacctatcaaaggagaacaattttgcttaagagtgtaagcaaggttgttatgaagaatttggagataattaaacctaaagtcaggctgtcaggctgttaaagtctgaatttcagactgacagtgcaactgcagtgactttgggcatgaattcaagcaggattgagcaagaatttgcttaggattgctataacaatattgtagctggatcttagagctaaaactttgctaaagggtgatgatcatgttactgcacaaaatcgggagtaaacagccctgcaaatcgctttgtcaggtgactgaatgggctttcccatggtacagtaacctgaaatggatcagatcaagcactcagctcaccgccgacgatctccgccatgattcgtgttgcctgcgtctcgattcgtgctcggggtaagtgcataacgtctcgggtagaaagatcatcaccgccgttgagctggacaccaatccggctagccgccgtacctcccccttgttcaccgatcgctcgggtaggatctcaccgccgttgatccctcactgccgtccgccgcgtgtccaaacactttaccacatcgcagctaactatgctacgcacgtccgatgatcgccggaggagcagccacggtaattgccacgttgcgcggccaccagtgactcacccagttcatacctatcgcaatccgcgctcctcctccgattccggtcgacgacctataaactgagcaaggattctgcttcttcaccacatcccgcacctcagtaactgagcaatcggctcaatttcaccggagaactcacgcagcccacaaattccctcctccctgttcttaactccgccgtgaagaactccaccgtggtcagcgctcttcgggttagtaacttcccaatttctccctg

SEQ ID NO: 72500 - DNA, 622 bp, Zea Mays
cgcggcaactttgcacagaggccctcggtttattaactaaatcgaagtaggtttgtttactgttcctctgtgccactaacaaattgcagaaatgccctccatcttctttctcttccccgcgaatgcccctgaccacggcgcgcacgcagatcatcccggacgtggtccataccggccatggccggcgatgactgctcggaataactaacggggaggcttcactgacctaaggcgacctaggaacaaccattaaactaacatgaaccctactgggaatcgcttgtccacgatcacggcggacaccgagcatgggagcacacgttcccgccaaacaatggtcgattagagcaaacagacgccaccatgagcttcgcaagcatgcagaggcatggaaacaatactttaattggataggaactcaccagagtggcccagccacgggcgggctgttcttcgcgatgcggcggaccaatttgggggaaaacggcgtcgcagcggctctgggtgaaattgggggtggagattgaggctatacggccgtaagaggctgtgttttcattgtgcgcaatcaatttgggcgaagatggagagtacagtgcgaatttaacttcgactgagcttc

SEQ ID NO: 72501 - DNA, 466 bp, Zea Mays
atgggagcagcctcaaatgccataggcgaggccctgtcacccccttgtttgatgacaacaacacaccttttaaggcgctgcttgagatcaatggcgagtcgcttaaggcatcgcttctccaccttacaccaaacgtcggcaactttgtcctgaccgagcttgctggaaggcaggcgagttgtcatctcaatcaaggggcaaggctctagagcctgtccccctacctggggtgccaaatgtcgaaggggagaatcctctggccaggtggcagattgcacccgccctgatccttagatgaggagtatgcttaggtgattgcctagccttctagatgaacacaagaacataagggtttatagtggttcaggccgccgtagtgtaatgccctacatttactgtgagttgtaatccttgagagccgaggagacgaaggtctgagtgtgaaaatgacctccttcgctatgga

SEQ ID NO: 72502 - DNA, 572 bp, Zea Mays
gcagaacagcccaaaagaagacatacctgttgatttcatttgagtgtcgtcaatgataagaaaaggcaataacttgagaaatgtgaagcgcttacttaaggattgacaaaatatctccgtgcatcccacgtccaacatacaatctaggctggacatagcaaaacattgtgtaaccactaatgatgtgcaatgcttcaagcaaccgtgtgaagacattgcgttcaaaaaaaccgtgtgaagacaaaaaggagggacagacctgaatccaccacatcaggagaaccaacactcgtgaatctgagcgctccatgacattctgaagttgtggcaacaagaaaaacaaggcagcaagaatatccggaaccatatatatgacgatcgcaatgttataaactgattgattataccaatccccaatccaactatttaggattttgccagcaccggatgggtatttgatggaactagaataggtcaatggaagaataattatccaagcaatggcgacaacaaattttagtaaatatctgactaactttgtccactccatactaccccatgcttgtacagta

SEQ ID NO: 72503 - DNA, 342 bp, Zea Mays
ttgcttactagtatgtttaggagttatcggtatgcttagaattacatttgtataatttgtatgacgttgctaactagatttgtatgggagagctctttcactattttggcaccttagttgcttcatttagaatcttttgtcaggtgtttgttatagttagaggagtgtagtcttggctaaaccaaaacaacatttattccatatttatttgtgtcagccatcatagttagttttagaaaggactattcaccccccctctagtccaccatctcgaccctacacctaggcagttggatggtgatcggaaggatccagtgagatctcggcttcattaaatcctta

SEQ ID NO: 72504 - DNA, 462 bp, Zea Mays
caaccacgatcttgttagttaagacacaatcaaagtgtataagttatgtgtgggacagatatcctctagatcttcgtgacacggatatgcttcatgggccgccttaaggcccctaatgggtcgtccatagaacacattgtgggcctcgacaggatgcaactgaaaccaactaaagcggccacacaccgaggcaaggggatatctgaagacacgtcctatgcatgcgaccatgcgcaagcctcgcgggaagccaactgaacttcgcaagactcagcacatctatagcagatgtgggtagacacgtatagatttccaatatgtacaaggttatctcttcagtcggctatataaggttgaagaggggtatccctatgaaacacgggctagactcataagctattttcatcttctaccttcagcaatcacctgtaatcctcaaactcggagtaatacaaccaccag

SEQ ID NO: 72505 - DNA, 508 bp, Zea Mays
tgggatcagcagtcgctggcctcttccttcaacacgatgactcttcagcagccccagtccatgatcgagtggattgctgacttcggggcctcccaaccatacgacacctgattctggtaacatctcccgttttcgttctccaacttatgctattccttcattcatcgttgttggaaacaggtctagtctgtcggtcacctcagtaggcgatacggtgctttctggccagttttatcttaacaatgttcttgttacacctgatatcattaagaatcttctttctgttcgtcaatttacaactgataataattgttccatggaatttgacccatttggcctttctgtaaaggagctcaattccaggaacacaatcatcaggtgcaatagctctgggccactgtacaccatcagtcttcctactgtgcgtgctccgccggctactacacactacgcccttgctattgttgctgctcatgcgtccctatggcaccaacgtcttggtcatcct

SEQ ID NO: 72506 - DNA, 591 bp, Zea Mays
accaggtcttggtgtcattgatttggagttagtgtatatcattagagttagggcatatggttaagatagatatgggtgagatatactcgatggtgtaggtcaaaattttgttcgatgataagtggggatagatagattatgcaggtcattataactctattagttgggttaggtctcatgcatgtggctgagttggtctaaggcactagtttaggtttaagtgcatgaggggagaacaaggtttataggagtatgatccagtttatttcactagttttaacttgttaagtgactcatattagattgcataagatctagattagtataagttgagtgtgttatgtaaaattctagttgggtggctttgtgttaggtcggacttggtaaaatgatgtacatcattggaatcatgtaggtcaggctggaagaatagaatctctctctctttttatagatagattagacaatttatcaagaatgtgtaggtcgttggtatatggccgagttgatctaagtcaccaatttaggcttaagtgaattaggagctcactaccggaatcgcaggctttgccgagtgccggcggctttgcc

SEQ ID NO: 72507 - DNA, 538 bp, Zea Mays
atgccattcaccgtgagaaagccgaagagactcgtaatgtacgtgttgcgctggccacagatgggttcaattcctatggaatgagcgctgccccgtacacatgttggcctatgtttgttatccccatcaatatccccgatgtatgctttcaaagacagaacatattcgtgtcgttgataattcccggacacctggggaataaaatgggcgtgtagatggagcctttgattgatgaattggtccgtgctttggaggaaggggtagggacgtatgaccaagctatgaagacaaacatcaaaatgcatgtttggtaccagtactccatgcatgacttatcggcgtgtgggctattctgcgcttagtgtgttcacggtaagttcccatgcctagtttgcaaggaagctcttaggttcatttggttgaagaagggtgacaaatattcatcattcgataaacatcgataatttctccctcatgaccatccattacgcctagacatcaagaactttacaaaaggtgtcgtactgacagaccaccc

SEQ ID NO: 72508 - DNA, 378 bp, Zea Mays
aaatttcagcgtacttctctgtcttgtgggtggtgtgcactggtaagaaatgagcagtcttggtcaatctgtccacgataacccaaatagaatcatggtgtctggaggtattgggtaatcccactatgaagtccatgcaaatgtcctcccatttccaagatggtatgggaaggggttgcaaagggtttgctgccttcaagtgactggctttaattctccggtaggtgtcacattcggatatgtacttggcaatttcccttttcattctagtccaccaatatagagatctgagatcatggtacatcttgttgctaccagggtgcatagagaatttggaaaggtgagcttcatctagtatcttctttctaagctcagggt

SEQ ID NO: 72509 - DNA, 741 bp, Zea Mays
atgaaagaaacccatggccaactcactggtaaaccatagcattgttgtaacatagtcttggctgacgacacatttagtattaaagctcaacaatcacaaacagcggaacaaatcatgcaaaaagatcatacatattccaagtaacaaactgtgtgaaccaaagatgtagtatacatagcccgtccctcacaaatccaggtatctggaacccatcccaacacagacacacgcaccagagtaaaaattcaccaaccacacacggattctgcaccgaatgacagacggtaacacagttcgtgcaaagaacaaacatcctaatgcagacagcacgagggggtctagcagagcaaacgtggacttacggagtcacagacaatgtctacggggcgacgggcagcaggagcagaccacacgctgccatgacgacggtgggtgcccaaaccaaagtggcgaacaactacaaagacgggctagagaagctatcggttccaggacctaataaggcgaacttgaattgaggagagagggaagaaaatattaaaggggaggaaagtactcaccgtcgtgcagcacagagcgcggtgctgttttcagccatgcctgtcactggtgaggcatgggagcgagggagatgactactggtatggcaacgacggctacgcgcccacccgctctttccttacaggctgcacatggacccgcacggcgtcacggaccacataagcagcgtcatccgacgac

SEQ ID NO: 72510 - DNA, 544 bp, Zea Mays
ctcaataggctaatatctctatatttatatacatggcttaaccttttatatgatgtagtatccaactagaatttttaaattgatacatattgttataaaactaatatatgatttaacctagtaagaaatctatcgtacaacctgctaaaaaacctgtcgtacaagaaaaaaatagtctagacatatatcttaacatagtggaggaattaagaagagttttgaaatttccatgacagtgaggaaagtgctaaattttgtgatgccgttaaggggatttgctccaaaaacttctccgccatcaacggtcatcagcaaaatctagtaagggcttgtttgagagcaagaatactgtaagatagaagagattaaaatccttgttggacggagatgccaacgcaaaagctcttcaattagtggaaaacggaatatacaggtagaacccattcctttcagccggaacaagagagagttgtcactagggatgctgaacttgaaagtatatcacaagattttacacatagttaataagcaaaatcatacacaa

SEQ ID NO: 72511 - DNA, 600 bp, Zea Mays
cgacgacggagcgactagtaattgctcaccggagtgtgcggggtaccgccgagccgcctggacgcgtgggcagggccgtcaccgcttcataccgaggtaatgcgcccaccaacggattcgccttgacctcctctacgcgtagcgctagggaatcgaaaacttgacagctgggcatgtaggttggggagctccagccatggcacttcgccgcggtgagcacgccgtcgggcttggaggtgttcggggaaggaggacggtttctgaccgtcgatgcgcgatgtgcggctcagatcgaatcagacgtagggattaggctggaactcaccgtggtcattgatctcgacgtggacggttacgattagactcagctcttcccctttggttattctgacccggaccgttggatctatcttgagcggaccggattagatcgtggataagctatttggttacatcggacccgggccgtcagatcccgatctagcggttggtgctgcataccgattgaaggttttatctggtgcaccggatcttgatcgtgcggccctggatgctcggtaccccttcgtcgtacctgttttgcataagagccctcctagt

SEQ ID NO: 72512 - DNA, 859 bp, Zea Mays
ttcttcttctcctcgacaggtgcagtcggcggttcactcggcgtgaacgctttgggtgggcaccttcggtttctgaatctccacttcttcatcaaattcttgcccagtcgtgatagccatcggctcggtgtgggtagagtcagacgactccccagccagcaggctaagcacgacatccatctcggcatcgtcagtactagctggcatctcaaagtgggttagcctctcagccttgggaagactccaaagtggagcaatcaatgcctcaatgtcctcaggagagggtcgcaatctatgacccaggctaccatcatgagcaggagggttggagataaactcagagaatggcctgtttggcggcaggttccatgcggaataggccacaggagcaccaacatttgagactctgcccctcaagatcatgtccagtcggctcagtagatcttcattgggaatcctcttgttcgtaacccgagtggagtcattgacacctctatataagtaagcgggataaatcctattcttcaagggttggatattcttgaaaacaaagtcagcaactacagctttagtagtcagacatccatccttcagcaagcagatctcggcaagcagtactttggcctctattatctcttaaaaggtaggagattctacccaactaggtgtacgaacatctggttgcctccccgatcgaggagggagagagttgtagtggttttccacgatgaaccactcaaggcgccaccctttgatactgtccttaagaggaatatcaagatactccactttcattccccagcaaagctctagacttgcgccgccaactagctggtgctttcccccagccatcccggtc

SEQ ID NO: 72513 - DNA, 1271 bp, Zea Mays
aaaatagctgagaactacaatacaagaaaatagtttagaactagaatacaaccgtcatcacgaatagtctgagactgaagtactcaaccattgtatgcttgcagctagcaaattgcttcacacatgtttaattgttcatagcagactcatagcagctaatcagctatcaacttcatagcagactcatagaagcaacttcatagcaggaagccaacaagccctccaaagtagactccacaatccatgcggccacgccattgcagctagcaaatgtaaacaacatatacttcacacattttataaattttattgagaacgaacactcacaatgcaactagttagcaactaggatgtgctttggtgtgtcgacttgctagctttgcttgattgtgaccatgcaacagagccatcatgttcttgcccactacctctgtgtttgccttttcccttttcaccatgttcttcaatcaactctaaaagtgtggtgaaggcattacacaacatgcgaataatatcttaatttggattagaattaacctatacaactataaagtataataaataagatgaagccatggttacctttttctaattcagctaattgctccatgtcctcctggatattaattggagtggtccttcgcagccaatcctgagtgtaaacaagtgcttccaccatgaatggagtaagagatgtcctgaagtcatcaaggattcttccagacgtgctaaaaactgattctgaagcaacagttgacaccagaattggtagcacatcacgagccaagcgtgctaataccgggaatcttgaggaattcaccttccaccatcctaaaatatcaaacttattatcttctggttcagtatcttcagcaaggtatttttcaagttcagatttgttgttgccaccgccatagttgtgttgttttagttattgtgcaattaaggacttcatcctcccgcctttggactgtcttacttcttgagaatcattggttggtgttgttgcatcaggtggagcataaagtctcctatattcttcaaacaattgtcgaacacatagtttaatagcagcccaaaccttatgtccattttcctcactaaacatctcttcaatcactagctttgtgtattctgatagtttgtatcttggatccaaagctgcagcaacaaaaattagcatgttcatattctctttttctttctccttccccttccctctctcattcacatttctaccagtttcgccaagaggttcatgccagtttccc

SEQ ID NO: 72514 - DNA, 737 bp, Zea Mays
ccctaaatgtcatattccttcgtcgagttcttaaggataaatctggaggtcaacaaatgagtttcatataaatctggatatcattgtgcacatcaaataaattaaatagagcatagaggactcaaaaaatgacattcggagtggccacggtagtaccaccagctaaatccgaagcaaaacaagctacacaagttttagatcctgttataaagtacatgatcaaatggattggtccatcttaactaaaacaaagtttgtgttaggattattatcatcgaatagtgaaattgtcctaaatagaagaatttacgtttcaggtgaaacactttgattgcttcttcgctgataccagatcttagaagcaaaccgctttggcttcccgcagactaataaattaagaacaaaactttcctctgctgaacaaacccccttgtgccaggatttcattcttatgtgttcccacataaaaaatccaaccaacaagtttatagtttacagtagtagattacgaataaataaagtcaaacataatttatataacaaaatattcagatctaagatatgtatgaaactaatgaagagaatataaaatagacagaaacaattgccaaatactcccttcattagtttacgacgaggaatagcaatgcttggctacaacaaaagtctagcgtacaaaataaggagcaaccaacgacaggattcacaaatgattgaaaatgctgaccagaaccttg

SEQ ID NO: 72515 - DNA, 325 bp, Zea Mays
gacaaggtttactactttctgcagtgccatatcaagaaggtgagctgcccaattcgattatcatcctattcaaggattatagatcattactattaaatacacaacacatcaaaagaatagtgtgtggatatagtggaaatgaaataatcgtatgctctttataggtgtcttgaaactggctatggagatctttgcaagccatggttggagatctaatgttagattagaaggtgtttgattgtccatgtgttcccccttgggatgttttctattgttttacggtggatgtttgttattttccaatatgcaaagctgtatgtaggag

SEQ ID NO: 72516 - DNA, 416 bp, Zea Mays
gccagactagcacaataagtgcgcaacatcgaagtcttttccaaaaagactctccgtgcaaaagtcgcctaagggtgcagccggaatgctaggcaagcaaaatcgaagtcttttctaaaagtctccgcgcaaaagtcacctacgaatgcagccggaatcataggtatgcaaaatcgaagtctttcccaaaagactccgtacagaagtcacctacgggagcggcctgatcaatgaaagcgtgcagcttcatcacacaaaattatggttacgtacacacagcgagggcatcacatattacatcggctcaaccttcgggatgatacccatctccctgtagttgaacaacactatcctcagttcctcaccctcaaacaaatttcgcagctccccctcacccacactcaacccaatcggcg

SEQ ID NO: 72517 - DNA, 362 bp, Zea Mays
cgcggcctgggtctgtgtgggtggttgcgttgcgtcccgatacctgggcctgacatgtgagccccgcgcacgcccttttgtcaggatcacgaggagtagacagcgtgcgagcactacacactgatcacgacactacttaatcaaggcactactattcgcgtaatctgatccgggtcgccacccttgtatcgggttcgggtctggtggattgggttgggcttcattccgacctcggattccgcgagagcaggagcaacggcggagtaggaaaggaagctgaggacgaagccaaaacgctggctgcctccgccgtcccgtctgtgttgtttgcgtgtcgccctcccatagtcccacactcccac

SEQ ID NO: 72518 - DNA, 409 bp, Zea Mays
gtagaacatcagattaatgatactcataaactagacatgtcatacctcactattactccttgaactttatattttgatggatcggtttgcaatgaagggcaaggaattggcatcgtacttgtttcaccaagtaatgtctccttcgacttctctagccgattgaaaacttgttgcactaataatcaagccgaatatgaggccctcctattcagcttggaacttctaaatggtatgggagtaaaacatgtgaaggtatttggtgattctcagctggttatccaacaagtgttggaagaatatcaatgttttgatggtactctaaatagttaccttgaaaaatgttggagcataatccattcttttgacgaattcagtattcggcatatctctagagttgagaatcatagag

SEQ ID NO: 72519 - DNA, 368 bp, Zea Mays
ggaaacaacagctgacaggggtcgggttgttgcaaaagtccgacgggtatcatagtgagagtttgttacaatggctcagagtttgttacgatcatgtggatgagttcgttcacgacggaggagatagagctgccatgtgagtcctgtaggtagtggcaatgcgcatggggctgcaggtgggactcacctatcaacgcttattgtggagggctggggagaggatggctagcggctctcggcccatatggttgaaacggagaagtagaacaagtcaaaaggagtgggttgggccgaacaaggtagagttttctgtttttcttttgtattttcagtttcttttctatttaaattcttgatttgaattcaaa

SEQ ID NO: 72520 - DNA, 349 bp, Zea Mays
tctttcacggtggcggaaatcgatttgggggaaaagagcaatttgtgggctcgggtgagtaattgagggcacaagcggttggattggatgctggattacctaacggagctgacggtgtgctcaatttataggatttgggggcggtgacttgtgaattggagttggcgcggtggcggccggagagaagagttgcactggcgcaagcgattagtggctttcaccatggcgggctcaccggcgatcatcggagatgcataacgcgagcgacttcgacgtggtaaatgtcgaggcacgtggcgcagggctgcgaggtggccaactccgacgaacctatctccaagcggccgtg

SEQ ID NO: 72521 - DNA, 600 bp, Zea Mays
cttgccctcatataattgcaaagaggactgtaccttatgatcaaataagctcaggtgctccatcactgaattttcagaaagctcaatctctcgaatctcttgtgcaaacaaggcaagataaagcttatgacaattccaccttttaattattgacacttcactgcctggacgaacccactgtcctgtagcagtaatgtgcaatacaggatgattctcacatactccatgatcaagagcaccatgtttccatgctaaagtggcctccagcattgtttcggtgatttgaatccatggatcgaatccaccttgtagacaagatgatactgcacctagaaataaacaaccagcttctactctatacatcccagagctaatgtcacttatccatggtgggatcgaattgaagacctgtgtagtggcagtgaacacttgcttgacaacccaaacgatacaactcttaccaaccatatttcttagaagctgacaaaattgtgcacgcagatcatgttgctgacgctccatttctgttaacttgaagttcaggttgtctcttttatgtctagctaactacgactccattggctcaacaaactcagcaag

SEQ ID NO: 72522 - DNA, 552 bp, Zea Mays
atcttctccatggtgactctattgcactttgcacatctttatcactttatttctggtaacttgattcaaagtgtcaagaatcttgataggatactccatgtaagtcagatcaccctaaacactgagttcttccattggtaactgctcttcagggacacagaggcacttcttgagttgtgacacgtggaacacatcgtgtacatcagatagatgatcaggtaactcgagttgataggccatctccccaacttgcctaaagattctgaagggtccaataaagcgaggggataatttgcctttaactttgaatctcctcattccacgaagtggtgacaccttgaggtacacatgatcaccttcctcaaactccagtggccttcttcgattatcagcatagctcttttgcctagtctgtgccacctcaagttctcccggattatacagacttgttcttctgcctcttaaataagttcaggcccaaagaattgtctttctccagtctgatcccaatatagaggagtcctacacttcctgccatataaagcttcaaat

SEQ ID NO: 72523 - DNA, 456 bp, Zea Mays
tgtaatctgttatatgataacctcaattttgatcatctttggtcttgatcttcaacttggagtaccaagataagtgccaaaatatttctcaacaaatatccttgtaccccttcactttccatgattatagatcaattaaaaaccaaactatggtctctcaaacaactcatgtgatttatcctatatgagagccttccaatcaaaaagtgactttcaatatttcaaatacttgtcacttatgacagattttgtatactccaaagaaacattcataaattttgatgtacagatcctatgaccacgaaaattggtggagatgtgctttaataagtctgctaacagctgtaaaaagttgagactcatttgacttcatatgtgctgccagccacaacatctcccacaataggtacatgctgaaaactgctgtgtttgtgttgacaagattgacttaatcaa

SEQ ID NO: 72524 - DNA, 520 bp, Zea Mays
agttgaatgccacgactattaaggataaatttccaatcccagtagtagaagaattgctggatgaactgcatggggctcaattcttcaccaaattggatttgcgatcagggtaccaccaggttcggatgcaccaagcagatgtggaaaagacggcttttcgcactcaccatggccattttgaattcctggtcatggcttttggactgtgtaatgctccttcgaccttccaggccttgatgaatgaagtgctctctcagttccttcacaaatttgtattggttttcttcgatgacattcttgtgtacagtcgaacctaggaggatcatctacaacaccttgcctcagttttagcttagcttcgtcatcatcagttgtaccttaaacagtccaagtgtgcctttgctcaagatacggtgggttatctcggacatgtcatttcagccaagggtgtagaggcagacccgaacaaagtgcaagatgtggatcgttggactactcctatgtcagtggcagatatccg

SEQ ID NO: 72525 - DNA, 322 bp, Zea Mays
gggtgatccagccctcttctagctaatctgtcagcggtccagcacctgttgtgcgcaacaagccaaagaaaaaatctacatttaggcggggcccaagtcctccacaccctggaataatggcggaaaaggtagatcccatgaagaatccttcgtaagccacttttgctgaatagataccgtctggggcaatactgaaaacatgtttgtcttcaatagtaggctgcagcactatctcagacataaggttccaaatctgaaggtaatccaccaaaactcccaccgagagggcccccttaatatctgagatccatcttctatttag

SEQ ID NO: 72526 - DNA, 693 bp, Zea Mays
catgggggttcagacagcatgcataggggtctgggtcccacctgagagggtctggacccatggtagtggtcccaaagcacttacacccctggtacacttggtggcactgaacttgccccctagtgggaagcaggtcccatggccaatggtctagtcaaacgggtacatacacatgggcccaactgctcagttccttactacgcggttacaggtaaccacacaagtatctagccttaacacagtaggagagggtaccccagttatagagtactgacatagggccccgggccaacctcaggagaggttacgaatcccactacaagcaatctaattgcgactagcacacagcggtgccacgcccactatcacgcttgttgtcagatcacctgttgccacgcctgcagtcacatatgtcactttggctcactgacctatggccccttgcctagttgtacgctcggtcatgcatgtgatactcgttaccactgtagccgtaaaaaatgttttttccaccagtggttcccgaggaggtactcaatgcccacgttccgcatgcacgacggttcagatcctaccttttcatacccgctcctgctacccgcttcatatgaccagcgggcccgggcccatatgtcatagtctgagtggctaccacttggtgtgcatgacccttgaagttccactcaacgcctc

SEQ ID NO: 72527 - DNA, 682 bp, Zea Mays
atggtcacgattagaatagggaaaggaagcgcaggggccgttaatcgatggttggacggcgcagattagatcccaggtgtcggttcggccagaagaaatccaagccgttgatcgatggatggaggggcgtgaggtgatcctggcgttttaaaatccagggcattgatctcagatcctagggctctggatgcgtaccccttcgtcatctaatcgggactcttgatctttgatcgagcggccagggcacatccgagttacaccaccttgacatttttccaatggagcccctcgtcttttgcgtaatcaacccgtcgtcctatcctagtataaagtaattgcggccgggcccctggtttttgcaaatcggcccctgtattcttagaaattgaaggtcgcggtcatgaaaatttataaaatgaatataaaaatataagaataattccctaaactttggaaaatcatatctcctttgttttaactccgatttaatctgtttcagttgcgtttgcttcataaaaatattttctacgcggtagcaacgttatttatactatatcacatacttttataattaagtaattgattaccattttagtagtagatttactttactaatcaagatggacatgcctataactataatttgactataatatgatttctaaaacaaattataatctgg

SEQ ID NO: 72528 - DNA, 790 bp, Zea Mays
cgcatcactatgactatttggtgacactatagtgcctaaggaagcatgagatggagcgggggtaccatatatgggaggagcaccattgatggtagggaatgtaggaggagcaccataagggggaatatatggagattggagaagaatcgtacggggcacatagagaagtgtatggataccctacgagtacataggagggtatgcatgaaagtttgtgaaggacagacatcagtggaaggggcttcatcagtgctaggaggagtgtcagtggttgaagacacaatagtagaaagggcgtcaacatttggtcagtaaggatatagagaatgatacgagtaagaagggagaggttgaggagttataccgtaatgacaaacaagatagtcctcccaccgatggtggacagaagaaagactgtaaaaaaaaattgtccacacccacttggatattaggacgtcgcgcttcatattgctattagaagaattatttataggctattcatcattctcaagctattatgtttttcggcagtggtttcccggaattacaatatttttatctttcatatctcttttctccataatataaaatcctaatcatatggaacgggatatcagatcgctgatttgtagtaatatacttgcccaaggaaccaattcgcatggtttgaagtttgaagagacgagaagagagcgagcgaggaagcgagctgagcctttctcccaggcggccgggcccaatccaattacccaactgcggcttaggcaggctccaacaagaccctctaaag

SEQ ID NO: 72529 - DNA, 633 bp, Zea Mays
gaaaaagagatttgggcactcggctcggaaacgatcgctcgaaacggggaatttggtgaaattaaagcctggaatctcggattggcgtgaaatttggcaaatatgttactggaagtgttgtgaaggtgcctgaaaaatttgggttcaattggagcatttttggctggtttgggcatttcaccgaacacgtgggggcggagttttagggtttcggggaaatggccatttgaggtgtgaaaaccctcccgaaggagctaggaacctgcaggaatgttcaagggccacaaaggaacacattgtacaacatggattcattgggattcacaagatttggaattgggcacaaagggtggaaatgggtgcttcactggtggcatgatcagagagtaaagggggaaagagagagagagagagggattcgcaccagagagagatgatgcacttggaggaggtcgccggagagcagatcgccggagaggagaggtggtcgtcgacgaggggtggagatcgccagagaccgagagagaggggcagagaacagagaagtggagagtgcaggcctcgggcgcgagaggagaaaggttttttaaaaaccggatatgggcgcaccggacagtctacagtgcctgtccg

SEQ ID NO: 72530 - DNA, 406 bp, Zea Mays
caaacttctagcaattttgttgtccgtaaccaaaccaacaagcttggtggcttcaccctcaacttcctcgacgaaacccccacctaatctccctcctaaatccacaaccaagggggctttgcacctgcttggtcaggttcgatatatcacgatggtcatctcgccaacagcctaatcacgactcaacgaccatattccacatgccaggtattctttgacaaggtcccaatccttgctggcaactgtggcatacccaaatgccttctcattcaaatcatcatcgccccacaatgaatcgagggaaggcatcgtagttgaacgaagtcatttcactcacttgtggccagcctgtggcaccttagccttctccaccccgtacatagaaccaaaaatctgtccaacttcc

SEQ ID NO: 72531 - DNA, 497 bp, Zea Mays
cgcaggagatgcagcatttggggtattttggggatggtgtagggcgcactccaggagccgaagaggtccctaagacggagggggagttggttgctttttaggcattttttagtgtaggacttcgcttgcatgtacatcagtttgttgtcaaagtgttgtggcgcttcgaagctaagattcatcaccttacgtcaaacgccaaggtggcactagcgaagtttgtgtgggcagcgacttcgtatggcggggagcgcttggtcgaggtattcgccaagaattattgtcttcattggtagaagaaggttattggtggcaagattacatagtttggtagatgcactttcatgccgaggactaggaagacttcgggtgaggttgtggagctcgtgccatgcaccaagactaaatggggggactagtaggatttttggttttacttgatgttggaggacatcgaggggcttcccgggctgcatccgtctatcttttgttcgcag

SEQ ID NO: 72532 - DNA, 357 bp, Zea Mays
gtcgtcgtgtattttacatttgcacccccaacttgttgatagtatatacgtttacatacgtacgtacacacctacctttctttccttttactactaatacactcgatagtgctgtatacacctatctttctgtgcacagaagttggggtaatcatggcccgcaacaggttggtaggagcttcctgagacactccgtactccgcttcctttttgttatgcacgtcgatccagccacatgtgtaactcgatcgattcacaggcacacaaagggatggttggttcatttgcgcgcaggacttgtaaattttatatagatattttgctagcgcacgtactaggcatagaaatggatgtaga

SEQ ID NO: 72533 - DNA, 378 bp, Zea Mays
tagctggtatcggagcgaagcccatttctatgaacattatttagtgcttcaaaagattttaaaatacttacccttgaacattctttcattcttaccttgatcctttcttatagcaacttatcttttgaagtcgggtaaaagagtgccaaataataagttatacataggaggtatgggatcaacaagtggttgattccataatcgtagttcatgcatgcatcatattcaaacaatactaagtaatctccccctcttatagagacatggcacgcacaaagactacccagcgaaaggcgatcgagcctcagggtgtacctcggcaccagttggctcctcgatatgaggggagcagtagcaggagtaatgatcccatagggg

SEQ ID NO: 72534 - DNA, 1074 bp, Zea Mays
attctttccggctttgccggattcgctgtttttaaaattctcaaattcggcttggaaataggacttctcattttccaaacatttattctgattttagggcaaacttgcagaaattccagagaacgcgtcattgcacaaaaaaatctgaaacttggtgtgttatcttcttatgtgctgctgcaaaatagaaaaatataaaaaaatatttgaaaaaaaacgcaaaaaaaagaagggtagcacataaccagaaacgctagtgttctgtgcacctctgtgattattttgccccaagcctgttttcttgctgcacccatatacttatacctcctttcttgtgccttggtccagctgttctattacattttctaggccagcaattaggatgagtacttggaacacttattcagcattgctatctgttactgacttgtgtgccacatatatatatttagtcagccttcccagaactccagctttctctcgagcagaacaggtactcctttgcaatcacaacaacgctcgttggacagtcacaccggtcaccgtttgccacctgcagtgctggtaagaacgttgtaagagcggggtaagacgcttcataatttgtattccaccaccaccaccaccctgagagatagttgtagggttcattttgttgcctttttgtctctgttttgtgctaacaatgacaggaccaaagaatcaaatggacaaggacaaggggcctaagcttaacaacgatgagtgtgtctctcagctggaattgaaggagatgatgcgcgcgatgactgaagcttttaaaaaatactaggactctgcgacgacatcctatgagcagcttgatcgacgagttgctaaacttgttacacgcatggatgtactggaggctcgtcccccaccaccaactccagccccagctcactctcctgtggacgacgacgacgatgacgacgatgtttatgcaccactgcgacaacgcctcgcacgtaatcgacaaggtatgggaggtaatggtagacgtcgtcatcataatcctgaaccataccatgatccatttgctaagattaagttctc

SEQ ID NO: 72535 - DNA, 547 bp, Zea Mays
ctgtctctagtgagcctacaccgaagaggaagaaagtgaaggtcctcactcaccgaccacgctacattgaaacggccatagtgcctgaatttggtggtgagacctcttcggctaacgaagccaaagaaactgcgcttatgcagaagactgaagagccggctgcaacgccgaaggcaccattggccaaactgagtgagccgaaggtcgagagaacaaagatatcagaagttacaagtcctttggcagaggtgacagtgccgaaggcacaaaaagatcttacagttacccctaagaggaaaaggatggtccacgtactagatgtactggaagaaataaagacttcaagctctactccagggaaaataaccgaagcttcaaaaacgcaaattgaaataaagcaaactgaagccgaagttgcaaagagtcatgccaaacccgaagctgggccctcagagcccgccaaaaagaaatccctggaaattggagataaagaaacggaaagagaagcttcagaacaacttctgtctgaacaaactgccactcccac

SEQ ID NO: 72536 - DNA, 682 bp, Zea Mays
agatcttctagatttggcttgacttccaggccaccgttgtctcccagacatgcatttagctgagctgtctcttccttccaatcttccagaaagtttgttcccttaaccccgaaaggtttccggctgagggcgtctgctactacgttggccttcccggggtggtagtggatttcgaggtcgtaatccttgatcaactcgagccaccttctttgacggaggttgaggtccggctgcgtgaagatgtactttagactcttgtgatcagtgaagatgtggcatttgttcccaatcagataatgcctccatatttttagggcgtgcactatggctgccaattccagatcgttggtagggtagttctgctcgtgcggcttgagtaatcgggatgcataagcaatgactttctcattttgcattaaaacacaccctaagccttgcttggaagcatcacagaagatgacaaaatcctggtgtatgtctggtagagtcaagactggtgcggttgtaagtttctctttgatgacttggaaactttcttcacgcttgggagtccacacaaacttattgtcttttttgagaagttcggtcaatggctttgctatgctggagaatcccttgataaagcggcgataataccctgccattcccagaaagcttcgtacttcactgacattggatggtt

SEQ ID NO: 72537 - DNA, 522 bp, Zea Mays
caatctaaattgttcttgcataatgaagaagcaattaaattcatttatagatgcccacggtaagtaaatttaaaagacataacaaactcacccaaaatgatgaccacactgcgtcttggtgagtatggtcgggtccatatggtttgaggcccaagtgagctagtgatacgccctatctgtgccccgttgaattgtaccacccctggatagtgaaacgagctatagatctagcactgtgttaactggtgtccggtgacctttgccactccatgccacctccacccagctcctctctcctgaagggtttatgaccctacgttggtctaagggttgtgtcggtggaactctaagggaccaccgaaacctacaaaattgtaaattgtgcactggtaataatatcaatccaacaaaaaatagaactcatcgtggaaataaaaatacctgaagttcgttgcctgtgtcgttgtaacaacctcgtcatcggcctctccatcatagtcctccccatagtaatcatcatca

SEQ ID NO: 72538 - DNA, 1012 bp, Zea Mays
ggcaagcatttgagccttaccacggtaaaaattgtcatgtattgggtgcttgatctcttgcgatttttacttcctctctactctttagttcttacttcattattcacttgtaatattgctcaagttcattccacaattttgtgagagcaatcaagtgcaagaacctctccttctcctcaccctaacttgatctgtttttgtgctaacactaattttggatcaggtttttgtttaatttgtgttttttagggatcacctattcaccccctctaagtgactatcacggctgaggggtcggggcccttagaagccgacgaccagatagtggtccctttagtggaggaggcgctaaccttagagcagtaggggtgccatccctagatgcggcgaggcactaaccctaggagtgacaaagatgatgacacttagagaacttagagatacgacatcccttcaaccactgctctgttaacataacttagacccaacaggcccaatctgattatggtcatggagtagtatgtagtgccatgccttcgatcatgttatagtgtcgaggatgtcctgttgtagtggcagacttacatgtcatagacatatgtatgacatgttgtggcgacgagtgctaaagttcatgccattggtacgacatagttggtaactggtgtagtagtttgtacttataatactccctggcacacttcgcatccaagcgtggctacatggatgatggcacttattgaatagtggccttgagtatgtctgcctatataattgcagtaatgcatccattagattacaacatcactcatcacacttaatgtgatgtgcaagagccttatccactatgctaccgtcgggagtagactttgaacatagtctcatacctttaggggttgtcttgccattaggccacaagctagttatattctttggtcttgcaagttctaccatacttagcattttatgagctcctttgttctcttggaagatcttagggccatgaggacct

SEQ ID NO: 72539 - DNA, 346 bp, Zea Mays
ccaaacttgatgaagcctcccacaccaaagttcatgttagagaagtactcctacgtgtcgatcatgtggtgggtggcatattgagatactagccatcgatcttgttgatgctcgaaccattacctaggaagatgtgggcacatgactcaccaaggtggagaatagcagagcaaccagtgtgggagggagtttaccttgatgcccctgagtactaggaatagaaccagcatgtcactctcatgtgtttatgtgacatgtgcatgtcaattacctcctcgatcatcacctcaaagaggtctagcaatgtcttcatcactaaggcaacctacatgcactttttatggat

SEQ ID NO: 72540 - DNA, 861 bp, Zea Mays
gaagtcatagaagagccagtggcatgattacaatgaagaatggagttatgtcaaggcttacatggggtaaagaagaggatattgccaagggtaggataagtaagacaccgccctcaaactgggataggatattggagattttagagaacggacatagtgtaattaccaaggtaaggtcgagagatgagaaaagtaaagataatacccaaccagagtacaaggatggagttgaaagctcgcaagcgacaaggaagaggatacaaccaagggaaaactaggtaaagtacaatgctcagattgagatagtaaagaggatattttaaagactggtataagataaacatcaaggtaagatatagaggtgataaggatgaaggtgctaatggtgaaaaacataatccatggacagagttaagaaaaaaatcgcaaagtgacgaagtggagaaaacaaacaagggtaagataagtgaggtcccgacagaagagttgaagtaaaaattcattaccgaaggaagttacaaggaattaacgagatcaccaaggatgcgcgaaataaaatgaatgctcatggatcatcgagaaacaagggtggtcaagggcgtgtaaaatgaaatatcttaaatagaccttgggatataaaggtaggcataaaaaggatgagagtatgaaagacttcaaggagatgagcataccaataccaagagacaagaaattgctaaaagatagtgacttaacaatagaagaggaaagggtctcaaaagacaggaagatcatggacatataaactgaaatgcctgagtaggcagtagaaatttagagacaagtattcgaaacaagagtatcaaaggggtacaagcatgt

SEQ ID NO: 72541 - DNA, 721 bp, Zea Mays
acacccaaatggagaaaaccctaaagcttaagtgaaacagtcataaaatgttactaggaatggacctaagttacactcacacccttgaaataccaaaaaccctaaaaaggaccctaaaaaacctaaatccaaaccctaggggcctatgtgcaaaattagtccacttttggactaaagtgcaaaaaccttgttaataaagcatcttaaatgctatggttcacaaatatgtagatttgtaagctaaaccctggattttggacccatttgcaaaaaggaccccatttgggttctatgctaagtctgaagtcagtgttataagctcaactttggagctttataactttcaaattattaagaatacaccatagggcaccacatcaactttgtagatctattaaaggtgaacaactttgtttaagaggttaagcattgttgttatgaagaattgggagataattaagcccaaagttggactttcaggctgtttgaagtctgaaattggattaccagtggctttgagtcatctttggagctctacagatcatgatcttcaaagaatttgcccgggatcactataacaaagttgtagagctattaaagaggaatagctttgctgcaaatattaagtcttggtaccatatgaaaattggagttactttggtctaatgatgggttgtcagacacagtttttctggattccatggtacagtgcctgaacgga

SEQ ID NO: 72542 - DNA, 438 bp, Zea Mays
cgtcgtacccacttgcgctgcgacgtggccggacggtcctcgccatggagatcgccgttcaccgcgattgcgccacgccgtaatcaattcaccacgtcgtcgcaagctgcaaggactcaatagtgaccgccgtagacagttagccagggagcgccacgttagtgacctccggtgactcttcccttttctcaccgctcgcgcttccccgtcaaaattcgccctcctggtggctgtcttctattaattgatgccccagtttgctctggtaggttgttacgaagccagagcaccagccctcacctccgattagccaccgtagcgccctaattccgttcttcccccaaatcgaccaaaatcgccgccgttagcatcacactgtggccagccatccataggttgattcatacttctctgattcgtgttctagcatcctttgag

SEQ ID NO: 72543 - DNA, 829 bp, Zea Mays
tggacgccactccggctcgccgccgtgcctcccccttgctcaccgaacccgtggacaaggttctcaccaccgttaagccatcactggcgtccgccgcgtggctctacatttccaccgcatcgccgtgactcactctagctccccgttgatcgccggagcaattgccacggcgctggacaccaagccattgcgcaagtaaacttccccttcctccgaccatcgtgcgtcgtcatccaaaattcccggccgccgctcaagtatcctataaattgatcccaccctcagctccgcaagatcatcatgcacccagccgcccattattgcccccagccgatcactagtgtgcccgaatttcttgtttcccccaaaacagttttccgccgccgtgaaagcaccctcgccgtggccagccctccacaggtctgatcatgccctctttgttttcgttttagcatctttgtatgctggtgatgctcaccaacccgcccaattgagctagacagccacccatcgccgggaacacgagcaaatgtccatagccttcgttgtcctcatgggcagagcggaataggtcaccaatcgtgcaattaacttaggggaaatgctcggagggggtgtgattcggtgtctgccactcgagagcaccagtccttacgtaatccgaccggtctaacctcgccggtgatcggacctccgccgtgcgacatcggggacgtaccactgtgaagaattagaagtctgggggtctttctgcaagatgtcagcgactcatagcaatagtgcggcgaacccagttctagttagtcaaaaccccgagggcctttctgca

SEQ ID NO: 72544 - DNA, 272 bp, Zea Mays
cccacccatacccacacctatctcgagtttatgtacccacgaagaaatccatacttatttctatgtgtgtatatagctttttaggctatctccaacatcctttcttttgaaatgtttgggacccataatgacatcaatgtattgcaacggtctcctgtttctgcaaggctagcagaagagcaagctccaaagataaacaactatcaatggtcaagactacgcagtgcgttattattaaatggtttatatctttcatggatgacatttgtgaa

SEQ ID NO: 72545 - DNA, 795 bp, Zea Mays
tagaaatcgaaaaattttaggatgaaccatattagaattgaagagatagtacaattttatctacgccataataaatgtctagtgatagataaaattttcccgaaccctaaagagttaaccataaccctcaaccctaaacactaaacaccggaccccaaaccgaaaaccctaaaccgtaacgcccaaaccctaaacatcaaaccctaaaacctccgaatgcttacacctatggattttttaccattaaatggtctccactaaaaacccaagaatgtgatttgtgtccaacccatattaaaatggaaaccaagtaatactaaaatccaaagatcataaagaattaagggcaaatcatagtaaaattctagagatcgaaaaatgtataaagacagaaaaaattgcccaaaccctaaatccttaaccctaaggacaaaacactgaaccccaaacccctaacttgaaactctaaacgccaaaccctaaaccctatgtatcgaaggataactcctatggctttttgaccattatggtctctacaaaagacccaagattgtgatttatgtccaacctatagtaaaatttaaccaaaagagtagcaaaatctagaaatcgaaaaattttaggctgaaccattgtaggattgtagagatattgcaatttatccaggccacatcatatggctagagatagataaaatttgcccaacccctaaacacttaaccataaccctcaaccctaaacaataaacaccagaccccaaacacttaaccctaaaccctaacaccaaaccctaat

SEQ ID NO: 72546 - DNA, 512 bp, Zea Mays
cgggaatcgtgcgtttaaattatgtttcagtgctatgataccgcctgttgggttattggtccatgtatcgtgttggagcccattagaagtgcattcaggggtcttgcatgcccctaacctctatttaatcagcagtcgtcaccaccattagggtttggttttgcttagcatcattctatcatccaacggtgtcgtcgttcataggtttgtgaaaccccaactcataatgaatataattttgattacgttattcatgttcatgcttgtattttttattgtgtttgtagtgataagccttaatagcaaggtcacttgtgtgtcacgggtgaatgagtgataacaaatagagttgtagtatagtgattgtgaggatctattgagtcggagcctcaatgtcgagatcttcatgcgattaaattattgtatctctcggaagatcagactttgccctctatgacccttaatgtcgatatctcaagtccgcgaatgttatcgaggttttgtatgtcaaa

SEQ ID NO: 72547 - DNA, 622 bp, Zea Mays
ccgggatacacaactaccggtgccctaacttggctaacaccgaattcacactttggcgatctactgggacacactaattcaacccgaacaccactcaagggcttggttcacgcatacccacagagttggtgacattcttaatgcgttcctagtgttctagcgcagtatagcttaatcgaccaggccaacaagcatcacaagcatgtgggagtactgaaacatggacaacgcggacgagagtggacctagaaatggttggccacggcgcgaggtcacacgatgacgcggaaaaccaatttgtgggaaatagcgaattgaggagctacagtggatgattggaggcgaggagcgatgcactgggcgcataacaacctaacggagcatgctcaacgctcaatttatagtgtccatgaatggtggctccgaattgaggagagaagctggcgaccgagaagaggggatgagtcactgtggcgatttaccctggcattcactagacaaaggcgtacggctatcactggttaacttccatggctcaagacgacgtggtaaaacaacctaaggcttggcgcgaccgagtgaatggcggcagccaccgcgacgacaacgcagccacgtcgtc

SEQ ID NO: 72548 - DNA, 532 bp, Zea Mays
cggggcaccgctggcagcaacctggggcgaggggccaacaggggcagcggcgcgcgaagtcgaagtacctgaaacacgtgaaataccacgagaaacaataggtgcatcatccaactccgataggaagtcaaagttagatgaaggaggtgaggaaacttcggcaaaagggaatgaagtctcatcaaaaataacatggcgcgagataataattctattggtagaaagatcgagacaacgataccctttatgttccgagggatagcctagaaagacacaagcggctgagcgaggtgccagcttgtgtggagcggtggaggaaaggttgggataacagcgacaaccgaagacacgaagatggtcataggagggctgaagtttgaaaagggcaaagaagggtgtggtggaggctagagttttggtgggatgacgattgagaagataggtggcagtatgaagggcctcaacccaataggacgggggcatgctagcttgaaaaaggagggagcgaagaatattagtggtggtacgaata

SEQ ID NO: 72549 - DNA, 412 bp, Zea Mays
gtttatctaatctgcctcaatactactttgcatcgttctttcgttgtcttacacatatttttattatttttaaagttcttagtgtagatgctatgcaagtgtgcatattatctacttaaaggcttttctggttgagttaacttgaatgtgctcattcagtcagaaaagaatgttcaaatatttggtttgttgaaagcatatgtgctgtaaatcaaaataatataatagcaacctcagcatttctagctgttgtgacaacatgaaaaaacctatgacgatgaccttgcaagcttgttaatttattcttgctggtttcattatccatgagacttttgggtcatactcacaatctgacaagtattttatttgtcatgagctaatgaaaacagtagattctttagaagcaggtgtg

SEQ ID NO: 72550 - DNA, 560 bp, Zea Mays
ggagcttcggtttttccagttgcaatctggtctgttgatttttctttagggtcagcatgctccatctcggcgggcactgaaggcctagcttcggtttcagcttgaattgttgtagcttcgacttctgcctgcttcgtttcagcttcgggttgcgccttggaagcttcggcaatttttcttgaaggagcaggactcaaggtttttgctgtttctaacacaacatctagcacatttgccatccttctcctcttaggagttgtggcagaacccttttgtgccttcggcactgttacctctgttgaagggctcaaaatctctggcatttttattatttcttcaaattttgacccttcagccttatccttatcagccttcgtctcaactagctcaactgaaggtaacttcggcattatagccggctcttcagtcctctgcgcaggaggaacaatttcttttgttttagcagccgaagaggtcccttcgccaaattcaggtatcacggccggttcgatgtaacgcggtcggtgagtcagaaccttcatcttcttgccctttggctc

SEQ ID NO: 72551 - DNA, 671 bp, Zea Mays
aagtagtaccataatagcaaaaaaactcgcttgcctgcttatcgaaccacttttactagttggtacagcaaaggccgccatttgcaattcaccattttggtcgcaaacttgcagagcatggctacaaaaaacagctcgagctccatgagtcggttttaccttgctgagtcacgagctgctggtgaaccgagacaagtcggttttctaagctcgaaaaagatacgagtcatctcgcacaagctcgtgagcaagctcgcaagctgactcttgtgcagctagcgcaacacgcacatcgggtcaacttcaatacaaggcttgtggcggcatgtcttggcccaataagtgaacctaaccctaatatgcttgcatccattgatcgacatgtgatcgtgactccatgaccgtaggctggctacactaagggttgtttgtcgacagccgtgacattgagacagtggtgtggcgacttcctctccccaagaccctgacctcgagtcctgagagcttgacgagggccgacctccgctgaccgctacccgtgaatgcgtggcaggtgcgacgacgacccacgtctagtcgttgttgctcacatctgcttcactcaagcggtcaagcttcaggcacctccaggccctccatcgtcatctacttgcggactcggcctcctgccc

SEQ ID NO: 72552 - DNA, 348 bp, Zea Mays
aacaaagatttgatacgacaataggtcatggggaaaccagaatgaccacctacagggatatcatggagagcacccattactttagtttacacttgctgattagcacccaaccacactctacctttatgtttaatcactccacccactaaggtaaaagcctccatcggctctccagttgccaaggcactcaaaattttctgggctaaaacatcatctttatacccttcagtaacttctaataaccatgttcgaactgcagaggatgcaaacaccacgttaagctgcattgctgaatcatcctgaccaaaatcactcctccttgacagagcattagctacccgattttcc

SEQ ID NO: 72553 - DNA, 457 bp, Zea Mays
ctgcctataaaagctgagggagcatagctgaccgggcccctgacgccaaccctagctaacacaagcagccgctacaaaaagaaaaacatagagaagccgccaggccaccacgcctctagccaggagagagagacgcacgcatgaccagacggacgagtaactccaagcgccgaagccatgagagcagtccaagcccgccacaagccacacgcagtagaggaggacccagcagcttccactcagcagatccaaacacagttacagctagcattcacaatcacctaacaacgtttcgcctatcaaaacaccggatcataggctttcagtgcataccagaaaatctgatggttattccggatgacgaagccccgaaccatacgcttattgtgcttaccggaagatcggatggttattccggatgattaagccccagacaaagcacttacggtgcatagcg

SEQ ID NO: 72554 - DNA, 487 bp, Zea Mays
ggctactgcgcgcacctgccggagaccgacagtgccccattcgctcgccctcacgaccacctctggcatgtgggcctcgctccaccggaagcttctccgggttgttacacttttgtagccgtcgcacgctctgcgtaacaaactccgccgcttgcggaggggatcgttgtgacttcggctcggcatccacatatctaggtccctccgcgcacctcgtcccatttgagccagcgtgaacgaccctaggtttatccatcgccgagagaggagccgagtgtccatcatcggagagcaaggacaggcttgtggccgccatcgtgcgttttcaccttcagtgtcgaccggagaccgtgatcggctcaaagtggcgcacaatatcttggggacgtaatccagtgggtaattgtgcatgggaagccgagggtctcacgcaattggtcgccggagttagggcgcattcgcgaagccagggaacgctgtgggcagc

SEQ ID NO: 72555 - DNA, 571 bp, Zea Mays
gcggcctattatattaatacgaatgagggttgaaattacaagtgatttacatatttatagcccaaagaagaaaactcgaagagtaagggttcttttgaatagcacagaaatgtacttaacaacgtagggtcgctttcccttttgctcctgcagcagcccagagatgtacatcatctttgattttctaaaaaaactacaccattaggagcctcgattcgattaaaaatacggttattcctctccaacaaaatatcccagcatactagaataatgagcgttcgaagacccttttttgagattgatggaatggcatccgtgtttgtccaacattggtgtaaggtgtcgtattcttccaaatttcttaggtcaattccttgagttattgtccaagatgtaagctctttctaaattagtctggtgaatctacattccacgaagaggtggatgcctattttaggcgagcaatggcagagggagcactggcctacgctaacccaatcatgtgcctggatcctattacatgtccaaatgcgattctggattgctaaccagctaaaaatttatgttttgg

SEQ ID NO: 72556 - DNA, 737 bp, Zea Mays
catgctcagaagtccagggaaatagttgtgtgccgtgggttcatccaaatggctaggcctatcatgggctcctattaggtaaggtgtcaattatattccaagttttgcatttcatccccatggcttagggtttgaatttttgttgcttccgtatgtgtgagacggattgtagctcgttttgtagggttattatctatgagtgcaattaattgctaattgtggtttttagatatagttggcatgtggttagagaactaataagagttgtcgtgtgtcatggtaggtcgaatataaaataagtttatattcactgtggtggtacctcaaattgcataagaagcttatatttcattatattttgaatttgagtgtaggaaagtgatactatcaagagggttacaaatcatagtcttggatgcaaaatcatgtggacaatgttgtgccttaaaatggttgtttgtgttgatgaggggtgtttatacatcttcactaatcccataatggctattgaaagtttccttgcccaggaacataatctggacgtcgcctaacggggtgaataggcgaataaaaattaacacttaaaactaagaattcttactctaaacgaagactggatcacggtggaatgaaagacacttcgagtatatcgcagtggaaatagagttcctatctcaaaatacctcgcacttcaaagacaacttatctatactacttaagagggtactgtcggcgcc

SEQ ID NO: 72557 - DNA, 896 bp, Zea Mays
caacatcgaccactcggcataattatcgcgcatgaggagaggccacttcagagagctctctttcacgccagccccggaggtcgatgcatcactcatggtgatcgacacttgacgacggggaatgacacgcttcttctttggcggttcttgtgggggactcaccgacccgtcgtattgcatacaaccacggctctgataccagaatgttggaccggatcgacggcgaacagcgcaaagaactcagtgtagtgcagtgtccccggagcgcgatcaccacgtctgaacggaagagaggacacagttgtattttctgttgccgcaactgcgcaaccttgcaaatgcattgaactgggaattaaaacaccgggatccgtcttccccgctgcactcagctgctgcgagacatgccgtaatttcagcaacgtccgcgacatgcacggcgagctaagtcgcagcggaaaaaacaccctttgaagcggtcacggcgaggactgagtgcactcgtcagtccgcccatgattctacgccaaattacaaatatgcacgcgcaatctaaaacaaactaaggcacctactacatatccctgacaagattacagtgaggctactacaacatgaagcagatatcgtctcatgagaaggaagaaggttatatgtagaggagaatacatgccttgtagatgtgatatctgcccatgatcgatctgctatgttatatattcaggaaccttgagaatgcttagttgatgcactagcatgcatctagcgattacttataagatttccatgggttttttataaaatgcttacaagatgtacattgaggattctgaactcgtcgattcaagaactgagaagaacaaaaaaatgtcaacaaaatagccgttagacgcgac

SEQ ID NO: 72558 - DNA, 540 bp, Zea Mays
taattactgaagattcgataagtactgaagatcgttcagtaattatcgagtgagtgaagcttcacctagagtgacgaatagcatgtgtgtgtagcacttagtaggctagtgcataaagagtttcagtcatatttaggattgtcaagtattaatgcagtaaaggcctatgtattatatttcctagtctgatagctcaataccaaagtttatcgtgcttccaaagttggccatatgcgtataaagcacctagtaagctagtacataaagagtcccagacaagtattaatgcggtaaaggcctctgcccactaaattgggcttcaattggagccacttctcaacagggaaagcctgacagctagatgacaatctgcccctctatattactcagaattatgcagttcaagacagtggggagagttttctccttccatgggttctccatggctccatgctgcatacatccaatgaagttgcagctgttaactgaaggctgcagctatttttgcagatgtcaactaaaggctgcaatcgttttttt

SEQ ID NO: 72559 - DNA, 730 bp, Zea Mays
cgaggaggcagcttggcccactggaggcgagggtgaggtgtcagagaggaggcaatgtaaatcttagggccagcgcaagcgcaacagagcaaggaagatgggagagggagggaaggttgagtgatttctcaacgtggtgggaagttttctcctcggctctacgaaaatgcgacactacgacgaccagtgggaggagcacggagcacctagagactggagcagcgggcagcgccacaacgaccagtgggggagtagtggacggtgccgcgtcaacatgtggggagtaataggtggtgcacgtgtggccggggaataatggaggaagcagggaataaggaagcgatgactttagggcaagcgaatcagttgggcctctaccttatatatatcacgttatagggccatattttaggcttgcatactgttcgcacctatggaaaaccgtcatgtagtgttcaatacccgcgccgaacccgtagactgccatgtcccctattggatcgaaaacccacgggtacccgcccaactgtcattcctatgcacacggataggagatccaaccacgccaacacatatttcagggggtgtttgaatctgtagtcttcacatagaatgtttgtttggatccactcaactaactgtagtctttgccatatagaatatttgtataataattatagatattaaatataatctaagtgtaaaactaaaacacagataaataataaaa

SEQ ID NO: 72560 - DNA, 495 bp, Zea Mays
gcaggctttaagctcttttctactagtgtgtacaggtggtagccaagcgttgtagtacgagcgtgtacatgtgcaacctcttttgaaccgcgcgtggtggtgaaagcgatgaagctttcatttgactgctgggcggcttcagccaatgccagattgacagacacatctatctagtttgttggtgatctgcgccattattgatagcttaaccacgattaaaaccgaagaacttcgctgtcagatagacgaaactgcaccatctccatctacaacgacaccaccagagctcgatcagagtcaatgagtttccatcgattatactcgagatctcgacggaaaacttaacatgctcaaagttaacgcatttagtgttggtgatctggcctaaacttcgctatcaaacggaagtactgcacacgttagcttgccgccacaagcaagatctccatctcagacaccaacagcgaacacagtcattcagttccgcatcgattg

SEQ ID NO: 72561 - DNA, 458 bp, Zea Mays
ttcgaaggttggcccctcggtgggggttcgacaaccgccctagagaatagagtcagggatgaccatgggtacgttcatacacggtcgaggctcgggctacaatcccgaggtaccctaagacatatctaagacccccgggaatgattcgtatcgatatcccatcaaagggaggcatcaagccctcggatcccatcaaacgggtccgggaccaggtgaatcatctgcatgtatattgggacacgtctttggaccgctacccgaaccctatcaaacagggctcgggcctccactcggattacccgccaacaactcataggagacatcatgctcgttgcccaccatgggtagcttggcactttccccttttcctccttgcaaaaaggcgatgaagaggcatatcatcaaattcaaggcattccttgatcgtcctctcgccctacgtagaggcttgggggctg

SEQ ID NO: 72562 - DNA, 378 bp, Zea Mays
tggagggaaaacggccactttgctgagaggatctgaaggagtaggtcaggaggagggtgcatgttgacaactgaagggggtagctagtgtcaatgcagacagggatggagatggagggtaggcttttgccaaaggcatttttggcggtgttcgtcctctcagtctcagagcgtaaatatggtcctgatcttgctgtcgggagggagatctccccaatcctacaatctactacctctacactagtagctagctaggaccacctcgatcagcggctcgatcggtcctgaatcctgatcgagctcaccagcctgtgtagccggggcagggactcctgttcgacttgaagcgagtagtccatcgatctcctcaacagctcag

SEQ ID NO: 72563 - DNA, 372 bp, Zea Mays
ttggctgtgactcatgagcaatacaacaaacatgtgccatgctaacaaattaacatgatctcgggttcccctgaaaattccatgtgagagcccttcaggaatcagcagaaaaaagctgtacagagcagcgaccaaacaattatcctatccttgataaaaagaggtggtgataaatataacatatatatttctatctagcaaaattctccaaaaggttaatgattagcagacagggttagagacctacacattgaattagaataaataagggttaagaagctccagctggagtgctctttatgcatcagtggatgggaacccaacgcttgtatagaaactaacattgaagtcatttttatctaggttttcata

SEQ ID NO: 72564 - DNA, 471 bp, Zea Mays
attcagagtatggctgcttgtagagagctgggaaatgctgaaggataccatcaccaagtctagcgaaggtgaactggtctggctgaaatatacattcaagtatggggataagttcgatgagccaaacgatgactggctgaaatgcatcgaagttacaagtgatgaactacttggatcatattccaaggcagaagataatgcattatccacagccttcggaagttggggaaagaagagattgaatagagtttttgatgctataggcttcgtctaccccgactatcgctacccgctgcgggggcaagggaagaagagaaaagctgctgctttggccgccccagctgagcctgtgccgaaggctgcgggcaaaaagacgaaggcacttacccaccggtcgcattacattgaaccagatgtggtgcctgagtttggcgaggaggcctcttcagctgctgaatcaagagaaactgt

SEQ ID NO: 72565 - DNA, 736 bp, Zea Mays
gtataacttgtccagattatcatgagaggccgcgagtgcttgtttttcctcctacaagcaagaagcaacattcaacatccatacaacaataagcttgacaaagtcagctaaggaagtttacctcatgggccgttctttcatagtgaagatgggaattgagggaagaaatcaaagaacacgcgtcgtccaatgaagcaaaggtttggaccaagacggtttggctttgagaatttttctcctcgaggttagagcactgttggatcaactcggcccgacttcgagaatacttttcattaagatcatagcaccactaggccatatctgacaatgcaactgaaaggggatgcatgactaagaagaagttgatcaataaaaacaagtaaggaagttgtaaggttactaaccagcgttcgatgcctttaggtcagcaatctgtttctgaagtagcaatgggttccactacatcaaagacatagcttcttctggaacaatggcaccacatgacctcagctgaccagacattccatcaaccaaagcctgtgatgataagacagatgagcaggagaaagataattcactaatatgaacaataaaaggcaagaggttgactcacctgaagtttggagaagaacaatggcagacctaaggcaggaggagttatgtcatggctcgacgggggaagatcagtaggaaccatctgtagggcatcatcagggatgatctcagccctgtcagc

SEQ ID NO: 72566 - DNA, 559 bp, Zea Mays
caaagaacgatatgttcaggagtttagaaggctcaatggtctctattatgcctatggggagaggtttgagccaggtcatattgctaaatgtaccaagagagggcttgtgcagtagaatgcagttattactgagaatgtgtcgatggtcttgactgatgaaatcttgcaacaacttgagcaagaagatgagcaacaagcagtgtgttgtcaggtatctgttcatgctctatcaggtattgtgggtaataaagtatgaaggtgagagctattgtgcaaaagtagtaatggtgatgttggtggattcggggagtcctacgagtttcatcagtgataacatggttcaacagttgggataatctgttctgccttgtgaatctgttattgttaaggtggccaattgagattctatggtctacaatacaatggttaaacagttggagtggtgggctaatggccaattctatcatactgatatgagagtgctccctattagtgcttttgatgttgtacttgggtatgattggttgcaggatcatagccctatggagtatgattggaa

SEQ ID NO: 72567 - DNA, 503 bp, Zea Mays
cctccaagcgggtgccaagaatctgatccagacgtcgaaggcggtcagcagcgaaatccagtaccgggagcgcgttggagatggacgccggccgcaccagcgtcgggatggggctcactcccaacggcaccagcgccgtgctcgcctcgtcagcccaggcggtgatgcgctgggccccggcgcgttgctcagcccagaggtcgtcgagtgtcttcctcatcacctccactgcctgggggcccgaggccgtctgtgtcgcctgagcagtttgtgatgcctggaactggcggacctactcctccagagcccgcactttcccctccaaatgttaccttttctcctctgcctcgagctcaagctcatccaacagcttgttccgccttgaccacatctcctctctgaaggcgaggtcctcctcctgccaggtgagatcagttgctcgtttcgccagggaagcttccctcgccttgaggctttcctcggcgcgagcaatgtcgttggcc

SEQ ID NO: 72568 - DNA, 697 bp, Zea Mays
gaaactggaagataaattcgagggtttagaatttcaccatgttgaaagggatcgcaatgcagcagcagatgcattgtcaaaattggggtccagtcaggcccaggttccatctgggattttcgtccaagaggtacagcgaccgagcgtcaccatagagcaggctgaggagtgcaacaccttagaacaagcagaagcagatcccaatgactggagggagccaattatcaagtacataaaaaatgaggaagaaccggatgacaaggccatgacagagcgcatcgcaaggcagtcggcccagtataccatcatagggggtctgttgtatagaagaggtgcaagaggagtcctcatgaagtgtgttcattcggctacaggaaggcaactactagacgaaatccatgcagtgtggtgtacatgcagcatcaaggacactggccaacaacaaagaatgatgcagcagaattggttctgaagtgcgaagcatgccaatttctatcaaagcaacaacacttgcccgcccaacatttgcaaattattcttgtaacctggccctttgcgtgctgggggctggacatgattgggccatttaaaaagctcaagggggatatacccacatacttgtcgctattgacaagttcacaaaatggatataatacaaacccattgcctctttgacctcagcaaaagtagtggaatt

SEQ ID NO: 72569 - DNA, 825 bp, Zea Mays
ttcatcatcattgagtggactttcttggcgaagctccttgtgtttaggcctttggtcttggtcatcccgagtgaggtggcgcattttcttcagcggcttcatcaatcttcttttgaaggtcggcaaactgaagcatctttccctcttcctcgctaagcggctccgaagcagaagacgactgatatgggagaagaagctctttcaacaccctctgctgccaacatggagaaaattctaaaggtaatgactgaaaccttgcctatcaagctaattccactgaggccgcatctgacgaagcttttacagaagaagaaggagccctcgtcaacgaagaagtctgttgggccgaaaaagcgaagaattattactgtgatcgaggccattgaggaaacaccacgaccagcttcgacgtcaaagacaccagctgtcgagagcactacagctgccgaagctgcacctactgaagctgcaacagctgacgatgcaaatttagaaagtacactctctaatattgataaaatacttctggacatggccgcagaagaagttgttgcagccaccgaagaaaccgtggccacagtgcctgagaaagagaaggaaatagccaaagatactttggaagcagaaaatttcaactttcaaaacttaactggacaagaattgtcgaaggctgagaaagaagagttgagagactatgccatatcctgtgggtatgaaccaggggtgctactcttcggcggtgtggacgatgaaagcttaggctgtctccgagaccgaaccagagcgaaggttatcggtactctatcgaagagtattggtttcccg

SEQ ID NO: 72570 - DNA, 366 bp, Zea Mays
gccaccggtgaataactccagctggactcggggtatggtgccacgtacgcgttatctaactccggtgttatccgttccttaccgagcccaaattggaacagcgtcggcacgaatcgcggcggtgagatttttttggcgctggcggtctgatccatttcgggacactgtaccatggcgagctccatttcagttaacctgacagagcgacttcagggcatattttctctcagatttctatagcaacgtgaccaacactctacagcaaaattatagcttaatagaccagatccaactttgatacatcgtgcatccacaaacagtcacaggatcatgctcagaattgagcttgaagttcatgcaattcca

SEQ ID NO: 72571 - DNA, 465 bp, Zea Mays
gcttagcgggtcccacgggacagagttagggtatgtcttggggggcgagcgtggcgtggccctacctttcgtcatgaaccccgcgtcaccctcggtatggtgcaatgatccgtcctgcccggtatgcatgttactatggagactttgatgcttaggtctcctatgatcgaggttgactggttccacaaggcagaggcgggaaacaccagagaccatatgatggtgtaccgtcacatcgatggagacttctcggcaccccttgcgtatgttgtgccattggtttggagagagtttggtgatgacgtgaccagacgtggatcaacaatactcgtcttgttctcacaccgggcgagcgcaaacgtatatgaacggtcatccggttactgacaggcgggctcaggagcccgggcccacgaatgtgcactgaattacaactttgtcaggacctccgcctcactgatttgc

SEQ ID NO: 72572 - DNA, 294 bp, Zea Mays
ggcgcggtgagaagcttcggggagtgaggagatggtgggttagggggcctcgggcatgggtgcgatgggagaatcggggcgcagcagtggggaactctagggccaaggaggttggcaatgaagaatggtgacggggcgaagagtaaggcgtgttggcgaggagctatggcggtggaggttatcacaacggtgggggaggttagcacggtttgagaatgcgtcgcggggaagaggaagctcatgcaaggcgttattgcctagctcggtgccaaggtctgtggtgccgagttagat

SEQ ID NO: 72573 - DNA, 713 bp, Zea Mays
cctctttcttcaggagtgccatgaggggtgctgcaatggcgctgtagttgtggacgaacttgcgatagtagcctaccaaaccgaggaagccacgcacggctcgcgccgaacgaggttggggctagtcgtggatggcctggaccttcgcggggtccatagcaacgccagccgctgaaatgacgtggtcgaggtaggcgacggagtcaacaccaaaggagcacttggacctcttgacaaagagtcagtgctggcgcagggtgttgaggacgacgtgaaggtgccggaggtggtccgcccatgaggtgttgtatatcaagatgtcgtcaaagaagacaagcacaaaccggcggaggtaggttcataggacgtcattcatcaaagcctggaatgtggctggggcgttgcacagcctgaacgacatcaccaggaactcgtagaggtcgtcgtgggtgcggaacaccgttttatggacgtcctcctgccgcatccgcacttggtgataccctgaccgcaggtccagcttggtgaagaggcgtgcgccatggagctcgtcgacgaccggaatcagaaacacgtctttgatagtgagcgcgtttaacgcgcggtagtcaacgcagaagcgccacaacccgtccggcttcttgacgaggatgaccggggaagagaacgctgagtcactacggcggacgatgccctggtcgatcatggcggcg

SEQ ID NO: 72574 - DNA, 786 bp, Zea Mays
tctggccgcatcatctttggtttctgctggcccgactataggcaccttcagcactacaatggatccttcagtgctccgggtggtgggagcagcttgttttgcttcggcagcggaggaggtcccttcaccaaattcaggcactacggtcgtttcaatatatcgaggtcggtgggtcaaaacctttattttcttgcccttcggcacagcaatggtggccgaagcggcagttttcctttttttccttgccttctcaaagggtagcagtaatcaggatatatgaagccaattgcatcaaaaaccctgttcaatcttttcttgccccgacccctgaaggctgaggacaaggcatcatcttcggcccaggtatatgtctcaagcaactcgttgctagtagcttcaatgcatttcaaccagtcatcatttggttcgtcaaacttctctctgaatctgaaggtatatttcaatcgaactagtccaccttcgcaggattcagcagtagtctccttcggcatctcccagctatccacaagtggccacacccaataggctatgtgttcttggattatatctcttgtgccaatgaaagcacggacattgctaaaagcctcctgacacgcttcggcatcactttcaatagtcaccttcggccttcgaagaccgaagcgagaccagatggggcgctcgataatttccttaatatcctccctctcaatcagattattcttaacataaaatcattcctccatctaggccttaggccatcttttctagtatgttggaaccggg

SEQ ID NO: 72575 - DNA, 700 bp, Zea Mays
gttgtttggtgatcggtgtgctagggtttcctgccggcgcacagatgtcgatgacaatgaagtacgatcttccgctgctggatctcgacacgtgtttctcgctgtggcaggtgaagatgtgggcgattctctcgtagtctgatcgcgacctggatgatgccctagatggatttggcaacaaggacgccaggacatggactgatgaggaaaggcacaaggatcataaggcgttcgcacatattcaccttcatctgtctaacaatatcctgcatgaggttctgacggagaaaaccgccactgctctttggttgaagctggagtcgatctgtatgtcaaaggatctgaccagcaagatgcatgtcaaaatgaagttgttctcccacaagttggaggaaggaggctccattctgacgcacatatcggtgtttaaggagatcgcggccgatctgacgtctatggaggtaaagtttgatgatgaagacctagctcttcttctcctgtgttccctccctgcatcgtttagcaatttttgagataccatcctatacagtcgtgatactctaaccgtggctgaagtgtatgaagctttgactgcgaaagaaaagatgagacagatggttaactcggaagatgctgctggctcgagtggagaagctttgtatgtccatggccgcactgagcagaaaaagtccaactcagg

SEQ ID NO: 72576 - DNA, 771 bp, Zea Mays
gagagcttcgccaaggtccaggtgcttccgccgttggagccctatgtgtgttggaacgacgctggagacctaggtcttccaccagtggagccggacgcgggcttgatcggcgcctgggtcgaggaggtttcactgatggagctcggctaaggcttggacgacattccagagagcaacagaggcatggcaatggggaagagatgatgctagtggcggcgacaagcgcgagagcagcgacgcgttgtgcgcagggaggggtggtggcgaagcttccgttgatggaggagggcggggatcctcggcatcttccatgctgatatcgcgtacggttcctcggacacctccgcagatggaggcgggcgttgatggcggggatcttggatcagcgtggggagatggaggcgggcagtggattgaggcggggaaggcggcgcgatgaatgccatcgccgccagttatggaatggggatcggcgtggggaggagggtggggatcctcggcaaccttcgatatcgcgtacagtccttggccgcgggcgttgatggcggagcagaggggtaggagatcctcgccatcgccattttccttcgacggcgtggggaggaggaaggggcggatcgacgtgggaaggatggctgagatcgcgtacggttccgacggcagaactgtgcaccagtagagatgtggacgtctacattagggtcttaaatagtagtagagatatcatctagccgtggaataggatggcgatagcgaacggtaatattattt

SEQ ID NO: 72577 - DNA, 531 bp, Zea Mays
tgttaaggaacataattaaggctaactatggctagactactcctatctctaatgtatatggtaaatttggtttgatagatagattgttggttggttcgatcgttcgtaccccttcatatataggggaggtctggacctgttactcagcaaaatccaacaattttacatgagttattagataagatcacaaatgctaaggacaacagtctgaattaatctgtttgtgggatgtccaggctgacaagccagaccgtctagaccacaagatcggaccgtttggctgtctaggtgctagatttggtgctcaacacctggcaaggctctaggtccaatatgagcttcgcaaatgctagtgtatgtccctcattaactcctaaccttcaaatcgggacaaacatttaagcaatggtgcacatacaccttccttgcatagctctcattctacaatcttgtatggatttgtccttccatccatcccttttatccagacttaatcatcgatcaaatattgaccttttaagaatgatattg

SEQ ID NO: 72578 - DNA, 445 bp, Zea Mays
gtcgatgtggtattaataggttcgttggttaactataaataatgtggagggatggaaggcatatgtgtaagttgatcctatgcaatcttcagtatcacgatgttcaaaaggttgaatatgtactttacatcttttccagcgtgatgattctgcatgcataagcagctatgaagcacattaacaaggaattgacaggtgtacatcataacagtggcatctgaagtaaagaaatagctaaggcctaaggcacaccgcgcacacgtctcagtttgaaaactgaagtttaactgatttagacatgagaggacatagcaggcagaacaataaccagtgacaaattgaatcgaggagtaagtggggtgggtaaacatagttctacaatacattggaaaatttcgaatccccctcaatccctgagaccatgacatttggtagggggctaggg

SEQ ID NO: 72579 - DNA, 909 bp, Zea Mays
cgggcatcagggcttgtgcatggggtgatctctggattttgccgccgctaatcctgggctgtcgtgtgtggtggatgggacactgattcttgtgccccgtcgtgaacagagagagggaggaaagcacgccgccgcatctaaccatgggcagtgcccttcgcgccgcgctatctggtatgacacgttccatcaaattcgcaagtgcctgaattttgttttgcgcgtttctaggggcgatttggatcgtcgggcagtaggcattgatttccagccatggcgccgccgttcctcagtaggcgccgcctggagttcgctgggaagtggaaaacacgtctcagccgtctgatccctagcaagagatccagattaaaaggaaaggggtattgtccggatcactgctgtgcgtcgatctgggaatcctagggtagacttcactgatccgctcatcttagatggtagccgttggatggccggtagaccactcggattggcgactagcgtgggcggattctggtcatgggatccagatccgagggctcctgtcgaggcgggtttgtaggcaactagatgtaatccggtccgtttggttttgatccaacggccaagatctctgcgtaccccttcggccagaagattatgcataagagaccctgaggtttacgttatttaacccgccgtcccgtgcactattgactgagtctcgggattgtttcgcagagacccctgcctttctctaaaatcgtgtgcccagtccagtgaatcgattaattagataaatagttagagaaatcgaatattaaatacaaaaaaatgattccaaagaacttatataattcatattaaattcattttagctccaaaataatcgattctaatttctataattttataaaattgttgtttatcatt

SEQ ID NO: 72580 - DNA, 914 bp, Zea Mays
gaaaccgttaaggttgagtgcatcggttctaggagtgaaataggggaaattctcacccaacatctccaaactttgaaaaaagagactcctccacatgaagtacctttgacacaaagtagagcaaaggatagatgcatgggtcactgaagtagtctttcatgaacctgtgaacacaaggttgatatgtacccttgtggtttaggttgtgagtgattgtcaacaagggtagtgccttgggttgagtcagttagactaactagagtgtgaggttgttggtgaaacatgtctcttagcttgtggtgcattggtgtggagtccagagatggtggtcaaaggtgaagatgaaggtgatacgggtcttcaccgatggaccgggtgcaacgaaggacgagcgttaagtcttttggaggagctcgtcatgttgctgacggagttgtggaccagtgggacacatgtctaggatgtgaggagcgtccatggagcatgctacccatgggggtttcgatggttgagcctcaaaaccatccagcgcgacagttcgcaggtttcgccaggtttggacctcaaaacccggtggaacagttctagaggaaattggaggtggtacacggtgtcatcgaggagtttacgtcaaggtgaagcaacattatgaagactgtgtggccgtcagctcaaaattccaagaattggtccattttgcccctagttgagtgttctatgtatctagggatagtttaggaaacaggaaaaaccctttataaataggaggggagggttaaaccattccgctatctctttagcactttcattccctcacttagtttgtaatcctcctctttctcattctagctataggagatccttagatgttctaaaccacaacatctaagttcatggattttttaggaagtctg

SEQ ID NO: 72581 - DNA, 624 bp, Zea Mays
caaaatcatgttcttctgttttgtagtttcactttcgtttgtaccgatctggcgataaggaattccatagtactcgcaacaacaacatgttccaagatcatttttctgttggtgtgcatccttttgtgtctgttcatcagttgtttcatttctagtgatgtttcgacttgccaggacttgctggtttgaggaggtgagttgagatactttctgtattatcagagcttgtgcatgtaacagcttttctaagtcaaccatcgagggtgaggttgtggttgatgtcatatggttatcggtagtctgctcatgtgctataatttttgctaaatcaacttgttggagtctagctaccacttgagacattgcttgcagaaactgagcatgcgccttcttgaactgttccatctgatccttagctggaggagttgccaacacaatgtattctttgcacttagtgacatcacttgtagttgacattccaaggtctgacatctgtatgggtatggaagaatggaagggacaaaagggttgagcaaagacagattatagagagcagagaaaacccatctatttaaggttttacccagctaactgatgtcattatggacaaaagtcacacaatac

SEQ ID NO: 72582 - DNA, 379 bp, Zea Mays
aaatatgtgaaccggaagaacacctagagtacttgcattgattttgtcgttgcttaacgataccaaggtaccctaggtactcgagagatttgaagttgcataacgatatgaagtcatcctaagtattcgagacagttgaactcgcttaacgataccaaataccctaggtacttgagatttgagagagttgatgaataagaggataatccaagagacgtagacttgaggcacgctaattctagatactgacaagctaccagcacatgggagattataaaggttcatgccacaaatatgtaatatcctacgtcctcgtgtatggtggattaacaaacacacgaagacgaagaagattacacgctacatctaggctactggc

SEQ ID NO: 72583 - DNA, 462 bp, Zea Mays
gttgccgaaaccgttaactggagtttgtatgcaactgatccaatacgttgaagaacagtatacggaccaaagaatcgaaacgccagcttttgattggctcgaactgccactgaggactgaacatagggctgcagttttagttacaccttgtcacccacttgaaaaacacgctctgtacgattggtgtcggcctgttttttcatccggagctgtgcatgggtcagatgctgttggatcagcctggtaatgaatttacgatcctgcagccattgttttaggtcagtaacagctactgctgaagcggaatccacaccaaaatgtcgtggggaacgtccatacagtgcctcaaatggtgaacaaccaatagatgaatggtagttggtgttgtaccaaaactccgccactgacagccattgtaaccatttccttggacaagcttggacgaagcaacgtaagtatgtc

SEQ ID NO: 72584 - DNA, 682 bp, Zea Mays
caggggcaccgactacttttcagttggcaatgaacactacgctatcacctgtgctcagaaaatgtgtcctagtatttttcgacgatatattggtgtatagcaaaacatatgatgatccttgccaccatctcaggcttgtgctacagctgctgcaaaaggataaatggcaggtgaaaatatccaaatgttcctttgctcaaaggcagttagcttacttgggtcacatcatcagtggtaaaggtgtgtccacagacccagacaagattgcagcagttcgcgcttggccagttccagcaacagtaaaggagctgcgtagtttcttggggctgtcggggtattaccgtaaatttgtaccccattatggtgtcatttgcaagccactcaatgaccttcttcgtaaaggggaattgtttgtttggactcagcatcatgatcaggcattccaagccctcaaacaggcgctgtgtgcagcaccagttgttgccttgcccgacttccgtcgcccatttgtggtggaaaccgatgcatcagcaacccgtattggagtagttctcatacaaaatggccatcctctcgcttatcttagtaaggcattgggtccccgctctcaaggtctctcaacatatgaaaaagaatatctagcaattcttgctgcagtggaccactggaaacattacctcca

SEQ ID NO: 72585 - DNA, 402 bp, Zea Mays
gttttcttgctaggaataatcaatctacctgtccatacttcaaagcgtagtttaagctacagctagaagccttgattaatctgggtttcacagaactgattctattgctgattagagttacttgcttcatttataaatgttctaagcacaggcacagcctacaagtgagtagcaattgaattgatagtcttgtacatctaaaccaacatgatcctaagtaatttttttgaggtctcaacaaaaatcattgtcacaattcacctgcagttcaattaaccatttcctcaatcatgcatgggagcatgacaccttagagtgccaaaatgttgcactcatgacttttggatcagcagaaaataatttgacaatcactcccctgatttatttatacttagaactgag

SEQ ID NO: 72586 - DNA, 382 bp, Zea Mays
cttgtagtaggggttataagcgggcgatagagggaaggaccttaagtctctttgagttgtttatctaaggtatgacctgattgctagaggctctaagttgcttgcctgtttgctctcttggagtcagggttttcgattgtcccttctctcttgctagatgtcgacaatcttccttttataggccaaggggagggtggcttatagatttcttctcatgtgagggagtgtaacgttagggtaaaaggaatagtttcacccttggtaaaagttttgccatgtgtagatatctcttcccgcgtgggtcgcctgcaatgcctcggaatccaccaggggagctcgtgatctgtgttggtgaaggaagctcggacgtcgtcattatttc

SEQ ID NO: 72587 - DNA, 653 bp, Zea Mays
atctagtggtccctatacaaatcaaatttgtgatgcatgtgtattgaaattattaatcttatttatgcaaaatcacacttacttaaagttgtacggggccattatggcttccctgtcttgaaatttaagaattgtgtttgctatgtaggtggtgaatcttgtttcaaactccttcttcatagtctttagacgctcctcaacttcttcgtatatctttccctttaacacttcattgtctttcccgattctgaaagtgtggctttccttgcatatcagtattgggttgagatacccaatccttttatcggcactagcaccggacttggtaccgtaaaggatctcctgttgatcatgttgcattctacaagtcacacgtgcatgtgtcagatattgaaaatttatacggctcactaataataataacacatatatgtggaaatatgagcaacacttaaagtgcaaacaccgtcacaagttgtatgtcgagtctgtgaaggttcatcatgaaccacatgtcctcgactgcaacaaaggcctttggtccaaaccaataaaagcatggtctggtatatgcacactaatggcgtcaatgccaactgatgatgcccacatgtaccagtcatgcaaccttttaataccagctaggacattcc

SEQ ID NO: 72588 - DNA, 429 bp, Zea Mays
cgaactttgagataaatgactagtaccttagcaacacgaagttgcgagtacatcgaaaggtaattctgagatttttttcacaatgtttgtgtgaaaaaccattgtgtgttcccgtcgaaccactttactcgtcctatctaggacctctatgcttgtgttgcatacatctctcagaattgtaaatacttatagtcattgaattgacttgggatagtcctttgactggtatggtatacattataagctaaatggtaaaggtcggtcctgaatggacacatacctggggtttatgtagccgaactacactgaattccacccttttggtatgcttaccattatctacctccgatctaccagaagtgagaagagtagacaaataactatgaaatcccacatcaccacagagcttgaagctaaattagacattaa

SEQ ID NO: 72589 - DNA, 589 bp, Zea Mays
gtttttctagatagagagcatgctattgtgcttgtgtgaattgcaattgtggtgttgtgttgtgctcttgacttgtggtttttctcttgttcttctattgtaaaagctagcaagaggctccaactctatggagtgccttgtggagactccgtttgtcataaaaaagatctaagggctcatgcttgatcgtagggatcacttgagagagttgagagagaccccatccttttggacacctcaacggagacgtagattctttggaaccgaactatggtaaaacaaatctccttgttctcttgtgttcttacttttgttgtgatttgttcttccctctcaccttcaattagcatcggagctcgacacttctttggggtctaaaaacccaaagtgatgtcagacaatggatcccacaagagcgagaaagtcctctcgggagaaaagcaaaaagagaagattgaggaatgtgcaagctccaagtcctccaagccttacaagaggaaggatggcaagaagaaaaagatcaagaagatcatctactgcgagaacgacacttcaacttcgcgaacgacctcaagtaacagtgaatcca

SEQ ID NO: 72590 - DNA, 941 bp, Zea Mays
ggaaggaattcctttctattttctattctatgttttcatttgaaattttgaggtcaagtttaaactatgattctttattccaataaaatgtatcacaacaatttcttcagtgtgatatgtatttttctttatttatttattggttatttgactattattatctgatttatgaaaagaaaaggaaactaataaatcttcaaaggtttcaaaagaaaaattcccaaaacactaacctgaatgtatttatttatttatatcattatttttttccaatgtaaaattttgggcattacaaatcctaccccccttatatataatctcgtcctcgagattagtagaaagaggaatgtagaaagtttggttagctttttttagtcttttttttagtttctaattggttccaataacaaaaggttccttttcctttaatattaattagtaggtgattaagaaggcgtaagcatcttttatctcatgccatttagtaggcaaggtgggggtggttatagcgatgataggttggggtaagaaaggttagagtaaggaaagactccattttagatggtgaatcttgattcatatgaagatctggttctactcatattcttcgttgtcgaggttgaccttcttctttccttcagtcttggcgtgatcatctgagttagagacatattgttaagatatatgtgggtaggtcagggcaagaatagcctggggcaagacagtttatggtgagaaaggactccttgttgggtggtcatgcctcttgctgatcgagtttgacttctcttctttcttaacgaggttgatccttttccttttccaatcttgctctttggtgtctctatccgggattgggacaagaggctaagatagatctattatgtaggtcaagttgttggatatggccgagttaatctaggtcaccaatttaggcttaa

SEQ ID NO: 72591 - DNA, 1397 bp, Zea Mays
ctgtactatgtgcaaacataacctgtttgggatccagacgtattcctgctggtaagctggttcctgctgtgtcccttttgctgtagaaggcaaggtacgtggtgccttaccttggctaaggcactgaatctgaatctgaataaagaaatgtaaggtccaattgtccctttcatgtatgttgtttctaaaactcctgaatctgctgctaaagaaacctagttgctatcggctgtgtctgattcaagcttcttcataagtttcaaggcaatctctttgagtctttgttgcctattatttcttgtccttgttggttgattctcgactcactaacaccttatgcaggatatgctatatcaactcgctgtttcacttctcgatgctggggcaagttgaaggagcagtcgtccatgcttcatgaaaagctttctcctctgcttggatctgaggttgcagtgctttgcaaacagttggctgacttagaggcctctcatgctacagaaaatgccggtaagatagccattgttgcattctcaactttattagtttcatgcttattctatgtggtgccttgtagcttctacggataaattttctaaactcgaagacactaagattcgctacgagcctgacctccgtcgggttaaaacaactcttgatggcgaccgagaggccaataatgcttcactacgacagaaatttgacatggagaagaaaaatcatgaggtaacttgttgtgaactccagctcgcctactccatttgtcgaagcgctacataatatgtcccaatctgcaggatgaaatgcataagcgagaagagaagatccaaagcttgttgagtgaggtgactcagcagaaggaacatatccaaactttgtcctccacaaagtctactctcaaaatactacgtagcttgtcagaagaccaatccaaaaagtatatggctgtgaagtccttgagaacaactgtaaggtgttcaaatttcttatgataaagccatggacaggctgaagcatgttgttcggtaaaaaacagtggtctccaatattgatgcttacagagaaattacgatagaaacaactcaaaaattagagtctaatgtggctagaggtgagggagctctcccccaagataaaccagtatctccccccaccatgtagagtagctatacttagttctggagtatgttagtttgagaacttttggttgtattgtgttgtgaactatttgatgcctttctcaggctgttgtatgcttgtcgttcctataatgagaacacctaagtggattttcttttgtcaatgtcaaggctttgtaccaacctaagttagttgtaaggcttagattccacttgcgctttgtatgcatgaaaatttatcaccgacatagaccaattcat

SEQ ID NO: 72592 - DNA, 895 bp, Zea Mays
gtttggtacaaacataatggcgtgataaattttaatctagttttcatgctagaacagtgttactcagtgatagaaaatattattactaaattaaaggaactggaatggattaaaaagaagctagtatgaattttctatgatttatacaagtttctccaattaatttcatactagaaatcagttttcccaatttaattcataaattccaattactttggactgcggacactatttctaaaatacacagggttacttttataaagcttcggatctattggtaacaatctatgaactacataggatagcgggttagttattaaaatgtccagggtctcttttgcacattgaccacagcgaaggggtacgggccgcccacggccgttggatcctagttcaagcgcctagattatatcgtgaagtggtatgagatcgtagcccacagatctaaatcctacggctcagattttatagcgcgaaggggtatgttacttctaatccgaaccgttatcccagggatcaacggtcagggtttcaatacatgaaactattcgttactattcgttgagatttgatccaacgccgctgaacccattatgcgaacgggtacaccagatcacatcccaaccgttcatcccgatctaacggctgaaacgacatcaacccgggatcaatcgtgttcgttggatgataatccagtggtacagacctcgtcttccttctcccaccgcagcagggcggcggcgcgcaggcccccacagcggagcatccgccggtggcagccatcttggcatgccaacgccccaatcccaaaacttgatcgaccaacgcgtagagggaacaaaacgtactacttgggagggcttaccagagacagaaacgacgccagggaagctgc

SEQ ID NO: 72593 - DNA, 279 bp, Zea Mays
taaatcttcaagcataactccaaagaaaactgctgaaacttctgaagcgtctgctgaggcatctgtcgctgaagcttcgaaacaacagactggaattgaagccgggccttcagaaccaaccaaggtaaaatctttggaaacagaagaaatgaaaattgcagaggcaaccgaaaaaatgaaaatgtcagagccagttttggttgaagaaattgatactgctgcccccgaagcaccttccaaaatatacgactatattgtgcgacacgcttcggggaaaaa

SEQ ID NO: 72594 - DNA, 975 bp, Zea Mays
gaaaatttcgaagttgcaagggctaaacaagaaataagtgaattcgaaagatccagagtgcaaaagaatgttgaagagcttcgggatgccaaggagagatgctatgaaacatctatacaatgcacaaagaaactgagagatagctttgctaaggtgggagcatactcttcggagcaaaagtttattcgtggtgatttcgaagaagttatccaatggatcggcgaagaagctgaagctttcgatgaagtactcggcgatcgcggggatttctgcgctttcgccggtgctcgaggggctgtggccattttggaaaaaaccatctgtgaacatgtcaaggccgtagcccaggctgaagctatcttctcagctgacgacaccaaagacccctcggccgaagcctctttgttgggtggaaattctactctgatgtttggatgaagagcggtcatgaaatggccgatgaagccattaaaaataacaaaaaagaatctcacaacgcccgagaagaggcaaaacaagctaaagaagctgctgaatgtgccatgattataggtacttttattcaaagttttgcttcgtcgtttgcttcgaggtttatcaacatattcttttattgcagctgggctttcaccaccaccggagccgtacaaccctgaggccgaccaagttatgaaagaagctttggatgtaatgaagattgtcaatgacgtcgttgacgaagtcgtcgacagacttttgcatgaagctgctgagaaaatactaaaggaggattaaattcttgtatgctggaaaatgtattgcttgtgtatggttgctgccatgtgtatgaaacaaacatcaaatacttgtatgtacattaatgtaatatatctctttgtgatgcatgaaatctacgtatgtacgatttttgagcctttggcgaaaaagcaccttcccttattttgatgcttcgcaaagagagttttccttatgcca

SEQ ID NO: 72595 - DNA, 601 bp, Zea Mays
gctgcaatccttccgtgtgcatcctccagctccaagtgtaccctagagaggtccagggtagcactatccaggtcggtgttaagacctaccaccacaccagctagggtgttgaggcgatcttcttcagctccacctggaacaatgctggtatggctttctccacgaatacacagaggaagatgcctatacttcgtgttgtgcagctgctgccggtaagtgtggctgagggaccacagtgttcgcctagcagcatcgctgactgaaagcagcgtaggtggatagcgacgttagagactcatgagctgacagagtcctgaaccctctatcacctgcatccatcaccctgacatgaatgcgagtgatgtagtagcaagcccgaggaggctcgtacactcgccttgtctcatataggggtcgaaaataggttcccaatgcatgcagaacatcctgcagcaggttaggaaagtgccctgtctcgaacattgatgtataatgttcagtgataggccataaccccacgtagtggtcgagttgttcatcgttagcttcctcattgatgttctcctcctcctcctcttcttcttcttcttcttcttctttt

SEQ ID NO: 72596 - DNA, 385 bp, Zea Mays
gggagcatcagtggcaggtaagaatgctgaaacaatatagcagagggtatgatcggacctgaaacgagctagccacggcgaagactctttcacggtggcggaaaacagatttggggggactgagcaattcgtgggctcaggtgagtaattggtggcacgagcgggtgggttggatgctggaatacctaacagagctgagggggtgctcaagttataggattcttgataggtggctcgtgaatttgaaggagacgtgcggcgactggagagggggaagagtactggcgcaagcgattggtggcatttaccgtggcgggctcaccggcgatgaccggacgtgctagagcaagtcactacaacgaagtatagcgtctaggcacatgtc

SEQ ID NO: 72597 - DNA, 365 bp, Zea Mays
gagggggcgacccgccaagggggaaaagtgaggcgaccaagaaaggggagggggtggcggccaagaaggggaagagggtggccacctagggtttattttgtgggagaaaagaagtgacgcctcagatgacttctgatacagcatccaacggcccacaaccctttttcccatatccactcaccgaagatcaacttttgggtcaacatttttttgggatattacactctaccccccttaagaagaattcgtcctcgaattcaaccactctaaccaaaacatccaaggtaccccatatagcaccaccattcaaaacatgggtcaattattggtcttaattaacacaagaacttctaccttggactaat

SEQ ID NO: 72598 - DNA, 527 bp, Zea Mays
gaggtgcaggatgtggtgaagaagcggagtccgggctcaatttataggtcgtcgaccggaatcggaggaggagcgcggattccagatcgcgctggcgagcttatcgtgcgggcagagccacgacgatggtccggcgaccaccgtttaaccgggcagcgccacctcagtgattctccgccacgtagccgaggatctttaccgtggtcgccgacccatcccgaccgtcgtggcgttcttatcgccggcgaggttctgatcttcatcccccccatgatgcactgtaccattgcaagcccgattcagtgcgcctgacagcccaagtttagggttaaatctctcttagttttctgtggtaacacacctaaagttctgcagcaaagttgtagactaaggattcggctacaattttgccacaacaactaagactaaattcctactagatcatgcttataatcgggccctaacttcatgccacctcactgtcaggccaaaattcagttttcagacagcctgacagcccatctttg

SEQ ID NO: 72599 - DNA, 931 bp, Zea Mays
cacgagcccatctatctgttgacgaatttcggcaccagtcatcgttgtaggtgggcggtctgtcactatgacacctttcgtaaagttcttgatgtctaggcggaatggatggtcaggagggagaaattgtcgatgtttatcgaaggacgaatatttgccaccttttttcaaccaaatgaacctaagagcttctttgcaaactgggcatgggaacttaccgtgaacacacaaggcgcagaatagcccatacgctggtaagtcatgcatggagtactggtaccaaacatgcattttgaagtttgtctttgtagctcggtcataggtccataccccttcctcccaagcatgtaccaatttatcgatcaaaggctccatgtacacgcccattttattccccaggtgtccgggaattatcaacgacacgaatatattcttcctttgaaagcacacaccgaggggggagattgattgggataacaaacatgggccaacatgtgtacggggcagcgctcattccatagggattgaacccatctgtggccagtgcagcacgtacattacgagcctcttcgactttctcacggtgaatggcatcaaagtctttccatgcttcaccatcagatgcgtgcaccatcttgtcaggattgtattgtttttcatttttgtgccatgtcatctgttttgcggattcctcggtcatgtataaatgctggatccttggtatgaacggaaggtgccataagattgtcaaggggatgttgagccgcctcttctgtccatcaccagagtctacctccatgaacctagacgatttacacttcgaacagtactttgcctccgcatattctttcctaaataacacgtagcccttcggacaagcatgcatctgctcatatgtcatcttgagtgcacgaaggaatttttgtgccta

SEQ ID NO: 72600 - DNA, 1140 bp, Zea Mays
ctgctatagcgctgctcactggcatgtgggccccgctggccatttactcagcccctcctgcgcgcgatgtcctcctcgccgaccggtgggcccaaaccgcgcaggatcgtcaacaacccccggttggagcgcgggcgcggcataggcggacctgctcgagctccgcggaatccggtgaattctgttggcgtaacggtttccgtgagctgggtggcgcgctgtgctggctttaaaaggctataccgccgcactcctcgcgactcaaccattggatagcccaaatttcttgtcgccattgacggagggagagaaccgggtgggagagttcgctgccggtctggggtggcgaagaagcttgtctgtggcgcatcaccggactccgccgcgaccttgcgctgccctctactcgaccgcttccgggctctgcgcccttttactctgctcggcgccctattccttgagtcaacggttcatcgccgaccaacgccgcaccgtgagctaagcttctgcgcgccatcaccttcggtgagaattctacccctcggttcaccatcgttgccgtagtgtgtagcacagtttacatcgaggattggggtagtggtcggtgttttcgctctcaccagttatggcgccgccgcggctgaaatcacgtcaccatggtaggagttgggggatagaagaaggctaggcgtcgtcagtttagcagtcaacggtgcagatctatctagggtgtagccttccgcgggtgggcgatctggtccattagatcataaatggacagccgcgatgtgatcctgacgttttaaatccaaaccgtcgaggtccgatctcgcggctgtgattgcataccggttcagggataatcgatctaatctggggcgtccagatctaatcctgtggccgaggatgctccataccccttcggccctgtaaaactgcaaaagagaccctatgttattttggtatcaacccgccgtccatattcactgtgtatgtgtcttaggattatttgtgccaagacccctgcgtttctctgtttttatgcgcccaatctggggtccttagtaaattcagaaattaatatagaaaatggatttttgagtataaaaacaaatccaaagaattgtttaattcatagaa

SEQ ID NO: 72601 - DNA, 402 bp, Zea Mays
gttgctgggcttgctttttctcctatccgcaagcatcccttgactcttgtcgcagttgcactgttcaccgtccaagtctctggtcaatgaatgccaactgtctgcaaaatgtgctctccttggcattctggtctccagccaccttgtaatgcaaaccagaaatggctctctgtctaagggaccttagaacattgtgcggtgtaaaggggaagtaacacatgcttttggagtacgcaatgttttgacttcgaccggattttgccttttgattcatgttgaatttggcatctgacgcattacttagacatattattttggccatcctttgccaacttaccacatcaagacattattgtatctactcagcgttgatgccacataaggtatcaaattttcattaga

SEQ ID NO: 72602 - DNA, 288 bp, Zea Mays
cttagcaacaatttccttcagcttccctcctctacctctaccttcctttgatgttattgggtcacttacattggttgtatccacacctgaagaatacattttcatatacacttcgaacaactcatgccgaaactatttgtcccctttcctcgccaaatatctcttcaacggttatcttggtatacaaagatagcttgcatcttggatcaagacaaccaacaataaaaattagtaaattcaagttctccttctcctttgccttccccctccccttctccatctccatgt

SEQ ID NO: 72603 - DNA, 426 bp, Zea Mays
attaatacaaatttataggaactggaatggactaaaaaggagctaaaataaattttatatggattttacaagttcctagaattatttttgtgttaaaatcaatttctgatattatttatatggttttctttattaactggaccgcgcatcaatttttagagagcacagggtccgtggtgtaaaattgtccaagacacagggcattgctaactggactgcgggttcaatttgtaaaaacagagggtctcttttgtgaatttgcaacgacgaaggggtatctacggatctgggccgctagatcaagcacggacagccgtgattaaatcgacccaagtaaaccccagctctcacacgccactgttggatcctagctcaaggatccaaattttatgaaagttccctacacaccgaaccgtccgattaaac

SEQ ID NO: 72604 - DNA, 713 bp, Zea Mays
gaaatgtgcgtgtgtcatttgaattccctctgcctagtgtttgtgcatctggcatttgattttcctctcggccctctctcatgctaccacgcgtttggtgtcgtttcacctgctgcagccacgtcattgcgaccctcaaatagctaaaccgttttagaaagaataatagtagtagtacgtaagtggagaacctttatatagaaaacgaaaagggaaggtgaattatttatcaattatgtgaagcctctctctgaaaacaaacaagggatgtcaaaactcaacaggacaaccgggtcacgtcgatgtgatatgactatatgaggcaccagcttatggatctttctgtgcctactaccgtttttgcctagtccagcagtccagccctggccacaattaaggtttctctaatttgactgccacaggcacctggttttcttgctgcttccgctgtttcttcctcaacctctccagctcagctgccgcaggctgcgactgccatggattccaaatccatgttagtgttcttgcccgtctccctttccgtttcgtttctctttgcagtttgctggcctcccttgtttgtttgtgttaatgttgattcgatctctggttgagaaaataagtagacaggtggaaggaaaagttcagtacaatttgcaatagtttggacattcatatatttgggtattgatgtgccctacctccattgcccc

SEQ ID NO: 72605 - DNA, 489 bp, Zea Mays
gtttattaagagaggaaaaaaatgatgatgcaagctgtgggatctccaaatcatttatattagctgtgtaagcttaccgtgcctccatgacaatctggccttggaagattaccagagagattcattacatactgcatgtatacatatagcaaagcaacaaggaatggttccaatatacgcagacgatcttgcatatccaccacataaattcatgcaatatttgccgatctgttgatatctacatgcatgtctaatccattacttatttccaaaactagctcgtcaaatgagtggctcgctactccctttatatactgatctgcattatattgccaagcccattgctcagctccattctgaatatcctcgctcaaatattacacggcggggagaggcttagcggcaagagatcagcaggcaattcggtatgactggccgccgcagcagcttggtttatgggactgccattgccatatgtgtgtctattct

SEQ ID NO: 72606 - DNA, 772 bp, Zea Mays
aaacagagctaatctctccactaaaataggagggctaaccgactccctctttatctcttcttatcttctaaacaaacagcctagctaggacttatcctttgtggcgcctggcatactgccggcccacaaaggtgtctacaacatttcctccctcgctgacgaagagctcgtcctcgagcgtcatggctggatatctaagcttgaagtcttccagctgctcccaagaagtatccatctctgctcggcctatccacttgatcagaacttcccacaccccctgattcagccttgcatggaggactttttctgatgtagggatgactctgccgttgaggagctcgggcagcggtataacttgggttggatcctcccctatgaattccatgagtagagaaacgtggaacacatcatgtattctggccctgggaggaagctacaacttgtaggagacagtgcccaccctcgatagcacttgatatggcccaaagaactttgggccaattttgttgggtgtagcagaagtgacaccaaatgctgtgcgctgctgtaagcgcatccatacccaatcgccctcatggaactccacttctcgtcgatgtatgtcctggtagcttttcattgtcacctgtgactgaatcaatcggtcacgaatatccgctaagaattcgtcacgtgtctgtagttgtttgtcaacagcagccacctgtgatgttcctggatgatagggcagaagagcaggaggttctcggccatataccaccttaaatggaga

SEQ ID NO: 72607 - DNA, 781 bp, Zea Mays
gagctggtggccgagcgcttccagcgggatctcgttgatgacgagtagccgaatctgcagagagaaggcaagggtcccactgggatgcagcttgtaatattttttggtcttcgtaagatacttttgagtactatttatcgagcagtattagcacttatctatatgctatttgtccttgctgtgtgtggtgttaccaactcctccccagtacttggcccccctgggatgtaggctcgacatgtcgatgctggataccagtatacctaagaaagagttggtgacccggcccccaggaggtagcctcgactaggacctggacctgtacacagcttcggctaggaagtgttagtagcgcacccatataacccatcgtctggtatgagtcatcctttgattcatgcaacaggacctgcaggattgagtctgggaagccaagcctcatgtccggacctacaagatcacagttccaaatactagggaacccgttgcagagtggtagaggtgcaagcttagggtacgggaccaggctaagtggctacacagctccggaccaccccaggaaacaagcgcccattctctagaaccggacccgcacgttgccggaccccctgtatcaggataggggtccagtactgcaagcctatcttactcaattcagatgtcctcataccagcaagggtgggaactgtatgggtgggttagataaaatatctggaaactgtagcagcatgaaatcatcccagaagcacatttgagggggtaaatccattctttataactt

SEQ ID NO: 72608 - DNA, 434 bp, Zea Mays
cacggggaagagttggagccttatcattggactgttcaccgcgctacttgtcgcgcgaccagccgaagtgttctcgctggagtttctgccctttgtagccgtgccgcgtgcttacgcttgttatcatgtcacaagacgtcacagtggacaacccgtttaccgccagggtctttacctcgtgagcgccatgatagttatgctctgatgactcacctccgctctgaccacaagtcatcccatctcaaattcgtgaaaccctcaagtggtatctataaattgagtgttcagtgtgctccgttagcttgttacgaactcagagcaccactcctcacccccgattagccacagtagcgcccgaatccgaattttcccccaaatcggtttgcggcgccgccgtgaaacaccccaccatggccagccgttcttaggtctat

SEQ ID NO: 72609 - DNA, 601 bp, Zea Mays
gttgatcagtacgtgctgtgaccagggaataagcaaaggtattgtgtcgggtagccgtctgccctgtcatgagttttagtacggagctgatccaatctagaattagtttcagactcttgctgtagatggaaaaatcttgtggcgctggcctcgatccttgtaatccctgatttcgattgccaatcttgaacggcgagtcaccacttgtttgtcccgatctaaccgaagattgattttagctatcaatctggagtttttgtgacgatcgacgagatatatccaaagcagttttctgatccgattcataggagcacgtatttacagtttctgctttgatttatctgtcgtacgggaaaacaggataggctagcagcagctttattctcacctggttttatctcacaggcacaacacgttgcaccttttgctcttgattcacatgcaacagctaagaatagaaaatattttcaccactcaacaacagaatgtgcgggacttgttagcctcgatctgcgcacgatagcgaattgattcgaacaaggcgcctgcaacttcacaaccgaaaaaagcacaagaaaacgtggacgaggggcgaattgat

SEQ ID NO: 72610 - DNA, 1478 bp, Zea Mays
ccacaacaagtttgtagcccaattataggagaacaactttgctaaaaagtgtgagctcagttgttaagaaaaatttggagataagcatgctcaaactttggatgtcaggctggattcattctgaaattcagcttttaagtataacagggtcaactttgagtttgaattcaaccttgatccagtgctcaaataagtttaaaccctatagtcgagttgtagctggtatgtagcactacaactttgatgcagagacttagacatgttgccacagggaattgagagaaattggagctccaaagtactctgtcagctgctctgaattggtgttcaccatggtacagtgctctgttgaagatcagaccgccagcgccaaaagatctcaccgccggtggccgtcgtcgttgatcgattgcgtgctgcgactcgtgcgccgtggccttggataagcacaaaccagtaaatatcccagcgtctggtccactcgagctcggtctcggctaagcatgccgtactttcctcccagccgtcggtcgctcagataactctcaccaccgtcgtgctgtcaccgtcgcgcaccacgtgccttagcgctagctctcgttgcggtgaatcatgcggcgcatgtccggtgatcaccggagttactgccacgccctaggacacgtaaccacgcgcgccaggcttcttcttcacctctggccgccagctcgccgtgggcaaattgagagccaccgctctcggagtctttaaattgagcccaccgttagctccgcaacctcatcacgtaccccatcgtccagtatcacccccagtcctgccaccgtgagctccaattccaagttttccccaaacctgttcgaatccaccgtgaaggtccgttcaccgcggccagcacaagccaggtccgatactgtcatcctcagtcttgttctaacattcccttgtgcccttgatgctctccaaaccatccaattgaactagaccgccatgaatcgacgggaacgcactcatcggtccgccttgtccacggtcgccgtggctagaccaaaccttgtgtccattaacgaaattatgttgggggaaatggtcggggtagatccaatttcatgtcagtcgcttggaaaccctagccgttgtcccaatcggccggcgtagatgctcgccggagcgcggctgtgcgcaagcgctgtcgtggacttccaatcatgaataggtagaaacgcaggggtctttttgtaacggtcagtgacttggttaaacagtgaagaagctcgttttcagttagtctaaaactcggggtctcttctgcaaggatgccaggacgcgggcacgcgcgggcgcgttttgccctggtcctgggccgtttgggccagaaccggcccagctctgtttaatccttttctttttctttttcagcagagctttagaaatttgtagaaaaatgtgaaaaaatgctaaaattatgaaaccaattttcc

SEQ ID NO: 72611 - DNA, 306 bp, Zea Mays
cttggaattacactgagatgccaggattaagccgtgagatcatagagcatcagctgcccattaagtccggtttcagacctttcaagcagaaagctagaacatttcgtccagaccttctcccacgaatcaaggacaaaattcaccggctgctagaagctaattttattagaccttgcagatacgcagagtgggtctccaatattgtgccggtggaaaagaaggagtcaggtaacctcagagtatgcattgattttcacaatttaaatagagcaactcctaaggacgaatcccatgcacatagccgac

SEQ ID NO: 72612 - DNA, 311 bp, Zea Mays
acgtcaagcgactttagtcggataaactcactccaaaatcagacaagtgcatgttcgtgggatatccaaaggaaactttgggatattacttttaccaccggtcagagggcaaagtgtttgttgctcggaatggcatgttcttagagaaagagtttctcaaaagagaaaaaagtaaacaaaaggtgtatcttgaagaagttcaggatgagccagtgtcacatgatccaacaagtgatgccaatgtagcagaacaagttgagacgtctgtggcaagagaaacaccaccacaaccacgaaggtaagcaagtctt

SEQ ID NO: 72613 - DNA, 637 bp, Zea Mays
atcagcttgtttggcttcagcctttctcttctcagcctcctcagcttcagcattcttcttctccatctcagcattcttcatctcgatctcagccttcttcttctcagcctctgccttctatatgttggcaacttgaatggccctatcgctcctccttgcgtaaattatatgatcctggtgcagttgagtagaatagccaaattaacatatttgtattataaaagtgaatcatttatattataaaaaagacacgaattgcatgaacatacctgggcagtaggatgctgcatcccagtgtccctgctcagaggctcctcttctgtctcaggtgctccctgttcagaatctatgattaattgcaagttggcagaggttatgattactatagtgggtggggccgattgcaactagggtctgctttctcttgggtatcagaggagcttaccacaggccgttgatcattgccaggggggtttgaggaagccttcctcttgcgaacagtaaatcgtggtgcacgagtctgctggctattgggaggggactggaattgtagaaaaaggaaaaaagcataatattaatcagaaaaaggagttgatggtaataaaaaaacacaataaactaacctcgccatcaatgc

SEQ ID NO: 72614 - DNA, 730 bp, Zea Mays
tggcatctaggccatgcgatccaaatcacacggcctagtttagatctcccacataaacaaactggtaccaaaacctggcccttagatctaaataccacggcgcgaattcaattcaaacgaaggggtaacctggagtcgaccagagccgtctatacttgatctgacggacaccagagccccgaccgaaacgttacccactcatcatatctgggccgatcacaagacgatcaatgacccatgtgcgtcttccccacccctatccgagccgggcggcactgtgcacacacgacggcggcggcagactggcaatcaccgtctcagtgcttcagtgaaccatcccacgtgccaactagcgcaacacaacacagaactcattgtgaaagctatagggccaactcaccgtggtttagggtagcatagaaccacgcccacggcgaagagcggcaccttggcagcgaagggctccggtgagcaatccctgatgccctgatgatcaatcgttcccaccgagcctgcgaacgacgttactttccacttgcgatgttcctcggcctgaccatgcgtaaagacaggcactgagggcgagttccctgggcagcggcgatcctctcggcttcacccgcggcaagtcttaggttgggctcaacgctcccggcacgtgatggataaggtaaggaccgcgggtttcgacaggttttgtacccaggtcaacgcccaagcaagagagcaa

SEQ ID NO: 72615 - DNA, 326 bp, Zea Mays
tggacaagtcacagcaatggctggcaatgaagttagaaaatagatgcagtttgcagtttatatgggtcaaacattttacattatagttctaaaaacaggaggaaaccatgcaatgggtgcacattttcacttcccagaattaggaccaagtttaaaccaacactttgctaataggactaaataatgtatgtgcatcacagcatcaggtgacctgcattagttcgaatgtttttagatcagtattttgcaaaacaagacaaacagtaagaaaatattaactacctccagtattcaaaatattttaaatcccataagtactccctccg

SEQ ID NO: 72616 - DNA, 473 bp, Zea Mays
cttacaccgttcaccatagtgaaaccaagatgtattgagatttgaagcaaaacttctggtggaagaggatgaaggttgatgtttttaagtatgtggcagactgtggggtgtgccagcgtgtgaaggctgagcataagaggcctgcaggtttattgaagcctctggaaattccagaatggaagtgggagcatatcactatggattttgtggttggcttaccctgttcccctcaagctaaggatgctacatgggttgttgtggatcgcctaactaagtcagcgcactttattcccatgaagaccaccaattcatcttcagaattggttcccttgtatatgaaagaagtgataaggcttcacggtgtgcctaagtctattatttcatatcgggactccaaatttgtatccaaattttgggagagtcttcatagtgccctgggtaccaagctttctcttagtgttgcttttcaccct

SEQ ID NO: 72617 - DNA, 690 bp, Zea Mays
gtgctcttcaggggaatatactggcttaggttctaggccatgttgcagaaaagccaagcggaaactgataactaaaggcagtctgtcgtcgattagagatggtggaaatggagaattacgcccgtactagatggaggtttacaaataggattgtgttgtaaccaaaccacctatccttttgtttcgttgttggtagagtggaaggtttgttcctcctcttcggagcagacggatgtgctacggatcttataataatttagctctattctcttggcgaggtgaaagccggatatattatacactatctaaaaaagaggaaccaaatgcccccgtgtgtaagtacatgcatgctgcaaaacgggttggtgaccggtgagtatggccattgtgtgaatgaagcagtatttttttcgctgaccccaaggtgtctcggagctcgtgtcgagatgcgcgcgtacgtcttgcatttttccccacgcaaacatgcctcagcagtccccaccaccccggcaccccctccgtgaaagtcgatcccatcagtctgtgggcctgcaatcctgcacacactcgctgcaacattccaaaaaccctcatcttgttccattttgtccctcggttctcgtagctagacgactgcagaaacgccaacggccggttactgaaggaaaagaagaagaagaaagagagcag

SEQ ID NO: 72618 - DNA, 381 bp, Zea Mays
ccgtagcacagcagaagcgcgacccgggaggggccactcttcttcgaccgcgggaggacgaaacggagaagaaaaccaaccaccactaaagctggaacgcgacgagcacggaagagaccagagacgggagaggaacgacacgaaatatgggaaagaatgagcaccaatgaaatctgaaggaaaccctaatatcgtacctttaatctcccccgctccacgcgacggcgcatcccgacggcctctatgggccgagcccgacgcagaaacccccgaggaccatccgatccagcgcgcgagagggagagacgacgctagccccacgacactcgataggatgcggcccatggagctcggacccagcaacgcgggccgacggggaac

SEQ ID NO: 72619 - DNA, 310 bp, Zea Mays
gtggactgtggacactattttaaccaagttcagggtttaaaacataaagtctaggacctattggcgatggttcttctattgcggtggacaacgggtcaattataacataatcaagggcctcttttacaaatctggctcggcaaaggggtatctaggaatcttggccgcgggatcccagatctacggcgtggaataaatcccagtcattacagaccagtgtcaagcctggcccgtccgatttcctatccacagtagtgatttaatggaatacctatgctccactctaagccacccgatcccgatcccacgg

SEQ ID NO: 72620 - DNA, 743 bp, Zea Mays
ctgttagactgactgaagaagaatctgatggtacagtgaccagaagaatctattggttcagtgaaccggccgccggcgaccccgtgcgtggattcacgccggtgaggtgattcgtgctcaccggcgcctggataacgttccgcggtgaaaagatcttctccccccggatgagcttaaggcactatttgttcggccgccgtgtccgctctaccccgatcgccttgaatcaatcctcgccggactttaaccacgccgccatgactcatactgacctatgcagagatcgccggtgaggtggccacggttgcagccactaatctcgtgcgccagtgactcctttcttctccgaccgccagcgcgccaatccaaaattgaaggccgccgctcaagcacactataaattgatggcacggtctgctgcattgggtcatcaccaagcctgagcacccgttcctgccgccgattagccaccacaactctccaatttcccatttcccccaattctgtttccaccgtcgtgatagagccctcaccgtggtcagcgtattccaggtctgttcatgctccctgctctcttgtttcagcatccttaggttctcctgatgctcctcgaccccgccaattggactaggaccccttagatcgccgggaacgcgttcgattgcccgtggtgcccgctgtcaccgtggatagagcgtgttagagctccgttaatgaaattagttgaggggaaactcttgtta

SEQ ID NO: 72621 - DNA, 725 bp, Zea Mays
gccgtcacgagtacggggtaatgcaactatgaaatccataccgatttcttcccatttccattctggtaccttgagaggttgtaacaatcctgctggtctttgatgttcggccttaacttgttgacatacgtcacaaagtgcaccatacgtagcaacatctcttttcaaactgtaccaccagtacttttccttcaagtcctggtacatcttggtacttccagggggaataaaataagccgaatcatgagcttctcttaagataagttggcataggtgctcaatttctggtacacagattctctttttaaaccatattgtgccttgttcatcttcggtgaaatccaaggtctttccaaaattcatttgtgccttaatttccttgattttcccatcagattcttgtcctttacgaatctcctgttccaaagtagattccacttccataactgttgcttccatattattgagcataccaaggttgagttgttccatttcacaacataattcctatggcatcaaataggtagtaatattgttcacttgacctttacggatcaaaacatctaccactacatttacttttcctgggtgatattgtatttctaaatcatagtctttgattaactcaagccatcttcgttgtcttaggttgagttccttctacatgaagatatatttcaagcttttatgatccgtgaagattttacacttgtttccaatcatgt

SEQ ID NO: 72622 - DNA, 512 bp, Zea Mays
taacgaagggccgatgttttttggtgaatcggccaaaacaaaggagaagaaatacatagaaacaactagtaaaacatcggacacaaaatacttcattcctcgatggtgcccattgggactaacacgctcacaaaagcacaaattgtagcgtctgagagcaaacgagctgcagggaaaaggagacataaaattattcaatgatacacatccacaatacccaccaccacagaagaggtggaaaccaaaggttgccgaagcgactcaagcggtcgtaaaaatagaaaacaaataaacacatatacaattccctacatgtactgcagatagtccggctccagcagctagaccgtccgaacctcgcgactagcgcagaccgtttgacccctacgtttggaccgtttgcgcctcaccaggaagcatccaaagacatgataatgcctatggatgagtacaacatcaaagaggacgacctacaaggtggagacctggtcgactatggagctttgcccggg

SEQ ID NO: 72623 - DNA, 404 bp, Zea Mays
gtggtttgcacgctaacatttgcttttgcgcgcgggtagaaagaaacgtgactttttcacgtgcctgcgtaaccacgtcagcagagttagtaggactgtggcgcaggtagttaatccgcgggcgattctattaggtattctggttgagctaactgtgtgtcgacggtgggccccgtcggagaagctaaaaaaatttgaccatctctctccatcctttctcattttctgtctccctctccctccatacgttttctcatttatatcgtgtcatcgtgtggtgccgtgcctgctgcgtcgcatcttccttgcatagcgaggcgaaagcctgcaggtggttggagtcggctagtagcctagtatagtacccaagttgatcccgccatcggagacgcgacagccggtca

SEQ ID NO: 72624 - DNA, 606 bp, Zea Mays
attatatttcaaggaactcccacgaaagtaaaagcatgataaacaagtcttgcttctgccattattttatctttccagcattctgcagttcacatttttccttgaatacacgggagagctgtgtatctttgtattaggagtgaaaaaagggggtccaatacagactacagaacttcgcctcctgttctggaccaagcagagaggactgccaaaacaaacacgactactgagactaactaatcagacaataactgtaggacctaagtacctaaccaacactgtgaaaactactaactagcccacccctcgaactggactcagttctttaagatgtttggccccggcaaaacaccaaagatggtgttctttagcaaaattgtgcagaggccttctgcatgttgggctgaacaacggcattcctatgctttcaaagagaccaagctcctagaatgatggccgagataactccttgctggaccagttttgagaggtgttcaatgctctccttcaatcagcaaaagaggattcagcttgacttggctcttgaggcaaagcccaagtttgaaagaattttaaaccagaattctctagtgaaaacacaagtgg

SEQ ID NO: 72625 - DNA, 403 bp, Zea Mays
gtctaccaagggttgttgtctctcgtaggacgagattgtgaagttggcaaccttagtcgtagatcagacagagaagacgaataagggccgatacaatccccacggctatccgattcatggcctaggatatccgattcatggcctaggatatgaaacatgcgtctctagttatctgtattgtctttagaccaaagtgtattggaagcaaattagatctaatagaccggcataatcgtatcatggaggggacgaaaatggggaagggtggggcagggatatagatgtaaaggaagcaagaagcccaaaagcccgacccgtttaacgtttagcctgttagaggccggcttttttgtactaaaccgtgctcatcggtccactttatctgtttttggtccggtttttt

SEQ ID NO: 72626 - DNA, 689 bp, Zea Mays
cgatagcaagagctagaagcagcaaaagtaaatttctctttgttgtttccttcttccattaaaatttgaccgattggtcgagcagcctttaaatcggtagatgggtgttgggccagcatacatcatgtcattaggagaaagagtttggggtgcgttgggttgatatcatctagatttggtcaaggatcgagctggaccactctcattccctgatcgggggcaaaacggtcgtattagttgtcctgatgttcgtcgtacctcctcgcctacatgaaatctaacgagctgtgatctatctctacatggaagtgagggaaatgtcaccgatcctactctactagaattgttgactccgatgctggccgccgaagtaatcctactcatggtaactcccctcaatcctcaaggtatactccctaattttttatcttctagttgctaaggttacaagttaaggttccataaaactaatggtggtatcagagcactagattttgggatacaatcctaacctaaaagttcatacccttcagctttgggtcgagtctaaccaaatcacctcaaaagtctcgaattcgtgtcaatatcttattagaacaacaaatagaagagaaggctaaaattaagacataatttctaaccctaagtcgtagtccccaaatctcccaaaccctaaccctaagatcccc

SEQ ID NO: 72627 - DNA, 293 bp, Zea Mays
ttctcacgacgacagcagaaaccgaggataatccaaggtgttctaggcaatttatggcggtctagttcaacccaatgggtcggtgagcttcaggggacatggggaaagctagaacaccaattaagaaagcttgaactgacctgcagaagggtgtccacggcgaggtgttcacgcggcggtattttggctgatttgggggaaatctgaaattggcgagctctggtgagcaattggaggcacgacttggtggcttgggtgctttactaccttacggacccgaaggcacgctcaat

SEQ ID NO: 72628 - DNA, 434 bp, Zea Mays
tgacaaatttgatagaaacatgcctcaaagttcaaactactgttgagaagcgaaataaccgagatttccaagtccgttcaagagtctatttccaactgcttcgtgctttcccaggtcctccatttcacccccatcgccgtgcaccggcaccagcgcgggcgcgcctcgccgcccccaccgccgtatcaacgcacgaggatgctgccgcacgcgccatcccgaacctcgggggccctcaggttcaaaccgcacctccccaccaagccgccgctcctcacctcttcctccaccgccacccccgcctctgcctccgcctccacgcgcggccgcctctgcgccgccgccgccgccgccgccacacgccgggacctcctcgtcctcgtcccctcgctagtcgcagcgtccaccgtcctccagtcccttcccctcgccgc

SEQ ID NO: 72629 - DNA, 394 bp, Zea Mays
gtcgcattataattgtctcttgtgcatcaacatgcttctctcacctttattcccataataaaaacttgtgaataatgtgatgtattgccaccttgcaaactctaagaaatgccttacctcgtgtcagattggtaagtcttgttaggtcgtgctatgtgtttctcttgtcttgctagctaggtggtattgtaattgttcaaccctctttgccaataaaaaaatttgttgcctgttttgcccataaaagacctccttcttcaaacaacctagtggttagcaagtgaaaccctaaaaaaatcaaatcacatgcttgtgttggtgttttctagcccttgtgtgttgcgctattggtaatgcacctgcacagcttatagacccccacagcttgaccgct

SEQ ID NO: 72630 - DNA, 463 bp, Zea Mays
gtgagaatgggagatgccgaggaagatttctgtctaaagaaaggaagtggtggacaagcttgagcttggtatggtctatggggtggcccagacgggaggtctggacatgacaggccctttaaagagccttttgctcagatcgtggtgtgatggcagtacctgttcctgtagcggtgtcttgtactaagcgctaggctagtgcttgcggattcatcatctatactagctgtagccttttacgtacgtatgtactagagtactgctcctgtattatgtgctctattattaactctatatattatatggttatgaactagtagaagaattggcgaagaatgtttagattagttgtcttataagtagtaacttcatcatgtccatttaatttgtattattggaatgcccttgaggccctatttgtcatggctcgaccgtggcggcaccttccactacacgacggttg

SEQ ID NO: 72631 - DNA, 842 bp, Zea Mays
ttctcctgctcttgttttagctccgatctgagtgttgcaggaagtaagatcgaattggggctactgagatggtgacaataagggggcgtagctactgtcagtccagtcgttgattccccgaaacggtggagtcataacacccaaccgagcatcgctttcttcaagtagaaacctgtgttcgtttggggaggatttttaacaaaaagcaggcttgagatctagccaagttcctactgaagattttactacggttcctttctaattcactgtttggaaattgtgagttgaagatatcatttgattcttaggagcccatggatttgacatcaatgttaagttttcatttgtacaaaaaccataatcaatgattgatgattgcacaagcaaataatctgtgtctgctgaaggggctcacgaaattattcgtgtccgatggtttgtgggggccagttctacgaatgcccttgaactgcctatctattgccttttatgttgctgtgagaaaaggaatgatcttggtatcatactatcatgggcgatgcaatgagaagatagaataagtcaagttgtggagcccaacaattgtgttcacattttagattttagtttagtgagaaaagaagtttagcaatatataaagttatcttttctgctgtttagagttgtttcatctagtggcacccactatgctgatgctggaatggcataattctagactccttcgaactgttattcccaacttctggaaccccatttttttagcaatttggccacaactggatgcctatcgcttttttctttatactgcaaattatttcattattatgttttctaggtttctt

SEQ ID NO: 72632 - DNA, 377 bp, Zea Mays
tgcttcatctttgccatggtgactccattgcactttgcacatctttatcaccttatttctcgtaacacgagtcaatgtatcaagaatcttgacaggatactccacgtaagtcaaatcaccctgaacactgagctcttccattggtaactgttccttggggacacggagacacttcttaagttgagacacatgaaatacattgtgcacatcagatagactagcaggtagctcgagttggtatgctatctccccaactcgcctaaagatcatgaatggtccaataaagcgaggggacaatttgcccttatctttgaatcccttcattccccgaagtggtgacaccttgaggtacacatgatctccttcctcaaatttcc

SEQ ID NO: 72633 - DNA, 428 bp, Zea Mays
tcgtctagaggtgatttctagaaccctagccgccccatccgttcaatcatcgatttgacataaaataaccatctaaatacattcaaatttttgcaccatattcacaatgagtaactcgagcaattccaccaatcaaaattgtaattccactgcccaattttagatcagagagaaaaccctaagaatccccaactttgaataaatcagacaaattccatgagattttgaaataccgagatgaagacatggttgatgaactccaaacaatctcccggacagtccgcgcgcaagtttggttctccgttcgctcacagtcgacaagaatcacttttggcgtgtggagtgagagagagagagagggagacaaacgttgaaagtgacactctatctgcctctgcccgacttatctgcttgtcacggatggtccg

SEQ ID NO: 72634 - DNA, 474 bp, Zea Mays
agggaggatgcccacgggtggtggtagtgatcactggtccggtttccgacactgaagacgccgcccgggaggacgtacaagatgtcgtggagacggcggccgcgcgtttccagcgtgaccctgctgatgtcgagtagtttatacctgtagaaatgaggctagggctccgcttgaaggcagatgtaataacttttgtttttgtaagatgcttttgggaactatcaattaaacaactcttatctgtatggcatttgttcttgctgtgtgtggtgttaccaactcctcttctggtacttggcccccttgggatgtaggctcgacgtgtcgaggctggataccagcatacctaagaaagagttggtgacccagcccccaggaggtagcctcgactgggacctgacctgcacacagctttagctaggaagctttagtagtgcacccataggacccactaactggtatcttttatccttt

SEQ ID NO: 72635 - DNA, 1748 bp, Zea Mays
ctgaaatcttgccctgtcaagggcctgggcgtttagagcagggggccctcggctacgaaggtcgtagccgcggtttgtcgtcttctccggcgtggttatcccccacagccgtaggcttagatggtagagagagaggtggagaggagataacttgtttgctgccctttattcctgtctccctgtgccgcatatatagccatcggcctgctgtcctggagcctttattttaggaaagcctaaacatggtaacactaatcaatcagtaatcaatcaccaatcaatcactaatcaatcaccaatcaatcactaatcaatctctcctttccttccctcaactttccattcttctattttccttcctgaccactactttccataggttcctgctgatctcccagatctacgcgcccccccagatcgcgctcctggcgatctgcgcgctcctgtgcgcggcgcctgtcacgggcacgacgctgcctggcgtacgagcgcccgtacatgacatctctcccctcgtcgaagaccagctcgtccttgagctggaaggctgggaatcgggcgcggaagtcgtcgaactcctcccaggtggctgatgaagctggttcgccgctccagtgaacgaggacttgccgcacgccacgcgacaagcgagcccccgctattcttgcaggctcaggcactaccgcaccattgagcagaggcggtagaggcggcggtgtggtgggtggtgagcccacgtacttccggagcacgtcgacatgaaacacgtcgtgcaggcgcgcgccgggcggcaattctagccgaacagccacgtcattgatgagctcggtgacgcggtagggtcccacgtagcgaggcttgagcttcccggtgatggttcgtggtagggacgccgccacacgttggcgaaggcgaaggaatgcccagtccccaacctcatatgtgacctcccggtggtgcttatcgtactgcagcttttggaccgtctgagcctgctcgagacggaagcggacgtcagccagaaaagcttcccgtgcttccatttcttgtgccaccgtcgccacccttgtgtcgccgggcttgtaggagcggatggagggcggatcacggccgtagaccacccggaatggggtgtcgcgaagggatgactggtaggccgtgttgtagacgtactccgcctagggaagccagcgaagccactggcgaggacgatcccccgtgaggcagcgtaggtacatgacgatgacacggttggccgcctccgtctgggccattcgtctgcgggtggaacgccgatgacatgaggagcttggtgcccatgaggcgcatcagctcgctacagaatgacgaggtgaacagcggggccgcggtcggagacgatggactgcagaaacccgaggaggcggacgatgtcggtgaagaaagcatgtgccacagactccgccgtgtacgggtgcgctagggagatgaagtggcagtatttgctgaagcggtcgacgacggagaggatgaccgtttttccgtgcacccggggtagcgcttctacgaagtccatcgcaatgtccgcctagaccgccgagggcaccggtagcggctgcagcaagccagctggatgtagatgttccgacttgaaccgctggcacgtcgtacacgcccgtacgaagtcctgcaccaggcgtctcatgttggggaagtggaagtcccggcgcaggcggtgaagggtgcggtggacgccctcatgcccatcg

SEQ ID NO: 72636 - DNA, 660 bp, Zea Mays
aacaagctcttatacgaaaatccaagatctgggcactacaaatctgtctgtcaggcgctctgaatcaggttttcaatggtacagtgtccggatcagaacgccagttcagatgactcaccgccggcgaccttgcgcccggattcacgcctgccacggtgattcgtgctcagcgcaaatggataacggcaaaggctaagaaatatcgcattgtggatgaactctggcaactattctactccgtccgctgtacctgcctgtgtcatggccgcttcagatagattcaccagagttagccacctcgcgaccttgcgccacgtgccctggtgtcttaccatgttgcagtagctcgcgttatgcatagtcagtggtcatcggtgagctcgccacagtgaaagccaccaatcgcttgtgccaatgcacccccttctctctaaccgccaccacaacatctcaaattcatggaccaccactcggggagcctataaattgagcatgttgtcggttccgcaaggtagtccagcatccaatccacccgctcgtgcctccaattactcaccagagagccccaatttgggatttcccccaaatcggtccgaaacaccgcgcatagtgacctcgccgtggctagctcgttccaggtccgttcatgctctctgctct

SEQ ID NO: 72637 - DNA, 889 bp, Zea Mays
acaaaatataccgtagattgaatgggtttgccttcgacttgcttttcctgtacaaggactccactcactgcatgatgtgaggtcgctaaatatcgtagtaacttggctcctggtgttggtctagatagagtggtcaacattgacaagtatgatttgaggtcctcaaacgttgctgcttgtactggcccacaagcgaagtctttggaacccgtaggactttcaggaacatgagactatgcacgactgactatgaaatgaacttgttcaaggctgcaatgcttcctgtcaacttatgtacttgttttactatttccggcggggtgcatttttgctatggcctagattttgtcggggtttgctttgatgccttttctagaaagtagatagcccaagacgttgcccctgtgaatgccgaagatacatctatatggatttaaccgaagtctagcctctctcatgttagcaaagttcttcgccagatctgccaggtggtctgtcttatttttgcttgcgacgacgatgtcgtcgatgtaggtgaatatattctggccaacctagtatttaagtatggattgagtgaggcgggagaatgtggactcaacattcttgagccttttgtgcatcctcacgaaatagtaggtgccaaagggtgtgataaatatggcatttgttttgtcctcttcgctgagatatatttggtggtaaccagagaaacaatcaagcagggacatgaccttgcagcttgctgctaaatcgacgattttgtcggtgccagggagggggaactcgtccttggggcatgctttgtttaggccggtgaagtcaatgcacatgtgccatttgtgttttttctttcttaccataacgacatttgcaagccaagtgggta

SEQ ID NO: 72638 - DNA, 404 bp, Zea Mays
gaacaacccagaagttactgaggtgtggagaatgtactttgatggctcattaaagctacaaggagcgggtgcagggattctcttcatcgctcctggaggtgagcaactcaagtacacactccagctattgtttccagcatcaaataatgcggcagaatatgaagcactgattcacgggctaagcatcactgtatcactcgacatcaagaaactgatggtatatggtgactcgctagtgctcataagccagataaacaaagactgggactgctcgactgattccatgggcaagtactgtgtagctgtgcgaaaactggaggacaaattcaaagggttggagttccatcacgtggaaagagaccccaacgtagcaacagaagctgggatccagtcgggcccatgcc

SEQ ID NO: 72639 - DNA, 776 bp, Zea Mays
caggaacacgaccacaaagtcgtccaagaactcatgcaacatcctattcattgcttccataaaagcagcaggagcattagttaagccaaaatacatgactatgaactcataatgcccatacctggtgcaaaaagtggtcttctcaatatcctcctcacgaatcctcaattgatgataaccagagttcaaatcaattttggagaacacctgggcacccctcaactgttcaaagagaacctcaatacggggaagcagatatttattcttgattgtcacttgattcaaagcgcgataatccacacatagccgcttgcttttatccttcttctcagcaaacaatactggggaagcccatggagacctgctaggcctaatgaaacccttagccagcagatcatccaattgtcgcttcaattcaacctgctcctttgtggccattcgatacggggccttatgaatgggctgcgtacctggaatcatcttaatctctaaagctgcatcgcgctccggaggaatgcctgcaagctctgccggaaacacatcagcaaagtcacacaccacccggatgtcctgcacccgcatgacagcctcaccctccaccaccatggagaaaacgattcctgacttccttgatcggcgatccggaagcaattgcgccaacaaggataacgtgaacttagtggaactttccaagaataccacctccctacccgatggcgcctgcaataacattgtcttccaaaaacaggatataactgcgcgatactgggataacc

SEQ ID NO: 72640 - DNA, 1028 bp, Zea Mays
tatgtatccagtacagcatccggtctacttcatcagtgaagttcttggaccctctaaaaagaagtatccccaggttcaaaaactactgtacgtggtacttctaaccgctcgcaaacttcatcattactttgacgaccacaaagtcatagtagtcatcggttttccaataggggatattcttcacaacaaagaagccaccgaaagaatagccaagtgggcctacgagctaggagatcatgacatagagtttcttcctcgcatggcaataaagactcaagcactagttgacttcgtatcagaatggactgagcatcaggtaccagacaacctagaggctactaaagtatggcgaatgtattttgatggctcattgaaactgcagggagcaggcgcagggatcctcttcattgttccaggaggtgaacaactcaagtatgcacttccgctattattcccagcatcaaataatgcagtagaatatgaagcactaatccacggattgaacatcgctgtgtcactaggcgttaagaggttgatggtatacggagattcactagtggtcataagccagataaataaggactatgaatgctcgactggttccatgggcaagtactatacatccatccgaaaattagaagataagtttgaaggggtggaattccatcacgtggaaagagaccacaacacagcagcagacacgttgtcgaagctgggatccagtcaggcccaggtcccacctagaatcttcatccaggaagtatcacgcccaagtattccctcagatcagacagaagaatgcaacaccttgagccaaccagaattggaccctaatgactggagagagcctatcatcaggtacataaagaatgaagaagaaccggatgataaggctgcagcagaacgcatcgtaagacagtcggcccactacaccctcatagggggcgcactgtacagaaggggtgcgacaggagtcctcatgaagtgcatttcctcgactactgggaagcagctattggatgaaatcc

SEQ ID NO: 72641 - DNA, 403 bp, Zea Mays
ggtcggacagcaaggatgggagcaaatcaatccataaatcagctttaatttcgatcatatccaaagtggctttcacctaaagtacaatcgaccactacacccaataaagaggcgccaaatgcatgtggttgattgcatctccatctatctatactatactatacgtctgtgtgttcttctctctagctcgtcgatgatccatcgattgtccagtatcgatcaattgcctttattctaacttcacacgaaagtaaaaatcattgcgcacttgagcaaactaacttctactacttgacaaagccatatctaaaaaaggactcactaaaatttaggtctccgaatttaactttccatttacacatatgttttatattaaatttatagttttatttccttgcaattt

SEQ ID NO: 72642 - DNA, 529 bp, Zea Mays
gtctatataaataatgaattccttgagttgaagataatgcctccattggtcaactgcaaggatgatggccaaaaattctttctcatatgtggacaagccttgattgcgaggacacaatgccttactcagataagctattggatgtgtcagcagcaaggaagactacaggggagaataccagaagggcgcggacaaggacacagaacagaagaagctgaaagaaaatgtgttggccgtcatgtgtcaaagccgagtgggcgttacccgtcggacatgtggtccgtgtaaggaggggcgaggaagtattttagactatggttgtctctgtgaaccctaatatttaagaaatacagaacccttctcctatcgtcttcttcctctcgagctacttccttctctcctctgtaatcaccatagttggtagctaacaattggtatcggctgagttctcctgggactgctcgtcgcagcaggcatggccggcgcctccgagtcctccattacctcggcgttggaagctcaatccaag

SEQ ID NO: 72643 - DNA, 717 bp, Zea Mays
caaccattagggataggcgcgatgtcacatgagacaccctttattgcttcctaggctttagatttagtgagctcggcttccaagcccaagtcgagcatttgatagacaagatacaagacatccaatgagaactagtaacacctcaggtgttagcaaaggatattaactcaacccacaccagttaacctatttttcatggggaccacttagtgcaaaagtcactaaaatcaaggatgaaagccctaactaggcactaaatatcctagaaggcttaacttggccattccctagtgattaaatgaaagggtgtagccgaaaactttaacctcacactcttaagggcacaagagcactaaaacaaagtgatcaaaagaactgaccaaatcacttaaccacagtggtcccttaacaaaagttgtagataattaagtgtacaacaaaagtttccataagcttaagctatgaaaatgaaagaagttactcaaaaatataagccaaggtaaaatccgaaaagaaagtttaaactttttaagtcaaaacatacacttagtcttgaactctctcttgttctctaacctcccctcatcaaatcacctcggtctaaacatgaaaaatgtgtaaaaacatctgaggcacctaaaaaaagatgaaatccaaaccaaatcgtttgacacgacttgacacggtttttgcctcggttctagaacagttgacaaa

SEQ ID NO: 72644 - DNA, 704 bp, Zea Mays
ggttagttcatgccgccctctccctcgtttgagcactctcataactctgtgatgcttgctgaaccaccaatttggacagagagcacaccaatcgccaggaacacgagcaaaggtccttagccttcgctgttctcgtggacagggcagagtaggtcaccaaccgtgcaattaacttagggaaaatgctcggagtaggtctaatttggtgtccgccgctcgggaacgccagtcattgccccgttaggccgatctactagctcaccggagctccaccgtgctcaccgtcgtcgtggacctccccctgcgaagaattagaatatggagggtttatgtgcaaaccgtcagtgacacaatgaaatagtaaaagaacccgttcccagttagccaaaaccccgagggcgtttctgcaaaatccccaccgtaggcgcgggcgcgcgcacttctgctgtggttgggccgtcctcgactaaatcaggcccagtactattcatagatttcccttttctttttcttccagagccaaataaattctagaaaatggtagaaaaatcctaaaaatgtcaaactaattttcctagattccttattttcatagtatttaataaaaataatttcatgatttttagattaaataaggaattttggagtatttaaagtagcttaaaacattagttctggatttttagaaaatagataataagtcc

SEQ ID NO: 72645 - DNA, 541 bp, Zea Mays
gaagaccgtcgacgcggtcttttttcgacgtagatttttgcgggggatttttcacttgtatattacatgactccgcctcgttaaaaacctcacccctcgggaggaaaagagtgcgggccagaataaaattgtttttgcgaattacaagggtgagctggccctgatgagtcaaacaaaaaatttgcggagattatcaatgttccaggaatgctccaagtcctcgccggatggcgttgcgagcctgtatgcactgggggatgccttcgtcttgacaatgaaagggcccttccacctgggttccagcttgcccctggactctgtccgagctgttcggacgagtacgaggtccccttcgctgaattccctcggggtgactgcgtggtcacgccatgcttttgtttgggcttggtatttatttagagcctgtagggcgaagacgcggtctccatcgatgagatccttcgaagtgggttcgtccacgtcggggacagctgacgagactgtccgtggggactcatgttttatttcttgtggggtcatg

SEQ ID NO: 72646 - DNA, 655 bp, Zea Mays
tgctcgtcgccttcctccaggcaaatgtcgatgtgttcgcatgggagccgtcacagatgcctgggatccccagggaggtgatcgagcaccatctgaagatcaaccccgacgctaggccggtgagtcagaaaccttgcaggcagtccatcgaacggcaggacttcatccgaaaggaggtccagaagctgctagacgttggcttcatcgaagtggttcatcacccagtgtggctggccaacctagtcatcgtccccaaggagaatgggaagcttcggatgtgcatcaactacaccagcctgaataaggcctgtcccaaggacccgtatccacttccacgtatagatcaaatcgtggattctacctccgggtgcgacctgttgtcattcttagatgcttactctggtttccatcaaatccagatgtctagggaagataggaagcataccgcttttgtaacagtggacgggctttactgctatgttgttatgccttacggtctaaaaaatgccttgccaacatttgtgcgggcgatgagtaagactttcggggacctaattagggataatgtggaagtctacatcgatgacatcgtggtcaagactaagagagggtcgaccctagtggaagacttaaccctggtcttcgacaagctgcg

SEQ ID NO: 72647 - DNA, 1717 bp, Zea Mays
ctggggtggccgcatgtaagaagttttcaatatcggcatggataccggcactgatcatgtacacatcagatgctgcttgctgaactccatatgcattattaacggcttcaataatcttatccaactcagacgatgatgcatcagtactgaattttgctttgttctgctgttcttcgtccctatccacacatgaagaattaaccatgtaacctagtaacgaagttttatcagaagttggtgctgtagaatctctgtctgcttcagtgccaacaccaactggagccacaacttcttcctgttcttccttgccaacgtatgaaggattatccagattatctagtgatgaagttttatcagaagatggtggtgctcttgcgtcttcggtgtcaccatcgactggggccgccatagcttttttctgtccttccctactatcaacacatgaagagttatccagatgacctagtagtgatgaaagtttatcagaagaagatggtgtttttgaatctgtgtccttgatgatgccatcaccaactggagccatggctttcagctctcctgccttgggattgggaagacagcttggagaactagtttcctcgatagcctctagggtaacatgatgaccactcctgggttttgcttggtgcactgtcgttataagaagcattctgttgctaccagctgaaacattatctccatgatcagtagtataaccggtctttgacgacatgttactgaaactgcgggccttctggtatttaccctttttctggtttggttttctagcataaaatgtatcatcatttatgtaatgtcctattgtaatgacctcacggaatggagctcttgggaagtgtgcacgtgctacaataggtcctgaagcagccatggtagatgaactagtcgtagcaggagttgatcgttgcatccttttcatcttctgtgctgctttcctggagacaacttcctggaaatcaccaccattgctagaataaccgctgcagagcaaggcttcttggctacagccaggaccgactgctaataaactgaagctttgatggtgaacatttggtctgtttccttcaccactcgtcgtcttgcgcctaaaacctcgtgaatctgtagaataatctgatgcagacaatgacggctcacttctcgcatctgacaagctgccagcataatcacccatggtgcagttccatgcattgccaccagtataatagtcattagcagatgaacgactagcagcagtggtgtatgaagtagtgctctcaaagcttttgaagtcatcactgctgctagaagcagatagttccttctcgttaccagaagatgcactgtttacagcagaagtgatgacaagttttgctgtcacccgacagctggaggaggaagaactgtattccagtagtggcacccgaacggcaacacggctggacgaggacgccgaggtttcgccaccggtcgcgttagcgcatgtggaagaaggttgttgggtgggtgacccagtctgcatttctgaagcatgtgactgttttctacccttgcctttgcccttgctcttgccctttttcttctttttgttgttcttgccgctcttcttatttcttgtagctttctgtttgtctgaatttatcttgataaaagtaccttccaggaaatctgtatcatcaggtggcttagctgaatcttttagaagccgtcctttacc

SEQ ID NO: 72648 - DNA, 376 bp, Zea Mays
caatgttttgcttgcaatcttgtagcgtcaggctccaacgataatgcaggattggtgtgcatagtgtgattgagataacactggatttgatacacatacgaatttggatttgttaatcgtggatcattatgtcaacactaggattttgtgcctccctcgtcaataaacgttagtattgatgtctcagtggatggagtgtgagtcgatttcattagtagttgattttaagtgacctgaaatgggctatcatttccgtgtcttctttgttatgcataccattgtcggctcagagggagaggagtagagtaccgtccaattttttgtttctccctggttaatttaatggactaaatatcctgctcaatatagatatcta

SEQ ID NO: 72649 - DNA, 522 bp, Zea Mays
aaagtcgcttcaagaaggtccaaataaggtccaaataaccaccaagcgcgagcagaccactatcaactctgtgggggtgacgtcagcctctagcctcggtgcaaaataggagcgcctagtagtcaaacagggcggaagagggttggtcgaacctaatgttgatacaaggatcgagcgagccaagcctaatctgaggggtcagccgaatcagacaagggcaagtgaatcacatgcaattcaaaggtcaaacatgcgaagctaaccactcccgtacttagccctcatcatcgcaatagtcaccgcaacatggagaagaatgtgggtcgtccttgttctaccaaacctccatacctcttacgtctagattaactatgggctgccactcctctcatacaaggatggaagttgatgttatagacggactatagggtatggtgaaccagcaaatatgggggcacaaacgtccccatcgatacaagttggttggggcagcaatacactcataatggctggtagaggggg

SEQ ID NO: 72650 - DNA, 1411 bp, Zea Mays
tgcattatcttcttttgcttccactataatgttctcattctggtggctgctatctgatgcattagtgttgcttgaatttttttttctggagcaggcatggaatcgttggagttttcagatttgtctaccacggtttcagaagttgcattttcggtgtttgctcccactacaatgctctcatcattgtgggtgctctctgatattgtagtattgtcggaattatcttctactgtagcaggaatgggatcactggaatttttggatttgtcaagatcaggctcagcttctttctgctgcaggagttcctttatagttgtcgtctaatctgggtttgaagcaattgcgttctctttcatttggttgatatggctctctttctccacaagagctgcttccaattctttctgcgtgttggtaagatatgtcgtggtagtttctgaatccatgagcttgtttttcaattctgccctctcaatacttaggacaaatgtttttcaattctgccctctcaattctgcttccaattatatttgtttgttacaaaatactttaaattgtcatttcatttaaactttttattgtaaactagaaagtatacatacatatacacggatttgtacatgtaatcatgtacaaaattcgccacacctcaaattttgtgcgtcctccgccactgctcgcccccacacctcgccctccatccacctccccaaatgatgtgccttcctggaattaaaaaggccgaagggaggccacacacgagaccaccaatcggacacacgcgagtacatccgacgcccaccatcagccaggtgatggtcgattacgagttcatcctgcgcaattctttcttagtgttgagtatgttgttcttttttctagacataggttacaggtttatttcagaaataagtttatgcaatgtgtttctgcaatgtgttgggttcagtcatacattggacagtcacaggtaggttacaggtttatttctgaaataagtatatttctgagacataggttacaagtttaccgatcctctccatgcaactggtctgttatgtttcattcgattttcagttaagtcatagtactaaactgcacagtctcattcgattttcagttaaatcaatctgttaattttgtaccataattttaaatatgttcatcttctctttgtgcatttaaatatgttagttttgtacaattcaagtatgtcaaaccaattttgctagactatttagtagtacggatatctttaactttgttgcctgctctttgctcatgctccaactaatttcagtgcctaatgctactcatagtactaaactggacagagtagaccttacaactggacgtaccttcctgttcatacaattagttagttcttgttgctaactaaaaatttgtagct

SEQ ID NO: 72651 - DNA, 591 bp, Zea Mays
ataattcactagttgaaacgtcgcaaaactcaccaaccaaataaccccacacccataacctacactaaatcaccagataaattgcacgcagacttaacacataataaaaaaacaacggttcatatcgctggataattccatctctcttactcactcaaatgcaatcaataaacaatactatttagatcattctcagactatctctcttccccataaccctagcctctctctacccctcacttgtgccatcattgccgctgtggcgtcaaccccttccctcgtgtcgttgtcaccactgttgaatcctcccctcatcactatcgtatatgccagtaatatatacattagtgagatgaatcattcacccatcaattacattaatttattgtagtttatttctttgtatagttaattattatatgtttttaacttcattttaaatcatccgcaattcatgcagcaacgtccgggatatggttctagttattgctgcttccttttccattgtagctgtgtaaatgatcagtaatggaccgcaattctagcagaagactaaatttccaatctgcaattcgatgcctcgtcgagtca

SEQ ID NO: 72652 - DNA, 680 bp, Zea Mays
gcagtttctctcgagttcgaatcatatgttattaattagtaattgctactaaaatttctctgctcttagctagctctagccacagttaactgctgctgctgctatagtacatagtgtcagtggctggggatcgatgcatgaatgaatgaatgacttcgagtatggatggatgctgttcgttgcgaaccagaacgggaaaatttccccggtcagctaacctctactcatcagctagcttcgtcatgtataacggtgcacacagtagtactaaatgatggacagcgaccactactgggacctccatctccctcggcaatggcaacacgcacgcatccagccagaagggtcgtcgtcgtcgccattgacgtcacaccgcaagctagctagctagctagctcgtcgccgcatgtggaaaaaaccaaccgatcgtcgtctctccacgcactgtcccagtcaagttcctactatggatctccatgcccttttctgtgcaaacacacagaccaacctttacctaaacatgtttgctgttgtagcctgactccaggtccctgcagtagctgctagcagtaggacacacacactttctccacgttccaggtctgtatgccctgcaaggactaaggagaaagcagaaaaggcaatgacagacagggactcatcagctgatgaagggatag

SEQ ID NO: 72653 - DNA, 990 bp, Zea Mays
tgggcagccgctcctgttctggagccgcgacacctcagagcccgtcctctccctcaatgatgagttggaggagcagtatcggaataatttccgtgaatataccgaggcaacgatgaggtcgcttcggtcgaccatggaaatcctttctagggacgttcctagggtcttccaggtaaggttttagatgtacacctcacgtgatcagggcattctttgtgatatcctgttttcctttctcaggagcttgtaacaccccaggtgttacttagagtttttcactcaagactacacaagtaagccatcatcacatgtgacttaagttgggaaaagtacaccaaatttagagctcaagatcctaagtaagtgcaacctctcttagatgtcatgccttggcttaccatgtacattgaaggggaagaaattgcccaaaaccctaatgcaccccctgtggacaattggagtactataggtaagtatgaccaaaaagttatgaaaaccacttgatcatgtcttgggccaattataaaagatgtagtgcacttaatgccctacaaataatagtaataaagtgaccccaaaaagatttcagaaaaaccccaaaaggttcaccaaagggttgagcacaaaagaaaaatcaaaatttttctaagtccaaaaccaacccttagccaatgatcaaacatgttcacccttattcaaacttcaaaaccctttgacccaattgacaaagtggtaccaaaatacctctagaataccctgaagaaagttgaaccccaccccaagtcgtttgacacgactaggcatagcttttgtcccggtttggacagctaggacagaggcaacttctcacctctatatctccctaccccaaccgtatcttggcttgggactcacataaaaaaggtaggaaatggtgcagggaagagaccgtacacagtggttttgccaagatctacacgctatggtgctccaatcggccgttgaaccatg

SEQ ID NO: 72654 - DNA, 845 bp, Zea Mays
ctgttttgaaacgttctctttgctttgaggtatcccgagaggaagggatcatgttacttctgggagagaagacgacgctctaatggggaaggcatctaggtgacagcagtggtgaagccaaaggtgaagattcagctatgggtggctggcactttggatcgtcaggtcgcacacctaaggaaggggtaggcagagcagcatacaagatacttcaagagttgctggaccattttcctagagaaattgctaccaccatgtctgggatctttcctaggggtgatcctttcaaacctaagtgggactagcctgatggtagtgctctaactggaggtgaccttgatcagcagcatagtgacactagagcctccaatgctatgtttgtagttatgcaactatataacaactctgagcacaacttggggatggtcaacagctctcttgttgtggctcagaacgagttacactagactcgagaggcacatggtgtagaatgggctcgagtctaggcagagctagcccaggtcaccttagagaaggatgaggctattcaggtcagggagtgtggctgtgcttgacaatgtgatatggattggcgaatgccaggactaccaggcaatggtaatagagatcatcaaggggaaaaatgttgtctggtcctagataactcagcttagggcaacccaggtcaacctaatgcagtagctgaacaatgcagaggcttggaatcctaatctgcatgaagaggttcatcagttgcacgcctagctaaacccagttaacctgccagaacctgagaagcagatgccgcagcagtagacaacggtggggtagtctctgaggttggt

SEQ ID NO: 72655 - DNA, 630 bp, Zea Mays
tgtctatcatcactgttgtcaacccaatcagtgcttgaaaatgcactcaagagaagagaagcagatggcatgaaatataggtccacagacatggtctctttgagataactaataattattttgactacagtccaatgacccgaaattggagttgccatgaactgacactcgattaacatagaatgatatgtccagccttatcagagacaaatattgtagtgcacccacaacactaagatatttagttgtgtcagcaggagataaaggtgtgccaccttggtgaacaagcttctttgcaggaaccatccatgtagcgatacctttggattggagcatatttgtgcgacataacaactcatgaatgtatttcttttgtgtcaaaaaaagtcctttaggtgtttgctgaacctcaacacctaaaaagtaatggagtttgtcgagatctttaatagcaaagtctatgcgcagttgggacagaagcttatcagttgccacaaaggttgagctaattataatgatatcatcaacgtagataagcaagtagatgtaaatgcctgctttgccaaagataaagagggggacatctgccttggaggcaacgaatcccaactctaatagcttagtactgag

SEQ ID NO: 72656 - DNA, 657 bp, Zea Mays
ctctcgcaatctctgcaataccatcttcaaatgatccacatgctcctcctcactttgagaatatataagaatataatcaataaatactaccacaaacttgtcaagataatccatgaatacactgttcatcagattcatgaagaaggctggtgcgtttgttagaccaaaggacataatagtgaactcatacaacccatacttggtaatgaatgtcgtctttggaatgtctgaaggtcgaatcctgagctggtgataacgtaacctcagatctatctttgagaacacgctggctcctctcaactggtcgaacagatcttctattctgggcaaggggtacttgttcttgattgtgacctcattcagagctcgataatcgatacacatcctcctagtgccatctttcttctccacgaacaggacaggggcggcccaaggcgaggtgcttggccttatataacctttctctgatagcacatcgatctgcttcttaagttcaaccaactttggtccagataccctataagctcttttagaaatgggggcggtgccaggcagaagctctatggcaaactcaactttccgctcaggtggcatacctggtaaatccttcgggaacacatccggaaactctgacacaactttgatagtctcgagtgg

SEQ ID NO: 72657 - DNA, 473 bp, Zea Mays
cctaaatgaaacaaataaccaaataagaatcagaactatggtgaagcaacagaagaaattatgtaaggctcaaaaaatacttgtcaatgagtgcactgattgtcgatgatttgaaggtgggcaatccttggcgaacctggtacgagatgacgtctagttgggctctctcgaggtatagagtgtacctctcatcgtacatcatgtctaagaaaccatggtgagttctagaacatagtgtgggaaggtgatgcaagcaatagacattttgttagttccaaacactttgctactaccactatgtatacaaagctggttccataagtagtcaagtatttgtacctgccccccacaagaaaacgtgcatggtgcctctcgtcatagaataggtcgaggaggtggaactgcgccatcctacaaaaaatcaaattagagtaagcacgaatataaaaatacataatagaaatgaataaaaa

SEQ ID NO: 72658 - DNA, 430 bp, Zea Mays
gttatatgtaaatttgggacacttttggacccaagtgcaaaaatcaaggtattagggtacctcaaatcatatgcttcacacatttgaggatttccaagtcaaaggatgagaattgggtttatttgcaaaaagccactccacctctcaataagtctgaaaaccagagaacggggctgactttggagctctatagttctaaaaatacaaatagtttgcctagggtcaacacatcaaaagtctagagctactataggagcacaactttgctcaagtggcagcctcgccaagacctagatctgtacacagctttagcttaaagagcgttagtgatatacccgtaggccccgtcatctggcattattcatcctttgatacatgctcgggatttgcagtgtttagactgggggaaccaagttgtgcgtctggaccc

SEQ ID NO: 72659 - DNA, 731 bp, Zea Mays
aatataaggtgtgctctctctatatgtaaacattgaattagtatatagaaaattaaatatatttgttaatattttatgccttatataccgaaagggagggagcaataatctaaaagtgaggctaataatttaaacttttctgtgtatagagcttgttctgaatgcagaactaaccgttagactatctccagtagcttattcgtacacatatccatatttaaactatagctttgtggccttaatttaatagtatctccagtagcttaaactgttagagcttatacgttagctcagtggccttaatttaatagtaaagggatgtttgaatgtactatagctaataagtagtgtcgtggttctggaaactagggcacaatagatttgtgttcggtgaaaatgcaagagtggattcacttcgaatggtgaatcacagggatctgagcgatgaactgagacatggggtttatagtggttcaggattatgccatagtccaatgtagtgtcgatcgtagcattgctctgtggtgtgttacaaccggtatgctcgtgtcctagaaagaaagttgtcctaccccttttatagctcaagggtggactttacagtggagagttgtattctactgggagggagctcggcttgctgtctttggatggtgtagttcacctaacgtcgcctgtagggtcatgcgctaccgtgcccctagtatggtgtcccatcttatccatccggt

SEQ ID NO: 72660 - DNA, 502 bp, Zea Mays
ttggaagtaacgcgtcccgcggcaccgagaatcttgcccatacgactcactcgtacgcgccgcttctcgctttactccccatttctcgaggggtggagggggtgaattatattacgaaaacaaagggaaggtgagttcgtgttgatctcgaggcgcagatttgcttgcacttgcagagtgggatagctttgcccagactttgcggctttgtgccggtgggttgggtttgtgtgttgacttcacgaagggtgcggaaaggcgattccttagttgtttctagattatgagcttgaccaaaatagggacacgggattgacccagcgtagtagttggctatcacgttgccagtgtctttttttttttcaaaaaataataataatgaagtatcacgtcttcgttttggagagcgactgtttccattgtggtgttattgtttctcgctgttaaggggatctagcatataatatgacacaaatttaatttattcatgcctcgagcatgg

SEQ ID NO: 72661 - DNA, 734 bp, Zea Mays
gtggcagcacgaatcgcggcgaaggtcgtcggcggtgagctgagctggtgttctgatccgatcggctattgtaccatggaatatgttcatcagtgtgcctgacagtcacagtttaggaccaaatttctctaaagtttctctagtaactcactccactctctgtagcaaagtttcagagctacaaaccagctacaactcgactatagggattgaactcatttgagcactggatcaaggtttaattcaaccccaaagatggctctgctacactgaaaaccggaacttcagagtgaaaccagcctgacagtcaaactttaggctatattatctccaatattttctcaataactacgcccacacacttaaataaagttgttcacctaagatagatctacatagttaatgtggtgacctagggcaaattctcaataatttggaagatgtagagctccaaagttgagccaatatcactgaaaatcagacttaagcatttgagaaaaagtgtggctttttgcatataagtccaaaacttagggtttagattgcaaattcacatatgagtgacccaaatgacttaagacacttatttaacttggtttttgcactttagtccaaaagtggactaaatttgcacaaaggcccctagggtttggatttagggttttccagggttccaattagggtttttggcatcccaggggtataaatatgatttaactttatttttgggaaca

SEQ ID NO: 72662 - DNA, 846 bp, Zea Mays
gggcgcaagagttctaggacacagtgcacagttaacagggacggcaggttgattctacattaaaccagggactcatgtgtaaagagcgcgcaacgaaggggtactggccaattctagccgcatgatctaaaatctaccgtccatattagattatccttattacgaaccaacgcgcgatcacggacgaacgacaaccgttgaatttgagatatgcgaaccagatccgttataaacctatgaatcgtgccaaccacacgattacagatccattggcccagatcatatgccgtgaaggggtacgcagccaccaatctcagccattcgaaaggaatcagacggcgccaggggattctccccacaagccggccggccgaggatggcgacccgaggtctcacggcggtctttggccggagaaagtgacaatcatgcactcgagccccaattaccctcccgaaagatcctacgtgtagaggagatcattgcgagcaaggtggatgacgtcttaccgaaggtggggcagtgagattgtccgaccacaaagcaggcgagtccacggcggagcagtgggcacggtgacaaattccggtggccacaagcacaacccgcccaaggtgaggattcgcacaacctccgtgccgccatgcgaagtttctcgtgcggtgtttgagggcgtagagacagggtagcgctgtttcgttcgggatgtctgaagtccttccgtgtactgggaatacccgccgacgacccgagcacaggggtgagggaggcttgatccgggagagggcgtcgcggggaaggtcagttttatagctggccggtggacgtagcccgaaatcctggtgcga

SEQ ID NO: 72663 - DNA, 338 bp, Zea Mays
tgaatgcccagtaaatgacatgttccatatccacgttcttcggatgaaagacttgatatctagcaaggttctttgctagccaccgccatattgtcctaggtttcagtctctgttgaatgcgcacgaccaataggttgataagtattgtgcaacgcttgaacgggcccaccgcaaattggtattaaaactgcttcagctctccgagacgtttgcaaacatgattgatgatgtcattcgacttgggtcccaggctcaataatcacaacgaacagatccacaaacaggtcaatgtcttattgtatatgttatttatgcataaaccaacttcattttaatta

SEQ ID NO: 72664 - DNA, 314 bp, Zea Mays
aaacctttgacctatttatagggggttacttcactaatctaaactacccctacatacatagagctcatccacttaacgaggggcaaaatgaactaagtgctatgatatgcatctgatggccacacgctccacacgaagttgcttggccttgatgcacccttcacgatgatgccacatgccggcttcaattcccaccggaactgcaccgccaagttttaagccccaaactcatcgaaacccgcctttcgtagcgctgggtggttttgaggctcaaccaccaaaccgccatgagtagcgtaccacatacacatccc

SEQ ID NO: 72665 - DNA, 969 bp, Zea Mays
tacatgataaccccaaaagttatcgccatccgaagcacagtaaagactggctgacccaaggaagaaggcgaagccttacagcccagtcggggtgcgagaccccacatcatcatcatcttctgattcatccctctgatcttcacgcgttgcacgcagctcgaccctgctactagaagaagaatgtggcctctagatggcagagctggaggatctggagctgttcaatgcatcagggcataacttggagggatcaactttgcagaacttagcccccaatttcttaataatcttgtggaagatagagggtggcgacggcctagcacagcacaagcaattcttccttattccagagcaagacttaaaacctctagccttctctctgagcctggcactccttctaacttcagtgtcaaccaagattgaacgcttctttctgttgacaacatctgcaggcgaaggagactgagattccttatgcaattcctgactaggagggagcaggcatttggagggaatcttgatggggacagtttccatgttgggctcaacgaaagaagaaagagctctagacaacaaaaatttcttggcccactcaaaagaatccggccttagaagcaggcccataaagaaagcagcccacatttttggaataggaataaattctgagttggtggggaacatttcagcacaagatgagaagcgtttcctggccaggtaatcttcataagtaggatcatgaatgggatgctccaagtgttgcatgcagcccacattgatgttttcttccacattcaaattctcctcccctgattgttgtttccctccaaaatcaaatccgctgggcggaaggctggtaaagcaagcacaacatcttcattttctggggcttcctcctgagggaattgaacctcttgagggataatgatgtcattgaaaagacccacagattcatcagagggtaggtcctcg

SEQ ID NO: 72666 - DNA, 643 bp, Zea Mays
aagcactcagaaagaaagtctttgacaagaataaaaagttcgcaggaaaatggatcagagagttgccatatgtgatctggagcctaagaactcaacccagccgagctttgcatggaaacactcctttctttatggtttatggttcggaggcagtgctgcctgctgatctcaagtttggggcgccaagattgatcttaaaaaacatagctgaagctgaagctactagactggaggatgttgatatactagaagaagaatgattgaatacagtgattcagtcagccaggtaccaacagactctgaggcgctatcatgataaggccatacagcatcgatcctttgcagtgggagatcttgtcctccgccgaattctagcgggggagggacgacacaaattgtcgccactatgggaaggaccattcatagtagcagaagttactcggcctggatcatatcgtcttactcaaatggatggcacggaaatagggaacttatggaatatagagcatctcaggaagttttacccccctagctagatttcaaaagctattgggacggcattgtattctgtaattgggtgatacaccatcaataaaatggcttcattctcaaaggcactcgaattgttttctgcatgcttact

SEQ ID NO: 72667 - DNA, 1143 bp, Zea Mays
aaaaaaaaaacctgccaaaccccgcgcatcgtccggccgtccacaacagaaaatgagcacaaatgaactgcacaagggaaaatcgcgaacgctgggattcaccccttcccctctcgatccaaaacatggctactacactgccttttgctggtaccgaaggtccaaagccatgaaagcgcgtagccgtactcgcacgctcgttctacggcctcaaaggattcgctcggcggtgcggactgcggagtaggacagacagtatcggtcgggcaccagaatctcacaggacatggtgcgcgcggttcagacgcccgccccacatgcgtggtattgacttctaccaccagtataaaaaaggaaccgctgccacgtaatatagtaccgtgacacactgttaatccgttgaccggaagagaaagcaaagataactagccaagcaccagcagcccaggccacaaaaagctctgagctccccgctcactgctctccgtgcggcgtgtagccatggacaaggaggtcaagccagagccagtgaagttggcagctccatccgttccaggcaaggcaatgatgcccatccgatccgtccaaccacaggatccatgccagggtcacatgatctccatcgtactctccgctctccggcgcgcggtcgagatggcgaagcgtatcggggtggcgcgataaaggatcacgggttgctttgggttttgggaagacctttttgttccgagtccacgacacggcggcagggtacagcagacgaccttaccttaccggctctctgatgatcgcccttttatgccccaggcccagccgagaaatcggcgcctgtttactaccacgtccattgattctccgtcctgcttacggttggtgttggcgtgcgtacctgctgtagccacgcaatctctgttgattgccatggatttagcatgagctagcactactcttcttgcgaaaacaacgcggcacagccttgagatgcactggtcgcatcctccggccgtccacaacaaaaaaaatgagcacagatgaactgcacaatggagtagcattttatctctcgaggggtctataaggaatcgtgcgtcggggctcgggggcatttgtgaacaaattaaaagggtccatcgaccatcatgg

SEQ ID NO: 72668 - DNA, 557 bp, Zea Mays
cgaggtgcaagagctaaagaagaaagttgccaaagcaactgagaactttaatgttgaagtggtgaaacacgaaatatgtgaaattgagagatcaagggcacagaagaatgtcgatgagctccgtgccgccaaggaaaaatgctatgaaatatccatggaatgcgctaaaaatctgaagaacaacttttctaaagttggaacatattcctccgactagaaatttattcgtggaaatcctgatgaagtcattcaatggataaacggcgaggtcgaagctttcgaggaagttcttagcgatagaggggacttttgtgccttcgctggtgaccatggggttatgtccatcttggagaaggttggctgcgatcatgctaaggctgtagctcagccagactttgccttctcagccgatgatattaaaaacccttcagccgaagctactatcttaggtgggaaattttattccaaagtatggttgaagggtggacgagaaattgatgatgaagctattaaaagaaatgagaaagaatctcatgatgccttagaagaggccaaaa

SEQ ID NO: 72669 - DNA, 305 bp, Zea Mays
gttgagagcataattttttgattttagaggcttttagtgttgtgcttgatttctttctattttgagtgatcctctgtatttgttagccatcattgagattatccagccactattttcctcatgagctactcatatgccatttttgccatttttgctatcataagggtttggatgaagtttttggaagaatgcctagataacttagagcagaaattttgattgatttccattcaccccctcagtagtcaactaatttggtctttttgattggtattatagtaggctaaggatcaatccaacataac

SEQ ID NO: 72670 - DNA, 351 bp, Zea Mays
atttctataaactacagggactcttttgaatgtttgcttggccgaaggggtacggggcgatcacagccgttggattggatatgggcgcgccagattaaaacactactccagcgaaccggtactcagtgtgaccccttggattcaaatccgacgacctagattttaaacacacagatctcaccgcagccgcaggatatgagatctacgattcattttccctacgcgcaagaggttacggaagatctaatccaagccgtcgctacggagatcaacggcacgagggcaactttccccttcccagcagagccgcgcggtggcgctactctcccacggcggcgccctcgccggaga

SEQ ID NO: 72671 - DNA, 1314 bp, Zea Mays
ttttacaccacaatttatacatagttgtgcaaagcaagtaacatgtccttctataggactttaggggataatatagttgcaatagtacatattctaaatatgacacatcgctccaggcgttcatccattgcaacatctatgatggtgtaacaaaagtccatcaaagatcgtaatccatcagggatttttcatcgatcagatatatcgttatagcctgtcattctgacacaatgggggatattttgccagtaacacataaaccttataggtttctgccatcgtggctttagaggataccgtaattccacatctagtggaaaataccatgagtaaagatcgtggaatgcacatgtgcttattcggtgaacttcaagtcctttggtacctcatcttattccttttcgggtctgtatgggtctttatccctttataggaattatcaaactttggtgtttaacacagactttatttcttctggaaatgttccattaaggaactataatctcataggagatattctctctacataggagagtgttcattcgtcaggaatgtattattcggtatgagatttatatgttgcatatttataattcaaagatatgagtcctcctaggatctcatgacggatcttcagaatcctattaactgcatattttaattcatgccatttgccagatatattatatagcggaacattgtttattcaacacatatgtgggatgggtctcttacaagaccacttgaaccatcacattcaccacacattatttcaatagtgcccataaatgtccgaacttcaagctcgtgactttcattttgcgattattggttcagcctcgattgcatttatcaatgacccgataagagagcttaaagcactcatgcctaggactttgttttggatccctttgcaatctatagaggcaagataggtgtcgacacatttgtctcccacattttataatgatctccgtcatttcccaaaacgaaagattcattgttccgtattcccagcacaatgatatggcgcgcattgctaggaattccatcgtcaagatgaacctattcgtgatgcaaatcaccaccagggcgagttcatcggaggaaagttattacagaccacatgaatctgcaatcagaacatatgctttgactaaggccaatggatcatattcgcaggcgtccccgagaatagatcaaatgccaataagtcaaatgtggatatgatattaatcccgggtatatccacatctacattaggtagaagcattcaaaccaatatggttactcctcaacgatttctagcaaact

SEQ ID NO: 72672 - DNA, 540 bp, Zea Mays
ggaaagggtctgcagctgtaagtctgtaactcaagtgttgatcaaatggatgggtcttctagccgacatggcttcttgggaggattctatcgtgctcaaatctcattttgcacaagcaaccatctagggaccagctggttcttcagggggaggtattatcatggatggggatggtggcgactaagcacaggagtttaattctagaaacacaattttgaaatgtagttggtgggtcgtattggaccgtattgtgattgtggtggccgactggtatataagttaggcttgtaatagttctgagacacgaaaaggaagaaaacaatactgcttgtacctttcttctccttctgaattcctctcctgttcttcgctccctgttcttcgcgctcaactccggtgaccaccgaatttcctacctctggttgtgacactccctactgctactaccgacgcgcgcctgctcctcttgtcgacacccactcggctccatctcctccgtcgttgcctgctctcaaccctagtgatggcatggccagtgcc

SEQ ID NO: 72673 - DNA, 512 bp, Zea Mays
atcggcgaagtcttcttgtttgggtactggtgggggtggtggtggattttggtgatgtggtggtggaggaagggcttggatctcttggtgttgctggtacatatggttttgttggtgggtgtgaaattgttcattgtgcaattgtcgctggtggtattgttgggggtggtaggtgtgtgcaacgactcgttggttgtcagctggttgatttctggccatcctgtctttggtggctttggtttcagggcagtccctggtgggctgcacggaatcttcaccgtgaaaaggcagtagaaccttcgcggttgtgggactcgacctttacctctgcctttggggttgctgccacaaccctgttgtgtggggtactcttggcgacgagcagtgtctccagcctgctactgattggcaatggtgttcacttggggctggttacggtttggctggccggagtcggactgcgccggtctaacccatgtcctactggactgcggggtgtccttgggttttgt

SEQ ID NO: 72674 - DNA, 367 bp, Zea Mays
gtttagagcaaagtattagtggtgcttcatcataattttgtgtaatatcggacatgtgtgccgaagttcattattttggtggatgtgttaagttcgatcaagtgttttgaatgcatgctatgatatggttgtatttgaaactgagaagtataggtattgctcgataataaggtttggtcagtgtggttagaaattgatttggcttgtatagagaagtgtcgacatgtcgaagtagtcatcgcttcctctatgctcgtaagtcggatcaatgcatgttatatgttcgttgaattacgcttcgcatatagtgtatggttgtattcgtagaagtaaagtagacacatcgaccttgattggtggagcccag

SEQ ID NO: 72675 - DNA, 349 bp, Zea Mays
tccgcaatgaaataaagatggtgtatgttggcatgttatatttttcaaatgtctctttgcttagatgccatctcagacccatgcacatgatggggcaggtacatcccacgacgaggaggacactcccaatccgccaacggtaacacctaccttggtcgaggctatcgctgccttggtcaacgccacagccgacaacacgtgctttctgcgtgaaatggctggcaaccaatttcaaaaacacggaggcggagttccacctcaaggaccacaagatactacctatctagagttctctgaaacctgaccccgctcttcgtcaaggcagaggaacccttagaagctgacgaat

SEQ ID NO: 72676 - DNA, 623 bp, Zea Mays
aaaccgagtaatggatgctctggactttgagtaccccgactacgagcgactagacaaggatgccgaagggcagaagagaaagagagtggccagtgttctgaataaagaagctactaaatcgatgaaagatgatgaagaaaaattggaaaagaaaaaggtgaagcctgagccgaagacagatgcttcgaagaagagaaaagctacagctccgaagcagaaggcaactgatatagaagaagaaactgctgcaacaccttctgccaccgacgtggaggaaatcttaaaggtaattactgaatatttgcctatcaatctaagtccactggggccgcatctgacgaagctttttcagaaggaaaaggagccctcgataacgaagaagacagctgggccgaaaaaacgaagaattgttactgtgatagaagttattgaagggacaccactgcaagcttcggctccgaaggcaccagttgttgagagtacaacagcgaccgaaactgcacctgccgaagctgcagctgccgaagctgccacggtcgaagatgtacatttagaaagcacaatttcaaatattgataagatacttctggacatggccacagaagaagctgccgcaaccactg

SEQ ID NO: 72677 - DNA, 678 bp, Zea Mays
ttcttgagcaatttatagaatgtcattcctttctcacctagccttgatatgaacctgatcagcgctgccatgaacctagtgagcctttgcacctttttctgcgaccgcggcgcttccattctcatgatggcctcaatcttctctggatttgcttctattcctcgatgattgacaatgaatccaagcagctttccagctggcactctgaagacacacttttctaggttcagcttccaccggtggcgcctcaggctgttgaagaccagttgcaaatcctcgatgaagttatctgatttttctgtcttgataaccacatcatcaacgtaagcttccacctgcttgccccagttgtcagctaagcatgtttggatggctctctggtaagtcgctccagcgttcttgaggccgaacggcatggaggtatagcagaaagctccaaatggtgtgatgaaagcagtcttctcctcgtcttcttttgccaagatgatttgatgatacctggagtagtagtctaggaaggagggcatagagcagccagcggtcgagtcaactacctgatctatcttagggagcccgaaggaaaccttcgggcaatgtttgttgagatcagtatagtcgacgcacatacaccaatcaactttattctttttgaatacaagaacaggattcgctagccac

SEQ ID NO: 72678 - DNA, 784 bp, Zea Mays
atctcgcgtttttaaaaatgcctccagcccgcaaagccgagccagaggtttctttttcccagccagccgccagttctcctctgttcttggcgattccacccctcaccggcggccaccatctccggccaccatctccggcgacctcgtctctctccttccctctctcggtgagcaggtcttccccctgtctcctgttcttctccctctcagttccctgtgttgagtttgcctcttctccaccccttctcacacctcttccaaatctgtgaattcctgtgaaatctggagatttcttgttgtggaatgtgttcctttgtatgccttaaactccattgcaggtttctagctccttcgggagggcattcccacctcaaataagcttttcaccgaaaccctaaatccccgcccttcacgtgttcggtgaaatgcctaaaccacccaaacttgctccaattgaacccaaatttttcaggcaccttcaccacactcccagtaacctacttgccaaatttcacaccaatccgaggtcccaagcttaaatttcaccaaaattcccgttttgcgcgatcgtttccgagccgtgtgccccaaaccctatttcttcgcctaaattcaaaccaagcacacacttcactcatattgacctatataaacctattcgtgaagtatcggctcaatcccatatcgtttcgtgcctcaattcgaattccaatcatcctatgtcactatttgacttcttgatcgtcccgtcccgtgccatatctctctgtgtatgtatttattc

SEQ ID NO: 72679 - DNA, 954 bp, Zea Mays
gtggattcaatgaaccgcaaggaccatgtatcatgtgctctgtagctaagcaataagccagaggatcaactagcaggtctgatatttcagcgttgatgaatgagtatattagagcaggtgttggttgcgtagtgtcagtggagacccagaatataatatgtgaatgaggaagacctcgtttttggaattcagttgtgtatagaactataaggaaaaatatttgaacatgtgttaggataagttaaagtacatgaatgtgaatgatgtatatagaaagtatgcaatgtgagatagcaatgttagtgtacctgcggtacatggactaaaaattgatccacttcttatatgatgtaataagtcattgagtttcatatggtaaacatgaacaatgatgttagatctttccgaatgggtttgaccaggttgagatagactttcaagtatctcttgccaatttggattgcatgtgaacgtgaggaaaaatctggtggtccatgaacttgacaaatagcaatgccgttatgataattttggatcatatagtgtctgcctcctgtgtgtgatgctggtagtattatagtttttcccatctgttcaccgctgatgcatccacggttaactgcatctgtgataccttgaatgctttccattcatagattcttttgattgttgattatgtagttgagcctattttcattgatacatgctctagcatctactttggcctgacttgataacattgcatagcgcaaataaggatttggttgatttttcctataatggaactagtagcaataatattcttgcatagttaaatgttttcgtgcattttgtccgctggatgtggcaccattgtacaaaactccaacctggaaacctctgtcgccaaaaggaaaacgcagtgagtattgtagagccatatatgctgggtgtagtgaagatattcgctttagc

SEQ ID NO: 72680 - DNA, 719 bp, Zea Mays
ccgaagtgacaaattatgttctgccagaagaacttttgtgttgtcttcgccatttttgtggagaacgccattgcctctatccatttggtgaagtattccacgactacgaaggcatacttgaggttgccttgggctatgggtagcgggctgactatgtcgagggcccaacactgcaatggccaggtgtgggcaattaactttgtcagctgtgagggggtaccacttcacgatgaaaacttctgacaagattcacatgagcataccacgcagttggcattgtagacaattcctggccaatagaacccttggcacatgactttagcggcgagggccttggggcccaagtggcagctgtagactccattgtgaaccttgaggaggagttctctccctttgatgtctgtcatgcacttgggtaagggttggctgatgccttttctatgaagttggccctctattattgtgaatccatggcttcgatatttcaatcttttggcttcggcttgatatgtgggctgatagtgcccttgcaagtatagggttatggggcccctcccgtctttggtcataatgagatttacgattctttgcccaactgggtcttttgtgattcttaggccttcaaggtctcttaccgcaggggtttcgatcatgtgtaagaatacgtctgagggcatgagatctcttctgggggcagccttcgctagcgcatcggcttt

SEQ ID NO: 72681 - DNA, 517 bp, Zea Mays
ctgctattaagattgatgtagcaacctcatgtgatgatttgagccaagatgatcaatctagtcttcatgatgaattgacttaaaaagttgaagtcttgacactagagaactagagaaattgaagagatacttgacatatgcaacaactagaggaaaggttgacatagaaagcaatgacattaaccatgagttggcagtggacaataaaaggcttagaaatgaggtcaagaaacttaagaatgaaaatgaacatcttgccacaagtgtgcaaaagttcaacaaaggccaataccttcaaaatgagttgctcatgaacactatcatgaaaaataacaagagtggtattagatataattcttttgtgcaaaagaaagcaacaagtcaatacaaggcaaaacagattcctaagcctatcaaatgctttgagtgtgaaaaagaaggacactttgcccacaactgcaaagccaaaccaccaactcccttgccaaagcactcaagtccatttgttttcaatgct

SEQ ID NO: 72682 - DNA, 1243 bp, Zea Mays
aaatccgacattgacagttcttgaggctgacaagagctgacagagctggagaaggaatgtgactatcccccttactacctctgtaatgccggctgttcttgcgaatcagcgggacttcttcttcttcttcatcttcaacaaatatacgaacgacagccggtgcacggtcatacccattgggatcaacttcagcagaatggtcacacccattgggttcatcttcagcaggacggtcacacccattgggttcaacttcaagacagtcgcacccattgggatcaacttcagcatgggcgcaaccattgggatcgacctcaggaaggacctctactagcacttcatcacaaactggcaccgaaggacccgtgccatgatccaagctcgacagtcgccaaagccgcctcttcttctttttctcttcaacgggtacggtaggccggctcactcggcgtggacgctttggatggacctcttggggttttcagaccctctccattccaaaaagttcttgcccgtccatgatagccattggcttggcatgtgtcgagtcagatgattccccagccagcaagttgagcacaacatttatctcctcgtcatccgtactagctgacatctcgaaatgagtctgtctctcaccttctgtgagactccggagtggggcaattaaagcttcaatgtcttcaggggagggtcgtactctaagacccagaccaccatcacgggcaggaggattagacacaaactcgaaaaaggatctatgcgatggcaggttccaggtagaataagcaacaggagcaccaacgttcgaaactctgcccctcaggatcatatcaagttggctcaacagatcggcagtgggaattctcttgtttgtcacccgggtgccatcattgatgccgctgtacagatatgcagggtacctgtccttcaaaggctggatattcttgaaaacgaaatcggcaaccacagcttcgacagtcagacctttctccttcagcaaacagatctccgtaagcagaactctggcctccgttacctccaagggagatggagactcaacccagctcggagtatgtatatctggttgcctccccgaccgaggggggagggactcgtagtggttttccacaataaaccactcaaggcgccaccctttaatgctatccttaagaagaaaatcaaggtattctgtcttcctcccgcgacgcatctccaaacttgcaccaccaacgagctggtg

SEQ ID NO: 72683 - DNA, 490 bp, Zea Mays
gcgattccaataatcaacgtgtgatatatgtaatgggatacttgagtagcagtccatgaataacttgccacgatgtgtcacttacctccgaacttagaaagctgggcaaacatgatttcgaactttctcaacccatgcaaaacctatttaaagctgagtttgtaaataaaacccaagagtacacactaataataacatgtcgtgtcacgttagagcacactaattaatgaaattggggatctcaagtggtttcaacgtggcatgtcacgtcagtgtccgattttgcaaacttgactttaaatggtttttgcatgatctgacaaagtttgagagcaagtgtgccaaattcgtgtaccgctagtatacttcactcggatctttggagtagtactatatgaggtgcagtacgtggcagtaaatactgacatggatatatatagtgctgcagactaaagtatttaaacaatgcaatgtggaataacgatggtaa

SEQ ID NO: 72684 - DNA, 962 bp, Zea Mays
agctttgaaatggtgactgggaccctgcaacgcaacgaccgcgagctgtccatggcgtcggcgagtagaggacttggagcggcggccggcactagagaagctgagcagggttcagcgcaggggccaagcacaagtgttgctccggcgtgtagaaagccgcgcgcatgcaccaggtggcgagggagcagggacgcacggccgggtagggagcgcgcgagctggtgcggtggtttttcctagacgcaaagcgcccagccgatgggaacgacagggcaaggagcatcgatgtggggagctggagccagggtgataccgctccaccagcgtgagggagagagagcacggaggagacggagcgctgattaaagtttctagagaataacttagataggaactggagagaggcaacacgtggaaagaaaacccgagtagatgctgagcgtggctgaagcctgaaggagacacgatgggcatggagctagaggattccagggacttgcacgtatcttgataagaagaaaatggtggctaggatatggatgaggaaatcgttcatcagataaatggtggcttagagataaggacttaggtagggcggtggaacaaaataggaatttctctttcttttattatcaatatatatatatatatatatatatatatctaaattctagggtaggtttcaagcgagacgtaattaagctagattgaaatgatatcagctacgatattttaatatgtatttgctttgattaaaatcagataaattttatctgtactttgaacacttgattcctcgaccagggataatttgctagaaagcaggatgatattgtaaagccatagacacaatttctcggttaacatgccgggtcgaaaagatatataaaagggtcgaactaaaaactagatcgacaacaatatttagacaagatttgatgcgatgaatactctagagtcag

SEQ ID NO: 72685 - DNA, 302 bp, Zea Mays
gtgggcctgtataatggtggccagggtgtctcctgtagctctagtgttagtggggaagcttcatcatagaggaagtcttggaagttgactggttcatgacaaagattgtcttggttgaagccctcgtaattttggtccatgtagttgttctggtcttgcgcttcaatgttgtgcatttcttcatttgcttcgtcaatctttttctgaagttgagaaagatgaagcaccttctccttgcgcttctccaattgttggtggattgcttcgaggttgttgatctattgatcgagctcttggtcttg

SEQ ID NO: 72686 - DNA, 709 bp, Zea Mays
tgccagcgtggagttctcaccgccgatgactccctccgccgcgattcgtgtcaccggcgtcgggattcgtgcctggtggatggatagcgtcgtgggtaaaagatcttcgccgccggtgagctggacgccactccggctagccgcaatccctctccccttgctcaccgcccttgaataaaggttctcaccgccgtcaaaccttcgccgttgtccgccgcgtgtctcagactgtctaccgcatcacgtgactcacccttgctctccgtcgatcaccggaatagccgccatgacgattgacacgagttcacttgcaccagtaacctttccctctctggccgccaccgcgccatcttcaattcaagcgccaccgcccctgggatctataaattgagcccgcagcgagctttgcaacatcatcacccacccagccaccacgtctcgctaagcaatcatttgcctgagctcgtgaattttgaattcgccccaaatcagttctccgccacccgaaaaccaacctcatcgcggccagctctccacaggtctgctcataccctttttgttcctattctagcatctgtgcatgctggtgatgctcgtcgacccacgtaattgaactagaagtcctctggtcgccaggaacacggttgtctcgccgtgatgttcacggtcaccgtggccagagcaaaccaattggccatagatgaaatta

SEQ ID NO: 72687 - DNA, 706 bp, Zea Mays
taatgcactcccatgagctatggcaagtgacattagaggaggagttgcatggacaagcaaaaggagcattcattcgatattaacaggtgctcacaagttatattgccataagaacgaacctcatgatattcagacaaatattcaaggtggaagagggaagttgagcaagctgtggagcagtctggatttgggtacctctacagatttgtgtaattggtatctaaaaattgtgagttattacatatttaaagattgctcttgctcattggttaacattgatttccatgatagttggtgatcactatagtaggagttttctcttgtgccataatgctatgacttgttctatgtttggtgtcttagtaataagaaaatatcaagttcaaggattaggcacaagtgtggagaagctccttggaattggaactttcaattaggaaacttccaattggatgaaaagtcaccatcacttggtaaataacacgaagatacaaatataggtattgtcactctcattacgagtatttgtacttgattccctctgatgcttgtgttgcatttgtttaattagtaatggggagtaatgttagtgcgattgcatttccttgcttcatacccgtctgtccctatgttcatgtttgtaatgtggttttggtgtttgatgtcaaagggggagaattgatgcattaaatcttacctcggtccg

SEQ ID NO: 72688 - DNA, 863 bp, Zea Mays
cttgatacaaaagggagagagacaagagtatgtgtgggggagcatgtagagaagggtggtacaagagatcggaaaagttatgagtgaaagacatattaggtttttatttttacacgtcttatttgtgatactcttatatgcacattctttcgtatgttcatatgttgtattatatactttatgttattatgtatgtatgatatgattatgatgttgtgcatgtcttgttttactttataccttataatatgtcacatatacttgttgatgattccttatttcatatatatattatgaataagcttactcttttatgtgcactagtttgatacccatgctaacactacggtcccagggaggggaagaaagggagatggggggttggcagcggcagtgcgaggggggttggtggcggcgtgagagggggcgacgaaatcgcaagggagggaggaggtaggggttactgtgcgtgtgagggatggaggaggaaggataatccaaataacattggccattgaatttgagtaagagataggtgggttatccagcaatttgatgaactgttggttttgagggaatgttatttgtgggtgtagttcgtttggtggatttaggaaaagttatgagtgtgggatgatttggttgagtgagttttgcaaagttgaaacaagtgggttatatataggagtatagataaggttagaaaaaattgtgattatacctgtaatttgtgtgaccttacaatgtgattttaccattagttttttaactttgtgattttatccctctgttttgaaaatgaagctgtcgtttacccctccccttaacaccattgatgaaaatcaaaattagtgattaaaaat

SEQ ID NO: 72689 - DNA, 540 bp, Zea Mays
gtgcttgttaactgcatattgtagctttggcgctgtaaatagtttgaaatgttaattcgtagacttgtatggtggttgatgcgtggttagtatttttagtgttttattgataagtaatatccatattgctttggtaaattttgctgatatggtgatgttaatgcctggtcttagtaaatgacatttttcgcatgtctagtgtttctaacagctaattaggaaattctactagacctgcttaattaaattgtgtgattctctaattagttggcgtgctattaaggttagattataatattggcttagaaagttaactaatggtttttatccgtagtctaagttcaagtgtcctagagatgtgagcctaagtttcatcaatcgcttggtattggctctagcttaggaaaagtatagaacttatgcttagtgtgttgttgcccaatgattagattcggttaagcaagaagaacacgagtattgtacttgtagtatgtttagctcattgtttcatgatgttcgagatagctctagataaattag

SEQ ID NO: 72690 - DNA, 564 bp, Zea Mays
gaattttggtcaccagtgacattggccagacttttaggtcgaattagagtgggatctattgctcgattggggatagttgctatagtcaatttgtagctggatcatagggctacaattttgacacaaagcaggtcgagtcactacatgaaattgggagaaaatatccctgcaagttactctgtcaggctgactgaataaggatccattggtacagtgcactgaaaatatcccaatccactgaacttcaccaccgacgagctgtgcgctcggattcgcgcctgccacggtgattcgtgcctagtgcagttggataacgtagaagggcaagaaatatcgcaccgtggatgaactccggccactattctactccggtcgtcgtacccgcctgagtcacggccgcttcggatagactcaccagagttagccacctcgcgaccttgcgccacgtgcctgggtgctttaaccacgccaccgtgagtcaccttagcccatccggtgatcgccggagagcttgccacggtaaacgccaccaattgcttgcgccagtgcacccccttctctccg

SEQ ID NO: 72691 - DNA, 859 bp, Zea Mays
aaggtttttcttcttcttcttaaaatcagtgttctgcttggcctttggtttccagttcgtcttgtttttgtttttgccaccagatttgccttcaaccacgttggcattagaggtaccactatccattggaccaaaacggggcacatccttagatctcgccttctcctcaacatcaagagtagcaattagactttcaacagtcattgcctccttcttgtgtttgagagccatggcaaaattcctccaagtaggaggtaatttggcaatgatgccaccaaccacgaacttgttaggcaagacacagtcaaagtgtgcaagttcccccatcaaaagctggatttcatgagactgttccacgacagaatggtcatcgaccgtcctatattcatggtactgctcattaacataaaattcacgtccagcatctgattcagtatacatccggtccagggtctcccataaatcacgagccacttcgtggtgcatgtgtatgtcatatagttgttctgacaacagtgtcaagatacaatcaacacatgttttgttatctgacttgaagttacgatcctgctcctcagtgagaggaagaactggggaaatcacccactagatcctcaacgacatgagccagaatttaaccctagtctgtcatctcttaatgttttgaccaccggtaaaccggtcaggttttagtgcatccaaaggtccagccatgttaattttatcaggtttctagattgttataaaattagcagggcctaagattaatttgataatgcagcacaaaacgaaaaacccagatctactggcagataatatccacgacattagaacagaacagatctgaagtaactcaaca

SEQ ID NO: 72692 - DNA, 317 bp, Zea Mays
tagcaatgaagtttgctagtgcttgggattggatagatgatccgtgaacaaaatcgatgacaaactcattgagttctgctgcccattatctgatttggtctgaagcctcactgtttcttatgatatccttgagtggctgagatgatggtacaataatgttgtgggattgaaactagtgccaaagctttctcgaagccatcaggattgcatataggactttttccatttctgtgtagtttcttttggatgggcctaatacttcggacacggagtatacatgtatttgcctttttataccttcctccaccaattcttga

SEQ ID NO: 72693 - DNA, 461 bp, Zea Mays
gaagaacactaccagcgcaggtcacttgtttgttactgtataactaggtggagaacttctacaattaggaaatcaactctgatctagttgccagtgttattataaaatagttttttttctacgaccatgtgattttctatttagttaggatagcatgcaaaagataataaatggtaggaaagtatgtatcctcgtagtgatataagactgtccgtagcaaatcctataacataggggttctgattgtagattacactatttcactgagcaaaatttgaaatagatgatgggataagataactgcttgagacagactaatcatggcccggttttgtttaacttttaccctagtgcattccttgtagactttatctagatattctgcatccttggtataggacaaagcttcatccggataacttcttttgatagaataaactgtgaattaggctggttcaaga

SEQ ID NO: 72694 - DNA, 558 bp, Zea Mays
caaaaaacaccgaagatttttacctccatgccaccaagccgtcggatataattatataacttaattctgacgactcactggtagctaccaaaagttatgtaactatatctgaccccctacccgaggtcgtcagaaataagttcgtgcggtccagatgacacagtcatggctgtctgacgggtttccctattttcgaccaattagaaccgacagacacttttgtcgttggaaataaaccctaagatattgaaaaataagtaatgtccaactattcagggtttatttatggtggctttggccatcgaaaattgcacctctactgacatgtatgagtactttgtaaaaagatacttatcagacttaaaagtgtttgaatttttgtggaccaaagtgtgcacttgttttgaaaagggtagagtaataatactactagattggtaatcaaatatatatatttaaattttacaatacatccgtacgccggttagaacgaaggtctagtttagaagccacaaaaccgaagggtatatcggaggggctaaaattatttaatttttg

SEQ ID NO: 72695 - DNA, 726 bp, Zea Mays
ttgtcgctggtcaaattgagaaagactacacatccagggagccagtcctcatgcaatacttatcggtcgtgcagagtctagaaacatagttcaaaggattcacactctagcacatagacacaagaaaaatgaagaggccaacatgctagcaaaggcagtagcaaagggtgatcccatgccctcagatgtattcttccatacgataggcacactcgtggtaagaaaccccgagggtgtcaaaatcacagaagatcctaaaggccaaagaatcgtaaatttaagcatgaccaaagattagagggtgcatataactctatatctccagggccactaccaccccaccgatcaggccaaggccaaaaggtttaacaccgaagtcatgagtttgcaacaatacaagggtagctatacagtaaggtactcagccaacctttgctcaaatgcattacagaggttgaaggcattgaactcctccaagaggtccacaaaggcatctgcagttctcactcgagccccataaccctcgtcgctaaggtcatgcgccaagggttctactggccagccatcgtgtgagtagtgaaccgtgtagtctgctcatgcgaagcatgcaaaaaattctcacctcaggcaggggcgccttcgtagttcacaaagcttattgctcacacttggcccttacagcgatggggcctcaacatagtcggaccgctccccactgcgtaaggc

SEQ ID NO: 72696 - DNA, 353 bp, Zea Mays
ttatcactaccgatacccaaagcggtgtcgaccagagatcttgaattcatcatccgtcatgcttcgggaaaacaactgacctagaggcaaattgccgaggcccaacattacactagggaactgaattatcctcgagggtccctagtgtacgaagatgatgaagagaatgacttcttatactaccttcctgacagcaaagaagttgatgtctgccgagaaatgatggacaacatgggttatcagaagcttgagcttgggctatccttaatgccgaaggaccatctggcagacagcttagcatacaatagtttgaatgtttgtgcttactatttctctcgatattttgataatta

SEQ ID NO: 72697 - DNA, 810 bp, Zea Mays
atctcggtgaaaaataggaactcgcgctcgtcgccttcctccaagcaaatgctgacgtgttcgcatgggagccatcgcagatgcctaggatacccagggaggtgatcgagcaccatctgaagatcgaccctgacgccaggccggtgagccagaaacctcgcaggtagtccgttgaacggtaggacttcatccgaaaggaggtccggaagctgctagacgctggcttcatcgaagaggttcatcacccagtgtggctggccaacccagtcatcgtctccaaggcgaatgggaagcttcggatgtgcatcgactacaccagcctgtcccaaggacccgtatccacttccacgtatagatcaaatcatggattctacctccgggtgcgacctattgtcattcttagatgcttattctagtttccataaaatccagatgtctagggaagataggaagcataccactttttgtaacagtgggggcgggctttactgctatgttgttatgccttacggtctgaaaaacgccttgccaacatttatgcgggcgatgagtaagaccttcggggacctaattagggacaaagcggaagtctacgtcgatgacatcgtggtcaagactaagagagggttgacccaagtggaagacttaaccctggtcttcgacaagctgcgggcaacccacacgaagctgaacccggacaaatgcgtctttggtgtctccgctgggaagttgctggggttcctagtttcgtactggggcattgaagcaaaccaggagaatatcaaagcaattgaggcaatgaggccttcg

SEQ ID NO: 72698 - DNA, 589 bp, Zea Mays
atgggcccaccaacgaccattacggccgttatcgaagttaatgccgatgggccatcggacataagctatttcaaacgacggtcgtcggaaataattttatttctgacccgttacgaccgagggatcaatgtcgtcggacataagccttcggccgttagaaataagctattttcgacggcttagggcttatgttcgacagctttggccgtcgaaaatttcctcttttacttgtgcgccacacaggtaagacgggtaaaaggatgagcaagttttatgagcatggatggacaactcaatatgaattacgattcaggatgaagtgtctagttgcatacaaatatacaccggtaagacgatgagctatagttttatgagcatgcattccttaaattaaaaaaaaacatatagaggcaaagatgtaaaggtcacgagtttgctaccgtgttgcaatacgtatgtacatgtttcagcagttcacctccactgattacgggatatcaccgccaggcgtgttaggaggccttgtggtaatgccagcgtggagaagcaacgcccagatgatcgtgatgaactcgccgccgccagccat

SEQ ID NO: 72699 - DNA, 358 bp, Zea Mays
atctgctcgagttcttgcgccaacagagctccaaaacgtgtgaatcttaccaaatgtcgtgtgtaagatatcttcctggcacctagggctagctagtttgtgtaagttccaatggaagatctgccctagatcacaagatatgtgggcgccaagtcttgtctgtctgcactgttcaccagtgacaaaactgatatcaaaccatgtcaaacgacctcggtttgaattcaaattttttagggatgtgccttggttaatttggccactttttgctatttggtccaagtggttttggcgccagcacaaaggtgaacacctttgatctttgggctaggggtggttttggggacttagagaattt

SEQ ID NO: 72700 - DNA, 737 bp, Zea Mays
cctctttgtaccgtcggtcgcctgtgcgtcgccgactcgcgaagcagacagcaacaggctccgccgccaaagaaatcgggtcgctgctctgttccgtactccgtctccttggaaaccgttgtttcgaggtcgatctgtgtccgtaattcttcgattttttttgctgttgctcttcgttgctttgttgatggcgtggttggtgattcgctggtttggcggcgcggagcggaccttgttagcctggccgagcgcctcctgagcccagctacatggatccgccggagtcgatcaactgaccgagcgtctccttgcccccacggagtcgctcttgtcaagatctgacacattcgctccccattttctgccaacctcggaagcccagcacacaataaaattttgtttggtttggagagaaatttcggccgttcttgctttgtttttttttgtagctttgagatcgatcgcaggtgtaagtcaggtggcagcgtgagacccttacccttctggggtggatgagctgacacagttacacgcctgcgagatcacccacaacgggagcgctctttcgttacgcgcgccgcgtcaaatttccagtagcggctcgcgtacatcagggcgccacatttctttagcaaaccccacatttctttttctaccatttccttgttagtccagactccagatgggccattcgcctattatctcgagattttggtctgatcttgctcaacttgccg

SEQ ID NO: 72701 - DNA, 978 bp, Zea Mays
gtagctgctcaagatcaatgaagacgacaagcgctgccctgatcagcatgcgcaataagcaccacaaagtgatgacgggaaacgagaggaaattaagaactcgagcacatgtacgcacaactaacagacgggcggttatagtttattaggcatgcatttgggacaaccgatattaaagaagaggaaaagattctgcatatatatatagactttgtttgctcggaggcgcgtcacctaatcatgtggccatttgaagctagctagcttctgtccctcccccacacccattattatcaaaagccaatgatcgattagctcgcaattattttagggttcaacggcatctttgccagggctgcctttagctaaatggccactgaagataaacaccacacctgttcacacacacacacacctttgataagaacgacgacattggacatgaaatgtgaggcacgaacgggagggatggaaggcttaatgctgtgaaaggtgttgacctaacaagaaggagatgattgtgtgcgcgtgtgtgtacttttaattttacacggtagctagagagagaaaaaatactgaccgaccaagagttgattgtgcgcgcacagagacccggccggccccttgtcgattgataatgattgatttatcaccgctttcaactccataatttagtggtttaaataaattgttaatatgtcatgtcaaatctagctggctatatatatgtattcgcccctgtcatctccagctagatatccgacccccaactcctgccccgcacatatatagtttatacatatggtagctagatttggaccaatgcagatcgattaaaatgttatctttgtgttgtttatttacctacgggaaagtggtgtgcagtgtggggatgatggctagctcgatgcttgattctgctaacagaatatgtgaccaatgcaaatggctaactggctaagtagtactatatggttt

SEQ ID NO: 72702 - DNA, 678 bp, Zea Mays
gaaaaccctagacatggcctctcgcaccaaacccgaattcgacgtggtccgaataaaacaagaaagttggcacatgcgagagggtgtaggatgcgatggtagaggcacagtgatgggaccagtagaagtggacgcatcgatagagagcccgcagacgatacgagagggggagacatctccttagacgagtaagttgacgtaggcaagagggtgcaggatgtggtgacgttgagatgagagcgatgacagcggcatgggaacaggggtggaggcatcgacgaggagccaacgaaggatccaaaggggaaggcaaacggtgaccgcaaaaataatagttggtggcggcttcgtgtgaatggaatatagaaggagacgggcgcaggaacatgaaggattcaacgtgattgcacgaacggttttaattttctaagtgacgtggacactcgatgagatctagaatttcattgggttttaatataagagataagatatatgaacctaaagcggtaagaaacaaagtgacagaatgagaatacgtatggaagacctatctaagcatcctcaaactagtacagaaactgcatgataaccaatgtgctttagaacatcatgtagtacaccataaaaattataaatagtcgcaatcttattttctacatcaaatagttcatatgaatt

SEQ ID NO: 72703 - DNA, 563 bp, Zea Mays
ttcgccccgcttccccaatccctacccggatcgttctctctcctaagtatttcccaatttgatcggcaagtgcagccctctagcctcaggtgagagagcgatcaaatatgtcgtcattatgtttgttctattcactcctttgtaccacacgtgatgttgtatgtacaataattttgtattgcatggtttgaacattcttttgatacaacatcagccgagggttcttcgtcaacattcagcatgtcactatctatgaaggatttggacacggccttccatggagctggacaaaaggagtatcctttttcattggcttccctatactatgtgctttttcagggtctaacatctttatatcatcgagacgcattgcgagaacataggatggctctcttaacctaaacaggtttggatgataatttgtgaactgattccaacagtaaacatgccatgcttaccataaagcacctaatttgtgtgtctgcatgttaatctgagaaacatacacaagttgcatattgtttgtcagttaaactgtcaaataacatttaggggggtgtttg

SEQ ID NO: 72704 - DNA, 571 bp, Zea Mays
gggagccaacacacggaagctatagaggctcatgtcgtagtgtgcgcaatattgtacatcctctagctaatcatcgattggtgacataaagaagaaaaatattatgagctcaaacaccagtgaacatcaagacttttagcttcccctcaccttatggttacgatgggagttctagcttaataatgctaatcaccctttatgcttgccttctagatgaagagtgtccatagtaagcttggttgtttctaacttgaactacttttgttagattgaattgaataccctaaaccctaaaccaataaggaatagtttgcatgcctttagatgtggggcctctttcctaagactataccatccttaatgggccctgatcacatctttgttttgtgatagggttacacttaactatcctaagtccttagctccttaggggagcttaggtcctagagggccaggttctggactcccttggagcacgaggccaatgactctttaggaaccccgagtccaacaaagggcggtaagcagctaagtatatgtttgcgtatattaataaatattatagatatct

SEQ ID NO: 72705 - DNA, 313 bp, Zea Mays
ccatacgacccatcacccatgcaccacaagctcgtagtttggtatctcactctactcaattaattagtggcttggtttggcttggctgcccgactgctgcagctccctgactgatgtgctgcagcctctgcctagctgcagtagcagcccaaccaaaaagaagtgcagccaaacatatctgagctagtatattactccctccaacctagtctataagacataatcatctatagtttaaataccaaaaagtgtaattatctctatcaacactagtaccactacatatatatagagagtacaccttatattatcg

SEQ ID NO: 72706 - DNA, 1024 bp, Zea Mays
tacatgtggatggatgagttgctcccaaatatgctctgtcatgcgctctgataaggatcttgatggtaaagtgtgtgcaaaagtatcccagaatcagcccccctcgccgccggtgaccttgcgctcggattcacgccggcgccgcaattcacgcccagttaaacgcagataacgatccccgggtgaaaagatttcgccatggatgaacttggagcacagtagtcgctctgtcgctcatctacttgcaggcgacgtggccgcgcaaccatcaccgtcgtgccgtcgttcctcgcggttatgccacaccgtcagccatcttaccacgtcgcaattgatcccaatacacaacccatctatcgcctaaggtgttgccacggtaacagccacggtcaccgcgctagtgacttagtccctctctccagccgccgcgcgtcttctcaaaattagcggccaccgcagatagcacctataaattgtcgccccagtgagctccactaagtaatcacacacccaacgcacctgcccgtgcctcagattgtccaccagagcgctctaattttgaagttccccaaatcagttagaactccaccgtgagtgagctcgccatggctagctctctgcaggtccgttcacgccctccttgctctcgtttcaataaccatgtatgctatagatgctcatcggcccagccaattgaactagacctaggtagatcaccgggaatacctcggattatcctcggtatgcgccatcaccgtggatagagagttttcgacctggaattgtgcaattagttgagggattcctatcgccgggattagaattaggggtcgagcaaataaggagcctagccgttgcgttttccggctagggtaagctcgccggagccactgctccgccgtccatggtcggggacctcaacctacgaaggaatagaaagggaggggcctcggtgcaaatgtaagtgacacaaagaaatagtgcgcaggactcttaaccagtttttcaaatggcaagggtcctc

SEQ ID NO: 72707 - DNA, 699 bp, Zea Mays
gcggaatagctagggctgtgaaggagtcggatgggcttccacttgtttgtggcccatgtgtcgaggcagaagagtcggtcatggaggggcgggcgaaagccttagactagctccaacatgaaagcttagtttacaaattacagaagatatttctctgaatattttggacgttttgctgtgattcttggtcttcttgtgtcactagcttaaacagtgaatcaacgtgcatatttgatatcttgttatctcatattgtttttagcaatattacaaattacgcaagtgcataacggtctttatagtagatatcttagtttatatttgatatcttgttatctcatattgttatctcatattgatatcttgttatctcatatttcatattcttcgtcttcttgtttttgtaatgacagttttgtttcgccacttggacgttctatatgggtacactgcgtagcccttctttgtccagcttttactttgtttcttatgcaatatcaatattagtggtagtacacatgcatatgttccgattaacccattattttgtagaacatagtaaaaaaaatgccagtatagaagtgccatctgtttccgtcacatggagtgtgatatgattaaactatgcattagctggcaatttcagtaccatcatatacgctactgttgaagggttgagttcaagttatatgatcctgc

SEQ ID NO: 72708 - DNA, 2024 bp, Zea Mays
ggggactgggggatcggtctacccacgacggtggtagacgcgggtggggtcagcgaagtgtaccgcgtcggacacatgcgacatggtcgtgcatggcgcgtgtagaggcagtgaggtcatgcgtggcacaagcggagtcggtgggaccacgcgtggcgcaggtggggatcgacggggccgcgcatggcgtaggtggcaacactggtaaaggtagaggcagcacggttgcgcatggcgtaggcgaggacgacggggccgcgtgtggcgtaggcagaggtgatgcggtcgtgtggggcgcaggcgacatggccatgtgtggcgtgaaagagggcaacagatgaggaacattgacacaatcgacatcaaggtcgggaggtgaggagctagcaatgtggaaaacgtcctcatcaaagacaacatgacgagagatgatgatgcggcaggtgagaagatcatggcactggtaccccttgtgattaggggagtacccgaggaaaagacaacaagaggaccggggtgaaagtttgtgatgattggtgacagaggtgttgggatcgcaggcacaatcaaagatacgaaggtgctcataggagggggtggtgctgaagagggtgaagaacggagtgggatggggttgtgttgaagtggtaggtggttgtgttgagcgcctcaacccaataacggaccagaagataagcctaggataaaaggcaacacaacatgttagtggtggtacgaatcatgcgctcgactcgaccattctgtggggagttgtgagggcattgacatccgcagctgcacgtcgtgggagagaaagaaagtgcgagacatggagttatcaaactcacgtccattatcgcaccgaacagcccggatgatgtgaccaaactgagtcgacacccacacaaagaggtgagaaatactggtgaaggtgtcagacttgcggcggaggggaaaggtccacatgtagtgagaaaaatcatccaggatgaccaaatagtactggtaaacggagatgcttggaatatggggtgtccaaatgtcacagtggatgaggtcaaagggatgagtagctcgggacatggaagaagagaagggtaagctagtatgacacccaagctgacaggcatggcaaagcaaggtggcggtgtcgcgggggcaagggatggttgaagtgccgagagtcgagggaggacgtcgtggccagggtggccaagacgacgatgccaagtggaggcagaggcagtggaggccatggcatacggtgtgacaatatgggcggaggaaggtgggtggggacgcgaatgggatatagggggggcagagctatcacatcgagcaaccacaacatgagtggtaagatcccgtatggtgagcccctagatattgaactccatagaacagtggttgtcagtgaagcgacggactaagagaaggttctggatgatgttgggggtaacaaggatgttggtgaggtacaaaggaccaggaaggaccgtgtcacctactaaggtgacatgcatggtcgacccattaccgataatgatggagaaagggaaggtggggctatggggacgaggtaaagagacaattctaggtcgagggtggtgtggaacgtggcaccagagtcggcaacctagtcggtgagaagagggggcgacaaagacatggggtgcgcgaagagagccaaggaaggcaccccatagaaccaccgggacgggggttggggccgggcgtggcgagcatgttgacgacgatcatgggtggcgtagacgataaggtctcgatcgtaatggagacaatcgcggcactgcagaatacaaatggcctagtagcgtggtggccctcccgagggtggatggaggcccgggggggggggggtggaagagcacgacacggtcacagagaaccgggttcatgaccagatcgaagcccacgaagatgccccgtagaaactagtcgtcgtgaagggagacacacacacggtagggaggcatctggaccgcggcatggcgaaggacgaa

SEQ ID NO: 72709 - DNA, 332 bp, Zea Mays
aagaaagcagaaggtacaagtcaggcaagggaagctcaacttcactactctggaggaagtacctgagggagctcccatcatgaccggtatctttttagtttataatcaacccgctttaattctgtttgattatggtgcatctcatagtttcattagcctaaagtttagtgctaaatgtgaactgcctttctctcactcaaaagggtcatttatgatagccacacctgggggtaaaatctcaactaatcaattaaaccaaagtgtgcctattcaactaggaagccacattgtcaaaaccacccttcttgtgttgggtttggaaaatgtggatg

SEQ ID NO: 72710 - DNA, 819 bp, Zea Mays
gaagaagtccttgctctgcagccagacttacagccagactagagactgtcaggctcattttagctctagctgctcatgggggtggaaggtacaccatataaatgtcaaaatcggccttgttggatgaagacatccaggagcaagtatatgttcataatccacctggtctgactgatgccaagaatgcaggcgaggtactgagattgaagaagactctttttatgtactgtcaaacaggcaccaagagctcacttctgttgattggagtatatgttggcgatcttatcatctgtgggccagacaataagaaaactgatgagcttaagcaatagatgaagagctgctgtcagcatgagtggtctagcctatcgagttattatctgggaatggaaaagtacttcaggtgttgtgttcttccttggctcgaatttagtgacctggacatctccgaaggccgaagcaaagggtggtagccctgtctgtccttttgtgtagctgaatatatattgcagcatcagcaggcgcttgtcaaaggtgtctgccttagcaggctcattgcagaccatattggtggtgaagtgaagatgttgaagctcttcactggcaggcagcaagtctgcactgaagggagttaagcaagaacccagtgtatcatcagaggagtaagcacattgacacacggtatcatatattcgtgagtgtgtcagcaatgccagtgtgcaggttgatcttgttgggactgacaggcagctagcaaatgccttgacaaacccgctcggcaggatcaggttctttgagttggggcagcgcctgggagcc

SEQ ID NO: 72711 - DNA, 574 bp, Zea Mays
gttacaacatatatattgttaaacgatttatttgattaaagtctcaaccttcgtcttcgaagtagttccgaggggataactacttgaggacgaaggatgtttatctttttaacattgtgttgtcttgttttcaactgtgtgtagtaattaagaacaagtgaccaacactcttaaccatgagcatggctgaggttgtacaactttacctgcaagtcgtggtacccgtttgctagggtttacaacacccgtcatatcttccaaggaagtatggtaggattcagtatgagacttttacaaaggtcccccaagtatattagtaccatggcagaatatttggaagcgatcttccataactatccatcccctatcttgcaactaagcaacccatggacatataccccaaaacctagccatgtgtagctatggctaaagggccttctctcgtccccatctaccaagactaatgcccacacatgtttccataattgcttggttaagactggaggccatttagtcatcatggtggtcactcggctaactggtctgtagggtaaggcacttatgcaatcccgag

SEQ ID NO: 72712 - DNA, 443 bp, Zea Mays
tatttgatcatacttaaaactggttggcgtcttgtggtgtgcgagatgtgcacttaaataatttggtacgcagagagtacacttgttcgttcaaatacagtaaaggctgagcctcagcaaccacgtgccgtttaccctaaacaaatgttcgcccgacacacattcaactccatcagtcaagatattaagacagggtccggaagttcacccacgtggtcacttaaaacatggttttgcactgtataccacactaatgcagatggattgtatgctgagagctgaggtgcaaaaaaaaagagggctataagtttatagccactaataaaaactttatgagaaagataaactatagtatattaatattaaaaaaagagctaactaattatagatcaattaattgctgggagcctgagatggtctattagagaaagtacaataagctg

SEQ ID NO: 72713 - DNA, 292 bp, Zea Mays
caatgatcacaaaacaaacaatcactcatctaagaggtaaagacacccctgctaagagatcccaaaaggcatgacctcttaaactcattagaggcttgaggaactccgacgataacaaaccttatagatggtatgtatagttttgaagtgcctccttcactaaagtttctatcattctgaataatacctaaatcctttaacatgtcgcactgcacaagacagacacttcctcatagcgaagatctatactaggactaacaccgatatgttgttgtcgtggtcaatagtgggg

SEQ ID NO: 72714 - DNA, 377 bp, Zea Mays
gttaaacttaagaaatcactatatggattgaaacaatcaggaagaatgtggtataatcgactgagtgaatttctaagcaagaaaggctacacaaacaacgaggattgcccatgtgtctttatacagcgatccccgaatggattctgcattatatcagcatatgttgatgacttgaacatcataggaacacatgaagaaattgaagaagcaagctcatatttgaagtctgaatttgagatgaaagatttgggtaaaaccaaattctgtttaggcttgcagcttgaacattttgaaggtggcatattaatccaccaatcaacttacactcagaaagtattagaaagatttggttttgagaaggcataccctgccaaaac

SEQ ID NO: 72715 - DNA, 758 bp, Zea Mays
agacacttgtggtgcaaacctggcatcgtcctccagtgatgatcaacactagtacctagactctagtgctaccgaccacatcactaacaaacttgagcagctcacaatgcatgagagctataatggcaatgagcagattcgggctgccaacggtacaagtatggacattgcccatgttggtcaatctgttatacccaccccttctcgctccttacatctgaacaaagttcttcatgttcccactgctcataaacaacttgtttctattcatggttcactcttgataacaatacttttattgagcttcacccccattttttcttgatcaaggatcaggtaagcaagcaggttctagtacagggaccttgtaaaggtggcatctatcccctacaatcgatctcccccaccattcagaagctcatcctctccgcaataaagccgtcctctcaacggtggcatcttcatttaggtcatccatctcgagatattgtacttcgtgctatcaagaataatagtttatcatgttctcgtgtcggctcttcagaatcagtttgtgatgcatgtcttcaagccaaagctcaccagctaccatactccaagtctaaaagtcagtctactacccctcttcaactagtcttctctgatgtctgggggcctgcaaccgattcctttggcaataagaaatactacgtcagctttattgatgattatagtaagttcacttggatttatttgcttcgttacaaatccgaagtttt

SEQ ID NO: 72716 - DNA, 614 bp, Zea Mays
ccgatccgcagtggcggcgtgccagggaagaggaatacgatgctctccaggccaaccacacctgggacctggtgccacgtcaccatggcaccaacgtggtcaccggaaaatggatcttcaagctgaagttgcatgctgacgggtccctagagcggtacaaggcccgctatgtgctccgcggctgtacccagtgctccagagttgactactacgagaccttcagtccggtggtcaagcctgccaccatccggactgtcctgactctcgctctgtcccgggactggccggtccaccagctcgacgtgaagaacgcttttctccacgacaccctaacggagacagtctactacactcaactcgttgggttcgttgaccctactcaccccgacatggtctgcaagctcaacaagtcactctacagcctcaagcaggcccccggggcttggtacagtcgcttcgccaccttcttgtgttcgcagggcttcgtcaaagccaagtcagacacgtccctgttcctcctccatcgcgccccgaacactgtgtacctcctcctctacgtcgacgatattgtgctcaccacctcctccattgggctcctgcgtcgcatcatctcc

SEQ ID NO: 72717 - DNA, 525 bp, Zea Mays
attttcccatgaaaacttttccaaaatctggaggtaaactgtgatcctctatccaaaatgatcttcttcggtacaccgtgttgagacacaatccaagccatatataactcagccaattgagatcacttataagtagtcttgacaggaatgaagtgagctactttagtcaatctatccacagtcacccatatagaatcataacctttctgggtgcaaggcaatccagtaacgaaatccataccaatctcttccaacttccactcgggtatctttagtggatgcggtagtccagctggcctttggtgttcagctttaactctttgacacgcatcgcacatagccacatgtgcagctacatctgtcttcaatccataccactagtatttctgcttcaaatcctgatatatcttggtactcccaggatgaatagaataatctgagtcatcagcttcctttagtatagtctcacgaaggctttcaatctctggaacacatatccgatccttgatccataccgtgccttgc

SEQ ID NO: 72718 - DNA, 500 bp, Zea Mays
cgattgccgatgcaatagctcttgaggtggtaaatccagatgcgccacgattactacagcatggtaaaggactatggcgtggcacattttgggtcattggcgtaccacggcgacatcggtgatccggccacgttgcgtagctgcaggcgcgtttgataagcttcaacccgcgatcaaatccactcccttgctgatcttttcaccctcccggtactatcctgcccgagttctacacgaatcactgtgatcagcgcaaatccttgcgcggaggtcaccggcggcgaggttcactgaatctgatcctatccaatcattgtaccattggaaccgttcatcagagcgcctgacagagcagattaaaggccttggttctccaattttttgtgtgacaacttgataagccctctgtaacaaagttattgttctatatatcaactacaattcgactatagagaccttgcccatttacttactccctcgagctagaattgaatccaaag

SEQ ID NO: 72719 - DNA, 769 bp, Zea Mays
tttgcggctggagtagattggctcaccggtgaaccgctgcctctcggccttgtgccgcgtggctctgcctttccaccgcgtcgtcgtgactctttgtggccgtcccatcgtcgccggtgaggtcgccacgacgatagacactagttcatgcgcaccagtaactccctgccctttccgaccgccgcgcgtccctgttgaaattcccggccaccgccgttgagccctataaattgaagcccctgctagcttcacaacatcatcacccacccagccaccgagaatcgctagcaatcgtgcaccagtgagcttgaatttcggttttccccaaaatcaagcttccgccaccccgaaaccaacctcaccgcggccagccccattccggtcagttcatactcccctctccctcgtttaagctttctcatatatctatgatgcttgccgaaccaccaatttgcacggagtagccttagatcaccgggaacaccttcttccgtccgcaacactctcggtcaccgtggccagggctaattagttgctcattagtgaaattaggttgggggaaaggtttgggatgggtccaattccgtgtccatcgctcgggaaccctagtcgttgccctattcggccggtccaggagctcgccgaacctcggccgtgctcgacgccgtcgtggactcagtgcggtgaagaattagaaaccagagggtttatgtgtaaaccgtcagtgacacaatgaaacagtgaaagaacaagttttcagttagccaaa

SEQ ID NO: 72720 - DNA, 547 bp, Zea Mays
agatgctgggattaagccgtgagatcgtagagcatcggctgcccattaagtccggtttcagacctttcaagcagaaaactagaacattttgtccaaaccttctcccatgaatcaaggacgaaattcaccggctactagaagctaattttattagaccttgcagatacgcagagtgggtctccaatactgtgccggtggaggagtcaggtaagctcagagtatgcattgattttcgcaatttgaatagagcaactcctaaagatgaatatcccatgcccatagccgacacattgatcaataatgcgtcaggaaatagaattattagctttcttgatggtaatgccggatataatcagattttcatggccgaagaagatgcgtctaaaacggccttttatatgtccaggcttcattggtttatttgagtgggttgtcatgacatttggtatgaaaaatgtcgatgctacttatcagagggctatgaatttgatctttcacgagctattaggaaacaccatggaagtctacattgatgatattgtagtca

SEQ ID NO: 72721 - DNA, 287 bp, Zea Mays
gtgcgacatgctcacgcttacttaactcaggggaccactataccctattaacggagcaatcgacttaagtcgacgatgacttaaggcggtgcgacatgctcacgcttacttaactcaaggtgaccactataccctattaacagagcaatcgacttaagtcggcgatgacttaaggcggtgcgacatgctcatgcttacttaactcagggtgaccactataccctattaacggagcaatcgacttaagtcgacgatgacttaaggcggtgcgacatgctcacgcttac

SEQ ID NO: 72722 - DNA, 741 bp, Zea Mays
gtttcaatgacattggaccatacaatcgcagtcgcagcaatagttcaaacagctagtttggacatcgaaagtacaaagttaatggtgtatcttgttgaaccatgtgatttggttcgagggctgagcgttggataaactcgatagtcaagaaagttacctagagttactatgacaagtaattggttggtaagggctacaaataccccataaatcggtccatactgatgttctttcccatttaatacctaaaataacccacatagagtgtgggaatgagcctttgcttggtgaaggtcttaagaagtaaatttgcttggttagtggcctcgttagtgcataagagggtaattagtgtgcacccattaatctcactaagcttggtagagtaaattgagatttgtgcttattattcctggtgattggcatgacctagatggttcaatggaaatcaagagtgtggtgatcatcgatagagtttaggtgacctagcttgggacgtgtacatgattgtgagcagttcaccatgctagagagacaaagaaccatctcatatagagcatttgatccttgcatagattaagggggagcgacactcttgcatggatgctccaatgaggattagtttgtggtattgactcttttagaacttagcaaaacactaaggcgccttctaatccttgctttactatacacatttacatttgagaaatttacttcaaatatttactttattagaaaatg

SEQ ID NO: 72723 - DNA, 452 bp, Zea Mays
caatcaagtactggaggatttgttgagagcttgtgcccttaagcatggaggcagttgggacaagagtctaccatatgttgagttctcatataataataattactaggccagtctgaagatgtcgtcatttgaagctttatatggcaggaagtgcaggactcctctatattgggatcagactcgagaaagacagatctttgggcctaaagttattcaagaggcagaagaacaagtccatacaatccgggagaacttgatggtagctcaaaccagacaaaagagctatgctgataatcgaagaagaccactggagtttgaggaggatgatcatgtgtaccttaaggtgtcaccacttcgtggaatgaggagattcaaagtgaaaggcaaattatcccctcgctttattggacccttcagaatctttaggcaagttggggagatggcctaccaac

SEQ ID NO: 72724 - DNA, 588 bp, Zea Mays
gaataaagcacgcgtaataaagaatgcacaataatgaatccgttcgtttgcccaaaggagctgtgaagttacgcataaaagctattggagtactttgcgacaataaagaatgtgcagaacaaacaacggacatagggaacaaagcacgcgcagctgagaagacagaagaacataatacgacagagactaatagaaaaatgaaaagcgctcaggcgacgatgatttatggacagagggagtatttaaggctctgcctcaaatactctttggtcttgattggtgttatcaggcggtactaaaaagtatcgactggtgttatgaatcagtggcctctcctctttggcctcaaatgctctgcctcaaaaaatattcccctacaaacctctctcctctttctcacatgtcaatttttcatgtctcacaatctcactaacgccgcttcgtaatccccattgtcatacatgtgccctagccccgacttcatcctcactgccctggctgctaccaccctcgacgcatgagccacctcccattgtcagttctcattgccatcctcataagtcgtgcttgtcgtcattgccttaccgg

SEQ ID NO: 72725 - DNA, 418 bp, Zea Mays
ccatacccctcatgcacttaaaaactaaactagtgccttaaaccaactcagccacgcgcatgagatctaacccaaccaatagagtcttgatgaattgcataatctgtctatacccacctgacataaaacaagatcttgatctacctcatgtagtctatctcatccatgtctgttttaaccatattccctgaccccgatgatatacactaacctcaaatcaataagaccaagactggagaaggaaagatcaaccccatcaaggaaggagagaagtcaaactcaatcttcagatgcattaccactcaacacggaattctttccaatcataaacttgcttaccctaggctattcttgctctaacctacccatcttttataataaaatgactatacatatatatacccatgccttcctaatc

SEQ ID NO: 72726 - DNA, 950 bp, Zea Mays
ctttgcagaccaagtacgccaccttgctagatgagcgcaacgagttgagatctaggtctagcttattgggtgcgtgtactgtttgtcctggcttgcagactgagctagcagagagagacgctatgatagccttgcttgagaaggctagctcagtgagtgcccctgtacctgcgcagtgtgcactttgtgagggtttgcagtctgctcttgagtcctgcagacacgacaagacaagaatcgaggaagaaaacacataccttcgatctgtcttgagctgggtgtcgtgcagtgagccctagttgggcatgatggtcagtcagttcaagaggggaactggcggactgaggttaggctttgctgctaaggatgggagtgtcactcgctttgggaaggttggtgagggcagtggtttgacaccttcagagaaaccttcacccactcccaagcttatcaaaatcaccccacctaagcctatcacccctgtgaaagatggtgtgattgaggagtctgtgagagcccctcctcagaaacaagtgtggattccaaaacctaatcatctcaggaacacacttgatacccttcctgacatctctagtgatccccttcctagagcccctcagccacccaaaaagaaagccccctcccataaacaaattccacctaagagagaggtgaggtatcattgtgagtattgtgagagggatgggcatctggcttctttttgctttaggaagaagagagatgagcggcgggtttctgagtcgagcaggaaggacatgaaccacccctctcacggtgttcatgctcagcctgttcagagacgtcctgtgaggcctagaggtgctttgcctcttgctgctaggcctcaggcagtgagaccacgtggtggtcgtgcccggtggggtgctagtcatgtgccatatgaccaaggaccccgtgacagtggcttc

SEQ ID NO: 72727 - DNA, 532 bp, Zea Mays
agagacttgtgagctctttgtccctctctcgcccacttgtaacccctactacgagcattgagtaacaaaggtgtcggttgtgcgagccgcgaagactggatgtcgggacgttctgcccaaaccagtataaacattgcgcccatcgggcacaccatttagagcccagaacatgcacatacaaatttacttgtcagagcaggtgttcgaaacactgacaaacgacagttggtgccacaagtaggggccttgcgcgttctcgacgaacttttctaggctctatatggcgggacaccgattgaacccccgaggtggcgatccatttcaagaacctcgagttcgtccttgatggtgaaggggatatggttagggcactggaagtccgaccccttttagtcaggagtctcaacattgttgtgagtgcccacggtggccctcgtatcacttacacccccagagcaactgcccgctttgagggccttgacttcatcatcaatgaagaaggcgagatggtttgggcaccgcccacccgaaa

SEQ ID NO: 72728 - DNA, 428 bp, Zea Mays
ccgacggcggccttttgaagacgtggcccaggcgggttgggttcgcttttccctgttcctcccatccctccctgatctctcccatccccttctcctgggctggctggccagtgacggaccagccctctcccacctcgcacgcccctgtggctcctgaccttcccaccaccggagttaatgccgcctggcctggccgtctcgctggcgcggcgtgggacgtggtagcagtaccgcgcgtcgcggttgggccaatgggacgggcgtaagtgcgtaagcgaggacgcgaggtgaggtgtggagattgaggggtgggagctgttgtggcgcgtgtctccctgtcgcccgcagcttctttttattcctcccgtccggttccgttccggggaattgattctggggagccggcgcggccgcggctgctttgatcc

SEQ ID NO: 72729 - DNA, 762 bp, Zea Mays
aagttagagctggtttgttaggctacaactttgacatagtgagatgatcgagtcactgcatgaattttggaacaactctccctgccattcgctctgtcaggctaactgaagaagttcttgatggtacagtaagcaaaaagatatgctagttcagtgaacttgccgccagcgacccccgcgcctggatttgcgccgccgaggtgattcgtgctcactggtgcccggataacgcctcagggtggaaagatcttcaccgctattgagcttaaggcactgttctgccccggccgtcgtgtccccttggcccacggccgagttcagataagttcaccagagttagccgtctgccgcttggatgacacgtgcctagacacagtacttcgtcgtagtgactcgctctagcacatccggtcatcggcggtgagcccgccactgtaaatgccaccaatcgcttgcgccagagcacctccttctctccggccgccgcgcgtctttccccgaattagtcaccatcgcgcaaggatcctataaatttagcacaccctcgactccgctaggtattcaagcaaccagcacacccactcgtgcctccaattgttcacctgagcccccgaattgctcacttcccccaaatcgggtttctgccaccgtaaaagggtcctcgccgtggctagctcgtttcaggtccgatcttatcctctgctctcttgtttcagcacccttacatgcccctgatgctcctcgactcgtttgattaagcta

SEQ ID NO: 72730 - DNA, 459 bp, Zea Mays
aagactggattactttcgatcgagattcttttggcagggggataatcataagaagaaatataggctagctaagtggaatgtcctatgtcaacctaaggatcacgacggactaggtatttagaacatagacatacagaataaatgtttgttgagcaagtggttgtttaagttattcaatgaagagggtctttggcaaagtcttttgagaaataagtatcttaaaaacatactctaactaacgtgatagaaagacccgaggactcacacttttggaagggtctgatgaagatgaaggatttattcctaagtatgtgatctttggttgttaggaatgggaaacaattaagttctgagaagataaatggttaggaaaccaaacttttatgcaacagtacccttccttatatcaaattgtgcgaaataagagtgatacagttgcaaatgtattgaatggtgtcc

SEQ ID NO: 72731 - DNA, 339 bp, Zea Mays
ggacaagaacgcaggaaataggagtgggaagggtgaggaggattcctggtggcgttccggacgctggagagttcttctagtgcgccccaggcaacctcctaggactaggagattttcttcttttgataatccctagtacaaactacccctggtctcttatagactgagcccaggttaatataaaaacaaatcatatcagtctcaacttgctagaaaacagactgactaaatatagaaacttatctgttgtctcttgtattccttatctgctgactcactatatatagaaacttatctgctgtctcttttattccttatttgttgtttcctttattcctg

SEQ ID NO: 72732 - DNA, 687 bp, Zea Mays
ccgagagagatgttcggggcctcaacgttcggcatcgccatgaaactgctccgatggctgccgatcaagatggtggacaggctcctgctcctggtggcgaggatggtcctgggtgacaccgagaagcacgggctgaggaggcccaagctaggcccgctggagatcaagaacgtcaccggcaagagccctgttctggacgtgggagcatggtcgttcatcaaatctggaaacatcaaggtgagggctgctgtcaaagggtcacactgaaataaagaagagtgacgtcgttcgtgcatgggaatggaggagtgtactaggagtgcatccatccatgcatctttcattcattccttcctgttgcttcctttcgcatgtcatgccaacgctagctttcacttttgaggttcatacaacattcttttccctatccctttgttgttggtggtagtgtgtgcgtgggctgatgagtgtgaaaactactagtttttacagttttatccgcatgcatgcatgcctctttgcatggaccatggctttattattatatattttttacaccctccccgtccccggtctcttcttgctctactagctagggtgcctgcctggtgcatgcagatgcaggcgtctgtacttgggcgtatagcatcatgcttgcatgacaacaaaataactgctggctgaaca

SEQ ID NO: 72733 - DNA, 475 bp, Zea Mays
tagtgttgttgttgtatagcagatcaggcatcagcagttctttccctgtttatttttctctgttagttagttaatcctgtgcattatttgcattcacattcatctaatttggtattattcatctaatttggtattgcatgtttgcttaactaattttagctaattgtgtgtgagaacgagccatgttgaagctagaaccgtgttgcgttcacggccggtgcggccagagtggtcatcgccatatcgtgcatgaaacatcctcgacgttttagacgggcacgacacactgtgagcatgcaaggcgggagggtcgtgaggctcagaccatgtaaacaccagtatataaggaaacaaataaaaccaaaaaggttgtaactctgggcaacgccattctcctgtgttcgcgtgtagatcataatgagagaaagacaaccttgtgtcagagttcttatactctaaagattcttgagcaagc

SEQ ID NO: 72734 - DNA, 627 bp, Zea Mays
aaatcagcagcgaagaacaagagccgcaccctgcttgagaagttgtcggcggtggaggctgagaaagaggacctcggctgccaacttgccacaaaaaaggagaacacggacagagcccgtgcggaggcccaggccgcccgtgatagggcccacgcggagacccaggctgctcgtgccaaggccaacctcgctctccagcgcgctgccgacgcggagtcggggcacaagagtcttcacggatatctggacagggcggagacctccactcgcataggggtcgatcgagcacataaattgcttgtggacgcgtactacgagcttggtgcgtgtaccgctccttttgactcgtctagcgaggaggtgggcctttgcttcctcacgtggttgtaggaggagctggacatcctcccggctatcgtgacgggtctcatgtcctttgcctcgctcatcacctgtgaaggtgctgcgaatgccttgtcccgcaaggggtgcaggcacttcgaagtgtttgaccgatccaacgaggacttcgaccgtgggatcttccaggtcaaagacgaggtgttaaagcggtctgctggggtgctttacgataggatgtggggcgcacatggccgcgataccgtc

SEQ ID NO: 72735 - DNA, 920 bp, Zea Mays
ggtcgtaaaactcatacaagacataatattcaggttcgggataccgaatagcatcataactgacctaggatccaacttcactagtttagagttcttcgatttctgcgagcaaaagagcattcagatcaaatatgcttcggtggcgcacccaagagccaacgggcaagtcgaaagagctaacgggatgatattggaggcgctcagaaagaaagtcttcgacaagaatgaaacgttcgcaggaaagtggatcagagagctgccgtatgttgtttgtagcctgagaactcaacctagtcgagctctgcatggaaacacacctttcttcatggtctatggtttggaggcagtgctacctgctggtctcaagttcggggcatcgaggttaatctttgaaaacatagcagaagctgaagctactaggctggaggatgttgatgtactcgaataagagcgactgaatacggtgattcaatcagcacggtatcagcaaactctgaggcgctatcatgataaggccatacggcatcgatccttcgcagtgggagatctcgtcctccgccgaattctaacgggggagggacggcacaaattgtcacctctatgggaaggaccattcatagtacaagaagtcactcggccgggatcatatcgtctcactcagatggacggcacggaaattgggaactcatggaacatagaacacctcaggaaattttacccctagctatatctcaaaggctgccgggatgccaatgaactctgtaagctgagaaatgtatcatcaataaaaagacttcaaaggcactcgaattctttaactgtcaatctgtgtactcgcctagctcggggtgaccactataccctgctaacggagcaatcggcttaagtcggcaacgacttaagacggtgcaacatgctca

SEQ ID NO: 72736 - DNA, 785 bp, Zea Mays
attgacaacctgaagccgtccgagtgggagtgctttccctcgttccctcattggtgggagaaagtgactatatcgtcgagctgcaataggaaaggactcagatcactgttggttttagtaaatggcgggaaagaaatgtaagaattttttatggcaagttttcgatcagccaacggatagtaaccaaaatcaagtgttaggcgaccgcctggaagtttggtaggggctaggcatctaactactcccttatcttataactaggtatgcgtccgtaagttgccacgaggcggaggagcgtggagaacgacatctaagctacaaatataattattatttatttttaaacactaaggtatatatggtctagtggttagaccaaattttttgagcagatgagtatggttcgagtgcttgctttacactatttttttgcaggcgctgaacgtgaagagggagggtgaagccgtagtagcaccaggtgcccacattaagttcttaatagagtagtatagattagttgggtccttattatgtgtttgtgttgcttctaattgtgggaggggttctctctgtctttacaacctggtgttttgggctgttactgtactgaacctcttatttgtcttcttatcaatataattggcagttgcctatctgttttaaaaaaatacagtatacatgctatgaatgacaagtagttatgatactacatatggtgatcctgtcagaatttttactagcaatacacgcgtctattatctattcagaccaagagaccagctgtt

SEQ ID NO: 72737 - DNA, 455 bp, Zea Mays
actacattaatctaagtccaaagctcactgcataaaacctcgatctgtaatgtgcgtaagatttcccgaataaatcatcacaatagcatacattggccacaactggatgattgtggttggggattttatctatatgcttttagaacatctcggcattagggggaggaatgcccatatagtgtaatgcctcaatattctattaaacgcacataagccaaactgaacatgtcgtttggtgtgtactcctgtgtatatggagtttgccagaaatcgttgaggattaaccatattggtttgaatgcttctacctgatgtagatgtggatatacccgggattaatatcatatccacatttgacttattggcatttgatctattctgcggggacgcctgcagatatgatccatcgaccttagtcaaagcatatgttctgattgcagattcacgtggtctgt

SEQ ID NO: 72738 - DNA, 640 bp, Zea Mays
ccagacttcccctgtcgaaggtccatatagcacacgcaggggttcggtcctagactgtagatggcgagcaatcccgccattggggcgcacgatggcgctggtggcctggaggctagtggccccgttgagcccaaactctaagttagagtagactgctcgtcatcccatggctacagataggcacatgggtcccgtctagactcagcaggagtgggtacctatatttagggtaccgacaactggattttccaaatatgggaaatgtgataaattatcggtttttttccgaaaaatctggaaacgatcattaaaggcatctcatcgtttatcgtaccatttttggaacccattatcaagtttcgtaccgtttttcatatatctcaataaatctggtaaatagtaccaaaaaaatatcagattttacgtccattttcatcattattcacgggcccttggacctcaccaatacaatttatttgctctgttatattcgacacattgggatggcattgcctttaggttggagtgatatgctatattggccttaaaaaatcaagttgaacatcaatatggactaatctggtgtcactatgcatattcatccattcatgcaaatcttgatcactaataacgtgtttag

SEQ ID NO: 72739 - DNA, 1039 bp, Zea Mays
ccccgttagaattcggcggaggacgagatctcccactgagaaggatcgttgtcgcacgaccttgtcgtgatagcgtctcagagtctgctggtatcgtgctgattgaattactgcattcagccgttcttcttcgagtacatcgatgtcctacagcctagtagcttcggcttctgctatgctttcgaagaccaacctcggcgccccgaacttgagatcggcgggtaatactgcctctgacccatagaccatgaagaaaggagtgtttccatgtagagcttggctaggttgggttcttaggctccaaacgacgtagggcaattcccttatccactttcctgtgaacttttcattcttttcgaagacccttttcctgagtgcctccaatatcatcctgttagttcgttcgacctgcccgttggccctcgggtgcgctaccgaagcatacttgatctgaatgctcttttgctcacagaaatcgaagaattctgaacttgtgaagttggatcctaagtcagttatgatattgtttggtattccgaatctgaatattatgtcttgtatgaattccacggccttggctgaggttaaagaagcaatgggtttgaattctatccatttggtgaacttgtcgactgctaccagtatatgagtgtatcctccttgagctttcttgaaaggtccaatcatatccagtccccagcatgcgaacgaccacgttactggtatggtctgcaattgctgtgctggtagatgttgttgctttgacaagtactggcaagcttcgcacctctgaactaactcggctgcatcgcttttcgctgttggccaatagaatcctgacctgaagaccttcccgactagcgtcgtggatgttgcgtgtattccacattgcccagcgtggacctcatccagaagtcgcttcccagtagatgagagaatgcacttcatgaggacgcctgatgcaccccttctgtataatgtctccccaatgagtgtgtagtgagccgactgtctggcgatacgctcggctgcatttttg

SEQ ID NO: 72740 - DNA, 752 bp, Zea Mays
taaaaaaaatgtatctagcttaatagattcatctcatcttaaaagattctatcctacactcatagatctatcttatctcaaaaggtcttaacttatcctaatgtatatagatccatcttatcttaagaggttttctcttatcttaataaattcatcttatcttgaaggattcatcttatcctaaccactttacttatctcatcttgatagatctaactaatctcaaaagattctatttcatcttatcttaataagcatacttatccaccctagtttaacaaccatgatctaatgcaaattaattagatcatatctagtcaaactagtcataccaatctaatctagatcccatctaacctaatatgatctaatctaaagtgagttacttaacggactagttgatactagtgaaatagattagaccctgctggccatgttttaacttaaattagtacatcataccaaaccacccatgaacaaataacttaccagcatatttatggtgaccatccctcctagatgttgccataatacacttatcttatgccaccagcctgttaaccatttgtccttacccacaagttatcctaactacatgaacctaattcggataaaaacttcaagaatgaagatcgaagatgttcgacctcatcaaatcaaggaaggataagattcaagatagatcttcaaaggaattaggattcacaatcttggatagaacctttcctcaccctaccctttcttaaccaaac

SEQ ID NO: 72741 - DNA, 924 bp, Zea Mays
aatatcatgcggtggataagaacctggacctcgccggcgataaggatgtcgccgtggctcgggtaagacgtcggcggccacggcaaaagttaccggcgacgtgtcaaagcctccctgaggtggcaggccctggttaaacggcggtcaccgcgctatcaccggaatccgccgcgcgggtgtgcttgccagcgcagtcaccgctcggggatctcatccctcctcggtcggctgactataaattggaccctggcattgtttcgtcgttgcattacgcgctcaagcgatcactcaattagactgaagaacccacgggctctttcctccctgttcttagctccgccgcaagaatccatccgtggccagtgcaattcgagttagctcgtgtcttccacttcctcgtttgagtattctcaggtacccgtgaagcttcccgacctatccaattgaattataccgtcattaatcgctcggtacatgcagttcctttaagatcctccgctgttgacgtgggcagagagttgtagagctccaattctgaaattgagtgaggggaaatgcgcgggtagagtccgatttggggtccgctactcgggagcaccggtcctgactccctccggccagtccagctcgccggagctcggtccccatgtttggtgcgcggtcgtggagctccttggagaagagatagaaatcgaggggcttatctgcaagttgtcagcgacacggtagaatagtaatcaaacccatctccagttagttaaaaccccaagggccctattgcaaaaactccacagcgggcgcgggcgcgcgcatttcttctggtcgtgggccgtcctaggctggattcggcccagtattattcactggtttcctttttcttttatttccagagccaaaacaattttagaaaatggtagaaaaatg

SEQ ID NO: 72742 - DNA, 337 bp, Zea Mays
aatggatagagttcaaacccatcgcttctctaacttcagctaaggcagtggaattcatacaagatataatattcaggttcgggataccgaatagcatcataactgccctaggatccaacttcaccagttcagaattcttcgatttctgcgagcaaaagagcattcagatcaaatatgcctcggtggcacatccaagagccaacgggcaagtagaaagagccaacgagatgatattagaagcactcagaaagaaagtcttcgacaagaatgagaagttcgcaggaaagtggatcagagaattgccatatgtagtttggagcctgagaactcaacccag

SEQ ID NO: 72743 - DNA, 535 bp, Zea Mays
gaggggtgtccacggcggtgttcccgagcaacaacacgacgttcccaggattatactgcagtagcattcaaattctcgtgctagtgagcatcacaacacctaaaggaaactagaacatgtagcggttgggctagggttactcaggagaggctggccacgatgaagccttcacgatggcgtgggtgaacattttcgggaaaacccggtgactgggagctatggtggacgagagggactcgctgagggtgggttgggttcataacagaagggggagcgaggggagcacccaatttaaaggaaccgagtgtgcctttcacgaatttggagcgaaagtgttcacggcagcggtaagatatttctactgggtgagttgaccatggtgcccatcggtgcaatggctcgtggatagtacttcttgcttgcaagatatttcttttgggtgtcctaagatactttcaagtgcttaacttctccaaatccttgtttcttaacatgtcttaccaaacttagcaagattactcctttgaacttaaaa

SEQ ID NO: 72744 - DNA, 286 bp, Zea Mays
ttttctctaagcacttgggttggacgatcacatatcatggctaagtccatgtgtgccttgtcattgtatttcgttttatctagaaaatcgatgcttgtatttatgagggctcgaaaaaagttacactcttgatgcatcacatcgatgttgtacatcagaatcaatgactcaacataaggaagctcccataagtcacatacgtgagtccagttatgctcctcaccaaaaccttgaaaccttttcccactgtcatctaggacaagtttcctatgctcttatgtaattt

SEQ ID NO: 72745 - DNA, 442 bp, Zea Mays
gctcgattgacttttgagttttggcatctgccacaacaaccatcacctgaatggctgaggagaagaagattataaaccccacaatgtctgggttttacgaagctttggagaagaccagcacagaaaagatcaccaatgagatgctagctgggttgtctgaggattccagtgatagcgacagttttgacgtggagagtgggaatgaagatgtcgaagatcgaccatggaggctgggccatgttgtttttgggaagtaaattgtcaaacaagggcaaattgaaatgatgaaaggcaaatattttcatgatgtttccatagtgagggctgggggagaaagcatcgttccccttcttgaatctggtgaggtggtggtcttcaagagctttatgaaagctaggcttcactttccactccacaagatgctggttgaggttttgaagac

SEQ ID NO: 72746 - DNA, 579 bp, Zea Mays
cgatccaatagaggtgttataatacacgatggttactccccgagacatgcgaaagtgttaagccctgacatgagagtaacctgattgacaaacgtaatgtataggaaccgggcatgcggtcattgacgcaaaggacatgtcgattgaccattcgagaaagacatatcgactaagtatggggaggccatgccacgaccacccacgacccaaaaggattaatctgcagggcaagatcggatttaacaatatcgcgtgctaccacaacaacacaacaggaggagagcactaggaactcttttcactcaaggacgaaggtcaccaacaaaacaataggtcaaagccttgctccgtccaggtgggcgtgtaacatgatcccctcctccttgggatataaaaggagaagggaactttcaaagaagggggcgatcacgatagcgcctgcttgtaactccacgaaacacttcacttccgacactagaggcccgagcctcgagctccccctcgaccaagctttgtattcccccttatacaaacattggtgcagggtacacaaatacccaatgcacataggtacatttg

SEQ ID NO: 72747 - DNA, 1122 bp, Zea Mays
gaatgagatagattaagtccacattattcaagattgagcaaagaagacaaccataaaaggatgccgatggccacaaaaattaatcgagtgcttggcgtgaaaaaagggaagaagaaaagaaaaaatataagggttcaaggcaaaagtatatatagggatattctttgccgatcaagatgcaatagagtgcgtaatcgcatttaggatatatggtcgtactattcatgcataatagagttcaattagacaactcaaccatccaatgctactaggtgttggcatcatatgattgcatatagtcctaggtgacgcacttgagggttagtatataaaacatgtgacaaaccattgatttagttaaagttagagaataatatagaaaactcactaagaacatagtgatatagttggctagtggtataattatgaaaatcctttaggaccaaagaaaactaagcatttcatatgtaagcctcacaagctaaaatggtatggccgacatttagcttgtttcaaactaggccaatataggcctacacccatccatgattaattgattagttgcgaacacaaagttgacttgtcccttgtgattcaggttgatgatgagtgattatcaacatgggtagtgctttggtgtgggtcttgaactaactagagtataagagcttatgttgagcaaccatgtctgtaggcttgtggtatggagcataggaacggtggtcgacgacaaaggtgaaggtcatgtgggttcgtgccgatggaccgggagcagccaagaatgagtattgagacttgactgaggggctagacaagcaaggtgactagctgtggtggctgacacctgggacacacactagcgctaggacgtggcagagtgtatcgtgtcaccgatgcggtcatggaccggttggacacgtatctggggcatggggggacacgtatgaggtacgctactcacgacagtttggtggttgagcctcaaaactaccaagcactaaagatggagggtgttgccgagtttgggcataaaaaatcgatggtttagttccgtcgagaaatggaggcagcatgtggtgtcatcacgaagggtgcgtcaaggcaaagcaacttcgtgatgag

SEQ ID NO: 72748 - DNA, 988 bp, Zea Mays
gcatttcggatttcatttggccggccaagacttttggcttatccgcacaaggggtagctatcacccctcgcatttcgtcatccatcaaccacttccttgtatcggtcaaacgtaagcacttttggttcgttggagaacaagaggggtttgttagggttttgttgtctatacgagcggcaacccaaaaaaaaatgtagtcgggactgcagtgaatacggacagtttcgtccatacgcgtacaagtggccaaaattcgtttctgctttcccgccttcctccaagtcaatgacccgctgaatcatctgactctcctttatgcccctgccccgtgctcacgatgaacctcaggtcagtcaggtgcccgttcactatctccctctgtcattacacgattccgttccagccatgaatttcaggtaccgtttttcccggcaacgtcacacacacgcaccaggctcctatatgaagactgtaaaagcgcagtaggctacgcaaaagaacaggcataaaacggtgacggacagagtttcttttgagttcaacgtatggtgcccactgcccagctcccccaccatctgaaggctgaagcgaaaggcgggctctcatggtgtctgctcgccggtggatggagccaacaggctagtggcctagaggcacactgcataattgcggcgtcccagtcccaggcaacaaaagaaccagaattatgctaggggctgcactaaacaagacctaaagcgaccacatacaggcgatatgggcgaacacatgtcccggcggggaggattagccgggcaaagacaaggagcgtgtcccctgtcgcggatccgtggatgtgctttctaaccaaactccttagattccggcccaggtgagaggcatgagtgctgtaggttggtggcggtttgctcactttcatcagagagccggcttcttttggcggtgccaaaggcgtggccttcgcttaatgcttgtcatcatgcgctac

SEQ ID NO: 72749 - DNA, 371 bp, Zea Mays
gtgaggcagactttgtgagacgtggtttcgtattccgacccttcggggcgatcaagggtcgaccgagatgggacaacccaccctacctctgaccttttggggttcaggtatcggtcgaggtagagccatgaggtgggactgttatgggggttggggtcggagggttgggttcggataagacatgttattcttgttgggtttagacatgattccttcatttgctaactcgtcgcttcctattaatcttggtccatgtcatacatgtgttattcacctccgacattagccatcgagccactagaggagaccagtgctccttcagaggtttcttttagcgatgacgcgtttagcccttattgagaacacacgag

SEQ ID NO: 72750 - DNA, 459 bp, Zea Mays
agacccctgtctgttcgaataactcgtaaagactcctccctactgtatctctctctcactgcatttccagtaagaccactcccctttctattctttacaacacgtgatccccgacggtggacggtgaaaggccgactccggcaagcttgtactggtcggaataggaaacggccagccctttcctctgcttgacacccaattcaacccctgacgaccatttcccctcacttaattgcaagactctaacgcctaatcactctgtccacggtgaccgcacaatctggggacaattcaaagtgttccagtcgatctactctggttcagtgcaaatggttgggccgatgagcttcaagagcacacaggaatgctagaacaagagcgaggagaacatgatcggacctgtggagcgctgaccgcgacgagctcacacacgcggtgttctggaccgatttggaggaa

SEQ ID NO: 72751 - DNA, 886 bp, Zea Mays
tgaggattgattgggtgtctgtatctcatatagctgagtctgacttgattcctttgtttgggtatccatgtgtttcgaggcttttgcttgtggttgaggtgaactaatcatgtatccaaacatttttctattccttttgttgttcttcattccattcatcgaatatctctgtgactcatttttctcgttcatagttgttaaggtaggaatattggcgttgacatcatttacttcatttccattgggattcatcatctagtcagagggtaaaagagttagtgagacaggctgcataagaggcttgtatgacattaagataaagagcaacattttgatttccaatataaaattagttaaggaacaaggatggtttcagatttccgcatagcttcatcatactacaagagcgtacaagtgttataatccttaacatagatccttttgaaccttatagaattcagagcatgatatccaaatcatctttctgatccaacagtatttctttgagcacaaattgagagaacgacttgagcaggattttagggcaactagagtagagcatcacattgtttgcatatagtagatgacaccatactttattttctttataaagagacaaaacacaataggtgcgaaagatcctccaaatttattcatatatcacttagcacaattacaatttctcaaaggggcaacaacttgacatttttttccgtgagacatactccttctcctagctaaacgatatattaatcttccttgatagatgcaccaatctgagctggaggtcggttgtcttcaaccactattgtttctccagatggagtttccaagcacatggttttctcagtatgttggattactgctttagttctttgtaaccaat

SEQ ID NO: 72752 - DNA, 491 bp, Zea Mays
tttgaatcgttcatggatgtgttcgacggagtctggactcaagaagaaaccagctggtgagggagtagactggatctgccgccgtgattactcgctcacacgacttcacagtggctggtgttggttgggagtggtccttcggggaacgggagtttttctgggaagcctcgggcaccggaggaagccttgaccgtcgctaattcctcactgacgactcgcgccgactgggggaccgcacattgccgtagccacgaaaattcacgccattgcttgaggtacggtgttctcctctgatctcgtccttctctccgcttccgggagcaccctaaggatagttttttgtgcgcggtactcgggttctagtgtggacagccatggcgtgccgtggggggggagtcccgcgccgccgggctcggccgcttgggaaacaagatgacgctgtcgcagcaggatcggttttgaagggctaggattagttgggaacataccca

SEQ ID NO: 72753 - DNA, 691 bp, Zea Mays
caatctttggaaaataatagatctcacaatttatcttgttctcgaagtaagaactaagcctgatgcaagtcaccgacttttcaatccaatagggtgatcatttaatagagatttaatgcataaaggcccttttagatcgcatctttctcggccatgaccatctaatcaatggatcaaaaggtatagaatggagcccccccagcttgaatagacaaagagactatatatgtaccatgggttcatagtcgtaccattccacatttgaacatggtagcatattgaccatgggtaggcgagtggaaagtatcctatcatcactggagatggatgaataggcgatggttgttgcgccacctttagggccattttgttttaccgggtgaccgatgtttctttgttggccgatcgtgtagaacgaccttcttgctagcatatttggagagcaattgatcaaaagtagggccagctttgaccagtcggccatgtgtattacatgtgctttgcccttgcatccccttcctcgctttgtgtggaggccgacgactctggccatgggcagactatccggctgagtctgtcagaccattgtttgagcgaaggaccatccgcgcgcaagtgtcggaccgtccacgatgcccgagtcagagatcttcgctcgactgctcaattgagcctcccccacgacgtctcc

SEQ ID NO: 72754 - DNA, 700 bp, Zea Mays
cacttgcttaggaccttgaattccaagtttgagatactttgctcaaactatcccacatgtgatagtaggtttaacaggtgtaaccctgggtggacaccctgagtaacacctaaggtgttacaaattgcacttacagagtgagaatgaaaacttgaatcaagaacacaagaactcgcaactctcaattgtgcaagccgttatgtctcccaaacacaaattgaccaaatgtggcgcgagattggctttggttggttggagaagttgcacttaatgtgtagtaggttggagtgagtcttatgtcttcaatgtgctggttgggaggtatttatagcccccaactaccaaaagagtcgttggagtaaatggacaaaaaagttgtctaagtagtggtgcatcggaccctaaactgtgcccggtctagtgcgccattagaccttgaatagtgttgttgcatgttaccattctgatcagtcagccaaccgttggtgcttgttagacggtccggtgctacaccggattagtcgggtgccccagcttcaacaatgctgatttacatgctctctgtgaactcggtttgacgaggctctagattgggtccttgcacaccggacaggtgcaatgtgccagctccgaattagccaagtctggtccttctgcttggaaggtctagtatgccatcggaccggttcggtgcctatgg

SEQ ID NO: 72755 - DNA, 506 bp, Zea Mays
ccgagataggttttatggatttgtgttcgacaaatatttaaggggagacgcaggcagtgttgggcttcgaactattgcttcctagtcctcaccaagggtgtacaattgatgcgctaacacatctccaacaatctatcctacaatagtgccttaaaatttaaaatattaacacattcaaaaggattagggctcgtaaaacaatttgttctccaacgataagcctttagttaaggtaattaactgaaagtgagatccgtttcctgctggcatgtctgacacggggcgtgttgggctttgaactattgcttcctcgtcctcagcaagggtgtacatttgacgcgttaacgcatctccaacaatctatcctacaatagtgccttaaaatttaaaatattaacacattcaaaatgtttatggcttgtaaaacaatttgttctccaacgataagcctttagttaaggtaattaaccgaaagtgagctctgtttcctgccggcatgcctgacg

SEQ ID NO: 72756 - DNA, 407 bp, Zea Mays
ccgagggggtatcagcatcaattggagccccacaatttctaatctacgcacccacattcgtcttctacctcacgatggccaggggcgctggagcagaggccgaggcggcgctcccggccggatttcccctcccccgcacccgaatgcacgaactcgaccccacgggtgctacaagtctagcggactacggcgaactcataggggaactcttaccttgactggcgcgtccagaagctttgaccatggcccgcgacggcacgaatgactccggtgatggttctgatgggggagggagtttacaacggtttgcttttatagcccggaggcactggtgaggtggccagatcggcccaagaatctcgtggtagccattcaaagtcggtctcggtgtttgttttggttcggac

SEQ ID NO: 72757 - DNA, 475 bp, Zea Mays
cctaagtcaggtatgagtgagcatgtcgcaccgacttaaggcgtttctgacttaagctgattgctccgttagcagggtgtagtaatcatcctaagtcaggtatgcgtgagcatgtcgcaccgacttaaggcgtttccaacttaagtcgattgctccgttagcagggtatagtaatcaccctaagtcaggtatgcgtgagcatgtcgcaccgacttaaggcgtttccgacttaagccgattgctccgttagtagggtatagtaatcaccctaagtcaggtatgcgtgagcatgtcgcaccgacttaaggcgtttccgatttaagctgattgctccgttagcagagtatagtaatcaccctaagtcaggtatgcaagttgtgtcgacttaaggcgtttccgacttaatccgatcgctatttgagggtttgtttgcaagtggacgaacacagaagctttattgataatgagatctctg

SEQ ID NO: 72758 - DNA, 641 bp, Zea Mays
tggatcgggacgttggtccttcagcacctactgctgaggaagtgcctgttcctgaatttactgatgctgaccccaatgggggtgctccacctgctgctgaccccaatgggtgtgttgtctgtgttgatgatgtaaacgatggggaggaagaagatgaggtccctttgactcggaagaacagtcggcagtacgtcgccagtggggaaagtagtggagttccttctcctgctctgtctgccctcattggtctacaagagttgtccctggcaaactttgatcagactcttgaagatatggttccagaagacctgttatcagagccagcggatgatggtgtgatggaggttcgtgctgatgtgctcgatgccgggttgggatcgtcccgggcagcatcccgcgcctcatcgaccttagagcgtggtcttgagggtcaggaaaccgacttggatcgtctcgctcccatggaagtaattgagggaccctcagccttagaggtggctactgtagagaacctggttctcaaggatggtgctgacacttgcccaacccccaggatgttgctggggatgactcgactcgggtgggagacgcaagccactgcccagcccccgaggatgttgcgggggatgactcggctcggg

SEQ ID NO: 72759 - DNA, 623 bp, Zea Mays
tgaatggacctgcagacgtctggccacggcgagctcactcacggcggcgcggagaactgaattgggggaaatgagaaattgaggggctctagtggatgatctgaggcaaggactggtgcgttggatgcgtaaatacctagcggaacacacaggggcagcaatttatagagttctacggtggtggcgtccaatttgaaggatttgtggtggctgccggaaagaggagaagtcactggcgcaagtgctattgtggcttttaccggggcagtggcttaggcgatgaacaagctacctagagcggtctattgcgatgtggtaaggcgtcgaggcacatagcctagccggataacggcgaactccgatgatgccagcgcgattaaccatggcgggacacgacggccggtccggccagagaccggattcaccccgcactagatattttcatcacgccccgacgttatctactcttaccgtggcacgaatctcccaggcgggcgcgaattgtggtggcggatcaccggcgtcgagtgcacggcaccggagatctttatggtcactgtaccatggcgatcatgttcagtcattctgacagcgcaatttgaggagctttgttctccattttc

SEQ ID NO: 72760 - DNA, 343 bp, Zea Mays
aaaaatgaggaccttaggagtaaaattttggatgaggctcacctctccaaattctccatgcatctgggaagcaaaaagatgtaccacgacctaaaacccctgtattggtggacaaggatgaagagggaaatagccaagtatgtgttcgagtgtgatacatgtcagagaataaaagcgagtcacctaaagtcggccggtgccttgcaactcctttcaataccttcatggaaatgggatgacaccagcatggacttcattgtgggtctacccaacacctctcaacaccatgattcaatatgggttattgtggaccagttgccgaaagtggctcattttcttccca

SEQ ID NO: 72761 - DNA, 332 bp, Zea Mays
aattcgaatacagacgggtaatattcgtaccatttacacccctatcactgggtgaccagccggtttgctagtcggagtgctcaaccaccgctaatgactccacacattaggatagggtaccatcgtggtagggcgaccgaccaagacaaggaggcacttcgataataggtagttccatagaggcgacaaccagttaatgcccagcggggacaacaaaataagacgacaggcatgactatcaatcgcatgtcggtggccgactcctcgtctcatcgccgcgggaagcggtgtcgttgtgtcggcgcgtcttgactctcgcgtcaaagtcaaac

SEQ ID NO: 72762 - DNA, 346 bp, Zea Mays
cgaagaagaagaggagaacatcaacgatgaagccaacaatgaacagcaggaccactacatggggttatagcatgtcactaaacattatacatcaatgttcgagacagggcacttccttaacctgctgcaggatgttctgcatgcattggaaacctacgtccgacccatgtatgaggccaggcgagtgtgcgagccttctcgggcttgctactacatcactcgcattcatgtcagggtaatggatgcaggtgataaagggttcaggactctatcagctcatgagtctctgacaccgctatccacctacgctgcttcggtcagcaatgctgctaggcgaactctgtgg

SEQ ID NO: 72763 - DNA, 393 bp, Zea Mays
ctagcatctgctccttctcctccagcgtccgctccttctcctccgcctcgagctcatgaccggtcagcagcttatcccgcctctcaagcatttcctccctgaaggcgaggcccttctcccgccaggcgagatccgccgcccgcttatctagggaggcatccttctccttgaggttctcttcggtcagggcaaggctgctggccctgtcatcaagcccctgctgcaccctccgcaagttctccacagtcgtggcctgctgatcccgctgctcctccagcatcttgttgtaggcattcaacttccctggagctccgagatgacctcctccctctggtccaagtgcacctccttcttggccagcctcttctccttccgggtcacctccagctccca

SEQ ID NO: 72764 - DNA, 748 bp, Zea Mays
catgagctctacttgcttttccccaatcatggaatagtataatattccgcccatcttgagaagaagtcactcctagctagctttatcttcaagtcaattatcttaattccagctagcttttataatagcaaaaaaaaaagggcatgctatcaatgcaaaatacactccatggtgaatctgattacgtggcatatataaattttggtattttccgtccaatttaattatcaaatttaaggtaatttattagtttatgttaaatctagaacatctttattttttgacatatgcatgccaaccatctccggtagaaatattccggccgggagggggttgtttccaaagagaggcgggcaatgagatgagagtgttagtctgaaggcagctacttttaatatgctttcggtattagcataatcccacaaaaagtctcgagtggaaagaagctagaaaggttcaagtacacttgtttagtgatgtcgatcctataatataatattaatattaaatggctgccctttttctcgctatctaaagcgataagaccagtacaggagatagctataggttgtggtgccaacctcaatgtagtgtcaaacacgaagatagcaccaaaaaaagatatgaacctgaaattatggagaaaagacaaacaaacaaaattgaggcaccagtccgccacacggagcatatcccatttccatcacgggggccgcgacgagggatgcccatcctcgtgagtgaagcg

SEQ ID NO: 72765 - DNA, 977 bp, Zea Mays
cttgtacgaagggctgcgtactattttaggaaagaatacacggaggcaaagtactgtcccaagtgtaaatcgtctaggtttatggaggtagactggtgatggacagaagaggcagctcgacattcccttgacaatcctacgacaccttccgttcataccgaggatccagcgtttatacatgaccgaggaatccgcgaaacagatgacatggcacaaaaatagaaaacaatacaatcctgacaagatggtgcacgcatccgatggtgaagcatggaaactctttgatgtcattcaccgtgagaaagctgaagaggctcgtaatgtacgtgttgcgctggccacacatgggttcaacccctatggaatgagcgctgccccatacacatgttggcccgtgtttgttatcccaatcaatcttccccccgctgtgtgctttcaaaggcagaatatattcgtgtcttgataattctcggacacccagggaataaaatgtgcgtgtacatggagcctttgattgatgaattggtacatgcttgggaggaaggggtatggacgtatgactgagctacgaagacaaactttagaatgcatgtttggtaccagtactccatgcatgacttaccggcgtatgggctattctgcgcctggtgtgttcacggtaagttcccatgcccagtttgcaagaaagcttttaggttcatttggttgaaaaagggtggcaaatattcgtccttcaataaacatcgacaatttctccctcccgcccatccattccgcctagacatcaagaactttacgaaaggtgtcgtagtgatagaccgcccacctgcaacaatgactggtgccgaaattcgtcaacagataaatgggctcgtggccaatacagaaggtggttttgtgggatatggtgagcagcatatgtggacacataagtcgggcttgactcagctcctctattatgacgacctgctccttcc

SEQ ID NO: 72766 - DNA, 372 bp, Zea Mays
attgaccgacggcccagatcgatcgcgcgtctggaccgcacgatttggatccaagggtagcgtcgcgtgcattctgtggtgagcgtgatctaatccggacgctcgattcatcatccgacgaccagtgttggctgataccccttcgccgatcgcttttgcataagagaccttgggttattagaaaaccaacccgcagtccgcactgtatagtgctctgagtcttagaaattctttcacgaaagcccctgcgctttacagaaaatgtggcccagtccagaggattagaaaatcagagaatttaatttagaaatagatttttaatattacattaattgcagaaacttgtaaaattcatagaatattcatatgaac

SEQ ID NO: 72767 - DNA, 320 bp, Zea Mays
caagtttgtaggccaattataggagaacaactttgtttaaggattcaagccatgttcttataagaaatgtggagaaaatctcaacccaagttggactgtcaggctagttctgtctgaacatcagactaacagattcatgccctcaacttcaagcttaaattccagcttgatccaatgggtttttgtggcatcatcatattacaaagttgcagatggtgtattgctctacacttgttttgcagagcctcggatgagttgccatatgaattcgagagaaaactgggattcaaactgggctgtcaggttcatttaactgaaac

SEQ ID NO: 72768 - DNA, 630 bp, Zea Mays
gagcagacgataaacacctggggtgttacagacgacgtaggatttagcgctcttttatgttgtgaattgctcgtcggtgcatccggccaccaccctggtcatgcgcctccgtgagccataggctctgctggaccatcgcatatgaaacctcaccgaatcgaatcacggtgttgcgggccacgtttagcagcttttaattcgagtttggcgcggtggtgtgacgtattggccgtacgtcggcgatgctccgcgcagggcgcaagcgcgccgccgctaggttggttgatgaacaccggtcgtcagatctagatctaacggcgtggtttagatctgcataccccttcggcttgggcaccgctcgaccgttgatctcttgtgctgcggttgggattagattggcgatagcgtttatgatgtgatggtgtggaccgttggatccaccttaggcggtcaggattagattgttggggtgttgttcggttatattggatccaggccatcggatctcgatctaagggtgggcactatgtataggttcggggaaggactcgatataacgtgccgaccgcttttgatcgggcggccgtgatcaaactgtacccattcagtcgtcacttttccacatgaacc

SEQ ID NO: 72769 - DNA, 1032 bp, Zea Mays
ctattatcgaatattaatttgggtcaagcaaatgttaatcgaacaactaccaacctgtatgtatatatactttcaagtacaataatcgtatgttgcaacggtatataaaattacagtctgtatcattttgaagaagcttagactcaggctaactaacctatcatataaaaagatacgctaacacacgcctcggggggaaataaaaggtacaatgattcattccgttggatatgtcggaacatgtacacgtactatggaaaaagagaagtactcgtgtatcatgtgggtggtacaacggaaaatatgcactgtttcctcaagcccgcatgtagagatcatttatttacatattaaaatgggtgtgcagaaaaacaaacggcaccagcaccacacgtggtcaaggattgacttccgcacacagtccccaccaccccaccctccaagtccaagcttccatccaatccgtgccgcacagtagcgcacgtgactgggagcgagcagacaagtcgccagtcggtagtggaagcagcagaactttgacgagaccaccggaaccccctccaaaaagaaaaaaacggaagagactattaaaagtaaacggttgtgtgaacagagaatgagaactcgtagtccctttccattgatctagtacatatttatacacagtgaaggggtgtctttgtaccccttcgtggattacagagagagagaaagagttacaacttttcactaacagacaccttttcactaactatctctatttcccggagtcctttgcttcatgcatcctggcgacgaacggttgtaccttttcctgaacgggtgtcttttcataaagatgagatcaccgttgaattaattcttaacactcccccttgatcgaatccatttttattgagatcaacttggaatatataaactaacaatctctaatctattatgtctattattatcttgtaaaaaccctgtgggaaaaatagatgatatgacatatgtcctatgttgatattacctcattaaaaactttatatg

SEQ ID NO: 72770 - DNA, 457 bp, Zea Mays
tagcctagtggatgcatcctaggtgtatcatacataatgaaatgtcaatgcatatgatgtcatgccaaagttttagttctcgtaacaccaggagtgttacacttgtcctacccaagacaaccatgatctaatctaaagttagttacttaacatgttagttaatcctagtgaaatagattagaccctacccttatagacttgttttaacctaaattagtgccctagaccaacttggccatggaaaacgacctaaccaacatgttcatgatgaccacctattccaacctaacatcaaaacagatattgacctacttaatgtagtctatactactcacagttatcttagccatatgtctctaactttgatggtaacaccaagcccccaagaaggaagagaaatcaacctagtcaaggaaggatatagaagtcaaagcagatctcgagatgaatcaagaac

SEQ ID NO: 72771 - DNA, 988 bp, Zea Mays
agccaaggaagtgggtgcctagcccctccccgactatattaaagggtgtcatctccgcaccaaaatcgtagtaggcctcgaagaacaatgcatgagcccgctccacaccaacccgcgtcgtggcatccaccctttgtcggtcggcattcatcattgttagttcagactctagtgcttggcgtgctcccgtgtagccggtgcctccatctgtgcctcagatttcgtgacctttagcttatcaagctggcgactaatgtcttcattttatttttcaagaagattagccattttagaaaggcaccgactcttcaactcaggggctgacttgtcccgcagcctctcatactctcaaccatcaacgctcaaccttagtctccagttctgccttctcggttcgcagcttcgaggtccttaagcttatgaaggcacccaatgccacttggccagcgaagacaccaacctacgaggaggaaaaataacaaggataaaaaacacatatgtagcgtagctgctcggtagcagcctttgcggccttgattgcgttagccatgagtctcgctgcgcccaccgccaccccattcgaagtcgccactgtaacacccctggtgttactataactaaaacttgagcatgacatcatagcattggcattgcatatgtttgacacacctagagtgcattcactaggcaaaaattttcaaacaagttgtattgtttaaagtgttttgcaaaaagaaccctggttaaaggacttaaccctaaatcgtggttaaaggggtaaaacttaacccaagataagaaaaccaaaagactttagggtaaaagtcataaaatgaccctaaggataagcttgaatcacttttatacccctgagataccagaaaccctaattggaaccctggaaaaccctaaatcaaaccctaggggcttatgtgcaaaattagcccacttttgggctaaagtgcaaaaaccaagccaaataggtttc

SEQ ID NO: 72772 - DNA, 303 bp, Zea Mays
catggatctcgcataacaaacaccgtagctgccttcgcttgcaggctcctctcgcggccatataagccgactcccctctgcagtctccctcgcgtccgggttccgtgaaccaccccgaggccagtagttgaaagctctgtctacatcaccgggcgagcgtatagaaaggtaggagcccgtcattggaggaacttcgatttgccatccttgatgcacctggggcgggccagggagatgcgcctagcatctgggagggttctcttgggattcgcttatgaagagctcgatcagtttctgaacggt

SEQ ID NO: 72773 - DNA, 469 bp, Zea Mays
ttgacgcgggggcggggacgagggagataaacggtcgaagatcaggcacatcatagtgctcgagaattcaattcgcaagatggggaataaggccaggggacatcatattcatttctctgaaagaaaaaaggactaacgggagaagagaaggacgcatcccaccaggcgtgcggcatgccctctcgtgtgctcggagcgtcaggtcagcccgcctcgtcggccatgctgtgatctgaaatgagtccggcggcgctttcgtcgcgatagtggatctttgctttccgcgaacggggccggcgataaagaggacgaagccccggtgagccatgggatgggaatataaagaattcgttggtggttggctgccaattcaaggcgagagcggcggggcgcgggtggaatcgaccgaaacgctgtcgtggccgtgcagtggaggatgacgcgcgctcgacggagacggcgaccgccc

SEQ ID NO: 72774 - DNA, 542 bp, Zea Mays
cagttggtcaaatctagcccgacctttgatcaattattgtctaaatatgtgaaaaagaaggtcggccctagtgatcggccaccaaagcggtctcgcttacctacctaggagcgacatcaggttaggccgattggatcacctcaccaatcagaaaggacgagaggtcataatgtccaactgagacctaacgtacatgcatggacacctccactcccatacacacctatgtcatatcatatacatacataccaccaccaccatatatcccgaatcagatgtggagtatgccaccatatcctttcgggacaccacaatactccgtttggggggcaccccagtcatctgtctttgccaggttgacgcctccagtacaagaccgattgagagcccctcaatctggtccacgagcacaggcccagcaggattgccgaaccactcggccccaaaggctgactaatccgacaggggggcatatagctacggcctccaacagtacgataaaaggggacgtcattgaaataggaacaacagatgtcatcgta

SEQ ID NO: 72775 - DNA, 440 bp, Zea Mays
gttttgggctgaagctaccataccatgtgcacaaagagagaaatttggtgtgcaaagtggagcacttagctgatgcactagatatcaataatgtcgttgtttcttctctctttgtgcttacgctgtcatcagaggtggtgcttgtttaacatgcattttcagtgtccttggctggctgctgctgcggctagctagcaggagaaaaatggacgaagaagcaagcaagcaaatcgtcgtccggcctatgtcaccaataatcattaggctatactctggccggtggcaggccagagtgtcgtcaagaacacacctccatcggtgccggtgaacttaaccaccgtcggtagctagcatgcactcgctcttttggttccgccagcagcaataatgcaacgacaagtacgttcgtttttcacgtgagatggatgggtcagtttaat

SEQ ID NO: 72776 - DNA, 340 bp, Zea Mays
gctggtccatgaggtcttttttccttatgtggccgcttcgctttcattctgttgtggtatcaagagatcagatggtggagaaccatactgtgaagtgcctctgcctcctaaacgtgtctggactctgaactgactacaactccttgtgacgacggacggaataattagtacttgaattgcacggcaataaacatgcttcgagcctgaattccggcagcaacacgggaggatctctttccctgcgtctcaatgccgcatcagtgcgtagcagatgagctcacactaaaatctgccgtcagatactaagatttgacccaatagtagtgcaagttgtaatgaa

SEQ ID NO: 72777 - DNA, 420 bp, Zea Mays
ctcgggtatcaggcccccgggcaagttctcaaggaaattctcactggagactccgactccggtgatgacaacaaccgccgcaagaagctatacgttatgtatggcggaagctgggagctcacctctcataggaacgtaaagtccctacgtctcgaggtcctttcggcgactccaggggtcccgaaggcagccccacatcagcggtggtggagcaccactatctccttcggggcatccgactgccccgaaaacatggcaggggctggtatactaccactcatcaccgcccctgtcatcgccaacatgaagctgcatcatgtgctgattgatggtggggctgggctcaacgtcatcagtcatgctacgttcaagcagctgcagatcccagggtcccgactggggccctcacgcccattctcc

SEQ ID NO: 72778 - DNA, 316 bp, Zea Mays
gacaatgtcaagctcggcgaccatttgttctatcgttgtgtactttactgaacgcgagcttctaactgggattacaggtgcaactcgctttctgaaccgtgttgttgcgtcgacattcaaaatgatccatatgcatgtcattagtgcgggatgatagcattcggttcccaacaagtcccaacatcatgccactgttgactgagacgacagtatttggttcgcagcaagtcccaatatcatggaactgtgtaattttgtcagtaggaactgctgttttgaaatctggaagctagaaagcctagaattctttagtaag

SEQ ID NO: 72779 - DNA, 600 bp, Zea Mays
tgatttcataggttaaacaaatactcaccacacgtaaggcttttgcccttattacaagagaattttccctcaagctagcctgaaagcattggaaattaactctagaacatatagattaaagtgacgcatctagaagcaaccacataccaaaagaagggcaagaattttatcaaaaaccctgcaaaatgagttcttctgatgtgtcaagcaaattttctttgttgaatctctagaaattgccaaaacctcgtagaatctccttggattttaatctagcaagatagtagataatttatcctgagagtgctggttttctttgttccaaatgcacagatagaaacttttcatgactaacagtgaagattattttgaaaatttgaagtatatgaattaaggcataggtagatgatcaatagttaagaagaccttacagcatattgagctaagaacaacacatcatattttatagcataatgggacaagaactgtgcaattatttgtaacagcgggtgcctatatctgctatctgctggtagataaagcctctcaactgctgcagttcaaaacctcatgaaacaacatgcatgagagttgtcttac

SEQ ID NO: 72780 - DNA, 341 bp, Zea Mays
aatcgatccaatgaatctatttagcagttcctttatattcttgccctaggagtagcagtaattagtattcctcatccccaatcttcacctctcctcaacttgacatcattcagaggcgtcttgggtggcctgctgatcccaagacaaccctagaatctttcctccctaatgaggtcccttccgagggacgagatccaggttttgcaggagatccacgaagccctctgtgcacctcgctaacggtttgtcgctcatatgtggacgttctgtgcgcccgtagagacaaccagagtccctttgcgaagtcacggacaatccgcgcttacatagagaggatccca

SEQ ID NO: 72781 - DNA, 602 bp, Zea Mays
aaaccctctagagcccactcactctccccctccctcattcacacgtccgcagagccattgccacagccccgtgtcgtgcgcatgctagggaggaaccgctaccgttcactatcgtcccatgcccgttcttccgccgacattgaggctccgccattctctttgccatggtgagcttcgccacgatgcccacaacacagaagacgccccaccctgcagcacagctcgccttctattaacctgtcgacccaaaacatgggtgcactccgtgctttcgctggcgggtgggcccgcaatactagtccccacattcggctctctcgtcatgtgccactgcatggtggacctggccaggtagtaattgtcctcctagattggactcaaatagatggtcgagaagcacgccggtggtctcctcgtgtggtgaccatccaaagccgagcacactacaacccgtagatctcgctaccgaccttctcggctcgatcccacccccaacgtgtataaaggtcaggccgtgaacccccataccgatagctgagagcgagaggagaagactaagaggaagagaaaattcgctgcctcggggaaactgggttgggtcg

SEQ ID NO: 72782 - DNA, 540 bp, Zea Mays
aacaaccctgtgattctattacatccagttgacaccaatgtattttggattcagcttccgtgctcgcgtacctcttcttagtttctggacagcttcagcttccggcttcccttcatctccaacagcttcatctcctgtcccttcctggtccggtccaccattagagttgttaacatattccccctggagatacagcttgtccccaagctggtgctgcagggaattgttgcttcagcactgcttcatcttcccacgtagctagagagacatcccaatccaaccatttaaccaacacatgggaaagtgctttgcctccacgccaaaccaacttggagtccaatatttgttcaggcacttgcaaaccaatcgacatatcgggtactaatgagctaacaggtgtattggaaccaacttgaggcttcaactgagaaacatggaataccggatgaataccacaacctggtggaagagccaactcataagctacaacattaaccttgcgagcaatggtaaatggaccaaagaacttaaaagccaatt

SEQ ID NO: 72783 - DNA, 538 bp, Zea Mays
cgaaaagggggacacacaccatatgtgggggagcatcacaaggggagggaacacatgaggagcaccatgcgatacataaggagaatcatcatatgaatatccatatgggtacgaaggaggacacaataaggaaaaggttgtgatggggagcgtcggtggaaggagcttcattggtaggaggagcatcgatcgtaggaggttcaacagtagtaagagcaacatcgacacttgatcaatatggatatggaggaggaggatacgataaggaaacataggttgcagagtcaggggacgagcagtaatgctctcttgtaaatgatggacgaggcaaaggccgtcgatgaagacctgtttccgcacccacacaggtattgggacattatggagattgctcgttgaacaaacctgagaacgtatcaaagttggatctccaccttagatccatatcaatatagagtgaaggctacacatgcagtagatggtttgtgagttcaagaggaagggatgtgaatgaacccgagcacccctctatttatag

SEQ ID NO: 72784 - DNA, 854 bp, Zea Mays
actggttgggatagaacgtccctatttccagtcatcagcgacttacgctaccgacaccatcgatgatcaaaactcgtaataggtgttacaagcgggtgggagagggaggagatgttcccaagtctctttattgggtggaagtggagcttataagctacatagtggagtcctagctaagtcttggcttggcggcaagctccgacctcttggtcctcgtcggtgctcctcctcctgtatgtcagttcgtccggtgttcatccttgtgggtgcgtgtctaagtgatctcaatttcttccatcccctttgcctgggggccaatccctcccttttataggcggggagaggggtcaaccagcgatggcttccttaggaaggagctgtaaagcagggataaaaccaaacattcttactcggggtaaagccacgcatactcgtgggcctagagccgcctgactgtctcgtatttagtgtggcagacggtatgtggccacgtgggtccgagacaccattatttaggctacatcgaccccctagccttcgtagcttgggcttggcgcggctcgtcgtgttgcgccctgctagtggtgtgcgcattcatacctagtctgataggtcatgagtgtgccgtagggcgaggggcgcgcggaccataaatgcgtcgtagtccgagggctcataggtcatgagtgctatgcggctcgagggattcgtaggtcatgagtgggaagcggaccgacgcaccgcgctgtggctcagtgtggttaatgtgaccggttatttacaattggtgagtctggggctgggcgtaggatttactcgagtggttcccctccgacacgtccaaccctcctgtc

SEQ ID NO: 72785 - DNA, 885 bp, Zea Mays
agtaaagttggatgaacttagagctcgattttgagaaagatcctatgactatttgatgatggacattataacaaagttaaagctggtttgttaggctacaactttgatgcagagagttggtcaggtcactatataaaatctgaaacaaatcgcgctatgaaatgctctgtcggaacaactgaagcatcctctgatggtacagtagcgaaaatatcccaggattcagtccccctcgccgccggtgatccgcgccggtcgccgtgattcgttcttggcacgccgtggatattcacgaggaggtaaaaagattgcgcgagggcgtggatttggtcgcgacagaggcttatcaccgcgcatgtagccattgcggcgtggccggaccgctggtgtcgccgtggaaactctggtgacctcggttgtgccacgccgtggcttgttactgtgcggtagtgaccgtggcgcacttaagagtacaatcgtggagccattgcaccggtgaacgccacgaattctttgcgccattgctcttccccctctccggccgccgcgcctctccttcaaattagctgccaccgctcaagggccctataaattgagcacaccctcggctccgctaggtattcaagcacccagcacacccactcgtgcctccaattgttcacttgagtccccgaatagctcatttcccccaaatctggtttccgccaccgtaaaaaggtcctcgccgtggctagctcgtttcaggtccgatcttgtcctctgctctcttgtttcagcactcttacataccactgatgcccctcgacccattcaattaagctagaccgtgctagatcgccgggaacacttctgttcatccatagttcgcactgtctccatggacag

SEQ ID NO: 72786 - DNA, 577 bp, Zea Mays
cccgccaatcgaccccaacagtcaattgccattcacgagtaaccatatgtctgtagtttgagaatttgatcttctgcgccttgtggatgtcggggttttacccccaaaagaactctattcttggcggatttgctacggagttactgtcccgacggaggacactcatgagtccgtcgtttatgttccctttcttatccgtggtctcgctcttcccgtttctcctttcttctgtggtctccttgatttttacaatctgaacttgacccacctgaatcccaattctgtcttgcaaatttccatttttattcatctgtgtgaggcctacctcgagattcttccccatttcggcctatggaagtatctgtatcattgttggcccgagatggctgggggatagcaccaacttgttggcggcgctagtccggaactgcgtcatggtaggaaatcatagtacctcgacatcccactgaaggatagcatcaaggggtggcgcttcgagtggttcatcatggagaatcactgcaagtcccttccccctcggtcggggaggcagccagatgtccgtactccaagctgg

SEQ ID NO: 72787 - DNA, 731 bp, Zea Mays
caaaagtctcccctattactgagaattttgtcaaaagcttcggcctcgccgtcgatccactgaataactccatcaggataaaattttgctccataaagaatgcgccaactttggcaaagctatttttcaatttattacaacattccatggcaacattgtagcattcctcttttgctagacgaagctcctcgacatttttctgaactcttagccatttagtatcagaaatttcgcgttttgtttgctcgacattaaaatttttagtcacttcatcgagtttcttctccaatccctgcactttggatctgtgcaaatccacttgaacagatagcgcatactctaagtcagcaatacgcttggcatctttctattgcttttcttcaaactccttcatcttctgctctgccttggaaagggtagacacctagcttcgttagatttcaacctctctaccaaggagagcagtattttatctttctcgagagcttcgtttctcagtgttataacttcgaacgaagattcccagttgctatctgattgctctcaacttttgcatccttttgagcctttaatgctttgctaagaatcagaccctgacaaacaaaaaacatacaaataataatgataagaattaccacaaaatagttcatcataacaaaaatcaccaaatgcgaagacaatatacaaaccttcaggttgttataggcgaggctgtctgcaagttggtcctt

SEQ ID NO: 72788 - DNA, 429 bp, Zea Mays
gtcgttgtttcgttaccatgacaagtaaatttgtaggttagaagagggttagtgggccactgtctcgatgcctttgctctcgtgagtctgaggaagagagtttaggccccatttggtagaactccgcttctagattatgtggagtgaatttgcagagctctgccaaaaaacagttttctgagaattgctcctagagcgaaatctgttaagtgattcttcaaaataaactaggagctaggagctcaaaaagttgtttctctcgattcactcccgccatatagtcaactttccatagagtccatcatatggtgttatttgagaattattttcagccacagaatcactactaatagagaatagaaatcggtgggagctctaccaaacaggcccttagattggttcgcatagaacttctatgtctagtatggc

SEQ ID NO: 72789 - DNA, 799 bp, Zea Mays
caaaatcttgagagggtagggtttaaagcgtaaaactaaggacttggatgcaaggatactttcacctatgtggacggcgggttgaatacggaaaagagcagaggctctttatgaagatcacccgccgaagaggtatcggccaatcctagccgtccgatcatcatcagaccgcatagatcatatcagccacacgcccaaaccggtacgtgttgacgaccgcacgatcccggatctacgggtaagattttaagtgggcaagattaaccaaggatcgctcaatccaaacccacgacccagatctgctcgcgcgaaggggtatgcgatgacataatttcgtccctccattgctgatccgacggtcgtgaagccttctagccgaacggtatgcccgacccgatccaagccattagcggctggatcaatggttatcgcagcgtcatccaccccgacgatgcccaggcaccgccgcccactggacacggcggtgaagtccggtgagcacgctcggaagtgccccccatagcacacccccgaatgttaactggcccaatacaaagaggagaagcgggtgaactcgataggaatttacctaccggtgctaagggcatgagaggtgtcgctccacggcaaagggcggatccgcggcaacccgcgacttcggcgagaaattcccagtgcaacgcatgctaatcgagtccggcgaggccacgagcaccatcctggtgacgagttgaagctcctagacccgatgtcgggaccccgaagctagtgtacgtacgtgtcccccgtggcggcttcc

SEQ ID NO: 72790 - DNA, 484 bp, Zea Mays
cgcagaggaagatgcatgtacttcgtgtcatgcagttgctgccggtaggtgtggctgagataccacagagtctgcctagcagcatcgctgaccgaagcagcgtaggttggatagcggtgtcagggactcatgagttgatagagtcctgaaccccctatcccctacatccatcaccctgacgtgaatgcgagtcatgtagtagcatgctcggggaggctcgcacactcgccttgtctcatacaaggataggacgtaggttcccaatgcatgcggcacatcttgcagcaggttggggaagtgccctgtctcgaacattgatgcataatgtgtggtgacaggcctaaaccccatgaagtagtcctgctgaacaccgttggcttcttcgttgacattctccttgtcatcctcgtcgtcgtcatcttcatcatcgtcccagagtcgtccaggctgatgatctagctgcgaaggccagtgactctaccaa

SEQ ID NO: 72791 - DNA, 435 bp, Zea Mays
cttcgggctccctaggatagatcaagtagttgactcgactgctggctgctctatgctctccttcctagactactactccgggtatcatcagatcagcttggcaaaagaagacgaggagaagactgccttcatcacaccatttggagctttctgctatacctccatgtcgttcggccttaagaacgttggagcgacttaccagagagccatccaaatatgcttagccgatcactggggcaagcgggtggaggcttacgtcaatgatgtggttatcaagacagaaaactcggaaaacttcatcgaggatttgcaactagtcttcaatagcctgaggcactaccggtggaagttgaacccaaaaaagtgtgtattcggagtaccagccgggaagctgcttggattcattgtcagtcatcgaggaatagagacaaatcc

SEQ ID NO: 72792 - DNA, 530 bp, Zea Mays
ggcttcgtataccctgattactgctacccgctgcgagggcaagagaaaaagaggaagattgttgcttcagtcaccccagctgagccgaagagcaaaaaggtgaaggttctgacccaccggtcgcgttatattgaaccggctgtagtacctgaatttggcatagggtcctcttcagctgccgaagcaaaacaaactgttccgatcatgcagagcgctaaagagctgactgtagtgccgaaggtgcctacagtcgagccaaccatatctaaagatgataaagccgaagagccacagtcggaagaaacaatgaaaatgccagaaattctgagcccttcaacagaggcaaaactgccgaaggcacaaaaagcttctgtcgtgactcccaagaggagaagaatggccaatgtgctggacactatgctggagactaccaaagctttgagccccgctccttcgaagaaaattgccaaagcgcaaactgaagccgtaactgggcaggttgaagtcgaaactgggcaagccgaagccac

SEQ ID NO: 72793 - DNA, 470 bp, Zea Mays
catagtcgtattgaagagcttgctcccctcattttcagcatggttctgaagagggctgctaaccggagaacagttttggaagcattaacaaacaagagatggattcaggatattcatgaagtggcttcctggcaagtgctgcaagaattcggtgtttgttgggaggccttggaaggggtgcagctgcagccaggaatgctagataaacatctctggcgcctctccgcctctgggcaatactctgttaaatcggcttatgaggcaatcatgcaaggttcaataacctttgagccttgggagcagatttggaacacctgggcgccaccaaaaggtgttttcttcatatggctagtggcccacaacagatgctggacagctgataggctccaaaggagaagcttgccccaccatgaggcctgtgtcctgtgtgaccaggttcctgaaactctagaccatctcctagtctcttg

SEQ ID NO: 72794 - DNA, 454 bp, Zea Mays
gtttctgttggctactggaagcctccgtcgccgccacatgagtggactgctgagggctttgatatggttgagctacgtgggggcagacctagtcgctgtttatgccctgggcctcttcagtcagtacgaggacaaatacatgtgcgggagggagtcgtttggtgacacattgccatttctttgggtgccctttctcatcgtgcacctgggcggccaagactcgatcagtgccttctctcttgaggacaacaacctgtggctgaggcacttgctaaacctcggaaccttagtgacagggaacgaggaacgatggcgcgttccgcgttcccggaatttcgtcccgaaacgaggaacgggaacgaacgggaacactccaagaaacgctcgcggaacgtcgtttatcgaagataggaacgcttaccttgaggaagtcgcgccgccgcgctgcgccgct

SEQ ID NO: 72795 - DNA, 507 bp, Zea Mays
cttctacacctatcgccggtaaggagtcatcaattacgttcgccatgccttacggtgtgtttatcgccgttcggtgtgacagattagtgcgtcttggtgcgggttggccgtggatcagtgaatcgccgccatggggcgcgggcggtgccgccgtctggggttgctggagaagaaagccctcgggaccgtcgatcgtggatgaacagctacgatcagagcgtagtgtaccggttcgtcattgcacatgggtcgtccaatcagtaataaaggcttaggattagatctcgttccataaaaccttggccattgatcacgatcgcgtaccgattcacttaaagagaagatctaatctgtgccaacgatttcggagacaacggctgatcttcgtcaataccctttcggtcatgtaacaattgcataagagagcccagattcctacataatcaacctgccatcctggttaggtcgaagagaagttaaactaagcccctgtattttgcagtctag

SEQ ID NO: 72796 - DNA, 337 bp, Zea Mays
ctgaggtgtccactttcaaataggttcctgattgggttctacagttgtatctatttatgtactccatgttttgttttgtgaggggatgcgataatcctgatattaatcatttgtgtgctgcgagaggcgattgaagttttgagctttgtgttctttatatgcagaactatgacgagattcaccattttgcgattcaagtacaccttcttagtctatgctggccaaagttaatgtacaccatttccatagaagtaagatcacgttcacctttttagaattatctattgcaagttatgtttgtttcggtcatttggagttgtacttgtcatcacccatt

SEQ ID NO: 72797 - DNA, 490 bp, Zea Mays
tatctgatttctgcagcaaagacagacaaaaacacgatctcagttgggcttttagggaatatcttttcgatttgcatcttattcctggtatccaaattgaccaagtgagacctgcaaaattcgaaatccctaagccttgaaagagctctctaacttgagcagacaacaccaaaatactatatatgtcttcaggtaaatcaatttctaaaattgtcctaggtcaaacttttacagttttaacataatttataacaaaagaacacaaatctttgtagcacaaaatttgtatcgttacattcactaggaaatataagtttatagtgtaattggtgtcattgatatttccgtgttcaaccgtcttcgcccgcaggcttcgggaccgtgccattctgcttctaatggaagaactggtcttcctcggttcttggatcctattcgtactggggtggctattggtagcagactctataaccgttccaattttcaaaat

SEQ ID NO: 72798 - DNA, 1043 bp, Zea Mays
cgccagctaacttatctgtgatgcaagggctgatttcgaatacatgtatataccgacccatgatggctaactgatttacaatgcatcatggcattagatgtggcagttgctagctttgtgcagaagacgctaactagctatcaaaacccacgacgaatatgcatggactggataagcagcatgcaaatttatatttagacataagaatgacacgggcatagcatttggcataggatttggagttcctcctgtgcatctcacggcaggtgcccttgttgatttgaacacaggcgtggagtacagcgaggaatatttccggcatgttgatcttagctctcgttcttgggaacaagactcttccctatccggcttgtatgacaagtccggcgtggggccttgagacatctcacagcgacttcctcgagggagcgaagccacaaatgaggccttgatcatggaggtgatggtggacatagctcttgttcataagaacaatgctcttccctgtctggtttgcaaggcaaatccggcgtggggccttgatcatggagatgttgataaagatttgcttgctgccgagcgccgtggagccacgaagatgaagagaggaaggggatcaagagagcgccatgctgtttttttttctcaccttcacaggaactccgacgtgcaacgacggccttcaccacgaactcctcttctgggctgatgatggtgcggcagagagtcagggtgatggttatttttttttggagatgaactgcagcaggtcttgcggtgatttggaggcagcctcacggcagtatcgaatcgagtcccctggatgatcgttgtggcctgctatttatagcgcagggaggccagcagttcctgagcaattttggcgctctttgcatttgattttcttttgctaatgatgccggcgccggagtttgaatcgcggagcgcgttaatcgtgggagcgtgtgggagttgctttcttctgactcaatcagtcgatacagaagttgctattctttctccatggcatgtctggcgtacgt

SEQ ID NO: 72799 - DNA, 446 bp, Zea Mays
ttactgcatagtagcttggggttcattgttgtggaggagtgtatgcgaagtgtgagtgaagtgttgaggtagtgagtatttatagaagggatacgcttcggagagaagccatactcttgtcgtgcagccgaagctagtcgatggcttcttgaagaagtgtcgtggcttacggtggaagcatggcaatgtctaaacattttttcatacgatttaaatactgtgacacgttttttgaacaacaattacacaaatcataaaatggaatgttattttttgttacaattcgaaattatgaatgaaccattttttagattattatttgtaaaattattgaatacattatttttatcatccttacaatttgatgaaatgggtacaaatcaaagaaaacaaaaaaagaaatggaaaaaggaattctgttaacactgtagctttaggggatcgaa

SEQ ID NO: 72800 - DNA, 572 bp, Zea Mays
ttggacgcaaaattgaaaaaagtcttggtaggtggcagattccaggcagaatatgcaacaggagcaccaatattcgacactttgcctctaaggatcatctccagccggcttaccaaatccacagcaggattcctcttgttggtaacccgggttgagtcagtgacaccactatacaaataagccgggtacgctctgtccttcagtggctgaatgttcttaaaaacaaagtctgcaactacagcttccgcagtcagacctctctccttcaacaaaccaacttcggtaagcagaactctggcctcggctatctccaagtctgtgggggattcagtccaacttggagcacggacatccggctatctccctgaccgaggggggagggacttgccatgattctctacaataaaccactccaagcgccatcctttgatgttgtccttgagtgggatgtcaagacactctgtcttcctcccacagggcatctccaaattggcaccacccacgagctggtgctgccccccggccattccaggctgacaatgatataagtacttccacaagccaaaatgcgg

SEQ ID NO: 72801 - DNA, 622 bp, Zea Mays
gcccgacgttgctgagcctccaaccatgggcctcctccacttcttcacggcgcgtccaccctcccaggcactggtaaattctcctacggtggtccttccccgccccacgcagtcgattcgccctaccgacctcttgcctccctatgcggctcctcccaccggcgtccaccgccacgatccctccctcggctcgacaccgctattgtgcctagcccctcccatgccgccatcaggctagggttggtcagtgcccccacactgttagcgccgccgcaccaacatctcctacttccctatctatcggcaggtctccctcgacacttccctgcacatggctagtgtcatccacccttgtctatggacgctcatttgtgttgtgcgcgactacccccttgcgcgtcgcccccacactgtctctcttgcttgcttgcgcaacgagcgtgcaccccctgttggtccccctcatgctacctcagtggtccactatattgccctcgtaggcatgggcgtgaacacccatgcccttgcagccccaatgccctccctactgcactgatgaaccttcctagcctctcaacaccgccgccactcatggccgccccctcctcggcctccgacgaac

SEQ ID NO: 72802 - DNA, 389 bp, Zea Mays
aatactggtgaaatagattagaccctacccctataaacatgttttaacctaaattggttccgtagatcaactcggccatacacaactacttgacctacctgataggttgcctaattcatctattccaacctcatcaacctatctcaggtttcacaaacatctacctatctaaaccttccaaaccccagatggagacaccaatatccaagaaggaagatatcaacctcatcaagaaaggatagtcaaacagatccctagatgaatctagatccaccatccgagatggagtcctcccttgctacaatctttcttaccccaacctatcctcactataaccaccgctcaccttgactattaaacaacttgacataaaagatgcttatgccttc

SEQ ID NO: 72803 - DNA, 970 bp, Zea Mays
cggacctgaatcgagctggccacggcgaggcttctttcacggtggcggaaagtaggtttgggggaaatgagaaattagtgagctctggtgatcaattgagggcacgacttggtggctggatgcatgactaccttacggacctgacggtgtgctcaatttataggacttgggggcggtggctcaagaattggagttggcgcggtggcggtcggagagtgaagagagcactgtcgcgagagcttggtggcatcaaccgtggcggcctcaccggtgatgaaccagtagcagagagtggcttacggtgactcactgtgacatggtaaaacattgaggcacatagcctggccggataacggcgaacgccgatgatgccaacacgacaaaccatggcgggacacgacggcggtgagaacagtggccggagtttatcgatggcacgatatttcttactaaggaacgttatccgcgtttgaccgagcgtgaatcatgacaccggcgtgcatctaggcgcaaaggttgccggcggcaagatcactgagctggcgatctgatcagtgcactgtaccatcgtgcaactcatttagttagcctgacagaccaagtttggcatcgatttgctccagatttcatgtaatgactgaatcaactctctgtatcaaagttatagcctaataaaccagctataactttgctacattgtgcacccacaaaaagtcacaggatcttgcttaaaattaagccctaagttcatgcaattctactgtcagtctgaatttagactcaaagcagtctgacagctcgactttgggcacatttttctccaaatttttcatgtgaccatgatttaatctctatagcaaagttgttatccttacatagctttacaaacttgatgtgttgacctagggcaaaatcttcataatttggaagatataggtctttaaagttgagccaattgactgattttcag

SEQ ID NO: 72804 - DNA, 805 bp, Zea Mays
ctcatgagaaagattaagatcgatgaactcatgcactattgaattccggtggtctagaataacacgttgcaacatctcaatatcactctttgtgagttcaccaactggacggtcatcatttgaatcaacgaccataacaaaggcataagacgcctcttaattcctaaattcaggactattggaggcaataaatccatctccgaatcaaccatgtgccacggtcgtagaatgaaccacaagagcaggggtctctcctgcaacatgcaccgatgtacaagaataaattcatggcaatgaaatgagcaaagtgctcatgctccaaaatgaacatgtgatcccaatgaaacttactgcaagtggtctgttccaaagggatacccacaggagaagttgtctgcaggtcatgagtcccacaatcatctcctggctgacttaatgggatcaaattggggccagattgagcatcagacacacttggcacgtcatgcataacacgatcatagtctttaggggtacggtctactacaacccaccgcaccacaacctccataacttgcaagtgggtcttcatagccgaaataacataattctcccactacagttgagaatcaattgggatgacatgtcttatgacgttagtggatgaccaatgttaagcactccatcaaccacgatgtcgtcatcttcatggtaacctagcttttgtttagcctttgtaaacaactcactcaagaagggtctaccaacgaataccacgggcacgtgtcgcatgtcaatgaacttagcacttccatacggatcttct

SEQ ID NO: 72805 - DNA, 1172 bp, Zea Mays
aaagaaccctgtgcactattcacttgtgtctctgacatttactcagaggcccctgcacttctatttcttcgcaccgccaggtccacgacggtggacggcgacgagcatacctccgtcgagcctgtaccaaccaagatacgcaatgaccagcgctctagcttggctgacacctaattccacccccggcgaccttaatccctcaactaattgcactaatctgggtcggaatctctctgtccacgacgacggcgaaaaccgagaacaatccgatgtgttcttggtgatccagggcagtctagttcaattaaatgggtctacgagaagcaggggactcaaggaaggctagaacatcaagcaaagaagcttgaactgacctgtagagggctggccatggcgaggtgttcacggtggcgcggaaactcgatttgggggaagtttggaatttgcgagctacagtggctaatcgaaggcgagggctggtgcactggacgcgtaacaacctaatggagctcactgtggcattgatttatagggtccatcagcggtggcgcccaatttgaagaaattgcgctggcgaacgagaagaggggatgagtcattgcggcgatctaccatggcgttcactagacaaaggagtacgactattactggttagcctccatggctcaaagcgacgtggtaaaacggcccaaggcgtggcgcgaccaaatgaacgacggcagccacggcgatgaccgtgcgaccacgtcgctgggcaagtgggcacgacaacagggcgaaacagtgccccaagttcatctcctgtgcgatatttcttaccctgtgtagttatctgcaccccaccgagcacgaatcgtagcgccagcgaggatcgtggcgcgggatcaccggcggcaggatacactgcacctgatcatattcagtcattgtaccatcgaaatcgttcatcagagcgcctgatagagcaactttagagatgtttttcataaatttttatgtggcaactccctaatccgtctttaacaaagttaatctccaatacactagctccaattctaccataggaacttgggtcatttactcactcgattaggcttaaatcaacttcaaagtttctcggaaatcactgttagtccagattcggtctcaggactgactaacagccatacttt

SEQ ID NO: 72806 - DNA, 603 bp, Zea Mays
gtttgcttatcatttgttttgatgcttgtcatgatgaacttgtaatgaatttggatctttgtaatgattgtcaccaaggtgtgggcatcccttgcaacttggtgtagttattaataaagtcagttgtttagttgggcaacctatttattccaactttcctctttatctgaaaatttgtgttggctgtgttgagagtaagtgaagatgatcaattgttcaatgctatgaagatttccatatatcttttgttatgctaaaagactatggaatcagatctgatgtgtgtgtgctttctacagatgtttgagaacaggcgcagaggtggaaggcatgctcagcaggagcaacaggcaccctaagaggaggcagcccagcagcagttgccatcgccaccccagatgaccattgagcagatgttcctaatgcaaacccaagcaatccaagcaattggtcagactttagcagcaatgcagcaggtgtagcagcatcaacccccaccttaacctcaagtgcaagtccaaatgctataggtgcccagagataagtggacagagttcatgaggggccacccccatgtctttgcccattctactgaccccatgg

SEQ ID NO: 72807 - DNA, 525 bp, Zea Mays
cccggattcgcgtcggtcgccgtgattcgtgcctggcacgcagtgatatccatggggaggtaaaagatctcacgaaggagcagatgtggtcgcaggggaggcttatcaccgcgcatgtagccgttgcaacgtggccggaccgccgggttgccgtggaaactccggtgacctcggttgtgccacgccatggcttgttagtgtgcggtagtaaccgtggcacacttaagagtacaacctttgagccattgcaccggtgaacgccacgaatcctttgcgccagtattcttccccctctccggccgccgcgcgtcttctccaaattagccaccaccactcatgaatcctataaattgagcgtgccatcagctccgctaagtaattgtgcatccagtgaaccagctctcacctccaatcatcccctacagctccccaatttgagacttcccccaaatcggtccagaacatcgaactgtgtgagctcgccgtggccagcgcgctacaggtccgttcatgccctctgttccc

SEQ ID NO: 72808 - DNA, 396 bp, Zea Mays
aatttacaagccaacaaccgatgacgacaggccgcgtgggctgtgttatttggtgcggcccacgtagcatgcccagcacgtcgcaagctctcgggccaacctggcgttcgggtccccactccctctatctctgattctctgcccagctttctcctcccttcctctatcgcttcgcccaccccacccaaccgccccgtgacgcctgcccacaccctacaccaccgaccaccgtctgcgcttcgcccccaccccgcggccgaccatcgccatgcgcatccaccactacgtcgcgtgcctcctctcctccaccaccgttgccccctcctcgccgtcgcgacttcccattgcgtcctggctccacactgatgatgacgatgcaaactgcgccttctgcaa

SEQ ID NO: 72809 - DNA, 366 bp, Zea Mays
caccaactccgcgcagaccaccggccgttttcaaccagccgacaatggcgcaatgcggatagagaatagactacgaggcccacccgtcggcgagccgaactcagaatacgtgcgcgcgattcctacggaggagaagttccgaccggccgggcccacgcgtcatcgacactgcgacgcgctctgcgtacattgggaaatttttcaaccccataaaaccaagaagtactgcggttataggtcatggaattaccactagacgcgcagagcagcggaagacgtctcgatgtagacgaacgcgtcgagcagtgccgtgtagtcgtcggcgtccttcacgtcctcgcacggttcgtcctagtgctccagatg

SEQ ID NO: 72810 - DNA, 287 bp, Zea Mays
caacggtcttgccaaaataaggttgaagatccattcccaatttcagtgagcatggcagtgtaaaagaaggccttcattttgttagaaaactgcataggcagtgaggaccaaggtttatccggatctgttttgctcagccacaactatctcattcttaaggcccatcccaattctttgagactagaaataccaagtccgccgatttcaagaggtctacaaactctgccccaagccactaaacaatgtcctcctctgacatctttccttccacgccagagaaatccttt

SEQ ID NO: 72811 - DNA, 777 bp, Zea Mays
accactatcacctctagagggtgacatacgcctttagccccggcatgaagcaggagtgcctatgggtcgagcgaaccactatcacctctgttgggtgacaactaaccgaacccgatgccggtcctatggccgggtgaatcgcatcccgcctgagaggtcggtcgaatcggacacgagcggatgaacaaactcatcgatttgctagcccatcccagaagtgagaatcaccgccagaggcggcactatactaccaactctggcatgggacctccacttgaactagtgacagacactggtctgaaccaccgcgctcccacgagctccatgctacccctttgatcaagatgagtcaacaaggtcatggctataagggaatggacgaggaggaggaatgacgtcaacggagcgagcatgatcatcctttcaatacatttcatctattcttcgtcttcacgtttataactgatccctctcttggcatataaaagaaggacaaccgacacactctcgatcttggactctcactctctcactcgaattcaatccgaccgatctaaggagaatagactcgatccaacccgacataatcaggacataacaccatgcatgaaacacacgctcatgaagcaaacacaaccctcgaaccaaagacttgggagctcctgcatctctcgctcagcttgtacccctactacaaataatcatgtaccggtagcgaaaaccagtgaatactggagtagggatattccaacagaaccggtataaattctcgtccaa

SEQ ID NO: 72812 - DNA, 656 bp, Zea Mays
tgtttttatattaaaaatctctttctaaatttatttatttaattttcatgagctctggaccgggcgccaaataatacaaaactcggggtccaatctgtaacaattccctagactcatgctaaaccatggaaggactgcgggttgatactgaggaaacagaggggctcttttgtaaagctgtcggccgaaagggtatcgcagaacacgggccgttagatctaaacagacggtccagatcataacgtgaatcggtacttgccgtgagcgtaggattccaatccaacggttcgcagtgtcgcctcccttacgaccgcatacacgttgatcaccggtcgagatcgatttgaccgaatcggtacacgcaactaaactcaagccgtcgatttctcatcccatggccgcaagtcgaaccgatcgacccaacgccccccttctaatctcagccaaccaagaaggatcggacggcccacgagtcctctccttcccctagcctgctaacccagggcggtgccaccgattctccgcggcggcgcaacataccgacgaccagcgccccagcagatgccccgatccgtgaccaacgagtgctacgcaatgagaaggacaaggcgacatggcaacgacgacgtaccggcgataaaagcggtggaaggaca

SEQ ID NO: 72813 - DNA, 448 bp, Zea Mays
gcgcgagctgaagacgagctcgaccggaaataggaacgccgtgcagagggagctctgcgagctgggatccggcgctggggggaaggagagatggaaggagcgggaagcaaggggagggcgcaggaaagagccacggcttggagaggagcgctcggcgtgaagataactatccaggagcagaccgacggccaggccttggttcatcacccgatcgctgttcaacaatgaagaagaaatatcccagagagagatgagaacggctggatatttcataggcttgagaggcagaagatagagagaaagaagctcatgcgcgccaaagaaaatcagccgacggcggccacacaaaaatcaaacagaggacggcggtgcgcaaggaaaaaatcacgctgcggctggaaaaatctgagctggggcggcgggatattctttcgagcagcgaagccag

SEQ ID NO: 72814 - DNA, 431 bp, Zea Mays
aagaataccacgaagcaacaacgggatgcaatatacagttcactgctagaaagaagccacaatggaaaattattcaagaactgtacccagttagtttctgttgcccataatgtgagtatcaggacagtgcagcgcatatgggatagttaacgtcgagaaagagtacgaagaatacaacccaagtaatctaagaagagtattcttgacacttcaagcatgcatgattgaggtgatgaaaaacaatggaggcagtcgatacaagctccgcacatgaacaagtctagattagaggctctaggcattctacctgataggctagatttagaacccgaattgtacgagcaggtgctaatgacattgagtacccaagaatagaagtatcaagtgaatgaaggagcatctttctgttgttcacccgtcgtcaccttgcc

SEQ ID NO: 72815 - DNA, 464 bp, Zea Mays
cacgaattcaagggattggtgcgcacgacacagatcgacggtatgggccaggggaggagacgagctcggcagggcaaagacgcaggggcgacgctatattcagttccccctaaaaaaatacagaactagttataatggtcaaattttcatcttatatgcaccttcatcatatgatgtttatatatccataaggcaattgcattgtcttcaactttgctctagcttcgccactgcaaagacgaggtggagggtggcgtcggtgagctagatacgagatggagagttgtggatcaaggtgccacacgatgcctgcagagctagatatggaggcacgagacggcaagggtgaagatggaggtcaatgcggtggacacgaagtggagggtgcctattgatggccaaacagacggcaatagcactagcattaatagacacaatattattagtcaaaactagtaatcgtg

SEQ ID NO: 72816 - DNA, 488 bp, Zea Mays
gcttttctagctacgaattgcttccacgaaacagatcttggtttctgacgaagactgctgtagtccttggtttttggcattggctatagtccttgctgttttttaggggagcagaaaaagttatttgttttgagcaaacatgtagccctttgtttaattctcttgaaacattctaacacttaattctctgggttgaatttttagcatcactttccactcttgctcctgctgccactgcaccattacatttgcacatagctggtctgcttactcactagcagtaagaatccatggacaacattgtatgccagcccggccttcaaggctacaatccccttgcttagcagcatccagatccagatcacccagtgtcattagctagactggcacttggaagcaggccagtgtcattagctggctcgcactggagggctctgtccttggctccttgatgccaaatatggtggacatgaggagatcaccaagtg

SEQ ID NO: 72817 - DNA, 303 bp, Zea Mays
ctagaaggtagcatgagaacgaactcttcccgcgtaacggggttacatttgtccaagtcctagtacggtaaggtcggccaccgtaaaccgagctcctggcaccaaccaaggcccagcctggttagagccacccttaagaacattgtctcaggtgaaacatgtaccccattgcgaaggaagagtctgtcctcttccatcgatttttttcttgcttacgcatgttattatttttacccctttcggggattcaagaaccgaataatagtgcatattattgcatctggtttgaaacatcatttgaca

SEQ ID NO: 72818 - DNA, 432 bp, Zea Mays
ctttcccgaagcatggcggatgatgtaatcaatgctctctttcaaagcttcgggagcaggagtgacaaccttttcaggtgaaatttgctctgtggccttttcctctgttgccttttcttcaatttccgtaggttttttctgagcagactctgaaggcccagcttcggtaccagcttgaattactgcagcttcaatttcggccagctttgtttcagcttcggtttgcgctttcgaagcttcgacaattttcctcgaaggagtagaggtcaaagtctttactgtttctaacacatctagtacattttccatccttctcttgggagttgcagcagaacttttttgtcccttcggtgctgctacttctgttgaaggacttaaaatccccggcatctttgttacttcttcagtttttgatttttcagtcttatcttt

SEQ ID NO: 72819 - DNA, 560 bp, Zea Mays
gaccacctgacatggagaaaacccgcttctgtagagagtaccgccaagcagtacacttagtgttttgtgaccaaatcagcgccaacacacttttggtgactccgctgggacaaaaatatcatatctatcagacccgatccattagattatatctattatgttagacctattagatcggccacaatggccgatcccaaagatcacaacaatattgccctagacaacaatacaaggttgactaactcattgaccactaaggatgagaaattagaagaccacatgaaaaggctagacgaggagttccaacgacaaagggctcatattagcaagatgacataaaagtggtacctcttgcacttcatggtagatgagagcacctagagggggggggggtgaataggtgatcttgtaaaattcaatactaaatagccacaagcttggttataaatgtgttagtgcaatagaaccaagtggctatagagcgagctcttgcgaatcacaataatcacagagaaagacaacacaagagacacagtggtttatctcgtggttcggccaag

SEQ ID NO: 72820 - DNA, 542 bp, Zea Mays
aaggttttagttccaaaccgcttcgattagcagtcagagaggctgtacgcgtcgtacctgcccagtttatataacaacgctctctgctctcgtcaacgacaagcatcacattagctgtattcatcaatacatgccgactagctagctagttgccctaaagaaacattctcaagccacccgtccagaaaccctatcaagaacaagaattcgagctataaataggagcggcaagcaaacagcgcctcaccaccactcagcttcttctcacttgagtttgtgatattattgtggctagagcaagcgcgatggcgagcaaggtgcctgctgcactgctctcatgtgctttcttgctcctactaggagccgcatgccaagcagcagctggtcactacagtcctccgagtcctgcttcgtgcgggctcaaggtggggtactacgaccacaagtgtccgcctgccgaggccatcgtcaagagcgtcgtcagagccgccgtccggcggaaccccggcatcggcgccggcctcatccgcatgctcttccac

SEQ ID NO: 72821 - DNA, 390 bp, Zea Mays
gtgacacatttagacacgaaccaaacagcccctaaattgcgagggcgggtttaggcaataacgcccaccgtggcaaccggcctaataaacaaccgctagtagatcgaggagcgtagctaattaggtatacattccttgtcatagtgataatgagttacgacatatatatagccggcccttgcttgtcgttgaccattaataacaatatgcaatagcaatggataatggaaggcaccaaacgaacaagcaatcaagcaagcaataaaggaaaagaagacaggcagtcgcagttcccatcccgtgcatgcatccatcgcacgccacacaaggagtacacaacagagtaccagaccacatcacatcgcgcggtaggtgtacctcctacctcgt

SEQ ID NO: 72822 - DNA, 284 bp, Zea Mays
gtttattctcgttggaatgttagcataaataatgctattaggtgttgtgcttgtatcggtagaatcagctctaggcccctgttccaccgcatgtattcacatacttgcctcatcttgtattgcaatttgcactgaacacttagaggtgtcttgctaactttattgaatacgcagttatttctctctttctacatttcccaaatggttagcgtgatcatagatcgcacaccctgtcttctgttccacagttccccatctcaatgaaccattgtcccaagtcttcc

SEQ ID NO: 72823 - DNA, 773 bp, Zea Mays
catttgcggagctgggatacgtgaaacacattgtggaagtcggacatggattccggtaattccagacggtatgttgtgggtcctacactgccaatgatgggatagggacctacaaaacgtggggctagcttcccttttacttggaacctcctgacaccacgcattggagagaccttgaggtagacgaagtctccttcctcaaatcggagttcccttcgcctgttgtctgcgtaactcttctgccgactttgagcttcaagtaaccttctgcggatcagtgcaactttctcttccgcctctttgacaaaggcaagtccttctagtgcttttcccccacgttggaccacatgagaggggtctggcatttctgtccatatagtgcttcgaatggcgacatcttgatgctggcctgatagctattgttgtatgagaactctgcgtagggtagactggattcccaacttctatcaaaggctaagacacatgctcttaacaaatcttcaaggactttgttgactctctctgtctgcccatctgtctgagggtgataagcggtactgaaatctagcttggtgcccatagctttctaaaggcttgtccagaatttggatgtgaactgggttcctctgtctgacactatcttccttgggatgccatggagtctgactatctccttgagatgaatccgggcaagggtggctcctccaaaggtagttttcactgggatgaaatgggcttccttggtgaggcgatctattattacccagatggtg

SEQ ID NO: 72824 - DNA, 897 bp, Zea Mays
gcagcacaaaatttgcgagaatattccagaggtgtagataatctacaatggcaccaactgtaagagctcctttgatgtctgcaatccatcgtctgttcaatagggcctgctgcacagttcttctgttaataattctttttggaataatgctgaataatcttggagcaatatcagatacccttttgccatggatccatttatctatccagaacatggtgttggtcccattccccacctcagagatcaacaccttggagaagaaggaacgggccatgctaggaacttgaatggacaggctagaccaagggcgtcttgggtcagttttttgcaaccaaagccatcgcatgcggagggcccagcagagctcaggaaggctagcaatacctagacctccaagctgcaacggacgacatacttttccccaagccaccaagcaatgccctcctttcacctcttttcttcctcgccagagaaaaccttttcgtattttatcaattgcttcaatggcccagtgagggagatcgattgccattgccatatagaccgtcatgctagtgaggacatgctgcactaaaattcttctccctgctctactcatcagatcggccttccagcttggtaggcggtctgcaattttgtccacaaactgctgagcctgattcctggataacttgtgtaaagacaaggggagacccagatatctgcaaggaaaggttgcaatctcacaaggcagccagctccggagttcctcaatagtctcctcggggcatttgatagggtacacatttgatttctgtggattatagcaaaggcctgacgcatcgccaaaaagctggaggatgtcaagagaagttgaaatatctgtagctgtagggtgtaagaacaacgccacatcat

SEQ ID NO: 72825 - DNA, 322 bp, Zea Mays
gtcatcccatttccatgaaggtatcgataggggttgcaaggcaccagttgattttaagtggcttgcctttatcctctgacaggtatcacattccaataaatattgggctatctcccttttcatcctggtccaccaatataggggcttcagatcatggtacatcatggtgcttcccgggtgcatggagaatttggagaggtgagcctcatccaagagtctcttcttgaggtctctatttttaggaaccaccaatctgtcttcaaaccacaatatccccttgctgtcttggcgaaaacacttgtacttctccactttctgattt

SEQ ID NO: 72826 - DNA, 475 bp, Zea Mays
tcttacgttgttagcttcaccggcattcaggatacccataacacaccttgacgttaactctaccatcctctacaacctagagtacggtgactcgatatccgccatgcttccttgtcattgtcgagcgcctatggtaccatgcagtctctctctacgccacaaggagcatcgctagaaggtgctaagtcttctccctctctcagttcactcagttacaccttaagtcacattaattgctcgttagagttctacatggccgccgcgagtacccttgccactgttcgtgccctcccaattgctccctcacctccaaccatgcgtagtgagtttactgtggcctgccatggattggtggccaatgttagtcccagttgagctctttgttgcccggtctagaccatgatggtgaactcccgctgcggagcgcatcgccattgtcgcattgccacccgaacactcgttcatttaatctcaa

SEQ ID NO: 72827 - DNA, 410 bp, Zea Mays
atcgaacagcttgggtcattcaagcggacggtccggcaacacgtaggagctgcgacgatcatgtaccttcaaacaacgatgaccagaaacaggtacgtgaaaaactaacacattcaagacagttggtcgactgatcaaatctagcccgacctttgaacaattattgtctaaatatgtgaaaaagaaggccaacctaagtgaccgaccaccaaagtgacctcgctcaccaactcaggagcgacagcaggtaagaccgattggaccacctcaccaaatgaaaagatcggtaggtcataatgtccaattaagacctaatgtgcctgcatggacacctccaccctcatactcacccgtgccatatcaatatgcatacattccaccaccctatgtcctcaaaataaaatgtgggg

SEQ ID NO: 72828 - DNA, 590 bp, Zea Mays
ctttagtcattagctgaagaaggaacagtttctgaagcattgtttagagtttcagagtaagcttcagttcatcggtcttcatcaacatcgccctaaaaaataaataagacaaaggtattgagaaatataataagaaaaaaaacctgaaaaaaacataaaagtaagaaaattgacataccttgtcaatcaacgctcaagcttcgtctctagcaatctctcagccgcccttagtacatatctaggtaataaatctgttacccacgcttctggcttcagctaggatattaaccaagtccgatgacgaaaggctgaaggttggtttgttaacagtttttacatgattgcacccaccacccaaccttggcgaaagcagcagttgtcccgcgggaagccaccaacgcacaaaaatcatcatgaccaactataacttcgtcaaggtcatcaatttccttctcaatccaatcaagcacttctgagatatcttcgacagaaaggttggcttcttcagacatagctccgatagaattgaagatactttttaatcgagcagtgcattgtgttgcaaagccaaagcatttatcccgaagagt

SEQ ID NO: 72829 - DNA, 658 bp, Zea Mays
cacataggggagaaagagtgaaaaggctgcggtcatgagtgtggggggagggagagagagttgggaccacttttagtccatagtgctaaagtactcggcaaagaagccgttgccgatgtacagttcgctgagagtgtcacactcggtgaagcatccgccgagtatttttcagactttgccgagtgcttcagacactcggccaagaagctgattccgatagtgacgtcacatggcactatgacactatggatgaaacaactatcccaatgtaaagtatcacttgttcattaggtcccacaaaataattaattgtttcatattgtgtgactatgaagcgtgggccatctgttgggttcagttttcaaatatttgatttcgtgcccaggttgtatctccgtgaagataaaatctctatctctttcttcgttaactctgtgccatgtcatcaaacagtcctatgtgacagtaattttatgcgcatgatacaatacaatggaacgagtcttagcctcctaaagatactcaaaagacccatcatttaattaggttgtatgtgccctaagacaaaagtaggtcttcctgctcccgctccctagaagcgggaaaattagttcaatgccatttcttaacttgaccatctagaaaatgccattcacta

SEQ ID NO: 72830 - DNA, 456 bp, Zea Mays
cgtgccaagtgtcttaggacatgcaacccatagtggtagctccatcagtacaagagtcacatcgagaagggatgaatatgggggaaaataaggcttccaaatactacaacaaatatgatacataatcttatggtcacaccttaaccctaacgtgctcctagggggcaagaacttgatgccactatacaggcgtggcctcatgtttaataccatatcttgtcagacaatcatgcctcttgctagggagtggtaagatcactatagccatgataggtagtatagttgtacttacatgtactaaaagtacaagaaaccgtactaagctcctattttggcgtgctagtgccatcaaggacattgtcctcactttgagttgggcccaaaaatccacctcaacaaatataattacactagggcatgctcgttgtgcattgtatgaccatgagatagaggacc

SEQ ID NO: 72831 - DNA, 672 bp, Zea Mays
agccaatgtgggaaatataaataccgtcaccaaacgctgatcctatttttattcttaatgttgaccaaaactgtatgcttttctgtttgaagaaacacaaatgtattttccttgaacaacacagaatgcaatcttgtacatattttttttttctgatctccctaccagccatgttgttttgtgtgtggcatttaaacgtataatatgcagaaaaagtttaaattcaccatggcaacatctcctaaccctgttaggtttaagtgtagtctgtaataagaattttattgcaaaatattaaactctacataattctatgtcactctatgcacctggcagtgttatgactccttactacagtgaagaaactgtatattcaaaaagtgatcttgatctggagaatgaagatggtgtatcaattatattctacctacaaaagatctttccaggttccatttttctttggtttcccttcaatctcaatgattcaattatttattattgtgttaccaattttcctccttttttatcctgattcctaatgtagatgaatggaacaatttcatggaaagaaataattgcaaaagggaaagtgaagtatggggaaacgatgaaaatgtactgcaacttcgtcattgggcttctcttagagggcagacactctgtagaacaggt

SEQ ID NO: 72832 - DNA, 464 bp, Zea Mays
ccagcatccaggcaatcgtcaccgacgttcttgcgccggactccactcagtacccccgatggcgtgatcaagtcctacagaccctccgtcgctacgccctcgccgaccacgtcctctccgcggtccctgacccatcagaggattggcttctgatggacgaggtggtgctttcctggatccatggcaccctcacgaccgaacttcaagacatcgtccgcgtgccgaacgatactgctcaccggatctggggtgccttgaggctcagttcctcggccaccgccagactcggatcctatacctcgagaccgccttccgttagcttgctcagggcgatctctctatggacgagtactaccgtcagatgaagacgatggcggacactctccgcaccctctggcccccaccactgatgagtgcctcgtgctcaacctcctccatggcttgagccctcgtttcgatcgtgt

SEQ ID NO: 72833 - DNA, 440 bp, Zea Mays
aggctctgaaggcccagcttcagcgctagcctagctcattgtagctttggcttcggtcagttttgtttcggttcccattgacacttttgaagccttggcaattttccctggagtagagcttgaagcatttatcgtctccagcacatctagtacactggccatcctttttctcttggggtcgccgcaagacctttttatgccttcggcattgtcacttctgccgaagggcttaaaacttctaatgtttttgttccctcgattcttggctcctcggctttatcagtcttcggctcagctaacttggatgagggtgccttcggtaaggtgaccggttcctcagctttctgtgtagaaggaattggttcctttggagtggcagctgaagaagttttcccgccaaactcgggcaccacggccggctcaatgtagcgcggtcggtg

SEQ ID NO: 72834 - DNA, 442 bp, Zea Mays
gctatgcaggtcagtagctcgggacccatgacatttgggatagccgtcgttagcacccaacatgctccggatacggccatcaccgacccgtcgcaggatgttgcttacccttctagtctgaaggatagtggtactccaacaaggcaaaaaaggtgtgaggccaatgacggctacaacgacatcaatcttgtcgcaacaaagacaactcgtcgcccgtgagagacccttacagagacattccacgtgctccaaaagggctcaacatcgacgttaagacccaacttgtctgccataagctccatggcatatggggtagcataatgggatgttgctcacccttcaagtcagatgcacaatgaagctcaggcagtttaggtcagcctagtacctcccacctataaggtagcatgagagcaaactcttcctttgtaataggatatca

SEQ ID NO: 72835 - DNA, 952 bp, Zea Mays
taagaatgaatcttaactcacttgcaatgtttaagctcccacactagtcgtgtggcctgttggggtcttatttatagtcccaaggagtaaaatagctattgcaacatctacagtctcactgtgtaccatcgaactgtctaacgggtacactatcaaaccattatgttagggttcgatgtctctcaacgactactatgttagtattgtgtcaacaatagccattgtcggtcgttgggtactcccatatagttcgatgcctacaaccgaactagttcaatgccccatttttctctctggatcctttctggtactgtcgaactctctattcgatggtccaatgcctagtgaatagaagagtttgatgctcatgtaagcgtgaataatgtgaccaaatggtatgatgttgttgttgttgtgggtctgatgtctcaatctctcttgttcatcactggttagggtttgcctttgacctatggtccgatgtccctaagggtctgtctcctgatgaacccttttgttgcttcgttttttgtgatctatgtgtatggattagtttcatcttgcgtcttggactctttcatgtttttaggtcttcaatgaatcttctaatgccttgtttgaggtgttgatcatccggatcacctctttggctttgtccaagttcactttacattatttaaactataattaaagacattagtaaatatgattagtctaaatggttatattgatcattaaaccttaaaaccctaattatcaatgggtctcgttccatttttcttacaatgcccacgttgacaaatagattgagtgtatgctttataacgttgacaaaatatccgaatgagttcttctatctagaaataaaaacaaatagagagtttgtgaaggcaatggtatcgccacgcagaagtttaggagctgcaaatgaatttcactcttgttttaagaa

SEQ ID NO: 72836 - DNA, 1102 bp, Zea Mays
cttcggtccaagagaatggaccggacttccacaggagcttgaagaagggtagcgccctctcagccagccgtgagatgaagcagctaagggcggctaacaaccccgtaagcttctagacgtccttgatccgggccggaggcctcatcgcctcaattgccctgattttctctaggtttgcttcaatgccccggtgtgaaaccaggaatcccagcaacttcccagcggagacactaaagacacacttgtccgggttcagcttcgtgcacgttgcccgcatcttgtcaaagaccagggtcagatcttccaccatagtcgacccctcctagtcttgaccacgatgtcatcgacatatatctctaccatgtctctaatcaggtccccaaaggtcttactcatcgtccgtacaaatgatggcaaggcgttcttcagaccgtagggcattacgacatagcagtaaagcccatccactgttacaaaagcggtatgcttcctatcttccctagacatctggatttgatggaaaccagagtaggcatctagaaaggacaagaggtcgcacccggaggtagaatccatgatctgatatatgcgtgggagtggatatgggtccttgggacaagccttattcaggctggtatagtcgatgcacatccgaagcttcccgtttgcctttggaacgatgattgggttggccagccacactgggtgatgaacctcttcgatgaagctaacgtcaagcagcttccggacctcctggcgaatgaagtcctaccgctcaatggactatctccgaagcttctgactcatcggcttggcatcggggtggatcttcagatggtgctcaatcaccttcctggggatccctggcatctgtgacggtttccatgtgaaaaagtcgacatttgcccggaggaaggcgacgagaatgagttcctatttctcccccagattgctcgtgatgcgggtggtctgggaggagtccgcgccgacctggatggtctttacgggtccgtcgtctgctctggacggctgcacctttggcaccttggtaggcgccttggtaccggaggtcgaggggtccttccccccgtcatccgggcga

SEQ ID NO: 72837 - DNA, 557 bp, Zea Mays
gtcggttatgaggctattcggtattctaaacctgaatattatgtcttgtatgaattccattgccttaactgaagttagagaagcaatgggtttgaattctatccatttagtgaatttgtcgatggcaaccagtacatgagtgtatcctccttgagctttcttgaaaggtcgaatcatatccaatccccagcatgtgaacggccaagttacgggtatggtttgcagttgttgcgctggtagatgttgctgttttgacaagtactggcaggcttcgggcctctggactaactcggctgcatcactctttgctgttggccagtagaaacccgacctgaagaccttcccaaccagggtcctggatgctgcgtgtatcctgcattgcccagcatgaacctcttctagcagttgctttccggtggctgagagaatgcatttcatgaggattcctgatgcgccccttctgtataacgtttctccaatgagagtataatgagctgactgccttgcaatccgttctgctacatttttgtcatctggttcctcctcatttttatgta

SEQ ID NO: 72838 - DNA, 443 bp, Zea Mays
gtttaggaggtgcatgttcttttaaccaaacaggatgcatgtgggctatgtcgggtgcagctacagaacaaagaattgtgtttccagttcaatcgagaggaagttcccactgatcggtgtactaggacttggaggcgttgggattttaagatgtgcaattggcgttgaaacatgacaccaccgaagccttgcctcacgcaggaaatagaaaagaagcacttgcaagattggtttaaccaatctgggccgaaggacttggcgctggggttcctagagcgggcccgcctggacaatgcacccgtgtccttcgcaccaacaacggagctctcagctttcatccctaaaccatgggcatagaggagattgaaaggaattgatgaggattttgacgtgctccttatggatttatagaaaacgaatagggccttagagatgacaacgag

SEQ ID NO: 72839 - DNA, 398 bp, Zea Mays
ggagatccctgagcctgagggcgaattggttgtgttcgaggcatttttcattatcggccttcgtctcctggcacatcatttcatggtggaggttttgcagaggttcgacatgcaggtctaccagttgaaacctaacgccgtggttgccatggcgaagtacgtttgggcggttgcttcgtacagcggtcagccgtctgtggaagtcttcgccaagaactattgtttgcactggaaaaagaagaaaataggaaataagattgcacaatttggatcgtgcaccttcacgccgaggactggaaagacttcggcggaagttgtggaaatagtcccttgtgctcggaacaagtgaggcaactagtgggacttttggttttatgtctctggtggggaagtcgaag

SEQ ID NO: 72840 - DNA, 861 bp, Zea Mays
gaccatttatagttatttcacgctgcatcaatcttgctttttgtatgcttgatagtagcctttttacaatcacaacttgcagacgacatcatttacaaacttacaattgatcttgattcagtcactgttaatagttttggttttagaggaatggtagttttgttgtctggttgttcatgattgtaagctcagagcattccgtgatatgttgcctttttattgtctattccttttagtggcatggctttgattttcctgcttctcttacctctctggttcgtagtactcttcagtggaggaagctgtggccacgaggaatgctgtctacgacctccagtggccctcaaacaacaacaattatctgatcgctgaatttgtcgatccagaagaggtaaagctcaaacttgaaactccaccatctcaaattcctcctatcagtctgagcacagctacagcacagcagacagcaaccttccaacaggcaatggctaaccaaactctagtacctccccatgttcctgctacttcgagaggtttattgcccactccagcacggtttgccaaggtgcctcccacctctgaccctggaccagcaagggagagccttcctccccctccactgagcctggaacctgcccggacactggatgagctcttcaagaagacacagacgtacccaaggatttactacatgccactgtcagaagaggaggtatctgctaaacgtgcagctcacgacaaaggtagaaggggatagtgggctttagtttgtcgctcaagctggtattttggtaagtatcttgtacttgtcacagctgttttcagatgcaaccatacttgtcacggcacagcgatcgacag

SEQ ID NO: 72841 - DNA, 320 bp, Zea Mays
ccaaagtaaccaagccgctgcatctccatcacgcggaccaaggaaatcctcgaagtaccaaattccacggtatggccaggctgcagctccatcactgccaaatcactcaaggtctcctcggacgatggcacgactagcgatgcgctcgcagcagatgaagaagaagacattgcaacgtatcgacggtggtggcatgtggtctgcttgatgcgggccagatttctgaagcaggagagcaaggagggtaggtgagcagttcgcaaaagctagggtttctattgcgcaaatgcaagccagagacaggcccgacagctgtcggc

SEQ ID NO: 72842 - DNA, 670 bp, Zea Mays
cggatctctcaatcgactagccgacttggtggaccatcctgcgtggtatatataccggccacctcgccttcaaccttgggtgtatcgcgtgaatcaccgacccacattggacgccaccagagagaccacagtgtggagaggggagagaaagccttgccagcgtacagagacttaggtggatacacaattgctccgtgggcaaagcgcgccagtgagcaacaccatctggtgggggaagtaatcgcagcgttggtggagatcggggctccacggtggccacagaatttcacatctgagctgagtgcgcgccgttcttccgcctctcgccgtggtacggctcctccacgatgccatagccggtaataaggccatccctgtcatctttattccttccgcattgtgtggctgaaccgaatcggaaaacggggtcgggaacgcggggatatgattctaccgaccatggcgcccccgtagactctgggcgccgccgtccctggtcaggattggggtaggcgtcgcgaggaccgttgatccttgggttaacggctctgattagcagcaggggagaccccttcacaacattaaatcgagctcattgatcttcgatcggacgaatggaattagatctaggatcctagtcgttgaaccttgatccatcggttctggttac

SEQ ID NO: 72843 - DNA, 1569 bp, Zea Mays
ttgatatgtaggatactcatatgaggagctgtctgaagtatctccagatcacaggttcattgcatacacaatgtatgacaaagataaggactccttcactttaatggttagggacctagtaacaggcacacttcatgataaaccctgtgctgaccgggtgtcaaatatttcatgggctatggatgggaaagcattggtttatattgttacaaatgaggaaagaagaccatataggtcagtgatttttctttataaatctgcttatctatgtttttttcaccgcataataactgtatcttttttcttatgttttggttaggttgttttgtagcatgattggatccaacaaggatgccattctcatgttggaagaacctgatgagaatatttttctaaatatcagacatacgaaggattttcgatatataacgttaaatgtcttttcagatactcactcaaaggtactgtttcttgtataccttatctatgctcttattatttgatcttttgtttgctgctcatgcttattggttcttttccaggtgtatttaataaatgcttctaatcccctttcccaaatgacgcttgtatgggaaggggaatcccaagttcattgcattgttgaacatcatcgtggtcacctttatttgtttacagatgctgcaagagaaggtgtccctgttgattcacattatataatgcagtctgttgtggaatcttctgggccaaacagttggaaggttcaaattattcatctcctatgctatgttgatttttttctgaacccctgttttctacatatacaagtgcagtccctttgtgactactatacagaagcacttctcccaaaaatcatatacttttagcgaatacatacatgacatatgtaattaaggtagttaacacttgttatgattgctgtatgaattcattctgctaagaactatttcagataactgacttcatatattctgtttgacacaacttgatgtttgaaccagaatgttttagttgaggaacctggtgtcattcttgaagatgttgatttttgtgatactcatatggtgctaactctgagacaaggcagaaaactcagactttgttcagttaaattgcctctaactgaagatatcaaagtaagtgaattttttatcgttatctatgggtgaactaagttgcgacattttacaatttcattcttgatggtctcccacagccttttcttttctgcacaattataatattttaaatatctcttgcttatttatttactcactccataatttttccatctattggaaatctggaaaccggatatctcgaaaacaattcctgtaaaggtttacgaatgtaacgtatatactgtaaacatgattcttatccatttcacttctcaggtacctactcatctatcagatttgcgtccaattgacctgcctctccccagtgatgtgtgtcagattgtatctgggccgaattatgattattattcctcaacaatgcgtttcacgatttcatcacctgtggtattcctctgctctttcttttattattcttttccattcttct

SEQ ID NO: 72844 - DNA, 683 bp, Zea Mays
gcatcatattgaccatgcctatgtcgcttttcaatcctcccttctccatagtagctcggcacaaaagaaataccgccacaacttaaactaggactctactcctaggtaaccttcacacagtgcaataaaggcagcgatgtgttgaatcccgtttagatttaggtgatgaagccgcacctggagatagccaaggagggctacaatgaaggggtgaggcggaagagcgaggtcccgttcatggaaatgtacgaacaatactccataacccatcggagaagctgggaccaccttggacccgggagcacccattcgccatcacccaatgggcatagattgacaagggcctgtagctgcccatggtacaccaaggagtgttgccaatgggccatgagtcccaatgaagctcgacaaacagactagtggcttttgtctggcttatctgacccctgctagtttcctcctcagttatgtgtggtctggtggttagccctaaattcacggagctgagggtgtgggttcgagtgcttgctctacacttttttgtgtggcgtggtagttacatgggtggggtcgggtgctgagtagggcagtagctagcttagtgggcgctgggatgcacagggtagtagatgagaaagagggacaagagaaccagtcagagagcgtggggcgggcctagagtg

SEQ ID NO: 72845 - DNA, 329 bp, Zea Mays
gtttttacataagttctatggtagacatgacatcccctgggttgatcttgtatgggactcatattatgcctcaggccggatccctcatgcttctcaggtaaaggcttccttctggtgttgaaagttccctatgcccggtaacaggatctggatgtcgcctagagggggggtgaataggcgaataataattatcactttataactggaaattcttactctactcgaaggctggatcgcagtggaatgaaggacccttcgagtaggttgcagcggaattgaagttcctgtcttaaaataccctgcacttcgaagatagcttgtagcacata

SEQ ID NO: 72846 - DNA, 807 bp, Zea Mays
ctgagccttgatgttgtacaaaaattggagataaatggacttgaagtctggctgtcagtcaccattgaagtctaaaattggtctgacagtgggttctgatgaactttggagtcgattcaagcttgatcgagtaagtaaatgatcaaggttcctacagtcgaattgtagctggattatagattaacaactttgctacagaaggctggttaagttatcacataaaaattggagaaccaagccctctaattacctctgtcaaacgcactgatgaaagactctgatggtacagtagtctgaagaagatcttgggttcactgaacctcgccgtcggtgatccccgcgcttggattcgtgccggccaccacgattcgtgctcggcgcaaagtggataatcgcggggagtaaaagatcatggtgctaggatgagctcggacccgatcactggattgttcaccgtacccacttgctgtacgactaaccaaggtgtccttgctggagttcaccgccttcatagccgtgccacgtgctcaggagcgttaccacgtctcaatgaaccgtaataggaagtctgtccatcgccggaagctctgccttagtgaatgccacggtagatcgctgcggtgactcatcccctctcctcggccgccagcttctcttcttaatttcggagccaccgttcatggactctataaattgatgccccagtaagctcttttaggttgttacgtgcctagtgcgccagccatcgcctccgattagccaccgtagctcgcgaatttcaaactttccccaaatcgatcggaacgc

SEQ ID NO: 72847 - DNA, 760 bp, Zea Mays
gtgggcatgtgaactcggggctcatgacatagagttccggccccgcacggtgataaaaactcaggcactggtcgacttcatattagaatggactgagcaccaggacccagatagcccagaagatgctgaagtgtggagaatgtactttgatggctcgctgaagctgcaaggagcaggtgcagggattctttttattgctcccggaggtgaacaacttaagtacgcactctagttgttgtttccagcatcaaataatgcagcagagtatgaagcagtggtccatgggctgaacatcgcggtatcgctcggcatcaagaagctgatggtatatggcgacttgctggtggtcataagccaaataaacaaagattgggactgctcgaccgactcaatgggaaaatattgtgtagctgtgcgaaaactagaagacaagttcgaagggttggaattccatcacatgaaaagggatcgcaatgcagcagcaaatgcattgtcaaagctgggatccagtcgggcccaagctccacctgggatcttcgtccaagaaatatcacagccaagcatcatcacggaccaaatggaagaatgcaacaccttgagttagccagagacagaccccaacgactggagagagcctatcattagtacataaaaaatgaagaagagtcggatgacaaggctgcggtagagcgcattgcaaggcagtcagcccactataccatcatagggggcttgctgtacagaagaggcacaggagaag

SEQ ID NO: 72848 - DNA, 870 bp, Zea Mays
ttattagtggtagtagccaaactagtaatgagttgttgtgagaaggtgtcatctgcatagctatgcactacctgatccatgcactgaggtactattgaagtaacatgaaacagtgaggaatcaggatgtggtcttctagatagggcatcagctgccccattgtcagcgccctttttgtataccactctatattgcaagcccagaagtttagagaacactctttgctgccaaggtgtactcagcctctgttcagtgagatgggacagacttctgtggtatgaatatatcaagaattcagaatgttggaggtactgacgccatttatccacagctaacaaggtggctagatattccttctcatatgttgacaatccttgatttttaaccccaagagccttgctcatatatgccaaaggatgactgttttgtagaagaacagccccaatccctttgctagaagcatctgtttctatgacaaacggtttggaaaactttggaagaatgagtacaggagttgtagttaggccctgtttgagggtgtgaaaagcttcttcatgcacttgtgtccatatgaacaatacccctttttcaatagatcattgagaggtcgagcaattaccccaaaatttttgatgaacttcctatagtaacccgcaagtccaagaaatcctctgaggtctttacagtttgaaggtgtaggccatgaagacactgcctctatttttgatgggtcagtagccatccattgctgactaatgacatgtcccaaatagcctattttctgttgggcaaaggcacatttagacatcttgataaaccattgatccttctaaagaatttggagaacttgctataagtgaccaatgaggt

SEQ ID NO: 72849 - DNA, 435 bp, Zea Mays
gtttagtgctcattctacctttggtactggttatttggcttgtcacatttttaaaaaataagagattgcatggtcgtgctaagcaatagtccatgctaaagtataattgtgattgctttgtcttccgtttggagtacattgctgatgttgccatgcagcagttgtgtaggcttattgctagattggatcttcctttgtgttttggtgattgtgatacatttgatgactttattaaaattgctgataatcctaggttgtccaatgtctttagacaaacatgagtagatccagagttagagaggatgcacaaatctagagcgaagaggaaatccgaaaatagagccaaatgccaaaagcccaaaacttacacgtatagatggctagacggacctgaggatagcacgacagatcatcgcaggcgatggaagagtgcca

SEQ ID NO: 72850 - DNA, 562 bp, Zea Mays
atgatacgcgacaacatttttcttggcatttgttgcttacacttgctaccaggacccgctcttgttcaaagcttactttgaacatctatgctgctcttgaactagccttagccagttgcaaagctcatactttttcactagagatggttgggaagcaaactgtcccaggggttctcttggcaccttggacagatgcgctagagacaacggtagaagttacgatctttcaggccaaagttggcgccgtgaattcatccgaggatagcgacgatgttgacattgaggaggacaacactaccatttgtcctacaaaaccgagtcacatgaatttcagcaaatcaaagatcaagggtggacatattgaggtacttaaccgatttggttgtattgacaatgttgattgggtgtgactaggaggcgatgacttattgccagagccaaaagaagacgaagttgttgtgttcttaagctttttgaaagctgggcttatatttcctttacgtaaacagtagttgttattctgaaaaggtctaacatataccttcaccggattacaccaaac

SEQ ID NO: 72851 - DNA, 400 bp, Zea Mays
cttttctcccctttgctcctctttgtgcagttttgttcagagagacgatgttttcctcttttttgtcgtccttaagaatttatttctctcttctgttgcgagctctgatgaggactgtgatgaaaaacacaatcaaaacacaccatctttcgggactgattggctcgatacgagccatgctgccaactctgcaattctgacgtccccattccagcccgcagattttcttttgcatttccacgcttttattcatgcgtctgtatgctgcatcgtaaaaaaattgatctgaaatactttgacagtggcctgtgacgaaactcagcaatcaaaaacaccatctttcggggctgattggcgcgagccatgctgtcacactgcaaagaattctgaggccaaacag

SEQ ID NO: 72852 - DNA, 373 bp, Zea Mays
ggaaggaatacattatgtgaataattaatgctgacagcacacaaagatctttgctagacgctgtgttgcttctccgactggttactgccatgtcttgccgtgtccgcaggtgggtgatggcttgttgcagtagaatacggagtagcctggtacgcctgttgtgcatagaggcatataggcggagccgttcagattccctccgccttagtaacgcatgagtaatcagcagaagtcatgatgattgcagtccatgcagcattgataggcagtgacccttttcttggaaacgagcgagtaatggtgagtcattgtccttgctatggtaacgtgtgagtaacagcacgacccacgcagcgtggattgggcacgccgc

SEQ ID NO: 72853 - DNA, 521 bp, Zea Mays
ggttgagaaaatggagtcatttaaatttgctttcattttaaagctcatgttgcgattgctcggtattacaaatgaactttcacatatattacaaagaaaagatattaatattgttcatgctatggagttagtttctgatgtcaaagatcagttaattaccatgagagagagtggatgggagaacttatttgatgaggtgcagcaattatgtaatgaaaaatctattccagtgccaaatatgtttgatgaaataccagtcagaggtagatcgaggcgtgaagggttcactgttactaaccttcatcattatcgtgatgagattttctatgttgtggttgataaaatttgtgtggaaatgaatcatcggtttggtgaagcaaacacagagttattagtttgcttctcatgtcttgatccaaaaaattcattctccaaatttgatatcaataagcttgctcgacttgctgaaatttatgatgcagatttctcggatggtgatcgtgcaataataagaagccaac

SEQ ID NO: 72854 - DNA, 873 bp, Zea Mays
acgggggtcatggtgtaaaattattaagacttagtgaacagccgcataggacgacgggttgaatacctaaaagcatagggtctcttctgcaaaatgcgcaggccgaaagggtatcgaggaatcctatccacccgatcatcaatctatggccccgattagatctactcttttaggtgaaccggtacgcgttgacggccacaggatccagatcccacggcgcggattcaattgggccgaagggggtacgaagcttttctgaccactagatcgggtttcaacggtcctggtttaattaagcgaaggggtattctatgttgtaatcttggtcatcgagtctaggatcaacggtgatcgacctatctccctccccaatccaagccgagtggcgacacaaccagagccacagtggaaactcgccggcgtgcgcaggatcctccgcccaggcgtccccaactcacaacagaagatgctacacgacgccgaggacagagcgacacagattagggtgtacttacccgaaacggtggcgtcagcgaggttgcccgcggaccagacggatctacgacgatatgggtacaacggtgaggaattaccaccatcagcacggtaatacggcctcgggacgccaatgagaacctaggagacaactcatagaggccttgcgtcacggcaggaagactcccgtgggggcgctcgcgatagtcaacagtggcagcggtaagcttggctcgacgatggaagcaccatggcctggcacccagcgcagtggcgccgcgccccttgtgttcgacagacgagcggaggtgctcctatttatctccgaagaaagaccctcgaaatcgagacctggcgcaaggattcaaccaaatcccg

SEQ ID NO: 72855 - DNA, 937 bp, Zea Mays
ttcattccttagtgtaataacttctgatcgaagatttttaagagctaactggcagctttcatcttctgctttcttctgggcctttaaagccttgctcagaattaagccctacaaaaacaagggatgagcacataatgataaagaaataaggtacgaaaataatcagctttccgataagtatattctcaccttcagactattataggcaaggttgtttgtcagctggtctttcgtcattgcagataagcccagttcaagcttcggataccctacattgtctgccatctccccacagacaagaatctctttattgtaaggcagacaataaaagaagtcatcttcatcatccccaccatacaccaaggaccctcgagggtactgcagatccctggcgtaatgttgtgcttcgacaatttgttcctttgataatttttccctgaagcatgacacactatgaattccaattcctcggtagatactctaggagcagggggctcagattcttccgtagcatcctcttttcctaacattaatgatacttcaacaaccttcgaaggtcctacttcaccaccctcctcaacagcctccgaaggtcttgcttcggcggggactaagggcccagcctcaaccgtagcccgcgctgtgacagcttcggtagatttctttataatctcgctttccacactaggtgctacggcagaggcaggagttagcgcctttgtggattccataacagtgtctagtacgctggccatcctcctccttttcagagttgttgcaggaatattcgacgccttcggcagttccatcctttgtagcggactcagagcattcggttgctctatcgatttctttgattctgactcttcagccggcatcgctctagcttcgataggaccggggcgacggggctcagatgcacaggaagacccctcaa

SEQ ID NO: 72856 - DNA, 352 bp, Zea Mays
tgccttcatgctcgagactaacatcacacacctcttctcatggtttgtcgccccgccgacaatcaccgacggtcgtggcaagttctgatatcctctttccttcctctgtctactgtgtgttcgcgatttgaaaatcttaaggttaggctttggttttttggggcatccggctagggtttcttccttcccttattatacatttctacttcatgttctaactagataacaacctaaatctaggattttgagaggttttctcctaaagacaaagggattatagcatatggaattaggccccatgtccgaaactatggctttcatacaactcttaataaaattgtgatattagctc

SEQ ID NO: 72857 - DNA, 885 bp, Zea Mays
ggttaggctcagaacaaccaatgtccttgttgaggtgtgtgctaaggataggtctctttcaacctgttagaggggcgaatcctatgaccgagtggcagattgcacctgccctatacctcagatgaggagtagggttaggtttttgcctggccttcaagatggacataagaacacaagggtttagagtggttcaggatgttggagcataataccctacatccactgtgacttgtattgcttgagaacttgagagttgaaggtctgagcgtgaattgacctcccccactatgtagaaagtgctcttccttttatagtccaagggaggcacgatgcaaggaagctcaggccccgacaggtgggcctagaagagtttacaatgtggaacgggaaacgccggatagagctgacaacactagatcttcttgagtgcgtataccttcttggtcatcgtgtaggctcatgacatcctatcctcctacttcgtcttcatcggagtacgtgtgcagccatcacggtaggttgcggcgtagtctagtctgttgccgtgcgtaggtgtgggcggtgtcatctcgtcccctctgcttgtccctttatgcctcgttaacgcacgaatcatagtggaagtcataatgagaggcgcccaaatggcgcattgggtcaatgctcttgcctcggtaatgtgcgggtaaaagtaaaatccgcacgttacaggcctagcacgccgtgtgcatttaatgctagggatacaccacctgctattgacgcgggcaagtatcatcccgtccacactcaatgctggcgaaccctacatcaaaggctttcgtcaggcatcgtccggtggcttacgctaggggcgtctagccatgtgtcggcatcagacctctg

SEQ ID NO: 72858 - DNA, 526 bp, Zea Mays
cgctttagcggtggtggccgagtgattattagcgaggttggggattttagaggtgatagccgagcgatagcgggccgcgtcggtgttttagaaataacgaccgagcggttactggcaacgccggcgttttagaggtaacagccgagtggtaatggactgcgtcggtcgcttttaaagtagtggtcgagtgaagtcggataacgtcagcgtttttagaaacaacagctgagtcaatttggtcgcgtcggccgttttggaaataacggccgagtgatgacatgacacgccagcgttttagaaataacggctgggtgatgacatggcacgccagcgttttagaaataacggttgggtgatgactgggcactttttagaaatggcatctggcccgggaaaatcccctatgtactgcactgtcgtccgcctccacgctccatgccctagtttctgcttttttgcatccaggctttctctgctctcctgcgatatcgcttccgctccgctcgctagcgaggttgagatggct

SEQ ID NO: 72859 - DNA, 686 bp, Zea Mays
ctactctttggataagttcaaaataccccgaggaacgtattcaacacttctagaaaggttggaaagctcaaaatcaacatatcgctattttgaagctagtttaagcaaaagaagaaatatgagtgaaataatcaaaatgtttataatccatgacttagactagatggaaaaccacttgagatatttttctaggtcataggatctctctcaagtttagccaaagcaacttggagaagattgttcaaagatcaacgggaagtcagaaactcaagttctgaaattgcctagcgcggaccgtccggccccttctggcggaccgtccgcgacaccgtttcgacttcggccaggaactaaaaatcgtggatagtccgactaaaccgtgaaatgtccgactatatagcgcggaccgtccggctataattcacggaccgtccgcatgtgaagaccttgttcagcccgaacgtgacaagttgagcaaaaggaattatagagctggcgcggaccgtccgggaccaagggcggaccgtccgcatgggttcaccgaggtagatagccgttgatctagccgttgatctatcagagatatccgttggagatgtcagattcgaccgttggagggtcgcggatcgtccggggcctagccgcggacagttcgccagtgcaatttctggcagatgcgccccaac

SEQ ID NO: 72860 - DNA, 662 bp, Zea Mays
ttgtcatatggcgtcctgtggttgccccaataggatttctattactgtaatgaataccgagctggaatccacgttcaccataaggaaataaaagaggatattggagaggcatgtaagctggatgtaatgaggagattcttttaagctctctattatgtgtttcaatgatgatatcacgtttgtacgtatctaaagagaagtcaccaaccaccaacattgcaagttcatcagtagttggtaagttgtattgaactggatcaccctcttttgcgccaacgattctgatgatgaaatcttcattattgtggtcagccaactgatctcttgtcattctaaatttcttagcaaatggattatgttggtctaacatgctaatcaaatcatgtacaattgatggatcaagcgattcaacgggtctatgatcagcatcaagacatttcaatctattactaacttcgttagcagtgtcgtacacataaagttgaagaaattgtggagcagagtcatcaaggggtaaaagagaaccaacacgatgatgtacttgaccacatatcttgaacagcggcggtcctcgaccatcattaatagagttatcaattcgtgcacccattgatgtgaaagcaaaaagacagttatattgcctgatactacgcatgaatttc

SEQ ID NO: 72861 - DNA, 305 bp, Zea Mays
cagggctgagcggttcagctctggccgaaatccatgccgcccgttgcgtaacctcctccagttcggctccataactatggagatttgctccctgctcagcacctcgcctaaaatcgctagctctctgttcttattcctcctctcggttccagtcacggtttggatcgattccttcgattcttggtgttctggtgttaatcctgctggtggaagaaggtggaggtggccctgcttgtgcgcaacgcggttctcctgcgctccgttgtctcaccagtgcacctgtgtggtgctctgtctgttctgat

SEQ ID NO: 72862 - DNA, 316 bp, Zea Mays
ttagattagatttattaaattagacctatcagatcagccgcaatggccaatcccaaatatcacagcaacgctgccctagacatcaacacaaggttgactaactcgtcggccgctgaggatgagaaattagaagaccatataaaaaggctggacgaggaattccaatgacaacaggcttagataagtaagttggcggaaaagtagtacctctcgctctttaaggtagatcaccactagaagatcgtcaaggagaagtaaagtacaattccatgtgagccttgctgcaacaactctctattgtacgtaacaccacgcc

SEQ ID NO: 72863 - DNA, 781 bp, Zea Mays
gggattcgtggggagttgttgccggggcagttggttgaagccaggctcaggcgagacgaagttttctctgaggctgaggctgaatgcaggcgaggcggagtttcctcccgagggtgagaccatgcccttacgtacacatgccccgtttggagttgtctgagtttagtagaggacgtggaggagcagtggccgttattctcgggcatgcgtcatcgtagttggtgaaagcagaggggaccgcggtcctgtcactcctgtttgactgcggcgtcacgtggggtaggtattcacattgaatgctcatgtcttcgtggttcccgtgacctttgactgagggcggactcagggttgtcctcctgtccaagatgagctcaggcaagacggaaacaaccattccgtgaagaggggacctcgggcgggacgaggatttcctagagtgcaggctgagacgaggtgaagttttgagcgaccgccgagtggggtttcaggcgaatcatggctcattcttttttgatctcggagaatgtgtcttctatagtttaggggttaagcgtgtttaggatcgtaatccagatacctctaattacgatacctgacactattcatcattcattatcattttttcttaactaacaaataatggcgtgcacgaaaatcgagtaaagggtgtcgtttagcacaccccttgatctggcagttccagtgcctctccatagcactgtagaccatttaggggcttgcgctgcggcgtttggcggggcactataggacctgattggtt

SEQ ID NO: 72864 - DNA, 286 bp, Zea Mays
atggagtggatcatatcattaaaggggtatcaaggaaagtattgatttgtgctattaatcaagtggcttgatgaagggtgacgggggaacttaatgctataaacaatgatcaaaggtagcatggttggctacattatggatgaccattattcatcatttgttgaacgaccccccatgttgtgtgcaatagtcaaagcaccatcatttgaagatatggaattgaatgagcagaacaaaggcatatgtgggggatagatatcgctcgagtcctcatggcctatgaaac

SEQ ID NO: 72865 - DNA, 406 bp, Zea Mays
tgcacccggctctgccccttcggaaacgggtgtgacataacgcctcaaagtttgctggtaccgtgctgattaaattaccgtgttcagctgttcttcttcgagtacatcaacatcctccagcctagtagcctcggcttctgctatgctttcaaagaccaaccttggcgccccaaacttgaggtcagcaggtagtactgcctctgacccgtagaccatgaagaaaggagtatttccatgcagagctcgactaggttgagttcttaggctccagacgacgtagggcaactcccttatccactttcctgcgaacttctcatttttatcgaagacttttttctgagtgcctccaatatcatcccgttagctctttcaacctgcccgttggctcttgggtgtgccaccgaag

SEQ ID NO: 72866 - DNA, 938 bp, Zea Mays
caggatttggccggagaagttgtagatgatgaggaggactaagcaggacgcgaccacaagcagcgcgccgaagattgtgatgtcctgagtagcagagtttggtgggcaagagctcttcttgtagcatcctgcgcgtgcagtattcagaaaggtttttactagctagtgactactgtgaatgaacaaggctgggcagggcaggcttactagtctgtgaggttgatcccttcctgcaataatacctgcaaaccaaaagacgaatgaacgatcaccatgaagaagaaagaagaagatatgcagggaaacgacattaggtagacaggattacccactactacaagggagcttctgtatagtgctggggcagtagaatccagcggggcagaagatgtcatctgtcgtgaccacatcggcccagatgtcggcggctccgcaggtgtggttagggttcccgggcggcggctggtagttgtagctgcaatggcgatgcatatatcattatatcattgcttgggcggcggatatgactggagcggagtggagtggacttacgggtcacagatgcctgtggaggtattcaggctggaccgtggacagtaggcacccagagggcaagctgcatatatgcattcattcattcattcagctgaagaagatgcaatgcaatgcaattgagtgttggctttcttacggatcatgcaggtgaggccatgcgggcagaagaatcctgggcagcaggactggcacttgagcggcctgtagggcatgttcttggtgtcctgcaggttgatcttctggtcggccccggcgctgcacgcccagccgggctcgcacccgtcgatccacgacgaccggttgcagttgacgttgggcctcacgtagttggcctccgccgtgtcgtcgccgcccatcaggctgtcgaagtagaacctcatctc

SEQ ID NO: 72867 - DNA, 817 bp, Zea Mays
caaaaagagctgttagtgttatgcaaagacaagctgccagaatgataaaagaagatgaaaatttagcaaaaaagaaaaaatctagccctgagccgaaggtggccatttcgaagaaaagaaaagctacagctccgaagccaaaagctaatttagaagaagaaattccctcagcaccttctgccactgacgtagaagaaattttaaaggtaatgaccgaatctctacctaataagctaagcctactgggaccggaactgatgaagctttcacagaagaagaaggagccttcggttgccaagaagcctgctgaaccaaaaaagcaaaggattattactgtcattgaggctattgaagaaacaccgccgtcggcctcagcgccaaaaacagcagcagccgaagctgctcctgccgaagcttctacttccgaagctgcagtagccgaagccacaaatttggaaaacacacttactgacattgatgaaatgattttgaatatggctgaggaagaaactgctgcagctgctgaggaaactccggctgcagtgcctgaaaaagagaaggagcttgccgaagatgcttcggaagaaataaatttcaactttcaaaacataattgggcaagagttgtctaaggctgaaaaagaagagctgacggactatgctatatcttgcgggtaccagccaggggcgctgctcttcggtggtatagacaaagagagcttaggttgccttcgagaccggactggggcgaaagttgtcagcactttatcgaaaagtgttggtttcccaaagctcgaggccgatctcagcagataccg

SEQ ID NO: 72868 - DNA, 335 bp, Zea Mays
atggattgaagagagatgtggctgcacatgtggctatgtgtgatgtgtgtcaaagagttaaggctgaacaccagaggccagctggactactgcacccacttaagattcccgagtggaaatgagaagaaattggtatggattttattgttggattaccccgcactccagcaggatatgactccatttgggtaattgtggatagattgacaaaagtggctcatttcatacctgtgaggactaattacacgggggccaagctagcagaattgtatatgactcggatagtttgcctacatggtgtgcctaagaagatcgtgtctgatcgaggatcacag

SEQ ID NO: 72869 - DNA, 377 bp, Zea Mays
gttaggctcaacatcttcatctgggcccttcgaagccaagggatgaacccaaatgccgaagcattttgccgagtgcatgagttgcactatcaaacgaaggccagagctgacgggatgcacgaaaattttggttgctataactttacgtatcgcaaggatacaaaggctctggtcctcagctatcgcaccaagtggccaactggctggaagagtgagtggttttatatcaaggtcgatgagaagaagagggagaagctgaagacgatgatcgtgagcccactgtctttaagcttcgggatgaccagacccttgtgcaacatgaagccagggtcaccatgccagctggccatagcagaattcagagtggtggctgaaca

SEQ ID NO: 72870 - DNA, 709 bp, Zea Mays
gagactggcgattgtgtgtggattatcgccggctgaacgccatgacaattaagaacaaataccccctaccaattattgatgagttattggacgaattacatggatcacaatggttcaccagtttggatctctgttcgggataccaccaaattaggatggaaccagtggatgtgccaaaaacagcattccagacccataatggacattacgagtacagggttatgccttatggagtcacaggcggtccggctacctttcaactcaccatgaactctatcctagctcccctccttcgaaaatgtgtggtggtcttcatagatgacattctcatttacagtcaaacttgggaagatcacatggcacatgtgagggcagtgttctccatattggacaaaaatcaatttaaggtaaaattgtcgaagtgtgcttttgcccaaaacaaactacactatctgggatacgtggtcagcagagagggggtggcaactgacccggacaaggtagcagtgatcaagacatggcctacacccaagaatgtgaaagatattcgcagtttcctcggtcttgctgggtactacagaaaattcgtcaaaaattttggcatcatcagtcaacctttgacaaatttgctgaagaaaggacaatcttttgtatggctggaggctcaacagcaagcctttatggccctaaaaacagctcttacttctgc

SEQ ID NO: 72871 - DNA, 590 bp, Zea Mays
ggggaatcaagctctgggccgccgggtagagcttctccggcgagtatcgccgccacggttgggggtgaaccagagaccctagctgtcgtgtggaagatgagtgagcgagccgccagatcgtgattgaacgatcacgatttgttgcgaaataacgttctgggcagattcatcctagtcgtcgatccagttgtgtgcggtcgtgattaagtgatgacgtacctcttcacaagttttgatcgggaccgtcgatcagggatctggcgagcgggtgttaatctgcatattctaggattggtgccgttgattgtggatcccgcggtccctggtgcataccgcttggatgtgggcacaatctaatctgcgccatgcatgaacaatccaatggctctgggtgctccataccccttcggctgacaactttgctaaaacgtccccgtacttttatgaattagaacccgctgtcccctaaagttataaaatcaataccaacaggccatgtttttcgcagtttagaccctggacttctggagttttgtgtccgcagtccacaacccttaggaattcaaaaataataaagaaaattggttttt

SEQ ID NO: 72872 - DNA, 725 bp, Zea Mays
gacgccaggtgtctgccgcctgctgatggggtcgaagttcctccgagtcatgcttttgatatcattcccattgatctcccttcatcaagcaaagcatcaactcttcctgctttgggtcttcccatgttcctctccaatattcaggtgaatcaactattgcttttttactgttcttactggcaaactagcttttttgcttatctttccatgatcataggatgttcttggtggtgtatctgcccaactgagatcctgcggtgctcctatccctgatcaagtcttgtctctaatgcagtggaaccctctgctactttaaaaacaaaatagatgacctgaaggcgtcaaatattggttagtgagcccatggttttcttatttgctttcattgcttagcttattctaaatcttgcgctctccttctgctgctttattagatttggctcggcggttctctgacattgaagaaaagtattcacagagccaggccgacttaaatcaaacttctgctttcctggacggtgcttgttccccgactcctccctgaatgcacagctcgattccgagaagatggcacacgaggtaaacttccttggctgcttctgctttgctcttcttgctccagtgcttagtgttgttcttgcttgcaggaagaaaaacgagcgctctttgcttcccgtgacaatctggacaggttgtatcgtgatgctagtaactccttgaccatc

SEQ ID NO: 72873 - DNA, 525 bp, Zea Mays
gttgttatgaagaaattggaggtaatcaaacccaaagatgggctgtcaggctgtttaaattctgaacttcagactagcagtgcaactgcaagcactttgggcatgaattaatgcatgatcgagcaaggatttgcctagggttgctataccaagattatagctggatcctagggctatgactttgctaaagagtgtcgatcatgttgctatataaaatcaagagaaaatatgccctaaatcctggctgtcagatgcactgaatgaggattgccatggtacagtatctgaataagatcagatcaaacattcagtgaacctcaccgccgacgactgatctgcgtcgtgatttgcgccggggtcgggctgagctatcgacgggcatctcctcgcgacgatattcttgaagtaggataagatcgccgcggtgggggggtgattattccagccgccacgcggtcactgatctttccggccatgcttggtcaccggcgccgctctcctctgttcgtccacgccatcaccgat

SEQ ID NO: 72874 - DNA, 374 bp, Zea Mays
gttcattactttattgttaaggaggttctaacaggaggaggtggaggttagcgatctgatgcatccaagatgtgaattaactgaaatgctttacaaggtccttgcacattagtgacattacactgaatggtgagttctgctccccagtgttagataaagcagcagtataaaccagatttggtatcactgactctatgaaatgacactttgcaaattgggatgtcagaaacccagaattttagttctggaggacagccttttgaagctagcaatttgtcaacgatactcttatgaacctcaaaagtatctttttgtttctgccattttctgttaggacttaggactcttcccaagttatctgccagctatctttt

SEQ ID NO: 72875 - DNA, 302 bp, Zea Mays
ggtctatcttctaatctcggccgcctaaggaactatcaacggtccaggccctttcttcctccgccgcccaggtcagtcgacggcaagggtctgtcgcgcgatgctccctctaccggcgaacccagaaccggccctacggttgataacttccttccccagaacgtgctatgcgcagatagaaacaaagcgaaacagatcctgggtctcttaccacaatgcgcgcagaggggacgacgatccacgacgacaggcggaatatcgacggcggcggaatcctggcgagaaattcaccgagctctgcc

SEQ ID NO: 72876 - DNA, 867 bp, Zea Mays
cacaaaatcaaatttgaccaaacaagcacatcagaaaccactagtcgatctccgaacatcagagagcatccttctcagtatgcatttgaaaaaggcacccaccatcatgcatggatgcaaaccttctcattccaaaccctaaatttagagccgtcactcctaaagagttcgaagaaggagacctcgtcctcatcaggatcgatagaacgaaatccaaagacaaactcgagccgaagtggaaaggatccttcatcgtcaaaaataaaacgtccccgaatgcatacatgcttgcaaatcaaacatgcggagacctcgaacattcttggaacatagaaaatttgagaaaactctatctgtaagacgacacatagtcagggccttcacatccttgtaataatttttgatacatcgctccatttaggcccacactcttttcctcgcagaggggtgaggtttttaatgaggtagcaccatgtaataaaataaacagtagaacccccccacaaaagaaggaagtgcggcccaaatacgtcgaaaaaggtcgcgaggtcggccttcgctattcgacggcaggacagtcaccacgacgacaagacttaagtcagccattgtgtgcgacaatcaaatctaagcaaaacgttgcctaagggtgcaaccggattagcacaaaaagtacgcaaatacacctaagggtgcgaagttgtctaatagatgcaatatctatccgagcaaaaattcacctaagggtgcagccggattagcaaaaaaagtgcgcaaaaacacctaagggtgcgaaatcgtccacagacgcatctgagcaacaagtcgctcaagggtgcagccggatatgcacatcgaaacacaaag

SEQ ID NO: 72877 - DNA, 464 bp, Zea Mays
tcaacgaggaagtagggcaccttggtggtgtgaccgaacctcgggatagatcttgtgtatcttgtgttcttgtacattgtgcttattcatgttcttcgttctctaacccttccgtggaagatttgttcatatctttttggtgtgtggattttgagaagtgcccttctcatatctactactttgaaccctgtggatcatttagaacatctcatttccaaagttaactgggttaatttcgagaacaattcagttttacccagtttgcttctagtttttgttgaaaaagttttaacttgcctattcaccccctctaggcaactttcaattggtatcaaagcctaatcctcgttctaacgcttaaccgcgtgaggaaaagatcatgttggggggactaagaaacgaaagtgcttctaagcttgaaaaagttgaggtattgaagaagaagaaaatgatcgatggagacc

SEQ ID NO: 72878 - DNA, 835 bp, Zea Mays
atgttaaagcttcccacttcgaaatttcatcttcttaaaaagatcaatcacctcatcattactaatggttgaaaacatatctttctccacatagcatattaggcaatcactcatgaactgatcacccatcttgtttctcaactttttctttacaacattcatagctgaaaaacacctttccactgatgctgtggcaaccggcaatattagtactagctttagaagttgatagaccaatgaaaaagtaatatgcttatttgtttgcaccattaatttagctagatcaacaatcccatccaaattgtcaaaccttctatctgctctcacattgtcaatgtatataacaagttcaaggcttagatcatccaatttatttgaatcaaaatcatctggataaaactcagcaagccttactaaggtttctctgtcaaatgcgagaaatgagttctttgggttaaaagcagccatgtgacccaacaatgcagaatttacctcactaaaacggtcatcgaactcttgaagttgccaatcaataacataattaagaacttctatttggtaatgctgcaagtttgtcttattggatttctttcgtggtgcatgcctattgacatattcgtcatgcatgttttccctttcaatgtgatgttcatcgcagaataaatgtaccttctccatgagtgagttccatccattctctcttaggttttgcagctcatttcttgttcccctcacacatgacatcgcattgaggatatcttgatccttcctttgtaatgattgtgacaaagtatttgcacttcccaatatatggagcatcatgtgcaaataaaac

SEQ ID NO: 72879 - DNA, 273 bp, Zea Mays
caatgtggaatacacgcagcatccaagacactagtcaggaaggtcttcaggtcaggattctattggccgtaagcgaagaatgacgcagccgagttagttcagaggtgtgaggcttgctagtacttgtcgaagcaacaacatctaccggcacagcaactgcagaccataccagtgacttggcccttcgcatgctggggactcgatatgattggacctttcaagaaggatcaaggaggatacactcatgtactggtagcaatcgacaaaatcacc

SEQ ID NO: 72880 - DNA, 799 bp, Zea Mays
tttgagacgaggctctacgggtatattctaacgtcgagtccgtgtgggtgggtgagagtagacctaatcatgggccagctgacccgactcgcctaaaacaaactcagtctaacccaaacctgaccaatgtcgcggaccgtccggaccgcggacagtcggctgtctaaaagtgtgctcagcgggtcaggtcaagtgtagatccatggatgaaatttgacaacgagtgaatgtaaaaaccatagccacccacacacgtggttgtaactgccatccctaatagatcccagctaaccaacacagggaacgagctcacgagcagcagagattgagatggatgcatggatgtcggtgatcaactcatcaacatacaggccgcggaaagaaaaaaccagagatcgagaaaacccaattgaaatgaaaaaggtcgatcgatgaaccgacgtggggcatcgcaccgtgctgggtatccatcgttggacgcggcgtccttctcgccgctgggccacacaccgcacgtccatgcatcatcatcgttttcgtggctacgcgttggcgcccacttcgacccaggccatgcattatatcatatataattccccaacggtcacacacgacagactaaaaaccaaactatatatatatgtcacacaagagactaaaaataatttaaatttatgtcatcgagaatatattagtccttgtagggaaagggacaaaacttggtcatgcatgcatagcaaacctttggacactttttcccctggattccggctcctgtttctgatcaccacttcctctg

SEQ ID NO: 72881 - DNA, 503 bp, Zea Mays
ctgaaatgttctttgacataactgagatattgtcgggaactaagtatgttattgttaatcttttcttcccaaagtatgtggtatttatttggctatacaaaaatggaccaaaagtaataatcatgtggttgagaggatggcagagagcatgaaggcaaaatttaataagtattgggctaatgtgcatggtcttatggtagttgccacagtgttggatcctagatttaaattacatccgttgaaggctcttttcactagtattatggtctagaaggggcaaaaataaagtaatataagttagaaccttgttgtacattttctcttttcagaagatgttggtacttcatctatgtcaacagtttctacccagaatagtggatttcaagaagatggggtcttcaacattttttatcaatacatgtcttcactagggatggcaacgggttgggtaaagtgcgggtaagccatttacccgcccgccaacatatccgcgcctctagtgc

SEQ ID NO: 72882 - DNA, 689 bp, Zea Mays
tgaactaggactaagttatagaaaaattgacgcttgtagaaatgattgcatgttgtattggaaagaagaagcaaatgcagatttttgcaagatttgtcaaagatcaagatggaagcaggacaagcaatcaggtgaaaacaaacaatcgacaaaaggaaaaaaatcactgaaaaactttacatttttttcctctcaagccaagactccaacgattgtatatgtctcgaagaatagctactttcttgacatgacataatgatggtagagtcgacgacagagtgatgcggcatccaactgattccaaaccgtggaagaattttgatgagctccactctgcttttgcatctgagcctcgcaatataaggttatggcttgctggtgatggcttccaaccattttctaccatccgaatctctcataccatttggcctatattccttattcccttgaacttacctccttggatgtgcatgaagcggcataatgtaatcctttccatgttgattcctagaaaggaaggtcctagagatgcaattgatatttacttgcaaccattaatagaggaactggttaagctttgggaggagggtgtcgactcacatgatgcatcaaccaagactaattttaatctcaaagcagccattctttggattgtgcatgactttccagcatatgcaaatatatcaggc

SEQ ID NO: 72883 - DNA, 297 bp, Zea Mays
gtgaatctgccttgtaacgtcgcgtgccttcccttttatagctcaagggaggcacatacaaggatgctgagccccgacatgtgggcccaggaacataacggaaggaatatattataggagtaactaacgcctgtgcaatctcctatgcgcctcgatgtccgcagtccatgcagtattggtatgcggcggctgcttccttggtaatgcgcgagtgatgatgagcatagtgcacgctgcagcatggatgtactgtctgtcaatggaatggacaaacacgctgcctgcggaatagactgg

SEQ ID NO: 72884 - DNA, 1389 bp, Zea Mays
ctcagaaaaccgacgctatgctcaagtggccgcacccacagactgtcacggatttgagaggctttctggggttgacagggtactacaggcgctttgtgcaagggtacgggatcattgctcggccactcacgaagttactgcagaaaggggcttttaagtggacatcagcagctgaaatggcttttcagtgtctgaagcaggctatggtctccactccggtattggcattacctgactttaacataccttttgttgttgagactgacgcctgtgatgatggggtaggcgcagtgttgatgcagcaggggcggcctatagctttcttgagtaaggcattgggcgttactaatcagaagttgtcgatctatgagaaggagtttattgccctgattatggctgtggatcgttggcgtcattatctgcagcggagcgagtttgaaatccgaactgatcacaaggctctcagctttttgggtagtcaggagcttcactcggacttgcaacgtaaagccatggcaaagcttatggggctgcagttcaaagtcgtttacaagcagggtaaagagaacaaagtagctgatgcgctgtctcgtgtgggctgtgtgatgacattgacagcagtaagtgaggttcaacctctctgggtccaagaagttacgaattcctatgtgactgacccggctgcgcagtcacttttggctcggttgtgtgtccatagcccggatgaacagggctactctctctcccaaggagtcatcaggaagggcagtttgatttgggttggccaaaattctgctctcaggacgaagctggtggcagcattgcatgatagtgcaacgggtggtcactcaggagtgcacgccacttatcatcgactgaagaagttgtttgtttggaaaggtatgaagactgatgtggaggattttgtccatcagtgtcaaatttgtcaaaaggccaaaggagagcgagtccacccggctggtttattgcaaccacttccggttcctcaaggtgcatggcaagatattgcaatggatttcatagagaaactgcccaagtccagtggatatgacacaatcttggtggtggtggatcgtttctcgaagtacgcccattttatagctttgaaacaccctttcactgctgcacaggtggcccaagttgttttggatcaggtggtctgcttgcatggtcttccgaggtctattgtcagtgatcgggataaaatatttacaagtattttctggagtcaattattcaagttgttgggcactaagctgaacctgagtacgacatatcacccacagacggacggtcaaagtgagcgggttaaccaatgtgtggagatgtacctgcggtgtgcagttcatgcccaacctacgaaatgga

SEQ ID NO: 72885 - DNA, 633 bp, Zea Mays
ctagaatggcatttgatcgtaattagttagctgaccaaaacaacaccagtagccagtaggtacccaccggcatccttagttagcatccactggcattgcaagcttcctgtgcctggttgaagttgtgcttttaccagttacatgcttgcgattctagttataacaaaagggatttgttttctctcttttgaggacacaaaatcaagggcgacatttgacaataatatgtgccatgatgtagtcttagtcatgtgcctatttgattgcatgtgaagatattgttagtagcatcagagtagtggtagaagtagacagatcagtgtgtataagcgtgcactctggcactaattttatccaagtttgtttccaaaatgttggtaatgcaaatgaaaatctgtattttgtgtctaaatcaagtttttttttcacttggcggttcattgggcgattggaagatattgcgagtcatgggccgtttatgttgctagccctaaggagagtcccctagggtttaatggatagtgtcatggctggtgacttggtgtgctagtcaccatgtgcatatggtcctttttgaaaacaggaggaaaaaacccttatcctttcctttgcacatcagcacttccatttagt

SEQ ID NO: 72886 - DNA, 418 bp, Zea Mays
gaactaagaggagaaaaaacccaaaccatccgtagttatccccacaataggcatcataggcttgctatgcctaggccagacgcatctagcagccacatgagtatcctttctatagatctcacaccatagagacttagagcggtccctagcgtggtgaccctgttccccgcatttttggcagaaaaatctcctccccaaatcatgatcagccagcggagacagaatcaaatgtttacggttatcttgaacaaccatctcgcagtggataaagagcccgcgaaatcacccttagggttcatccttctaggggagccttcaagcgccagcttaaattcctattttcccccattgttgtggctcttgaaccatatccttgttgttgcctctctcccgttttttatcccagcccttagcttcc

SEQ ID NO: 72887 - DNA, 525 bp, Zea Mays
ctcgaggcatctcgcgcatggcccaacagtgacattaagtacgaaggtcatgggccggtcaaccatgggaataggaatagcatccagcatgaccataggtgggccgacagtaaatgcatcaacaggcatgcaggagcagcaggccaaccgctaatcagactctggccccacctgcagcctcgcaccctcctctgaggcaggcctgggggccactattggtacccaggatcaggggtaccctcttctactatatgaagacgatgtacacgtacgacgtgtccaggtcacacagagaacgacaccacgtggcagggaaggataatacatcttaggatgcatcgttgggtccggacctccacagagggacaccggacccctgtacgtacaagttcagagctcccaagaaggcatgtcgggtccctcgggtgggccccaggtccctccgagtaaggtccgggccttggtgaggtcctgggatggggaagaccccagcatgagtaagggtccggtgctggcacatgtcta

SEQ ID NO: 72888 - DNA, 509 bp, Zea Mays
cggaggctaatgagtttaagtatactagcgctgggtatatatcgaaaacacgtacatagctcaatggtttgacctgctaactatgagaccaagctcccatgttcaagcgcgtgcaaggagacattttttgtgtttttgcctaccattttatattaattctttgttttttatttctctctatgttttttgcaattatctattcatggacacattagtttggtttatgatcatgttataatattttgaaatatttttgacatagtggtactatacatctctcacttagtaattagccttatatgagagatgtatgcctttcttaggatgtgtgtcaccactttgtccgaatgaattgaaactattttgtcaacattgtacaccaaaatgaatggtccatccaagtttttagatttttctagctaggttatggtattgtaacaaatatctttacgaaatgcatcaaataattacagtaattggtaaactaggtctgaaaaatgcataactgc

SEQ ID NO: 72889 - DNA, 606 bp, Zea Mays
aacaaatatagttctttggaaggtgctgaagtttactaaattttattctatattcaggtgcaaagatgaataactaaggtctcaacaatagaaagcaaactggatctttatcttttcaaaatttcagaaacctgaattagttgaggctggattaagaaatcacacacaaacacagacctcaacatttgatcgatggaattagaaagcattaatactgcatttgttcgatagttgggcagtaatgaagcttccgaacatgttcctcaagaggagggctgggaagttaaaaaatatatctcattatcaaatgatagaacatgtttatggtggagattacgttgatttattaattcagatgtacgttgatttattagacatgaatgaagcgtgataaatctaaacgctatgaaaccgaactactcgtgaaaagatgcaatgacttagaattgaattacaagcaaaggcaagagccatttaccactttggataaacactggatatacgattttcttgcatgtatggaaacaccatttggtcgttgcctgttcacggacattccctgcaggagaaggggattagattctggaatcccagaaaggtataaag

SEQ ID NO: 72890 - DNA, 277 bp, Zea Mays
tagagtatcaggtcatggagactataattctgagtacagtggccccccttgttataaactttttctataattcttggagtatagtggcccccttgctaaggctccgagcaagatgtttcgtatcgtattagctgactgcaaattataccaaacaacttaatgcaatgactagttaggtgcctgtgcgttgcaacgacacacaaattgttaagggagatatgttgctactcgtccgagtcgatgacgggctatcattgttgctaggtatcatcatccg

SEQ ID NO: 72891 - DNA, 385 bp, Zea Mays
attgccatcgtcagtacgcgagttagggcattggggaggggggcgagaccctgtatttccgccgtcgtcgcggtagactggccgcgccaccgtgcgttgtggctgctctgccaccgtcgtccgcgatgatgcgtttggatagccatcgtccgttcatcgggccgtggacgaccaagattagagctaggtaacgattcagtcaaagcgagcagtaaccgttgatgcgatatccggcggtggggatccgacctatatctcattaaacgcagaccgtgggatctggatcctatggcctccatcctgggatggctcagtcggtgaccaatctaatcagggtcgtctgtggtcgatctggcggctgataaagccccataccccttggcga

SEQ ID NO: 72892 - DNA, 292 bp, Zea Mays
acaatataaaggccagaaaggacttagcaaaactttgaaaccaaccaacccaggaactcgacgaaaatggaaaaaagccacatgctcaattttgtctaaaacctaaacagaagaaagaagtaatggaatggttgaaaattttgaaattcccagatggttatgcggccgggtttaggagagctatgaacttaaagacaaataaaataactggattgaagagccatgattatcatataatgatggaaaggctcctccctataatgttccgtgggtacttgaaagtcagtatctg

SEQ ID NO: 72893 - DNA, 462 bp, Zea Mays
aagggcagggaaacgagcaccagggacacttggctgattgttctaggcgggggcaggagtgggacggataaacacgggttgtttaaaaggatatgtgggtgggcgaggagaagaacggtttgggtttaaaggtcggattaccaaccttgtccgcttttcaggcccctgagttgatccttcacccgcatatctttttgactttccttgtcccgaatttttggcttcaactgacagtgctgtgctgatagccctggtataggtaaggtccagacacgtagccattttgtgctggagtcggcatttaatcctctcatgaagcattttttctttttcaagtctgtgtccacatgatcgataacatattgggagaggtgattaaacttgttgagatattgcgtcacagaatatccccttgcttcagacatatgaactcctccagcttcatctgtagcactccttccg

SEQ ID NO: 72894 - DNA, 895 bp, Zea Mays
gcttgataaacctgtgagtacgtatagatgtgggcttgcagaatgcatgctagtattttttggcagtacgtgtacatgtaataggttggattgcatgtgttgggccgcagggctttcaaatttgagctgtcggggtcacaattacttttttttgccagggtctttgctggtggaaaatcatattgtataagatgctatcacgaagtcgtcggggtcggctgaccccgtcccggcaacatagcttcgcccctgctatctttggccatccatttcaaaaaatccttatagtttcacaagatatgagttacagattatggaagtgcttctcatagtaaatataaaaaacataaatcttatgccatgaactttttttttgaaattgatggtcaaaattacatttttttgacttaagacaaagctaatatataaaaacagagggagtaacaactttaattgtttatttatttaccatatggacatattgttgggcaataagttatatcattacttggtttggtgaactgcataaatgctgcttacttggccgtatatgataagatccttgattctatcgcagttgcgaagtgcatgtgaatgtgagattggagttcagtgttggatttttttactttggtaaggcgacgtgatggcatgggtgtagagcagcggcgtgataacgagcgagggagagacaacgcgtaggacaagcccttgtggcctagaaagatgtttgtcttgcttccttcgtctggttacatcgcccctgtatttatagttcctagaggacttggttcagaagcaaactagaggaggaattcctaacaaactaattctatttcctaaatgagtattgttcacaccggatgtaattttggcccaacacccgcgtggcccg

SEQ ID NO: 72895 - DNA, 286 bp, Zea Mays
agtaattactttggtttgccctaatcatctcgtgattgcctacaaggaaccccaaccccttgctggtgctgtgcttttgttagaactactataagtatacccagtcacgtcactttgtcctagcctgctttgattttgatggttttgtgagccggaggccattggtgcgatgtggcaagcttttcttcatggttcccatcgatgtgtttttgttgggttctctcgtcagaactatataaacaggcgcctacccgcttcaccattcctcggtcttctgaagcatttc

SEQ ID NO: 72896 - DNA, 545 bp, Zea Mays
gcaatttatagcaggcttgagctgtggcgtccaatttcacgatgatgcgctggcggccggagagcaagaaggttactggcgctcggggttagtggctttcaccgggcatgcatgacgtgtttcactgcgacgtggtctagcgctttagcacgtggcgcacaacggtgagcggccaacggtggcaaggtctatcccggccgcacgacgagcaagtaggtacggtaaaactcatccgcgatcgagcttgagctgatctggtgccaagatctttactccgtcgtggttatccacttaccagagagcacgaatcgcgacgacggcgcaaaggtcaccggcggtgagggggctgaacttgtaatctgtttcagttactgtaccatggtggttaccattagagtgtctgacagaccgtattgcagggatcggatctcaaattttcatgtggcaacttactaatccaccagtaacaaaactgtttcctgatgatccagctacaatcctggtatagcaatcactcctaaattctaactggattaggctcgaat

SEQ ID NO: 72897 - DNA, 386 bp, Zea Mays
gccttcctcaacaatctccaggaaagtcggagcaaagcaggaaaaagcgcgatctccagcgctccgagcgaagactacctcctgccagccaggagcagaggatccgactacccggagaattccgctgtccacctcttctacggaaaaatagacacggatcacaaggaaaaaggaagcaaacgaggtaaaggctcgtcaagctgctctccaggtatctccgccctcaaaggagaataggaagaagcttgtcactatgacggttccattctacctcgacgtcctctttatcgggggaagagtggaatctatccccgtctccaacgatgaaccaaccgcgccaggagaagaacctctttagcgggaatctcaccgacgaaggaaccgac

SEQ ID NO: 72898 - DNA, 416 bp, Zea Mays
tacccccaaccttggctgaggccatcactgccttagtcaatgtaacaaccgataacacccgctttttgcgggaaatggcaggacaacaaatgcaacagcaaggcgggcgagcgtatccgcaaggaccctgcgaaacttcatatttggacttctcggagacacgtccccaattatttgtcaaggctcaagatcctcttgaagcggatgagtggattcgggttatcgaacaaaagtttgggcttctccgatgtacggagactcaaaagcccttatttgcggcacaacagttgcgaggccctgccagcacctggtggggaaattatgtggctatccagcctgctggtcatcaaattacctgggacgaattcaaactggcttttcgggagcactatattcccaaaggagtgctccatatg

SEQ ID NO: 72899 - DNA, 894 bp, Zea Mays
catgaaatgagacaattagtgtggacataggattgtattttgttggttcttgttctgatctccagatatattcttgaaccatccttttccccttgttaataatttctatttagagtcattaatctgggacacctgtaacattatcaagttactccttgtgctgatgactttctgtattttgatttttgcatgcttaatgatattggtgttactctaatgactagaaaatggcatcggatttcctgggtacttctagatttgggttgatgcgacttggtttgtctatacaatttatgtatggataggataccaaatgtattaagttgcaacgcacgggcactcagctagtatagatatacatttggttcaactatatattgtagtaccttactaggaccaatgtactccacagaatagcggcatcaggtgtcggcaacatacaagatctgcctcttgccacttgagcaatggaagctatacctatccattccatcctatcgttcgatcgagatcgaatctcccgttgtcgttgcacgggttcgatcagggctcatatccacacgtacggccggtcctttctgcgtgtaactgagatctgtcagtcagtcagtctcaaagctacgtacggcatcaggcagctcatcacctggacccacaagtacgtccgtgccgactaggatatcatggatcaatgattgcactggcccaacctagcctgtggggatcactggccgatcacatcaacgccatcctgacccaatgattggaatcggatctttgcaggcgtctgtgcgtcgacctcctcgatcgatctcacttctcacccttgcgtcgacctgcacttgcactggacgtccgccacaagggtacagcgagatcgatcgacctcctctt

SEQ ID NO: 72900 - DNA, 451 bp, Zea Mays
cttttactaccataatgtattgttttgttgtaggaaatgggaaaatttccaacaacttttatctgtttgttgcattgtgcctattcgattgttagccaatcaatctgttgagaaacccgacacacgatccaggcttgcagtcgaccatataagttgtacatcaatagtgggggcacattttgttactccatttctcttgtgcatcagggtttcttatatggctgttgttgctgatttcagtcaccttcaccttctcacaggatgctgctcagctaggcagattcaccttcaccttctgttactcaatttctgcttgccttcatttttactcatactctttttgtttttttatttaaatactcataaataagcattacagactggctcttttgcaaattctgcaataagccgtatagagtgtctcatgaatttgtgagtcacttgagctcat

SEQ ID NO: 72901 - DNA, 341 bp, Zea Mays
atctgtagacaacgtccatgtttcccagtttctccaacaaaggctggaacaagagacaagtcacctagagggagaatttgatgaatccactgtcggatcgttgcatcatcgggtggttcctgtaacaattgaggatcagctggcagaggatgtgccaaatggtactcaatttgatggtacgaggccttcactgctatgttggtccaactaatcaattttatcttgtgtgttcattttgcagaaacatatgtattagatgaagttgagatacctccatttgcgttatgttgacatggtacttaatccaattatgtatgctgaaactgacattttaagaattg

SEQ ID NO: 72902 - DNA, 339 bp, Zea Mays
ctgaagagcgccgacaagactgtggtaggcagtggggtcgctgataggggcaccgttgacgaagaccttggtctgtgtgtccaccggtgtcgcatttggcttgtagtcagcatgtcaatgcgctccatgatatccacttatccagggtgtactggcgttgcttaagaaataggccatctaggtgacgctcaacaacaatccctagaaaatgatgaagatgatctaaatcctttattgcgaactcgtgctaaagggcggcgatgatccgatatagcacgctcaaagaagaggtaatgagcacaatgtcatcaacatacaggaggaggtacacaatgtcac

SEQ ID NO: 72903 - DNA, 299 bp, Zea Mays
ggggagtcctggtggccagatccttcacagaaaaactagaggggtcaaactcaatggaacaagagttgtcagtggtgaaacgacaaacagaaaggagattatgagtgatgtggggggctacgagaacgtcgttgaggtagaactatctagggagaaccgaggcaccaactgaggtgacaggcagagtggaactgttcccaacgacgatcgatgaaggatgagaggaatggggggatgggagcgagagagcgtgcctgtagtgggagtggtgtggtaggaggcaccagagtcgatcaccc

SEQ ID NO: 72904 - DNA, 715 bp, Zea Mays
aacaggaggcatattacaagcgacttatcaaaaatgcagcgagttaacatgatcttagaaactaacaaatactatgtactacttacttactactactactgctaggcaatagaaatagagaaactaacaatggaattaagcaactaggcaatggaatttaaaggggcaactaagctgtgcaatggaattaaccaactagaaactagcaaatactactactacttctaggcaaccgaagaactgagcatgcaacaaatatcaagcatgtgtaggatgaactctctcctcaaagtctcgtaaagtgttagaagcatgctcatttgatctggtgttttcacaaacacagctgctgccttgatctgttcagtccgggtaaatccaagcttgcgtagctctgctactgccttatcccttaattttttcttgaagttcagcctcgcgctccataaccgctgtcatttttccaacattcatagccacaccctttagatcaccttggacttcatttaacatgtccaaaagagggtcacttgatccactcttctccttcccagatgtcctcctcctcttcacacttgatgatgctgaatcagtagaccacctaggggttctatagatctcatgccctcctcttcttcatgatcattaccatacccagtagcaagctcttgttctaagttcccaacggcttcatcaatcccttccgcaccttcac

SEQ ID NO: 72905 - DNA, 382 bp, Zea Mays
aggtttcctgtcattgtctaacagtgaggacttctgacattacattatgccaggagatggagaaattgaacctgggaatgattcaacatgggacttcaaaccatttgaagctggagtcagtcatcctacaaagaataattgacgcacaaaaagatgatgagggtatgaagcacatacgtgagaagataagggctggaacagccaaatgtttcaaagaagacgatcaaggtgtggtatggttcaataaccgcatagtggtgccgaagaatgaagagatctgccagcaaattttagatgaagcacatcttagtcgctattctattcatccgggaagcactaagatgtatcatgatctaaagcagcactactggtggacgaagat

SEQ ID NO: 72906 - DNA, 638 bp, Zea Mays
ctcgatgtgtccttcccaaacaaaacaagccttgcatgcctattgttggtatggcagctgacgggttagggctttactcttcccattttgcgaaacccctatctagaaaaccaaaaaggagcttcatcggtttggtgaaggttgttgaggggctgatttctgctaaagaccttgagaaggattttggttttcattttccgtggggcaaaacttggaaagcaaccaagtgccatgtcgggttcttgatgcaattcccttctcaagagaaacttgatgagatgattaatttctctgaacttaaaatgaaaatgtccggggcaaaaaattctgtctcttattggagctcacaggctaaacctaaatccaagcttcattctgtgtggattgtggctgaaaatgtccctgaggaacttcaaaactatcaagctatttgtgagctgggatcaacaattggggctgttgaagaggtggatatcttatctttagactctaaagatattgtgagattcaaggtacacgtcaaaagtgttgctatgattcctccaattatagaggtaggtgttaaacctttactctatgacatattcttcaagattgatgatatcactgatgagggatggaacgatgagtctataaat

SEQ ID NO: 72907 - DNA, 931 bp, Zea Mays
aggtgctcggtcagtcgttctgaagaaactaggcgatggtatagtatcccgattagactgccagctcggtcagctcgccgccggcgatccgcgtccggatttgtgctggtcaccgggattcgtgctttgcacgcagaagattctacgagaaggtaaagatctcacgggggaatggataggatcgcggattggagtttatcaccgtgcctatagccgttgcgacgtggccggactaccggcgtcgtcgtggaagtgccggtgacctcggttgcgtcacgccgtagcttgttactatgtggtagtaatcgtggcacccttaggagtattatccttgcgctgttgcaccggtgaacgccacggttacagccactgtgttcttccctatctccggccgccagcacgccgtgatcaaattgagagccaccgccccaggagcctataaatctagtgcaccatcggcttcgttatgtattcacgcatctagcgcacccacccgtaccccagatcctccaccagagagcttcaatttgagatttcccccaaatcactcaagaactctgcacggtttgccctcgccgtggccagcttgctccggttagttcaagcactttgatcatttgttctagcatcgctaagtcctcctcaagcttcacgacccctctgattgaactagaccgccctgggttgccgtgaacgcccgtgttcatccgttgcccatacggtcaccgtggtcagggcattttagtgcgccattagtgaaattaacttaggggaaacttcggttgaggtgtgaattaggtgccagtcgacggagagcaccggtcattacgtaaatcggccagtacaggcacgttggtgatcggtgtgtcgccgtccaccgtcgtggactggactctgtgaagacataggagttcgagggtttattggaaag

SEQ ID NO: 72908 - DNA, 432 bp, Zea Mays
aggtatagataggggttgcaaagctccagctgatttcaagtggcttgcctttatcctctgacatgtgtcacattctgatacatactgggctatctccctctttcattttggtccaccaatacataggcttcagatcatggtacattttggtgcttctcggatgcatagagaatttggagagatgggcctcgtccaagattttcctcttgaggtccttgtttttaggaatcaccaatcttcttttgaaccataatacacccttttcatcttggtggaaacatttatacttttcaaccttctgatggagattcttcttgataatctgtactcccttgtcactgagctgggccatgatgatctggtcttgcaaagctggctcgacagaaatgtgagacagagcaccagaaggaatcacttctatttgcatcttgc

SEQ ID NO: 72909 - DNA, 482 bp, Zea Mays
ctgaaattcatacttaactcaatagagtttaagtggggccttttgcaaataagtccaaatctcaaggtttactttgcaaatccacatacaagtgaatcatatgagttaaggtatcctaatttcatggtttttgcacttaggtccaaaaatgtgcacattttgcacataaccccttagggtttcagtcttgggttttctaggggcttatttagggtttttggtacttctagggtttggatgctacttaagtccatccatggtgatattttatgatcattttactaagttttgaagttttctctgagttaagctttgtttactcccctaagcctagtgtagggttaagcactgtaccctagggtttcacccatgaaatgtcacatcaatacaactttgtttgaaatttttgcctagtgaatgcattctaggtgtgacaaacacatgatatgccaatgcttatgatgtcatgctcaagttttagt

SEQ ID NO: 72910 - DNA, 361 bp, Zea Mays
cggagcctgggtccgttagacttcattacaagtataaatttgaagatgaatttggagaacctactgatgggtggttagattacattgaagtgaaatgtaattaaatacttggtaattatagcaagcctaaagctgaagctttacaacgggcttttgcagctcgaaaaaggcatcgattgcactgtgtcttcagtgctattggcttcttctatcctgactatcctaacatggcttaggattcgaagacgaggaagaaaatggtgaccactaggcggagcaaagtcccaaatatgcaagttgagccgactcctcaagcttcagaggaaattatggtaaacatgctttttttgattttttgtat

SEQ ID NO: 72911 - DNA, 885 bp, Zea Mays
atgtcgttcatcaggatgagcgagctacaaaatcacaattagtacgctttgttagacatgcacaatagttaatttgtacggatatataaggtgactgatgtagctatcaacaacacagtataaatctcttgcaatagagtatgtattaagcaaggcatgtaatggtgatagctgataaaaaattgtttgggacatttcatcgaacaacctgcacgcatagctcatgtatgatgtatttagaagaataggtggggaggcgacgggacccgacagatatagacatcgtcgttatcagcacgaagtggaggatgatgtgtgcaagaagttctagcttccgcaagcgtagctcggacgaaacacagtagtggctgcgtttgcatggcggcggcgacgacggagaggctgtagggtaaaagaatggagggagaaatcgcaggtgaggcaaggcgaggaaacgaacctggcacaattagaattgttgctggcaggcgagaagaacgacatgttcgatgagtgagaaagccatgtcggtcgtcccaaaaaacattggatggatgcttttgtactgaaaacgcttcgagagactaagcgagcagactatcagatgtaagctagcagccgagcgatgcgcatccaatagctagcatccagccaaagcggacgacgaaggcagtgggaggaagaggaacaaattgggaggaacaaatagggatgggagaaagaaagatgaagcaagaggaacaaggacggaactgcagtggcgaagggaacgtgaaccaggtagaagcatccagagatgggaagcggttgaacggtagaagttgtcgatgaataatcatgcaggagacaaaattctgcaaacgtggatagcctagtatgcgtcgt

SEQ ID NO: 72912 - DNA, 776 bp, Zea Mays
tttgctaaccgggtatcacactctacccgccttaaaaagaattcgacctcgaattctgacgcttctatcggaacgacaaaagaaaagattaatgaatcaacaatacttacccacaacgaaaagtttaggatatttctgccacatcagctcctcaagttcccacgtagcctcgcgctcagactgattagtccataagaccttgacatacttaattgatctcttcctcaaaacacgctccgaggattccaagatacgcaccggacgacactctagagtcagatcctgctgcacaacaattggttccatcttgatctgatggtctggatcccacaagaacttcctcaacatagagacatgaaataccaggtgtacccctgccatggaattcggcaattgcaagcgataagccaagttgcccacccgggccaagatagtgaatggtctaatgtatttcgggctaagctttccggagacaccaaaccgaacaacttctttagtaggtgataccctgagaaggacttggtcacccactacaaattccaaatcctgccttctcacatcagcataactcttctgacggctctgagcggccaaaatattctgacgaatttcctgaaccttcttagaagtctgttgaacccaatcagaaccaaccagggatctctctcccaaagtctcctagcacagaggggagatacaccgcctgccatatagagcctcaaatggtgccatcttgatgctagcctggtagctgttgttataagcaaactctgaca

SEQ ID NO: 72913 - DNA, 551 bp, Zea Mays
atgggaggggcgccaccaccgatgtcccagcaggagcagcatcagaagagtcctcagccagcaaatcaagcatagcacttatctctgcatcactaggattcaggggcacctcaaaatggacttgtcgttcatcatcaggaatctccccaagcgaggcaaccaaggcgctgacttcttcagcagagggtcgcactctaaggcccaaactgccatcagtgacaggtggattcgacacaaaaagagtgaaggctttgggaggaggcaagttccaggctgagtatgccactggggcaccaacatttgacaccttgcctctaaggatcatctcaagtcggttcaccaagtctacagagggaattcttctgttggtaacccgagttgagtcggctaggcctcgatacagataagccgggtataccctgtctttcaacggctgaatattcttgaagacaaaatcagcaaccacagcttcagcagtcagacccctctccttcagcaacccaacttcagctagcaaaacacctgcctcagctacctcctgatccgtgggg

SEQ ID NO: 72914 - DNA, 600 bp, Zea Mays
aaaagaggaggattatagcattttgatcccatcaaaacccagccacctagattttgagaaatctactatgtctgaagccgacctgcccatgatgatgaaacatggctactttggagaagctgaaaagaaacttattcgttttgccggagaagaaaccagtccaacgccgaaagatgatgaagtagtggttttcaaaagctttttcagagcaggattacggtttcctctaaacgagatgataggagaagttttgaaattttttgaaatttatcttcatcagctgacccctaacgctatcgttaggctcagcatcttcatctgggccctccgaagccaagggatagacccaaataccgaagcattctgccgagtgcatgagttgcactaccaaacgaaggctagagcagacggtctgcatgaaaattttggctgctataatttcgcgtattgcaaggatatgaaggctccagttcatagctaccgcaccaaatggccaaccggctggaagagtgaatggttttatatcaagaccgatgagaagaagagagagaaactgatgacgatggtcatgtgcccgctggctttaagcttcagaatgac

SEQ ID NO: 72915 - DNA, 632 bp, Zea Mays
ctcaattggtcgagccgacaagcattcccagcgtgcatggttgttgaaatgagggtgaggagggcgagagcggacctggagatggcggtccacgatgcggtgactcacgacggcgcggagaactgatttgggggaaatcgcgattgctcgggctatggtgagtaatcggaggcgaggagcgatgcactgggtgcgtaacaagctaacggaccacgctgagccctcaatttatagagagcgaccgcgagtacgatgaatttggacggagaagagcttgcggtgacaaaggagaggagtcaccggaggccgctcaacgtggcattcactgggctaagtcaccagcgacagagggcctatctacaatgatctattgcgacgtggtaacaaggccagtaccgtggcgtgcccaggggtaatgacgatcatcacggcgatggccgcgtggccacgtcaccgggcaagtgggtacggcgaagctagttctatccattcccccgctgatcttttcactcccgcggtgatatccgctacacactgagcacgaatcgcaacgctggcgcgaatccagccacggggatcaccggcggcgaagtgcggtgtatctgctgatctttatcaggctactgtaccat

SEQ ID NO: 72916 - DNA, 691 bp, Zea Mays
taatttcctgtttccctggttcaagcacgaattacagagaaactcggggttaaaccataaaattctcccagactcagtctacacccccttggacggcgggttgattttcactttggcgagggactctttagcaaattgcatccgcgaaggggtatgcatcaattctggccgttggattagatttggacacgctagattagatctgccaaactaaagtattcccacgccatcctagccacctatggcaggatcaatgggcaatcagccacctgaccatgcaccccatccggaaccttggatctccaatcgacggtcacgggtgagcgtggccgaatcggtatcatgatctaatcctacctgcactcgctcgatccaacggctagggactcatcttctaaacaccgacacaagcggaggtgctgccagggctccctcagcggaggatcaccggagcatgccagatcggcgtgctggtgcatcccgaccctaaccaacccgcgattcgctattagaatagtaattcaaacatgagggagaagctcaccaccagttgaagctgcgaggaaggcttggccatagggaggggtggacggcggtaatactggcccgccaccgtttaaattgagggtggctagagggtctacgacaacacgaatgggtgggggaggtggccgtagagcttgcttactta

SEQ ID NO: 72917 - DNA, 330 bp, Zea Mays
gtgagtggtgatacacgcttgtgaaatctactactatgtagctctaagtaagctcaagataagtttgagatcaaacgcaactcaaagagtgtttagaatatgagttggtggtgctacaggtacacatacatgtccaatatacatcgaatatgaggcaccatacaagaatgtgtcttgttgcatagagaactagcatggatacgtatggtgtgcagaactagcatgggtatgtatggtgtgcactggttatggtgcaccaaacacaacacccatagaagactacaaattggcatgctggcaaatatactcatcggacatgttcgatgggtg

SEQ ID NO: 72918 - DNA, 476 bp, Zea Mays
gcaagggcaaagcacatatagtcggctgatcaaagccgaccctacttttgatcagttgctctccaaaaatgctagcaaaaagcctgttccacgtgatcggtcaacgaagaaaccccggtcacctgctaaatcgaaacggtcgaacaaaacagcccaaaaggcgacgcgacaagcatcgcatgttcatcctatgagaccagggtactttccacccgtttattcatcgtcgatatattgtcctactcaaatgtggaatggcacaacgatgaatccatggtacatgtatagtccctttgtctatccaggctggggggaacctccattctattcattttgatccattgatcaaatggtcatggccgagaaagatacaatccaaaacggcctttatacattggtgctttattggatgatctctattttgaaaagccgatgacttacatctggtttagttcatatgcttttggttcatcaac

SEQ ID NO: 72919 - DNA, 395 bp, Zea Mays
gcgtggagtgctggtcattgatggtaggatggatggacatgattagatcaagagcgtaccccttcagggatttgcaatttggacgatcctagttgaatagcggttcaataaaaatctaaccgtggatcttcgatcggatgagcgttaatgcatattggttcactggatggtagatctaatctgggccctcgatgttgaatccaacggccagaaacaaccgatacccctttggtcgatccattttgcaaaaagagcccctcaactttattatatttaacccgccgtccactacaagttctagtttcaccacaaataggtccttttctttacgaatttaaccccaaagagtctacaaatatgggtcgcagtccattaagtttgaggaaattataaaa

SEQ ID NO: 72920 - DNA, 838 bp, Zea Mays
ggatcatggtctggttcaggattatgatgacgacgtctaccattacctctcataccttgtcgattacgtgcaaagcgttgtggcagcggtgcataaacatcgttgtcatcgttgtcgtcgtccacaggagagtgagatggggctggagttgttggtgggggacgagcctccagtacgtccatgcgtgtaacaagtttatcaactcgtcgatcaagctgctcataggatgtcgtcgcagagtcctggtatttttaaaagcttcagtcatcgcgcgcatcatctccttcaattccagctgagagacacactcatcgtcgttaagcttaggccccttgtccttgtccatttgattcattggtcctgtcattgttagcacaaaacagagacaaaaaggcaacaaacaatgtgaaccctacaactatctctcagggtggtggtggtggtggtggaatacaaattatgaagcgtcttaccccgctcttacaacgttcttaccagcgctgcaggtggcaaacagtgaccggtgtgactgtccaacgagcgtgggtgtgattgcaaaggagtacctgttctgctcgagagaaagctggagttctgggaaggctgactaaatatatatatgtggcacacaagtcagtaacagatagcaatgctgaataagtgttccaagtactcatcctagttgctggcctagaaaatgtaatagaacagttggaccaaggcacaagaaaggaggtacaagtatatggtgcagcaagaaaacaggcttggggcaaaataatcacagaggtgcacagaacactggcgtttctggttatgtgctgcccttctttttttt

SEQ ID NO: 72921 - DNA, 484 bp, Zea Mays
aggatgccacggcggtcgggatggactggaggctgcggtaaatatccttggtcatgtggcagtaactctctgtggtggcggactccggttaaacggcggtcgccgtgccatcaccgggttctgccgcgcggcgagctcacctgcaccgtctaaaatccgcgatcctcatccgtcgccggccagtcgcctataaattgagtgcgggcactgcgtcgtcaccgcattccgcaaaatccgcagctaagcacttgactcgagctcaccagaaatacccgcgcagccccaattccctctcttcttcgttcttgctccgccgtgaagaacttcctcgtagccagcgttcctctggtcagtaactctcaaattgctccctgttttagttaatccttgatctcctattgcccttagatgtggcaatttagagtttggccgaagctccttaccggaacgcacctatgcgctgtcaaacaccgccgtaaccccc

SEQ ID NO: 72922 - DNA, 365 bp, Zea Mays
cgtgagtatgcgtgatatggtggcgggtataaatatccttgtaatcgaacgaccagacattcaaaaaaactactattactgaatcaaaaacactgaaataacaaaacagtattgttgatagtcacctagaagcggtgaatatgtgatacctgaaattcacaacttaaacacaaacttggcacacaaattaaaagttagtacaaaactagatccataagagtgagaaggagagaagttcttgcacttggttgctcacaacattgcggaattaatttgagcaatattacatgtgaaaaatgaaacaagaacttaagagtgaatcctaatgaaaatagagcacacaagacacaatgatttttctcgtg

SEQ ID NO: 72923 - DNA, 589 bp, Zea Mays
gtggcgcgtgagtaagcttctcttttaaaagagcaaaagaatcctcttgtgactgcccccaattaaatgaaacacccttcttggtcaactcatgtaatggggcagcgatggtgctgaaatccttcacgaaacgacgataaaatcctgcaagtccaagaaaactccgcacttgtgtcaccgtcgatggagttggccaactctgaatagcatgcaccttggcttcatcaacctcaataccctgtggagtgacaacatagccaagaaacgatacgcgttcggtgcaaaaggtgcatttctcaaggttagcaaataagcacgtagatggtcaagttgttcagataaacaagtgctgtagatcaagatatcatcaaaataaaccaccacaaattttccaatgaatgggtgcaaaacctcgttcatcaaacacataaaagtactaggggcattagttaatccaaaaggcatcactaaccactcatacaagccgaacatggttttaaaagcagttttccattcatcgcctaatttcattctaatttggtggtacccactgcgcaaatcaatcttagaaaatattttagaaccactt

SEQ ID NO: 72924 - DNA, 873 bp, Zea Mays
atgaattttccaagttctagcaattgtttttgcattaaaaatacatttactaattcatttattcattttatacaggttctggactgggcatcaatttttagaaagctcaagggtctctgcgcaagataacctagactctgggaacagtggccaatggactgcgggtttgttattaaattgtccagggactcttatgcaaaacggatccgcgaagaggtatctaaggtttctggccgccagatcgcgagtagacgaccacgattaaatcggtgagtgttatgattccgtgggcgcttcgatcgtccgatctcaaatgggtggctcagatctattggtaagtgcgacgaagcggcatgcctcgagagtcattagatcgcggatcaacggttcccaacaatcgcgaccacagacacgatcagagccgtccatcgctagatctacgcaccaattctattccgctgtaagggtgtttgcgaatctaatcctagccgcatgatcgtatcggacggctctggtgcattaactcaatcgttttcccacaaccgaatccctagcgtccaaacccagatggacggccagggagtcgtcttcttcctccctggtgaacgagcgcccacgcaaaagcagccgcgatggcctctcgccggcgaccggatgcagcggcgccccgacctttcccgacctacccaatgactctaaaacgcagaaggaataaccgcgagtccgttgggggaaatcttaccgacgttggtggcgcgccgagctccgtccacggcgtccgacgattccacggctgcccgaagtcgatggtgagcaattcccccaatgccagcggctaatcaatcccgaggacgagtcgtacacgttccgcgc

SEQ ID NO: 72925 - DNA, 434 bp, Zea Mays
gttgatttaaacaaaactaagggtctcttatgcaaaaatggtgtagccggcgggcactgactagtatgggtgtgtgctaatcattggatcacacgtgaatgtctaagattaaatgcgagggtgtgcgggtgatgcgagcccagggatgatgatggcctccgcgatggtggcttgccggcgttggctacgcagggcgactgagggctcgattggggtcaagtttgccgccaagctattagaggccatgacgaatttttttgccatgaattggaaatgagagggtggtcgagaaggcacggacgatggtgagggcagatcgtgacggctgtgggaactccgttgagtaattccagcctaacccgtgtatgtttgagcaagagagagggggcatgcaagttctagtacttgctaatgcacttcttggtgctgagatg

SEQ ID NO: 72926 - DNA, 408 bp, Zea Mays
cccacagtgtgtaggcaatggcagtctatatatagtgtgtgtgtgccgtggaaacctcgtcgtgtctgaacactgaactgaaccctgcatgtgtttcggtctggtctggagactggagtgcgcgcggtggtggttggtgtgccaaatagctcaagctcgccatgcatcgatccgtgcgtcctcgtaaatgcgtgcctgtatacagacagacagagagaggggtcagatcagggagcgagaggtgcactgcagtctgcatgcaatggttgacgtgcttggccgcgatcgtccaaacggtgccaaaggaatagtcggatagggagacgtcacctgaacctgatgaggacgacgcaggaggccaggagcacgaccacccgcgagttcgttcccaatgcatgcatgctgttc

SEQ ID NO: 72927 - DNA, 425 bp, Zea Mays
ctttggcatctcccagtcattcacaagaggccacactctgtaggctatttgttcctggactaggtctcttgtgccaataaaggcacaaacattattgaaagccttttggcatgcttcgatatcattcccaagcgcagtagtcgatctcctgatgccgaagcgagaccaaatagggcgttgaataatcccctttatgtcctccctttcaatcagattattctttacataaaaccattcctccatccaggcccctggccacctttttcaaaacattggaactggataactcacatcagagcgaggcccgaagccataacaaccaaagttgttgtgatattgctccttgccagtagccttcgtctcatacagcagctcgtgcatgttgcagaagcattttgcgcttggctctagcccttggcttctca

SEQ ID NO: 72928 - DNA, 559 bp, Zea Mays
ctcatgcacctcataactcaagaaggtgcattagtggcacaacatggatttagtatacacacagtatcaaaattgggtaattatgtgaacatggactaaacaagatgtcatgcttgcacataggttaatcattaaagacaataacatgtattacaaaaggatacaggtttatccattaacacaaaaaagagttaatcatagtgaatatatcgattgaaaagctaccattgaatgattcaaaagatataacatatacaacacacaatcatgattaagcaagcatcattatgaaccattgataacacaggcaatctcaaaagcataactactccaaggataggtagcacaacaaaccaacttaagagcaatactaattagaaataatgcacttaagatacacgggtaccgtcctttggagagcaagttgcagattctcatcaaagtcctttgcttgattcaccaataatgattaaggacctctacaacttatttaactcgagatgaacatgggattagtattgcacaataattcaaccttgggtcaataaatagacaataa

SEQ ID NO: 72929 - DNA, 463 bp, Zea Mays
tttgggccttacaagtggggaagagtgacgagctcaccttggtggcgtattacgatgctgcggagaagtgttgggtcgataagatcagtgtagaaataatgactagtatgtctgatgattctgatgacagcagagagtttgattttgaagattatatcgatgatgctgaaacccggccttggaaacaaaggcatgatgtcttcggcaagtcgttcatgaagaaggggcatatcgaggtgatgaagcacaattattttcatgatatttctattgcgagacttggtggagaggacacagtcctgcatcctaagtaagatgaggtggtggtgttccgaagcttttatgaggggtgggcttcaattcccacttcataaatgttagtggaggtcttgaagaagtttgatatttatctacatcagctaaccccaaattctttggtgaggatggggatttttatttgagc

SEQ ID NO: 72930 - DNA, 693 bp, Zea Mays
actactcgccaagacttaaccctgtcggagggtggtcagatttcacttggataacccgtccatagcttgacggcttccttccccacaacgaccaggtcggtggagagtggccctcccctcaaacggaccacaaaaagccttccaagggggatgcgtgtgtgtcaagcgactggaggagaccaactcagaagagcacccttcgaaactatgcacgttttaggcacttcatggactcacgatcagtgcataatgaccatcgtgggaagggtccaccactaaaccgcgcacacaccgaataaaccccaagcaatctacatgtattacttatgggctcaggggctacatctagcagaggtgcttgcacgcacccgagaaattcggtcttcaaccaaaaaccagtaaccatggactcacactcagcgcgtgatgaccactactggaagggtccatccctaaaccacgcacatgctgaataaacccccaagcaatccacatggattactcgggggctacatctagtagatgcacttgtgcgcacctgagaaattcgatcttcaaccaaaaactagtaaccatggactcacgcttagtgcgtgatgaccaccacgagaagggcccgtccctaaactatgcacacaccgaataaacccacaagcaatccacatggattactcgggggatcgggggctaaat

SEQ ID NO: 72931 - DNA, 1078 bp, Zea Mays
attcctcgtacacgaccaggatgctcagggttaccgagaccagccgttagaatgtctctctcccttttccgcttaaatgtttcttggctctgcttagttgcaattgcatatatgttttttgccgcttcttcgacagtgggatcatcaaaatatacaccagactcagtttcccttggttttctagcacggatccaattagctgtcctttcaccaagttgctcggacagcgttggcaaccctgcaacattcttctcggcgtcttcttgtctccatttaggaacctgacgcttgtaaccacctgtgccaagctggtggcggtatttgttcttcttagatagttccgaatttgcctcacttagcgatatgaaatcagggttgctcctctgctctagaaatactgcccactgacctactgagattttatattttttcgtcgggtctaggtctttctttgcaaactttgtattcatctcagacctccagtttcggaaattgattgcaaactgcttcatcttgtattttttcacgagttcttctgaaccccgaggcaaaacgaacctcgttattagcttattccacatttgattcttgacatcatctaatacatctctccactgtcggattgtgatgtcaagattatctctaactaagaacccaagtgcattctggaacttaggcagtgcctcttctggagctaggggctgaccattcgggctcacgtctgcgattttatatgtcttgtcaggaaacttgtttagccccctgtcacctctgttccgattgctccgcttccttttccttgacctctcggtggttttctcggtcgattccggtgcgccttgggtcggttccggtgcgccttgggtcggttccggtgcgtcttgggtcggttccggtgcgtcttggtattgtgccacagctttttcgagcatctcacgaaattgagacaagacctcctattcatgtaataaaatgcacaagaaatcatgcatgtgtaatagacattgtgaaatcagctaattaattaggtacacacacgaaattaaggatgtgtatttacctcatggtcttgtggatc

SEQ ID NO: 72932 - DNA, 449 bp, Zea Mays
tattgccaacaccaaattgtggtgtggtgtggagtgtaatgaacctttaatgtacaaaataatgggtgtatgttacaacaatagatccatcttcgaacttttgttattacatctctttccttacccagaacttttggcgtgaatgcgaacgcattagaatcactcatcttctttgtcgagttgtgtctcgtcctcatcctctgcacacatagagtgttggaatagcatgccttagaagacctttttagatgtgtgtgatcaagttttcaggagcatcatcatgactgcttattggtcttgtcccatctttcacttggtgtatgttcgaggcacgcaattgtgaataactactcgtacccagtggcggagcgcaagaaaaaacaaggtatggcaaactcacgacgtggttgccatttgtcatggagagacagagaccataggggtcgggc

SEQ ID NO: 72933 - DNA, 712 bp, Zea Mays
tcgtcctcccaccgattcgacggcaagttagagtcccaccgcgacacacccgtgcgatcagtgtagacgccgagacaccgcgatacgcatccaaaaccggagcccgcggccctatctcactcgcctcatgaagtgagctcccagcaatggcagcccctggtgtcctattttctaggtgcgatggatcagtcgggaagggaacaagaggagcacagggagaagcaggtgcttaaatacccgagcgagcaggggagaagagatcggatcataccggccacccgcaaaacctgacgagtttgttacaagggaggagacgaaactggcaagtggggtccacgtggcagggagtatgcacaggtgaagctcagatggaaaggctggccacttgggcccacaaatcggcgaaacaaggcgcaacacagccgtgggatgaggggctgatcgcagccgcagtagctgacccgtggggccgaggtgtcggcaccaaggggagtttgggttgtactgtagaggtgttagttgggccagggagtgagaaattggcccgcacgtgtggtcttccctttttttatcctttttctgatttcttttccaaatttgaaacttcaattcaaattttaaattatgtttgaacttcagctttccaaatatatccaataaaaatcctaatgtgaagataattcctattatttattttataatatttttattt

SEQ ID NO: 72934 - DNA, 383 bp, Zea Mays
ccatggaattcaaagcaactacattaaataaattaaactactataacatctaacacggacaagtccatgaactaagcaaagatcacagtaagaggtgtctctagggccataatgtaagtcaagtccttagtccatgcatagtagcaatatttctttagggctcctttggaatgcaagaatttcataggaatgatttaggattcacaggaattagttcaaaaacacaggaaaacacaagattcaagaatttattctttgatcgataggaagcattagaatgtagacattaaattcatctagtatatcacactaacacaaaatcaagttgaagggatcatgatgcctaagagtgatctgaatttggcagttttaaaagtaatggc

SEQ ID NO: 72935 - DNA, 386 bp, Zea Mays
gtttcatgcatcgtaaagaaataaattacaataatttacatattcgatccaaagttacacacatcaaatattacacctttgttacaataaaagcacaatgtccattctagtgtctcttacattgaccatttaaaaatgttttacaataagtgctagtcttctttcaggattttctctgcaacttcattaagcaatttattgacgacttcgtcaacaatagattcagctatattaatgatctctagtgcttccttcgtttctggatcggccaggggatccaacggttctggtggcagagataattcagctgtaggaaaattaattagtacgaagccataaaaaatgccaaagctgaatatcacaaaatattacctatacgtttttcg

SEQ ID NO: 72936 - DNA, 523 bp, Zea Mays
gaaaatcgggcttagttgtgacaaagagaaccgttgacgaaggtacttctggtgccgaagctgagcaggctgatattgaagaagaagaaaatgctgatgatgaagaagaagattatagcatcttgatcccatcaaaacccacccacctagattttgagaaatctactgtgtctgaaaccgacgtgcccatgatgatgaagctgggttacttcggagaatctgaaaacaagcttattcgttttgccggagaagaaaccactccgatgccgaaggatgatgaagtggtagttttcaaaagctttttcagagcaggattacggtttcccctgaacgagataattggagaagttttggataattatgaaatctatcttcattagctgacccctaatgttatcgttaggcttagcatcttcatctgggcccttcaaagccaagggatgaatccaaatgccgaagcattctgccgagtgcatgaattgcactatcaaacgaaggctagagcagacgggctgcatgaaaa

SEQ ID NO: 72937 - DNA, 335 bp, Zea Mays
tattgaaagaagctcatgattctgattattctatccatcctggtagcactaagatgtatcaagacttgaagcaaaagtattggtggtatggactgaaaagagatgttgctgctcatgtggctaagtgtgatgtatgtcaaagagttaaggccgaacatcaacgaccagctggactattgcaccagcttaagattcccgagtggaaatgggaagaaattggtatggattttattgttggactaccccgcacccctgctgggtatgactctatttgggtaactgtggacagattgaccaaagtggctcatttcattctggtaaagactactcataag

SEQ ID NO: 72938 - DNA, 398 bp, Zea Mays
cgggaaccccgacgagaatttatccgtgtgaggaatggagatggtgaagaaatatccccagaagcattcgtgaaaacctcgcggagaattttttcatctggagatggggatgaggagataaaacccgacgaagatatatagggcacgtttgtgaccttggcccgacggcctggctgtgctcgcgggatgcaacgcatgtgtttgtgtggcctgacttgctttggagctcggttctgcgcatgcaaaagtggctcttcagactggcttccaagaaacgaaggcagactccgttttttttgagctctcctggtcgtggtgcaaaccagctgctcatggttgctcctaagaaacaaaagtgacttttaacctggctgtctacgtgtgacaaacatcggctc

SEQ ID NO: 72939 - DNA, 1768 bp, Zea Mays
caatggtcggggctgccaggcccttgaagtcttggagtaaactaagcaggcttttccaccaaaaggaaccaatatttgaatcgctagggagtctgtttgtcctgtagtagttgttccagaccaggttaacccagggtaagtcatgattgttgaagaacttgtacacgaatttcaaaagcaaggccttgttttacgtctccaacctgaccaccccaaggcccccatttcgcttcagctgggtaatcatgctccaaccagcaagagcagatctgtttgagttcacatcattgcctctccagagacaatgcctccgggaggcatcaatccttttgacagtggaggcatgaatttttagcgtgctcatcaagaaagtcgggagagcagagaaaacagagttaactacctccagtcttccggcctgggacaggagagcagaagtacaggacagtctcccttcaatcctttgaataagaggtagaaaatggcagattctgggttttgacgggcctagaggtacaccaaggtaagtgaaaggcatagaacctgtctggcagtttaaagttctggctagaatttccaatcgtgctgggcagacattgaatgggtacatacttgatttaaggtaattcactttgagacccgtcgaggtagcaaaggagtttatagctgctctgagaaaaaataattgtctggggcaagcttccaagatcaagagagtgtcgtcagcatattgaacaatcgggaaatcttgaccacagttctcagtgagtggcagctgaagaagaccctgctgtctcgccttattgattatactttgaagcaaatctgccgctagaacgaataaaagaggtgaaagggggtctccttgtcgtaccccacgcttgcaatgaaaagatttgcccggcacaccattaaggagaaccgaggacgtgccagaatggaggatatccctaatccagcccagccatttgggcccaaatcctctgaaggacagcacctgaatgatcagatcgtgctcaactgtgtcaaaggccttctcaaagtccagcttgagcacaatgatttcttttttggaaacatggcacaaatggatgtattcataagcccaagctaggcaatcctggatggatctacctttgatgaagccatattgatttttgtgaacaagggaggtcatcactgtctgaagacggttggccagcaacttggtgatgattttcatactattatttagaagcgagattggcctaaaatctcccaccaattgagcattctccttcttcggaatcaaaacaataaaagaaccattaatacttcgaagacagacatccccttgataaaattgctcacataagtcatagaaatcctgagaaatgatcggccagcattttttgagaaaattggtgttgaatccgtcgggccccggcgatttgtcagtgggaagggcagcaacaatgctgtcgatatcttgctttgtgaaaggctcctctaaccaatgtaagtcttcttgcaacgaaatcaggctagagaggtcaaaaacattgtccgaaaagtcagaagaacccaagcgacatttgaagacattccacagaaggccagctttcccgtcatgatctgaaaataatgacccattatcatcagagagcagcacaattgaattacgctgatgctttaccgttgcgtgagcatgaaaaaatctagagcaaatatcccccttggtgacccaattaatggaagcccgttgtttccaatagattttctgaatttg

SEQ ID NO: 72940 - DNA, 315 bp, Zea Mays
gtgaattggctagacaagtatcaggcagttatcagttgtgataaaaggacaatcaagttggtgtccccactaggagaggaagtggtgaccgagttagtcccgcctgagccagaaaagggaagttgttatcagatggttgtcgatagcaatgaagcagacccaattgagagtatcaaggttgtgtctaagtttccagatgtgtttccaaaggacttgccaggtatgccaccagagcgaaaagttgagtttgccatagagcttcttcctggaaccgcccccatcttcaagagagcttacagaatatccggaccagag

SEQ ID NO: 72941 - DNA, 297 bp, Zea Mays
gaccagacccaaaagcagacacaccagagaaacagtggacaaggtacttctgttttgaccttctgctgtatcatgctagcttttggggcagtttggtatagctcccagagcaggttccaggctgaatccaagagaagctccgccgaatagttttttaccgagaagtgattctttgctgatttcatgaagcgattctctaaaatgaactagggtgccgggagctgaataaaggtagcttctaattcacttcatgcacagaatcactatgtgcacagagtttatcctagagaatcttag

SEQ ID NO: 72942 - DNA, 570 bp, Zea Mays
ggctattacctatgcaatatgattaaatgatctaccctcttggaatgccctatcccttcttttatagtccaaggagggggacaattacatgtttaggtcaattacatgatatgaatcaatgtcgaatacaaggtatgaacaacaacgaaccaagagcaagcctatcccaacctattagggatcctatccttatcggtagaagattttcctgcttatcaatcgggttctaccatatttacatagatatcaatcttatcttctaaccttgtaaattccatccaactgaacgatgacatttagggctttcataactttcttggtggatctcagacttaaatcattcatctccagttcaactcccacccctgcaatgtggcaactgcaatgtgcgatggtaccatgtgtttgatggactttagccttccgggggaattagatggagctaggagaatccagtggtggaaaatttccagtgatcagttgcaaggagttgccaaaaaaaggtctaaattctcttattattctttggtttggatactttggaatcatatagaaatgattgtgttttaa

SEQ ID NO: 72943 - DNA, 281 bp, Zea Mays
caggcggatagctattacctggcagccttatcgggtcatcggtggcgtgaatcgcaacggcggcggcacgaatcgcggcggaggtcatcggcagtgagatgcgcggttgatctgatcttcatcaggtactgtaccatcgccgtgcctattcagtgggtctgacagagcaacttgaagctcggtttcttccagatttcatacatcaaccggttcaactctctgtatcaaaattatagtcccatgttctagctacaattttgttatggggatcatgcccaaac

SEQ ID NO: 72944 - DNA, 775 bp, Zea Mays
cttcatacctttatgtgctaccatatatctctcatgttataggagaggtgggaagatgggggagtgtcatggtttcggaaaccagagggacaataaaatttttgttcgggatgggaggctagcgcagactcacactgaatggtgaatcgcatgtgactcgaataaatggttaagatagagtgattatactggtccaggctttcgcctagtccagtgtagtactgatccttgtcttgctctcgagatcgtgttacaacaggtgtgtgctcaaaatgagagagggtcctgcccttttatagttcaagggaatgaccttacagatgggacttgtttcatattggcaagggcgtgatcttttgtcttcggtagtcctgctgagtagttttcctggcgtcgcctttaggctcatgcgtagtcgtacacctggcatggcgaaccaccttatccgcctggtatacaggaccctctagcgagtctgactctgaggtccccatagcgacgcttgatgggtactacacggcagagtcagggtatgtttggggccgtgcatggcgtgaccttgcctctttgtcagaaaccttgtgtcacccttccggcatgcgtaagcatacaaccggtatggtgtattgctccgtcctgtccggtatgtagattactgtagagactccggtgcttaggtcctccatgactagggtcggttggacccacaaggcgaagacggggagcggtaaagaccgtatgtggtgatgtgatgttacttcaacatatacttccc

SEQ ID NO: 72945 - DNA, 756 bp, Zea Mays
atttggagttcatatgaattttctacaaattaaacaagtttctgcatttaaatatgtactaaaaactattttcctggttttattaatttatttggacagggcctcaaatactaggaagcgcaggggcaaaaccgaagttgtcccaagacacagatcactggcgcatggagtgcgggtttatttctaatacaactagggtttcatctgcaaaatgacgcgacaaaggggtatggagcgagattagccgtccgatcaacaccggacgcctcggattagatcctggctgcggtgaattgttaagcagtcgcaaccgttggatccaagatcgacggccacagtcatagcgcgtgggactctattggctggttcgaatcacgtccgtagacctaccacagaacgacccagatctcatccacacgaacaggtatgcgtcgttctaatccaaccgtccatacttaatctaacggacccgggttcttcgtctacatccagtcaggtcacggcagcgcgggtactccgcgcggcggagcactccgacgactagcgcgatagacgccagggaggccaaacccaatgggcgactggttcaacacgtcgagtagaacgaggagaatagaatggttaaggactcaccgatgaaggcgttatggtgtggtctgtccacggaaggaggcggacgcgcgacagtgaccctgctccgacgagcgattcagcccacgccgaccgatctccaccgcacacaaggtcacggtcgag

SEQ ID NO: 72946 - DNA, 589 bp, Zea Mays
gacaacactgggatagttttgtcctaaccttttacccaggaccaaacaacctaatttgaggatcgtccatcccgtcctatcattgttaactgatcatcaggagctaatgctttggagttctcacgcatgcatcatgcagactcgacctgagcttgctagactgactggtgacaaacataaccagatgctatctagtcggcattcacacgtggcaccataactcccttcccttgcaggcgtacatgacgacataactcccttctcattatgtttttgggatataaatataataatgaaacatattgcttggttcgtctctgcgtttgcgtttcaatctcgggtaattgccaaattgtctcttgtaatttcctaggagtatttcactgctagtcgtcagaacgagaggggtcaatgacatatgagccccacgtgtgatagggtttagggtttaaggttgcaccctccctctagaccttggatatattgtctttcaccactaccaccactactagtcgcctatttaaatctaagaagaaagtgaagatcttaatcccagtctcctcttccatctccagctgctccagcattt

SEQ ID NO: 72947 - DNA, 350 bp, Zea Mays
ggaaaaaggaagatttaggtacaagttagaatgaaaggaagttgttttacccttttataccttcacatagagacgctctcttcattgtgcgttgtccttagtcttagatgcttaagacctatacttaagacaatatatggaaatattttgcacaagaaagagttttacaactagtgatccttttctaagtcattgttagcatatatcaaaatagatcacaaattgcatagatgtatcatgaattctcctttttaacttagtgcatatcaagagagatatcgattgaaattacatgaggcactaagaagcataagtgtgagttgaagttattcaatgatcaaacaaataac

SEQ ID NO: 72948 - DNA, 442 bp, Zea Mays
ccttgcattatgtgtgtccttggacttgcctggtatactgagtagtgtgcaaagaatattttcacatacatttttctctatgtgcatcacatcgagattatgtggaagcataaaatctttccaatacgacaattgccacaacctagatttccggctataaatctttggaccgtcactacgcttccttttatttccagtaatgtcagcctgcttccctggcctgacatctttcaccttctctagctcttgtaggacctcatccacagtaaacctgccaggctcaacgttgttttcacgcttaccattgaaatccaagctattccgccatgaatgtgtccttttaaggtaacgacgatgtccaatgtagcataacttgttccttattgcagagacaatggattcttgtcgcaataaatacatgcataatacccttttgttgttt

SEQ ID NO: 72949 - DNA, 727 bp, Zea Mays
gggaataagacctcaacatcagcacctcttcgtccaccagcagcatgaaactctgaacatgtcaacaaatagaggtcaagtcactactaggcactagatatgtgccattgctggactgatggaaactggtaagaataagatcattggtgctgctggactgctgtgataaactggtcgctgctatgaagctaagaactattgaaggcaatagaatataaaagtatagaacactagatgagcagggccagggcagactgcaaacaaatgggtattgttgcacagaatgcaaaactgcaaacaagggggaaggaggggagcagggatgaccttcggatgacgagctcatcttgtgtgtcatctcatcttgtgccttgtagatgagcagggggcagggatgaccttcaagcatgagctgcatgccgacgctggtggacgatggagagccctggaggctggagcagccgacgccgacagagccacagaggacagaaagtttaggagagacgagaggggcgcaggcacaggggaggctttagagtttaggggcgcaaacagatttatacagatttatgcagctacttgaccaaaaaacggtgaagcccaatagcacatctagcccgctgcacactggtcgaccagagatggctaatcgaacgactaatcagacaatttggacgcctaatcaatgattaggacgaccagaaaaataaatgacgtcgtccccctg

SEQ ID NO: 72950 - DNA, 498 bp, Zea Mays
ttgtttttgcgaattacaagggcgaaatcagccctgatgagtcaaacaaaaaatttgcggaggttgtcgatgttccaggagtgctccaggtcttcgccgtttggcgttgtgagcctgtaagcgctgggggaagctttcgtcttgactataaaggggccctcccacttgggctccagcttgcccctggactctgtccgagttgttcggacgagtacgaggtccccttcgctgaattccctcgggatgactgcgtggtcgcgccatgcttttgtctgggcttggtatttgtttagggcctgcagggcgaagactcggtctctgtcaatgagatcctttgaagttggctcgtccacgtcggggacggctgatggaactgttcgcggggacccatgttttatttcttgtggggtcatggcctccgatccgtatagaaggtggaaaggagtaaacccggtcgccctgcactcagtcgtgttcagtgcccagactgcctcgggt

SEQ ID NO: 72951 - DNA, 438 bp, Zea Mays
cttcagggtaatatggctccggtggaggtgaaagttcagctacatcataaaaaatatttgttaattccgaagctgaaaacgaatttcgaagctaaacctcagtaaaggtacctataagccttgcatgcttggtagcttcttcagttcatttagcttcttcttgagcgtcgtgagattgtttttcatttttctaatcgcttcatcagctatctcacggccgcccttcatccaaacctcggagtaaaatatccagcctagcacagaagcttcagccgaagggtctttgatgtcatccgccgagaaaacaaatcctggctaaactatagccttagcatgttcgcagccagctttctctaagatctacgtggccctcgtgtgccagcgaatgcgcagaagtctcctcggtcacttaaaatttcgtcaaaggctttgacttct

SEQ ID NO: 72952 - DNA, 395 bp, Zea Mays
cccgcgggtacccggtacccgggtgggcacgggtacgggcaaaaacttgtacccggctgcaggcatgagtttcttagcgggtatattttaatttcgcgggtacgggtttgggaacatagtacccagcgggtacgcgccggttgccatctctagtcgcagcgcaggtctctcaggagtcatcagctagtaggtagctcatcatcggtatacgcatatgctgttgactgtccaaatataatcaccggatggatgtgctttccacctgcatgcgctagctcttgacttccatgcgcatggggggcctgattaatgaagctcccttcttgttctacatactggatcactctgtgcgcggcctgtgggatcgatcggccggaacaggtcgctgtctgcag

SEQ ID NO: 72953 - DNA, 424 bp, Zea Mays
ctcttgtattgtatctatactaaacatgcatcattaaatgatactaaactccatcaaatgaccctaaacatgcacgtcacgacttgcggatgtctcaaataacacttatatctgtatacatgaaaatacacctaaatatcctagacaacttctctttgccatctctcacacattgctactgatattactataactacgcacccttttaaattatgtgaacaaagcccactatacggtttgacgccataaaattctcacatgttactctctcctaaattatatgattttgttctaccggttgcagtaattaggttaagaatgccagtgggcaagcataaactaatgatgaaaaaaccatagcatgaatgatatgccgaactcaaacaagcctgactaagtatttctttcaaccattcacggttca

SEQ ID NO: 72954 - DNA, 562 bp, Zea Mays
gagcagtatcacaacaaattcggttgttatggattcattgctcgttctaatgcaagctacccagttccaacattttggaaaaggtggcccgggtcctggatggaggaatggttttatgttaagaataatctgattgaaagggaggacatataggggattatccaacgccccatctggtcttgctttggccttcaaaggccgaccgtggcgattgaaaatgatgccgaagcatgtcaaaaggctttcagcaatgtctatgctttcattggtacaagagacctgatccaagagcacatagcctacagggtatggccacttgtggataactgggagatgccgaaggagactgatgctgggaccagccaaggtggattaattcgtttgaaatataccttcagatacaaagaccggtttgacgaaccaaatgacgactggctaaaatgtattgaggctactagcgacgatttacttggggcatatagcagagccgaagatgatgctttgtcctcagccttcgggggtcggggcaagaaaatgttgaacagggtttttgatgcaattg

SEQ ID NO: 72955 - DNA, 1190 bp, Zea Mays
agccattctttgcaaggcttcttgaattgtttttcaaacttaaaatggtaagcaagtcgaacaagttcatgcttcttccccacttctttcctcttcggcattccacagccacttgacgttggatatgttctgtttgccaagtattcttgcaccaagtccctagtattgatctatcagctaccactctaaattctatttcagccaactaacagggtgaccctagttgcatattgcataagggcctggtcattccgaagctcaaactcagcggactcataaccatggtcatcagcttctccctctttttctcgtcagccttcatatagaaccactcatttttcaaccagatggccacttcatgtggtagctaaggactggtgcctttgtatcctttcgatacacaaaattataacagccaaaattttcatgaaggccatctgccctggccttcgtctgataatgcagctcgtgcactcggcagaaagcttcggcatctggactcatcccttggcttcggagggcccagatatatacgttgagtctaacaataccgtagggagttagctgatgaagatacatctcaaagttctttaaaactacccctatcatttcattcagggggaatcgcagccctgctctgaagaagctcttgaaaacgacaacttcatccttcttcggctccgggataatctcttctccagcaaatcgaataagtttgctctcagcctctccaaaatagcccaatttcatcatcataggcatgtcatcttccgtcaaagtcgatttttcaaattcaagatgactaggcttcgttgggatcaaaatgttgtagtcttcttcactctcatcaacattttcaccctcaaccacagtttgttcagctttggaattagaagcaccttcgtcagcaacctcctctgccacaaccagacctgatcgcttcattacttctgaaattggcgctgtttcggtggcttcggtttcggtcccctcacgagacactagcagatgatcgcactctggccatttcgatgattttaccgtttgacgaagctaaccttaaatgatgaagcgtttgctcaaaagcgcattgcagaaagctttgactatggttaaattttttaacagcacaacagtgcaatgacaatgaatgctgtggtaactcctcaccaaccagtctgtttatatag

SEQ ID NO: 72956 - DNA, 677 bp, Zea Mays
ggaatgtccatctagtgtaatgcctcaatattctataaaacacacaaaagccaaactgaacttgtagtttagtgtgtactcctgtgtataaggagtttgccagaaatcattgaggattaaccatattggttcgaatgcttctaactgatgtagatgtggatatacctgggattaatatcatatccacatttgacttattggcatttgatctattccgcggggatgcctgcgaatatgatccatcagtcttaatcaaagcatatgttctgattgcagattcacgtggtctgtgataactctcctccgattaattcaccctgatggtgatttgcctcactgagaggttcatcttgatgacgaaatttctagcaatgcgcgcaatatcattgtgctaggaatacagagcaatgaatcttttgtttttgggaaatgacgaagatcattattaaatgtgggagacaaatatgtcaacacctatcttgcctctatagattgcaaagggatccaaaacaaagtcctaggcatgagtgctttaagctctcttatcgggtcattgataaatgcaatcgagcctgaaccaataatcgcaaaatgaaagtcacgagcttgaagttcgaacatttatgggcactattgaaataatgtgtggtgaatgcgatggttcaagtggtcttgtg

SEQ ID NO: 72957 - DNA, 698 bp, Zea Mays
ctgaaatctagtgaggctagtcttgctgcataagccgaagctcataaagccaaagtggaagagctaaaaaagaaggttgctgaagcaaccgaaaaatttgaaatcgaggctgtgaagcaagagatttgtgagatcgagaggtcaagagcgcaaaagaacgccgatgagcttcgtgctttgaaagaaaaacgttatgatatatccttggaatgctccaagaagttaaaggacaactttgctaaggttagggcatattcttctgagcaaaaattcatctgtggcgaccctgatggagttgtcctgtggatcagcggagaagccaaagcttttgacgaaattttaaatgaccgaggagatttctgcaccttcgctggtgcacgggggccacatcgatattagagaaagctggctacgaacatgccaaggctgtagttcagccaggatttgttttctcagcggaagacattaaaaattctttagccgaagcttttgtgctaggcgggaaattttactccgaggtgtggatgaagggcggccatgagatagctgatgaagctattagaaagaatgaaaaagaatctcacgacgctcaagaagaaaccaaacgagctgaagaagccgccgagtgtgcaaggcttataggtacctttactgagatctaacttcggaattcgttttcagcttcggaattaaccaac

SEQ ID NO: 72958 - DNA, 380 bp, Zea Mays
aaataatctcgtcctcgagattagtagaaaagagaggatataaagtctgtagattcagttgaaagttttcttttagtctataataataatactagttaggattaggaagtagtaagagaagcattggtatcttcttcgtttggccattgggtagaggtagtgcgggttggggtaagaaagattaggatgaggagcgcttttaagccgtatagtgcatcctgatttatctggtttgatgttaggttgggatggatggttatcatgaacaagttggttaagtcgtttgtccataatagagttggtctaaggcatcaatttcggttaaaacatgtctataggagtagggtctaatctatttcaccagcattaattaacttgtt

SEQ ID NO: 72959 - DNA, 315 bp, Zea Mays
aacagggctgcatccgggtatgaagctccaaaggctttggagaacttttcattggaaacagggtttcaagtttctggtgatatcattctcctagctttacttgttgtatactgcatttaacttatattctaaccatttgtttttttcaggggaatctagatctatttctttgtggagacttaactactatgagtgggcaatgcaaatttttgagcaacactccatgagcgagggggcgtaccaatttgctcttgctgcactagaactagttcttctcgacgggatagataatggaattgaagctgagggtctcca

SEQ ID NO: 72960 - DNA, 843 bp, Zea Mays
cttcgttgctcagcgtcgcgcacgaccttgcgtccatataggccgaatcgtcgcgcctcccctcctctcctcttccttttcgcctttcaacacccatgaatcgcctcgccgctactaacccgaggaccatatccaccactgaaagcctagggagtcgggggaaccacggttgccttcgcctgctcgcctcaacacgctactcaggtcttcgcctagacatcacggaagttgtggtggcaaaaattggtgcgaaagggtaccacgacgttggtaattgctcgtcggactttggtcaagacatcaccgcgtggccagagttgtccgcgccatagtcagtggtgagtccgcccccacgttattcgcgctattcttctccgtgtatagcatcgatcggtagtcaaagtatacagtaaggcgtgggttggtgatttttccggcgtgcctccgctggccgcttgggcggcgccaccgtctgctcggttgtgtggaggaagatgaagggcagaccgcttgatctaaaagcgacggtggagattagaagtagctcacctgttcggctcgtgcgactgctaaccgtcccatccagatcagtcgtatgcggtgtgatcgggggcattttaaatcataggcatccatcttcgatccgacggttccaattgtttaccggttcggtatatgttaaaactaatctgagccctcgattgagaatcgaacgactgtgatctgcgcataccctttcgcggcgctaatcttacaaaagagcccacctattattttaaattcaacccaccatcctatcagctgttcactgggtcttagtaattttattccgagacccctgtg

SEQ ID NO: 72961 - DNA, 566 bp, Zea Mays
gcagactgctcaaaatacagtaacaaacccgagtgagttcgattaaatccaatgccacatgagcaaaagaacatgcaatccatcatcacataacaaagcacgaatggtcgacgatatcaatcatatgtttgccctttctcgatgttctcgagaatcctgaatgacaacttgacgtagatcctggggaaatcagtaagtagctaattagtgtcgtccttctatacaacatgcttcagttctagattctagaaacaacttaattgactgattgatttttttgctactcttgcctgaaacatgtggctcctaatgctacacatataggcaaagcctcgagaggcaccgagcctgactgttgttattctataaatgatacgatcatatcattgattttgttattgatgatatcctctgcataatttttttatcctagtaatgctacttctatttaccatgaaaccatgcaaaattaactgaatttcacacgacactctatctcacaagtcatatactcagtgtcaggaatgattgctctgaaacaaatagctaaggtgtacaactgttgc

SEQ ID NO: 72962 - DNA, 356 bp, Zea Mays
tagttggatggttttgcaagtgttggatgagaggaagaaaatacacatgctcgcttgtctagtcgtcttgcctcactgagttacacaatgcgcatgaatgacccactaaaatcaagatccaagctttacgggcgtgcgacattcttttgcggttttattttgccaattattctattgtagattttttggtgcaatttcttgggaagttaatctgttatggattttattgtggaatttttggaatcacgaaacctacttggttttagaacacctccacatgtctgttgcgtcgtcatatacactactagcttcatccccatcatcgcatgaatggcccaccaaaatcaggatccaag

SEQ ID NO: 72963 - DNA, 746 bp, Zea Mays
cttagacatcacaatggctgctgctgcttgttaattattacttcttctttttaactattacagagtagtctatagttggataatgatgttccataatttcacatccaaatgtcagatgttggtgtgatgagcggttgcatcctgttcattcagagggaccttcacatcaacgaggctatttaaggtaactgattgatgatttgttggcttaatctaattgacaaatttaaggtaactgattaataataataacaacactatttagatatgtataatcattcgtatgttatcattcaatttgtgatatatatatttttattttcagtgttttgtgtaatcatgtcatcgagaagatatctatctggaagtgaaaaaagaaaaagaaaaaaacgtgttgatgatctcatagactcacagagaggagctattgacaagtttttcaagagcaatgctagtgcttcgacgaattcaaatgatgcgtttgcattggcaataattcccgtgaggacagaggaaccaaccaatgagaattctagagaagaagaacatgttgatatcaacgccgatgataacaatgtaagtgaccatgacaatatgtctaattcatcagatgcacatgcacagtttggtagtgttgatgatcaacctgacatttatgatccaagaaattgggataatcttgataataaagcaagagacatattaattgagaaaggacctataagagaggaaggtctcgagttccc

SEQ ID NO: 72964 - DNA, 1224 bp, Zea Mays
atttgtctctcaatttcgtccttttgagctgggttgtaatgatagggatgaagacaaaagggtaccactccagggatgagagttatggtgtggcaatgagatctgggaggaggtaggcgtttgggtgggtcaaataaggaggtcaattcaatagaaggcctttgatctcctgagaaagatgttgtatgttgggcgtttctagaattggttgcacttccatagtacaccataactcatccaaccgtgccatatgatataactgaaaggctgacacttgttccaacttggagcaatcagttcgctgaccttgtagaattaccagctactgctcatggtaaaaacataaccatttctcctgctagtgaacctgcatcgggctgtgggaagatagccagtccatacccaagatgacatcataacactgtagaggtaacaccttgaggttaacacacaagatatggctttgaatgttcatttgacatcgaggaatttgatgagtgcaacatataacttgaccattcaccactttgacaataacagactgagatagagctactaatccaggaccaaaagctgccaagagctagctaataaaagaggatgaactacctgaatccacaagcataaccactattttggagaacatggatgcaattaatgtcaccgtttgtggggcttcaataccttgcaccgcattcaccgataaggtcattaaatcatcactagattctttagttggctctaaaatattttcctgagtcccagatgtatccaatagctgccagagttcctccaccacatgcaaagggacagtagtactgcatttgtgtgttggaccccaacgaagcccacatttgtaacaaaggcccttagcttttctaaaagccatcagagttgcagctttgtgttcatccaaaccaattttactgacttctttgtgatgcttgacatccccaactgaagaagcctgagatagaacagctagtgaaggcaatcgagaggtggtgagattcccagtagtatcagttaatctacgagttgtagcaatgttgcccaagtgtagatttcctcctgtaacatggccaaagaaacaatagtatcaatgaaatggttgactatggctgaaacactgaacatagggtcatgtgccaaaatttgatgcatcaacgtatcagaattgtccacatattctgtaacactatctgattgtcgaatatgaaagaa

SEQ ID NO: 72965 - DNA, 797 bp, Zea Mays
agaatgtttattgcaagattctaatgttcaggcgatgggcttgctggaattatcattgagctctttccagtttctaatactggacggtgatggcttgcaagatatttcgtcggagcaactaattgactctggatcatacttggtgggtgctgatttcaagccatcggcatgttgaacattagtgaccagaaaattgtgaagatggagcgagttgtggcacggctgaagcatggtgggtcttctctatttggaaaccaaggtttggggttgacaggctatggggtgttgcctctgacacctcaggtatgttctgaaatgccagcaacatagatagaacacaaggtgctagggcctccagtggttgcacaaggtactgcagctccaatgcctactgaaatgtctcttgttgatgtcaggtgggatgccgaattgtttcctgatctcggttcgcatgatggattgttctggcaactagcacaaggcaatgagttcatgagtagtcatgagaatatgagggacaattttttcctccatgtttgttaggtggcttcagttctggacatgacaacttaatgctgttgtcaaaagaacctgccatgcattctgttcaccacatgctcaatgaaatgcatcttttggatgttgtttgggatgagggtttgctggatgtagagggcttgcaaggggttcagtgggagcagccaatacagtgtggagagtacttgattggtgttgagaacttgattatattgttcaagaactatttcagaagtcggaagctcacgtccattacagtt

SEQ ID NO: 72966 - DNA, 396 bp, Zea Mays
gttgtaagatgagtgtactggaaatgttttataggatcgatgtaattattaatgatcttaggtacttgggccataaggtggatgatgatgacttctcccactaattcttgagaagtttgcctctaaggttttacacattggttaccatcattgtggtgttacccctacctaagtactaggtgatgtggtcacacaagacacataccatgtggtaaggaaagatggagacgttgatgatgacaataataagaagagtgtgacattgaagaccaccacttcaattaaagggtaagagcaagaaggaataatcaagtgacgaataagatggatgctcaaatgatgaagatgaggagatggatctctttttgcatcagtttggcaaatttatgaagaagg

SEQ ID NO: 72967 - DNA, 1461 bp, Zea Mays
tagagagataactgtttctggctcctcatcaacttcttctatggcagtatcctcttcgaagtcagctacttccaaatagaataaccgagggcatcgatggccgcgaacatattgttcatcacagttgtaacaaagccctagctttcggcgttctgccatctcgccaggtgtgagcttcttgaatggtcgctgcggcgctgcattgcctatggttggcactgttggctgtgttgctgggattggaactgatggtggttggggcggtctcactggcttggtgggtgctgctatgacgttgccatcaagcacttgagaacgtcgttcatatgcacgcgccaagcttagtgcgtgattaaggtcccgtggtgccatcaactcgacatcaattttgatgcattctgggaggcctgcagtgaatagttggactttttgttcctgggtgaggggcgccgtatgggcaagaaggtcccaaaacctctcttggtagtcttgtacggttgtctggaagggaagccgagccaattcaccgagagggttgttgcacagcggaggaccaaaccattgctggcaggactgcttgaaagaattccatgacaatggtggctcgttgcgctggagttgacagtaccaggtttgagcgactctcgtcatgtgatatgaggcaagccacaccttcttctcttctagcgtacgctgtccttcaaagaattgctcgcatgtgttgatctatccaatgggatcttctttaccatcaaacaatgaaaactccagtcgatgaaagcgaggaacacttgtcactagttgcgagaatggtgctcctaaatattctggtggtggtgggagaatgatggtagtggtaatggggaatgaggaaggggtagacgatggatttgaaggggggctgtggaggtaggatgtgtcgtgactagcaaaggatcggtgttcacctgtaccttggggatgccgccgtagcccggtaggccataggaaatgtcttgcgggaaggccggtgtggatgaagatggacatgcctcgatggccgcaacacgagaggagatggaggacatctgctgggcaaaatcgcagagctgacgttggacttcacctagtgtcgcggcgatggatgccagggatggctggagggcagtggctgtcgtgctatcttcatcatcgtgacctgacatatctgataccatattgtaatggtcccgacttctgagtttgtatgagtgggtagtaaggcgaggccttgaggatcgagggcgagagggagccgtgcgcggttgagacacaatggggcaaggagcaatactcttcttagattgatctttgctaatcctcctaggtacaaactaaggactttatatagtccagtacaggcgcacataaactgctgcttcccctacttattctctaacaaacttctactatctctccttttgatatctaatctaacaaact

SEQ ID NO: 72968 - DNA, 470 bp, Zea Mays
acgtcgcgctggggaggttcttcccctagcacgttgggttcgtcgtcagagatgggcaatgactccagtctcccctaaatgaagaggatgtcggggaagaaaggagtaggtgcagcggtgtgcttcttcccatcctcctttgagggcggaggtatcgggtgatcgtctgttgcgcttttccgccctggctcagaatattcatctctttaagccgggtgatccgtgtccactccttagtgggtgaggtggacaacagagttcgttgggttggggaggccgtggttgactggccttctaccctctgggaagtcccgagcctggcctcgtgcgggaccatgtcccgtcgcgctattagcaggggcacagttcgtggtttcacagcagctccctttggcgctcccgaggaggatttcttctcgagtggagtagctatgcggtgcagagttccctctacgtccgctacgcaggag

SEQ ID NO: 72969 - DNA, 370 bp, Zea Mays
cttcggtccccaagcctctgcctgaccttcaccatcgcttagtcccttgaagccctttccttctagtctccactctatcaagccattgacccctagggcacctcgagcatcagccttgtgacacctcttgctctaaccttcggagaccttgtgcaccagcctttggtgcatctattaccctcggggcaccccacagaatggcccacccaaacaaatcctcggtccaacacacatgtatgtgaaaaaataatatgaggtggaaagtctagtattgtaatcttcttccaactattgtagacatgcaagctccatggatattttgtcagcacaaccctctcccagagtccaaggcaccacgctgcctcgccga

SEQ ID NO: 72970 - DNA, 694 bp, Zea Mays
gttggggctcaggctagagtcccgttccatgcacttgaaaacttgccttgcccttccctagtagtacactacagtactggagtctctgaaactaatgatgcaactgaagggatgccatgccccctgggtttctgtccgtcctccaggaagggtcggggtccgatctgcagcagcagactagtcactagtgtggtggtttcctaggattccaacatgcaaaatggttctggtcggagtgaaaatggttcggtgtctgtcagttccttcgaggtagtatagtagacagtggtctgcttccacacaaatggtggtgttgagcctttgagatggctccatctatcacggtaggcagctggatttcgtactcctctttggcctttggctcgtgctgccctactgtactgtccgtcctcgaacagaacagaacagtcaccaaccaaaatttaagatactcagttctgattgttgatgcttccatctttcagagtcttaacacaggaacatattcctacgcactccctatctgttgttcactgtgctctttgtcgcttcttccctggccgttgccctctccattggttgatgcggccctgtactgtactagaggatgtgttgaggttccgcccgcgacacgagagagaggacctgagaaagggtgggaaaaaaaacaagttcccatttgccttgtttactg

SEQ ID NO: 72971 - DNA, 827 bp, Zea Mays
gttttatatgggtcgtgaagagccaagggttagagccagacgccaggtgtttctgcaatattcacaaattatcatatcacacgaaggcgattgggaaagaacaataccacaacaactttggctgctacagcttcgtgccccgctcagaggccagttatttggtgccgacatttcggaaaaaatagccaggctcttggatgcaggaatggttttatgtgaagattgacctgagtcaaagggaggatataaaagggattattcagcgccctatatggtcttgcttcggcattaggaggccactcattgcacttgggaatgacgtgcaagcgtgccagaaagctttcaacatagtgtgcacttatatcggcacagaagacttggtccaagagcatattgcttatagagtgtggccacttgccaacggatgggaaatgctgaaggaggctgccgctagctccagccaaaatggcttagtctatctgaagtatacctttcgatacaaaagccagtttgatgaacctaatgatgactgtctagatgctatagaggcaactagcgatgaactgcttggagcgtactcgaaggctgaagacgaagctatgacaactgccttcggtgctcggggcaagaagagattgaaccgggtgtttgatgttatcgggtttgtgtacccagactactgctatcccacgcgaaagcaagggaagaaaaggaaagctgctacctcagcatcttctagtgtgtcgaggtcgaagaaggttaaagtcttgatgcgccgaccgaggcacattgagacggccgaagtgccggagctaaatgaaaaggtg

SEQ ID NO: 72972 - DNA, 342 bp, Zea Mays
ctttggcaatttgctgttccgataattgtttccctgaagcatggcgaacaatgtatccaaaatcaccatgagaagatgcttcgggtatcggcaatgttagcttctctggaagatctacctttacttgctccactggcttagtctccaaaggtccggcttcggcacaggcaagagaagcgcttgcagcagcagcttctcccaattcttcaattttgtcctcgggaaccatagtggaagcaggagtagagaccttcaaagatttcaggacaacgtccagaacactggtcattcttctcccttttcctaggagttgccgctggagcggctgctatgtatgacaac

SEQ ID NO: 72973 - DNA, 435 bp, Zea Mays
gtttctgggcagatttggttgctgaatttgtggaagatgcacgtggtttgtcgccggaggaaggcggtggtgctggtcgactcggcgagggagctggtgttagggtacggccggtcatggacgtagtcgtgcgctgttgccatggtgtagattttcctgcagaaacattagaccttgcactagcacgtcgtccctgcacttcccttcagctttgcaagcaagatgaaacaatcgggttacattagcataatctttataagcaaggatgtcctgaatttccctatttaactcgcccaaaaatctagccatagcagattcctcaccctcctctatgttacaacgcagcatacccatttgtaattcctgataatattcttctacactttagtaccctgtctcaattgttgcaacttgtttaacatatcacgtgcataa

SEQ ID NO: 72974 - DNA, 557 bp, Zea Mays
gtaatgagtgcatggtcaccagttgcctcctttgtcctaggaccacctccttatgatcaagtccctgctaaccaacccaagtcccaaggttagacctacaccaaagggacagaagggagggatctgaaacccgtactgtcaacagtatggtctcagaggcaaagcacatatattgaggacactaaggggctaagtaagtgagcccgatgttaccaagaaaccactattgtatgtttacatttactttcgcaagctttcttcactgtcatgcaaatcaatacaataatgatctagtatcttcgagtccaatagtgagctatgatttatttcacctaagtaatgttggaaaagctccaaagtcattcctaagggaatgtagagctatgttttatttcacataaagtaatgctggaaaactccaaagttgttcctaagggaatgcagagctatattttatttaacctaagtaatggtggaaaagctacgaagtcgttattaagggaatgcagagctatattttatttcacctaagtaatggtggaaaagcttcaaagtcg

SEQ ID NO: 72975 - DNA, 633 bp, Zea Mays
gaatattcagccacaaacatttgttgtatgcagtcctgtatgaacaagtttgctgaaattctgtaaatttataacaagcgatggatatagatgtagttcgcacattgagatcacattgagacacattgagatcacaaattcagttctcacattcatttcagagatagatgtagttctctgaaacattcggttctcagacataaacacaacagacacatttaatctaggcagaaaaatagatacatttagttctcagacagaaacacgatagacacattcagtttagacacaaaaatagacaaacacattctgttcacatttagtgcacattcactgcctcgaaccccgacgccgagcattcaacttctcaattatatcctcctgcaaagcttgatagtacatgtgttgaaggggttggcattgatcaaggttgatggccaaaatgcgctcctcctcttccttctctttttttcagcctccatgttcagacgttgcttatccaaagccagtctttccctctccaactctatcattgtcttgcggtgttctcgagcctcctcaaccttcactttctccaaactaacaatttcatcaagtcggacctttcgctcatcttctgtctctttgaacaat

SEQ ID NO: 72976 - DNA, 1032 bp, Zea Mays
aaacggtaggtatgatatctatgttactcacgcacctaagcaaacataaacaacccgtccgttctttcgctacgccttgtcctgtggtccgagtgtggcacacgcctgcatgttcactctttagatgaaaagcagaagagaagaggtgcaattgtgcgtctatactagtagggctaaaaaatgcctgaacgatctctagaattcagttggtacagtgtcagcagtctgtcagcctacggacgatctgtagactgtagcagtatattaacggagtggacacaacccaactttgaattctcagtcatcagtcgtgtgtcctggggaccaatcatttgcacctctgcacgctggcaatgaggagacctgaacgagaagggagaagacaaaacttgcccctacggatggaagaccgggactccgggagaggctacctgcttatataagcaaccatggttatcacggaattctttccgcggggacagatacagatggtggcatggtgcagcctgctcgttgcttgccgatgccggggcgggcgacgagattctctttctctacctgtcacgtcccatgatctgcatgtgagatgcccatgagccttttgacgtcctcgcctttgctacgcggacgaataggattcagcgacacatgttcagtggaacttttttctctctctctcaccccattagcctatgaaccaacgtacccacgctttattagggtgtttggtttgagaggctagatgagaatgtgcatgatgagtttttttttttgaatttggtacaatggagccattttatcatatagattaataaacaaaagaggaaatgactcactacccattattaaacattttgttttaaaattacacacaccacttagagcaagtttaataatgtagccgactgttgtcggtaaagatatgtgtagcctatctcttaactcatgttttgtgtatactagttaagtcactcatctctcttacaaaaaaaatggctctcatgtctcagtcgactttaaatttacaacctg

SEQ ID NO: 72977 - DNA, 1154 bp, Zea Mays
gccgcgtccagcagcgcccggaacagcgggtggttggcgcagcgggcgcgcaccccgaaccgctccttctccgggcccaccagaacggtgaagtagccggcggctggcaccggcggcggcgggggcacgcccagggacggcgacgacgccgccctcttcggtgccgccggcggtggcggcctcctccgttgggccagcgaggtccggcacctctgcagcgtcttggacaggatgttcttcttctcgcctccttccttcattgatgttacgattacgaacgaacttacgacagtaattaaacggcgtagtaactgagccgcaaacaagctaagctagcacaactgcacaaggcaaacactatcaacccagtaggtttttctgttcaacaagctaacgaccacagcagatcaaaagactatcaacccggcctattagctagccgcggtcgtaggcctggtgcaggcgagacatgtccacggtggccttgggcgcgaggaggctgtgcttcttggtgctattgctggtgttattcatggctcttggaggacggctggaggcatattctgcggctacaggttcagcgtgcaggaggcaggagcaggcgctggactcgacgatggattgaccggtcgggccggaggacgaagctaagccaaaatatatagaaggagctgagctgagctgaattgaaagaacgcagagcagcagctagctagccgagagagagtgcgtgtacgtgcagcagaggcacactagctagagacaaagaagggtttggcttcctcgtggtcgaggaggagatgggatcaggagagctagagccgatcgatcgaggaggaagaagggttatgcggccgcctgcgatcggaacgatgacaaacactcaaccacccgcgcaaatgaattgaaggcttatgcggccggggccatgcctctccgactagacggcgaccttttaacatcatattgcatgcgttgcacatcctgccgatccatcgtagatagatcgcgccgttctgagttctgaccttttaggtcctgtatgttggatttaaaaacatctcgagcgatgcagacatgcatgatgtatatggcacaaatacaatactccattcgtttcgttttagttattgctggatagtgtaaaattaaac

SEQ ID NO: 72978 - DNA, 698 bp, Zea Mays
aaattgagcaagaggcaccaatcaacttaaagataaaagattcactaagttatatctaaagaatcatgtctaaaacaagtgaggtttttaaaaaaaaggaaaaatgttgaaaccctagaccaaccctaattaagccacttaagtagaaaggaagaaaagggataaaagaaccatgaaaaacatggaatcatggcttaggccaattataaaaattggaatacactaactaagctacaataaagattataaaagtttggccaaaatagtttgttaaaaactccaagcaagccattcaagtggaggtttaatggggaaatctgaaattcagatttttgaattttcagcctctaaaccaaaaccgagcgcgttcaccttgatctctatctcaaaactctaagctcccattgacaaaactgtgcctagctaacccctctacctgatacctaaagatggcattgggacgcgtgccctggacacgtcaaacccgggatcttctctcagtgttcagcagtgagacaaacccaacttcacccctccatatctcttgatccagtcagcgaaacccacaagcctccacacacaaacggcaaaggaatgtcaggggaagagatctctcaacgggatcatggccataatctcaaagatttggagccaatccacgcttgaacacgacctctctctgtgctgcctcgtgctcg

SEQ ID NO: 72979 - DNA, 814 bp, Zea Mays
gttttatttgtgacttttttcttctcattttctttcttcctttctgatataaaactctcgcatagataatttagtctcttgtgtcatgctagttacacagtgcaaagttatatgtagtaataatataatatatggcggcagtatgttctcacgaagttaacacaggaagggaaattttttaaagcaggaagccttaaatcaaggtgctacaagtctagtgatgaatacttgccatgttttcaaggtggtatgtctctgcatccacttgctggaagtgatctaaacaatgagaacgtcagtaggtcaggagaaggacaatcattcaccattattaaaacaagtatatgggtaaatgggagtcagcaggtgaggaaaaggacagaccaccactcatttcttcaacaaggataggaacagatgctagttttttttaaactggaacacataggagttcggtactaagtattttaagctagaacactatacaagtactgattgccttgtacgtttgacataagactctcatttgttcctctcatactttcccatctaatggaggaactacttgagatagttctagttgtttcgaccatacttcttggcttagctctagtttacttatatgaaatcctatggctgaggcttgagaagataaggaagaagttaaggaggcaaggcataaacggtcctaaacctacgtttctctacggcaacacccaggagatgaagagaatccgacaagaactcaagtttgtgcagaggcaagacaaagacatgaatggctacatatccaccatcttccctcatttccttt

SEQ ID NO: 72980 - DNA, 978 bp, Zea Mays
ccgcctaaagatcaaccccgacgccaggccagtgagtcagaagcctcgtagacaatctgttgagcggcaggacttcatccgaaaggaggtctggaagctgctagacgctggcttcatcgaagaggttcatcacccaatatggctggccaacccagtcatcatccccaaggcgaatgggaagcttcagatgtgcatcgactacaccagcctgaataaggcctgtcccaaagacccgtatccattgccacgtatagaccaaatcatggattctacctcagggtgtgacctattatcattcttagacgcttactctggtttccatcaaatccaaatgtctagggaagataggaagcataccgcttttgtaacagtggatgggctttactgctatgttgttatgtcgtacagtacaccttgcctacatttgtgcgggcgatgagtaagactttctgggacctgattagggacaaagtagaagtctacgtcgatgacattgtagtcaagactaagagaaggtcgaccctagtggaggacttaaccctggtcttcgacaagctgtaggcaacccgcataaaactgaacccggacaaatgtgtttttggcatttccgctgggaagttgctgggattcctggtttcgtaccagggcatcaaagagaacccagagaagatcagagcgattgagacaatgaggccccggcccgagtcaaggacgtctagaagcttacgggatcattagcctcccttggccgcttcatttcgaggctggctgagagagcgctgcccttcttcaagctgctatggaagtctgggcccttctcttggaccgaagaggcagagcaagccttctaggagttgaagcagcacttggtgtccctaccaatattggtagctccggaaccagaggtgccactgtatttatacatcgcggcgaccgcggaagcggtgagcatggtgctggtcgtcgagagaccggcac

SEQ ID NO: 72981 - DNA, 750 bp, Zea Mays
gagacacgcaacaacaagttgcttcatggttacaattctgcaaacttattgttattactaccaaatgcatagtcaatcattaagatttagactgatatacgcaacactattttatccatgagggtccttcaggggctcatgcataccattcgtcgtttggagctattagtttacttcagatcaacaagtaaaatgaccatcagggtctagcgctcacaaggacattcactggttgtattgtgctttgaggcacataggaaaaatatgtgtgcttatattggtagtaaagtgcatggcatcaggccaatgctgccaagcaaagatttttatacacagagatgtatagtccagctcgtttttatcacactgcccatggtttacccaattactcataccgctctgaaattgggtatcgatttatgcaacatttttaggtattatacttttgagagagaactaataacaatagttaattatttgtggtgttgccagtagggcaaacatttctcctcatattatataccaaattgttctatatagcattattgcgatctcttctttgttcagcaaaaagagaagctttggaatagaacagacaaggccaagaattcatttttctaggaaaatcaccatataactagcttttgatgaagcaaatgatgataactgcttggcaagaacgaaacaagactggtatccgcctaggatccgtcttcaacaacagatagtgttgctctcatatgaaggaag

SEQ ID NO: 72982 - DNA, 1393 bp, Zea Mays
gtccgggaacacatccatgaattcttccactactgacatgctttctgttactacgttaaacatcattggatcattggcgaatggctgagcctgacaagagactgactttccttggtggtctgtgagaaggactgtcttgtttgcacaactgattatacctttgtgcttggtcaaccaatccattcctaagatcacatcaatcccttgggatggcaagatggttaagtctgccaagaatactaccccacttaaaagaattctgacttgggagcatttgtgttggcatagaaggtctgaccctggggttcgggtgatcaagggaatctctagaggggtagaggggatgtcatgcttttccacaaaactagtggctataaaataatgggatgctcctgaatcgaaaagtacagtagcgggagtaaattcaacaaggaactcactgagcactactcccggagcttgctgagcctcctgagcattgacgtgatttactcgtgcccttccttgatactgggtcttgttctgctggctaatggaggagggcgccttgggggtgggtgctgaggtattcttggggccattcaccgagttagagtaagcaggtcccgatgacttcagctggggacaattgttcttgaagtgacggggatctccgcagtgccaacatgcattcgctggtggttggttggttgcaactgagggggcatgaaaggagctctgactctgctgactgaaccgcgatggagtgggtccagctggtctactgaagcttggtcccttgggtggaaatccaaaggatcgagttttctggtgccggtcttgctgctaagctcggaggacttggaatttcctcttgagatggcctttttcttcttcatttgccctttccacttgcatggctttgttggagaggtgcgagaaactaaggaagtcttggctagctaggatggtcttgagttctggtctgagccccttcagaaagcgggccatcttcttgacttcggtgctgacgtcatccggcgcgtagtgggccaactctgtgaatttgtgcatgtactcactgacagatctttcgccttgagtcagttcccagaattcatcttccttgatctgaacgatcccttggggcacatgatgctcccggaaagctgtttcaaactctgcccaggtagcatctctgatggtaacattgaaggtatcccaccaggctaaggccattccggaaagttgatgagcagccaattgaacacgctgattttccgggcatccgatggcttccagcttccttttaatcgtgcgcagccaatcgtcagcatcgaggggattgctagatccgacaaacgtgggaggcttgagcctcaggaaatctcccatcctgtcttgtggtcttcca

SEQ ID NO: 72983 - DNA, 595 bp, Zea Mays
ccggcatcgtttcggtcggtccacggcgaagcgcgaatgcgcgacggcggagacaaattgggcgcgctccggtcacccttctgcccagtaatcgccaccaatgcgaaccggagacccgggcgaagcctcctggcctcccgcaaggctccaatttagcgtcgagctctacggacgatggtggcacacgaatttggtgtagcggcgggttacgacttcctcggctcacggcgattgtgctcaacgaggtaggggaaagggcggaatagtggatgggagaacgagacttcagccacattggctttttatctgtagaagcagtcaaccgagcggagaagaaaattcaacaatggcgggatcacccccgtcgagttcggaccgttcgttgaggaaggatctgaacacgtgaccccacgcgtaagtgacttgaatgagcgggcgcggccgacttacgcgtggaccccgtaggtcggtgcctcgcacccggactgggcttgcgcgggagtgagaaggagccgcgcagtgggaagcaaagaggagatgggccaaaattgaatgccgaggcccaactaacttcccccctcttctcttttttgtt

SEQ ID NO: 72984 - DNA, 664 bp, Zea Mays
tatgccatagcagccgtccgatccaagcacaacgctcccgatttaaaaacctaagatctaatctctggcgttcaaccgtcgatcgacgggcatgatcgccccgttgcccaaccggtatgcatggcctaatctccaccgttggtgcccgatcagacggtatcccacctttcttcttccccagcgccaccgagcagctgcgtccgattcgcggcggcgtacacaaggcggcaagctcccatctcggagtaacggcgcccggttctaaatgacagcgagtctaacgcgtagatccaaccaaggcaaatcgatctaaggataactcaccgagatgtatgcagcccagtgccctgaccacggtgaggcgtcgctcacggcgaaatctctatgacgacgatgaaattagcccgcccaggatgccttcctacgtccgagagtatcttcgcttcccaccagaggcccccatcgaagcgccgtggccctaggaccagctccaacagcgcgcatgaccggaacagctgtgcagtcactccctcccatggtttctttccgctcggagttcatggcgtggcgtggtactttacttccgggactacgggtgcaagaggggcactggttcgcatttatacaccgcaacaagcgcagattagttgggttgggatgagac

SEQ ID NO: 72985 - DNA, 756 bp, Zea Mays
gaatgatgaattttttgaattatgataaaattgttgtttgatgttgaatatagtgggcgggcgggtaatgagtatccatacccacaagtgtatatgagtataaatatgacttgagttttgtctcgcgggtatggattcgcgaattatatatttgtgtgctatccgcccacagcctcacataaaatcatagctctccaagctaaaggatcaagtctcggagccctcttggttctagggatttcccactctctatggtgtcttcacggtcagaggatcgagtctcgaggccctctagattggaggattcaatcctagggctcttcgtctaccagtacaggttagaaaccaatctttctgctcgtccaaatttgggagccttcataagctaggacatctcttatcttaaaattgtagatcttttgaagctctctctgcattgaacggacgtttccctcgtcgtgggtgctgacacgtggcaaggaaaaaaacacaagcgtcacatacccgaagattttatgaaatctagttgagtccgctccttcggcctctttctccctcccacgctatcgcctccagctcccccctcgcggcccgcgctcgccactggcattcctgctccgaaccttccacaatgtggctccgcaatgggcgactcgagcacctctatcgaccctatcatgtgccaccacctcactcgccgtcctccctgtcacctttccttcctgtaaacctcgatgacctcctcctcaagttcac

SEQ ID NO: 72986 - DNA, 988 bp, Zea Mays
catccaaagatccaccctgacaccaaaccagtgagtcagaagcctcggagacagtccattgagcggcaggattttatccgtgaggaggtccggaagctgctgcgcgctggcttcatcgaagaggtccatcacccagtatggctggccaatccagtcatcgttcccaaggctaacgagaagcttcggatgtgcatcaactacaccaaccttaataaggcctatcccaaggacccatatccacttccacgaatagatcaaatcgtggattctacctctgggtgcgacctcctgtccttcctagatgcttactctggtttccatcagatccagatgtctaggcaatataggaagcataccacttttgtaactacggatggcctttactgttatgttgtaatgccttacagcctgaaaaacaccttgccaacatttgtacgggcgatgagtaagacttttggtgacctgattagggacagggtagaggtatacgttgatgacatcatggtcaaaactatgagagggtcgaccctagtggaagacttaaccctggtctttgacaagctgcgggcaacatgcacgaagctgaacccggaaaagtgtgtctttggtgtctccacagggaagttgctgggattcctggtttcgcaccggggcattgaagcaaacccagagaagatcaaagcaagtgagacaatgaggcctccagcccgaatcaaggacgtccagaagcttacggggtcactggctgcccttagccgcttcatctcaagactggctgagagggcgctacctttcttcaagctattacggaagtccggcccattctcttggactgaggaggcagaacgagcctttcaagatttgaaacaacaccttgtgtccctaccaatactagtagctccagagccaggggagccattgtacttatacattgcaacggctgcagaggtggtgagcatggtgctggtcgccgaaaggacgacacaac

SEQ ID NO: 72987 - DNA, 631 bp, Zea Mays
cggaatcatttgtcagccattgacaacattgttgaagaaaggcgtgctttcatctgggcaccagatcaagatgtagctttccataccttgcagcaagctctagtttcagctcatgtcctcgcattgcctgatttcttagccacattcaccacagacggaagcatgtgatataggcataggtgttgttttgatggcaaagagccatccactagcctttctcagcaaagcattgggacctaagtctcatgggttgtccatgtacgaaaaagaatacatggcaattatagtggcagtccagtagtggaggtcttatctccaacacaaggaatttatgattgttacagaccataagagtctcacagttgaatgagcagcgtcttcatactccctagcaacacaaggtgttcaccaaactactgggccttcagtatcacattcactatcgtaaaggcaatgagaatcgtgttgctaatgcattgtcccgtcgtggtcattgtgaacttggggttgtcttagctatggttcctcagtggctggacgatattcagagcggttatatgaatgatcctaaatcacgtgacctcttgtccaagttatacattgacccctcggctttgaatcactttgccct

SEQ ID NO: 72988 - DNA, 328 bp, Zea Mays
aatctagttgaccgtactaagaaggctaatccctactagtaatatgaaaaacatatgcaagaagtcgaaagtaagcaacttaatgaaagtgataactctaaatgtatgattaagcaattgaagttgggctttcacaacatgtaacatcaattcttacatgatatattgttctaaaacaaaactcaatgcctaatgtgggaggtggctattgaatatagggtcatcataagccctagacgtgctccctaatgtgctataagatgatagatggctcaatagaccaaaagacgatgacctagcatcctaacatattctagatgctaacttg

SEQ ID NO: 72989 - DNA, 1240 bp, Zea Mays
gaaaggtcaggtaatgcagaacaaaagcacgttggtccaatggttcatcctgaaatagtcataatagttgaattaatgctaagaataagtatgaaggagtaatatatgcatgatcaaaacactaatttagtaacataacgatacataaaattctgataagtcgccatcatcaaaatcgtagtatcggaggaagtttgcgacaaaaaaccacaatcgtttgaccctggtaacatggctggacaattggggaagaagcccaatcttgtagttgccaaactttggtaaacttgtatccggtcgagcttcttgtaacgcaatgctaagtcttctcattattaatctggaccaaggtatcttcgttccatttattaacaattgatcattgtggatttgtttccaggtagtgcctccaagcaatgtcccataaggatttgaatctaaaatgtctattcgacgaagttgaaagttgattgcataaagggtccaatgactacggcgtagcataggaaccaggatctgttaagatatatgtataagtttctgaatgaacaataataggtgtatggaaaatgaaagataacgtaaaatataacttatgaccaacagaacattaaaatattcttacaaataaaactgattggggctcaccaattttatttggttcagaacttcatctggaggaagcgtcggttctagttgttctttaagaactgatgttgagaagggctggggatttgaactgtgctgttcgaactcctcgatattcaaaacggtctggacaaaaaatatattgattagtattatatatttatacagtaagggttgaaatatgatacaaagttgaggagaaaaaaataccccaacattgacatttagtattagagtgttgattatggtatctggattgtataatacatcatcatcacgaatacattcgataaatccctgcatgaaaatgttctcaaggcatttattagggccaaacgattggacaacaaccaggacattacctccaaatcctccaaaatcaatgatagtcctggaaaaaatgaaactttaattacaaattatctaattatacttaattgaagtttgaataatgaatacatacatgctcggatctagttgtcctgataaaatgaacttaaatagttggcgagcacattcttcacgtgatacgtggggaggttcagcaactgcagatttagaggaaatatcctttgcaacaagttcagtagtt

SEQ ID NO: 72990 - DNA, 461 bp, Zea Mays
aagttaaggaaattaaagctttgattggtttgggtaaagccctagatttcatggaagatgaacaaggcacagtatggtttaagaagagaatctgtgtaccagaaatagagcacctatgccaacttattttgagagaagctcatgattcagcttactctattcaccctggaagtacaaagatgtaccaggatcttaaggaaaagtattggtggtacggtttgaaaagagatgttgctactcatgttgcattatgtgacgtgtgtcagcgagttaaagccgaacaccaaagaccagcaggattactacaacctctcaaggtaccagaatgaaaatgggaagaaatcagtatggatttcatagttggactaccccgtactcgagatggctatgattcaatatgggtcatagtagacaggttgaccaaagtggcacactttatacctgtgaagacaacttattca

SEQ ID NO: 72991 - DNA, 340 bp, Zea Mays
gttaaggaattcaactttcccatgcggagtacagggcgtgtaaatattagtgacaatccaggattcattggacgaattagcaaagaattcaaccaaaagagcataatcattctgaaaaatcacagtgcccaccaacttagagctattccaaacagtaatgaagccccccgaatttcccaccgagggaacaaaagcgaacgcatccaatgaattgggacagaattttctaaggtcagccctgtcaaaaaattccttcttggtctcctgcaagcaaacaatatcacatctggaatccctaatcgtgcaatgagtaccattccctttaacgaccgaattgatc

SEQ ID NO: 72992 - DNA, 353 bp, Zea Mays
gtgtctcatccagtgataacttctgcagctcctgccttgttgcctgaaatatcagccttgttacacaagtttgctgtggttttttctgccccagtggctttaccacctgttagatcatgtgatcattcgattccgttggtagcaggagctcagccggtcaacattagaccctatcgctatcctccatctttgaaagacgaaattgagaaacaagtgagtgatatgatgcagcaaggactcatcaggcctagttcatcttcatttagctcaccggtgctgttagtccgaaaaaaggatggaacgtatcgattttgtgtggactaccgctacctcaatgccttaactgtgaagag

SEQ ID NO: 72993 - DNA, 847 bp, Zea Mays
gtgatctggaggagaaataggaactcacgcttgtcgccttcctccagacaaatgtcgacgtgttcgcatgggagccgtcccaattgcctgggatccctagggaggtgatcgagcaccatctgaagatcaaccctgacgccaagccggtgagtcagaagcctcgcagacagtccgtcgagcggcaggacttcatccgaaaggaggtccagaagctgctagacaccggcttcatcgaagaggttcatcacccagtgtggttggccaacccagtcatcgtccccaaggcgaatgggaagcttaggatgttcatcgactacaccagccttaataaggcttgtcccaaggacccctatccacttccgcaaatagatcaaatcgtggattctacctccgggtgcgaccttttgtctttattagatgcttattctgatttccatcaaatccagatgtctagggaagataggaagcatactgcttttgtaacagtggatgggctttactgctacgttgttatgtcgtacggtctaaaaaacgcgttgccaacatttgtgcgggcgatgagtaagactttcgaggacctgatcagggacaaggtggaagtatatgtcgatgacatcgtggtcaagactaagagagggtcgaccctagtgggagacttaaccctggtcttcgacaggctgcgggcaacccgcacgaagctgaacccggacaagtgcgtctttggtgtctccgtagggaatctactggggttcctggttttgtaccggggcattgaagcaaacccggagaatatcaaggcaattgaggcaatgagacctccggcccgtatcaaggacgtccagaagct

SEQ ID NO: 72994 - DNA, 672 bp, Zea Mays
cccgggcatagtgtatggcttctgcaatttcttcttcagacaacctttttcctgaagcatgtcgaataataaagtcacaatcttcggagggtgctttgggaatagcagatttagcttttttgggcacgacttccttctctagagccaggtcagcatttgaagattcttgctcagttctagcaggctctgcctcagtgggcacgaagggcccagcttcggtttcagcgtgagctgtagcagcttcagctgcctctttagtaggggcaggagtcaatacccttgttgtttccaggacggcgtccagcacactagccattctcctcctctggggagttattgcgggagcctttgataccttcggcaattctggctttgctggtgggctcaagatttttggcagctctactgttttctctagctctggctctttgaccgccttttgtttggctttggcaccatgtcttggcatttcgactggcctggctgcaggaaccttcggcaattcagtcagttcttccctaggggtggtaggagcaggttgttctgcctcagcagttgaagatgtcccttcgccaagttttgacaatatggccgtttcgatgtatcttggccggtgtgttaagaccttgatctttttgcccttcggcacaacagagatagctgaagcgacag

SEQ ID NO: 72995 - DNA, 712 bp, Zea Mays
gcagcatcatgctttcaatcttattaaagattacttatcttcggttccagtgctaaaatcaccaaagagtggttcctgttttaggttatacatcgcaggtgaagataaggtaatcgaagctgttctaactccaaagatcgaaggaaaggagcatgccataacttatttaagctagagattggtggatgctgaaacgaggtacacttttattgagaaattatatctatgcatgttttatacatgcaccaaacttagatgctaacttctgcctagctcttgcaccgttttgtctcaaactgatgtgatcaaacatatgctgcaaaacccaatcatgagtggtagaattggtaaatgggcttatacgcttataaaatatgacttggcctatgaatctttgacatccatgaaacgtcaggttgtagctggttttattatagaggatcagattgatgatattgcttagctagatatatcatatctcactattactctctagactctgtattttgatggattggtttgacatgaaggacaagggattggcatcatgcttgtttcaccatggaataccactattgacttctctagccgattgaacgctcattgcactaacaatcaagctaaacatgaagccctcttgttcggtttagaacttttgaattatatgggagtaccatatgtaaaagtattgggtgattctcagctagttgtc

SEQ ID NO: 72996 - DNA, 910 bp, Zea Mays
gcgttattgcagcctgagaagaccagagataatttagtgagcttcaacttggagatagaagccatgaagcttttcatgaataagagatgaaaatataattatagactttgtccccttgattaatgtactacgtttgttgggcttcatgaccccctctcccgcgacgatccagggggttggacgcgacagaggaggatataaggggtcagacgaatcgattggaacccactcgagtggatctcacgtaaccgccagactggccgcaccgtcatctttgctcacgccgcattaatacgtcagtcggcgtgatacgacgcgtgtggaattgatcttcttctcacttatgacctacataccctaagcctaagtctcccgacaccctactgccctgcacgaagacaagagagaaaacccgtagaaaggctacgaaggaaaaagtcggcataggggtgaaatggacaaaaaacaacaatgatggtgcccgggttttcatcgccagcacggatcacgtcctcccccaacaatctcagagatacggaagaaggctcacacagggaaagataccgacgcacaacaaggtttttactatggtgaacccttcttttttatctcaagatacactcccttccggaagaagccatatgtaaacgcctccctccttggtctatagaggggagggtcggcctaacgatagagggaaataataagtgagcacaaacaacaaacagatatttgagaccttttactttcttgccagcttgtaacccttctatgagcaatcaggtgccagtatcacgactcacgagcaatcgaagactagagtagagaaaattttcccttaacaatataacccttgtggtcactcaccaaactattcgggcctagctaaaacacgcatacacaaatttac

SEQ ID NO: 72997 - DNA, 525 bp, Zea Mays
ctacactacctagcgaccggtgagtcaaccttcttcatactcgtcgtgtcctcaacaaagattagcaacatcagggctggaattgggacgtaggaaccttcacgtcgtggcaccggtgaacctcgccgtcgtcggcagggtcctgctgcttggttgctaccgtgaggtagaagacgacaacctggctgtcggtccgtggatggacggcccggattagatcggggccatactggttcgatcgggtggatctagaccgtggatatctgatcggacgtgatcagggcgaggagggttatctagcagtggatcttggatcctgcgagtgagagcgagtgcaggttcatctgtgatgtgaatcaatctatattgttgatctcggatcacacggtcgttgtcgcataccgattcttttaaagcttgatctaatctggaccatgcaaatctgatcgtgcgaccgagaaaggacgatacccccttcagccgtgtattttcttaaagagaccctcgactttaatctatttaacc

SEQ ID NO: 72998 - DNA, 776 bp, Zea Mays
tttcgtcgcttgtctgcataactcttctgacgagcttgagcttctttcaaattatgaattattcgttgaactttctcttctgtctcctttaccatatctggcctaaagaaacttctttcacctggttcagaccagtttaacggagtacgacaccgtcttccatacaaggcttcaaagggtgtcattttaatgctctcttgatagctattattgtacaagaactccgctaatggtaagcaatcatcccatttttgtgggaattctagaacatatgctcgcaacatatcttcaagtatctgatttacccttttagtttgaccactagtgtaacatctaggtgttacctaggtgttggcttcttattggcacatatacccattatcacatgtggttaaaacttggaggagagggagtgcttaagagcttggaagcatgagtgagttaagaaataccaaggacccaagtgttacccaagcttttaggcaatgatcacctagggcaaaggaggattgaaccttggacccccctctcttaaagtctttagttgagaaaaagatcaagcaaatgcacatttcataaattaaaccttaaccaaagtttaagagtaccaaaatgtttacaaaagccagcaatggaactttacaaaaagacccctataagacccctaaatcagccccaagtggagaacactatggaatcaccccctttccctctaagtccaaaatcagccctaatctagagatcagtggtgttcacctagctaatggcaccaaaac

SEQ ID NO: 72999 - DNA, 1439 bp, Zea Mays
aaggtggctcccttgatgttggcgtagacagatggtcacagagagggtgagtatggggtggagaaggtggtgggtccattaatggtgattcttgtggcagagacggtgggtcaaaaagagcatgtggagcagcaagtgaagtttgaggaggtgatgacggtttagcaataggatatacaagtgatgactcttgcgttaggggttgggcatgcgacgatgatagtggaggatcaaccaattggacatctcatcgaggccaaagaatgaaattcttgatagtcagtccaagtgttccaataccttcaggcctagggatgtctagcatgtcatcaccggatgcttggacaatcgtcgtcacttataccctacaataatgttttggaatgttgtttccatggaacttgtgtcctaggatcgctaggcctgtggctactttctttgtacgaagattgttaattccatatcttataactagggtgcacgccataggccttttaatgtcatcaactcgatagcggtccatatttctcgtagacacgacagagcttgggacggttgtacaatctatggaagatggcagttgagctgctagaattagttgcatctataaagcttgagtggtcatctgttaaatagacatcacactcactaattgttgcatcaattctggaggaggattcgacagtatttgagacatcaggtcttcgaactctttcttagcctcctcaaaataatatgtcatcgcttgcttgtatcgatcacgtttcttgtatagaccttcccattgtggtctgaatacttccttccattcttccatagacgacatgcctcgtacacgactaggatgctcaggtctactaagaccagctttaaggatgcctttctccctttgtggcttaaatattccttcgccctgcttagctcccattgcacatatgttcttttctgcttcttcgacattgggattattaaaagacacactagactcggtttccctaggttatcgagcacagatctaattagccttcctttcaccaagttgctcgaacaacgtctgcaacaatgtgcccttcttctcggcatcttattgtctccatttaggaatctgacgcttgtaaccacatgtgcctaggtggtggtacttgttcttcttagacagttctgaatttgctttgcttagagatatgaaatctagattattcctctgctctagaaatactacctttatattttttttatcaggactaggcctttctttgcaaacttggtattcatctcacacctctattttcggaaattgatggaaaactacttcattatgtattccttcatgagttcttctgaaccccgaggcagaacaaaccacattaatagctaattctacatctgaatcttgacatcatctgacacatctttttgtcagattgtgatgtcaagat

SEQ ID NO: 73000 - DNA, 400 bp, Zea Mays
gcgtgaagggctcatagaagagcatgcccatgagatactccttgaggacgcgacaggggtgttgtgggagcctcgctccatggcctccatctctcacgaaacctgcacgtcgaggttgaattgttatgtatcgttcacatagcctaggtgtgtggtgacctaacggtgctattgtggcgtagcggatgtgctagcgcgcagcataggtgacagggtggagaagggcatgataaatagactggggctatgttgtgaggaggaagggagatatgtgtggggttgtgggagggcactgccagtggcgacaacatgggcgaggtgaagcgaggcggtagccgagccgtaggaggaagagtgaggcgacaacctgcacattgatttagtcttgagcattatggtg

SEQ ID NO: 73001 - DNA, 437 bp, Zea Mays
ccattgtgtaatgtattgtgagtctgagcttggatttggccttgtaacgtcgcatgcctccccttttatagctgaagggggcatgtacaaaggtactgagcctcgataggtgggcctagggacatagagaatatagcgctcgggactataaatatttgctgctggggcaatctccttgtgtcctgtcacccgagattcgtgtaccttcggcgtgcaggggaagcttcttgcagaagggataatgagcacgatgcgtcgcatggcacgagtgcattgttcgatgatagattggacaggcgcgctgtttgacgtcgtctgccagcggagtggactggacgcattaaatgccgagggggcacatcgttcgtcagcctggtggcaggcagcgtgtcctcttcgcaataaatgcggagaccgcgcgaccgcggtggcctgac

SEQ ID NO: 73002 - DNA, 308 bp, Zea Mays
gttatgttgatggaacaaccttgaggtttgttgcactaacatgaagttgtcctggatgaaccttccttttataaaagtgctttgacttggggaaaccatcgcattcaatctttttgccaaccgattagccagaattttagtaatcagctttgcaaaactgtgcacaaggctgattggtcgaaagtccttaacctgatcagccccatctgtttttggaatcaatgtaatgtatgccgtgttgagtttactgaaatgatcaaacttcctgctccaaatagcagccaaggcagccataatatcatctttta

SEQ ID NO: 73003 - DNA, 695 bp, Zea Mays
catcgcggacagacaatcgcgttcctggtgatctaagggatcctagttcaatcaagttggttggggagcatcaggggcacacaagaacactaaaatgagagggcagagggcatgagcagacctgaatcgagctggccgcggtgaggattctttcacggtggcggaaactcagtttgggggaagtgagcaattcgtggtctcgggtggacaattggaggcaagtgtgggtgtgttggcttcgtgataacgtggcgcaacagacccgaccatcaatttataggatcgctaagcggtggccggtgaatttgggtttgagacacgcggcggtcggaggggtgggaggtcactggtgcttgggttagtggctttcactgtggtagctccccggcgatcaccgggcatgcacgatgtggttcattgcaacgtggtcaagcactttaacacgtggcgcacggcagtaatcgaccaacggcggtgaggtctatcccgatcgatcgatgagcaagtggtacggggagcttagccacgaccggacccaagttgatccaggcgccaagatctttacccgctcaccgttatccacaagtcacagcgcacgaatcatggcgaccgacgtgaatcacggcgcgatggtcggcggcggcgaagggggatgaacttggaatcttctttagttactgtactatggtgaattc

SEQ ID NO: 73004 - DNA, 524 bp, Zea Mays
ctttatattaaattgtttgttgtcaactaaaacgtatgtatacacacacgtatatagatttgtacatgtagttctatataaaatctgacataccttaatttttgtgtgtcctccgtcactgctcaccggaacatatttccttctatctcggtcgtgccagtggatcagtatatttagattattttattcgcaatatatgtagcactgtttcatcttgatggattcttcagacaagacaaatgaaatacccgtcgattatagctaattggacaagcattcaaaagttgataatgaatcacccctcgatgcaaaaatagatgagcataccagacttcctatacatcccaatgaagaagatatatctagaacaaagataaattatctagcgctaatagatgaatacaaatttgcattacagcacaataaaccaaaaaaggacatgtcaagtgtaattgttcaagaaggtattacaattgtgtattagttatctctactattactatttgatcagttcgtatgtttta

SEQ ID NO: 73005 - DNA, 551 bp, Zea Mays
ctggatgttgcaccgggtacttgtgtccttcctccacccgctcgactactaacgtggtgcttaccatgtgagtcgtgcaggggatgtataggagcaaatcttctgctggcggaccgggcgtagctcagcgcgacgacttgagtagtggtggtgtggtcaagaacttcttcagtgcctctagagcttcttgtgcctccgtggtccatggaaacttgtccacccttttgagcaatttttaaaatggtatgcctttctcgcctagccttgatatgaacctgctcagggctgccatgcacccagtaagcctctgcacattttttgtgaccatggcgcttccattctcatgatggcttcaatcttttctggattagcttcaattcctcggtggctgacaatgaatccgagtaactttcctaacggtactccgaagatacactttttctgggttcagcttccaccggtagcgcctcaggctgttgaagaccaactgcaaatctttgatgaaattttctaagttttctgttttgactaccacatcatcgacgtaggct

SEQ ID NO: 73006 - DNA, 665 bp, Zea Mays
gtgtgggactgattactttttgcgccaatgacatgattctatttgttgccaccttagtggatactttaaaactgacattttgggccgatattgttgaatcaacaaagcctccttgcatttgggaagaagtataattgttccaaaatttatattgtatagcggcaatgttcctttgtgaaattccataaacaaagccatcaactctagtttgattacatatttacatcccagaaagcctgatagaattccgttgggaatccatcaggtccaggagccttgttatgttccatcctaaagattgttgtctccacctcatcttccgtgaaccccaatgtcaaaaaatcattttcgaccatcatccataacaaagtcactgttttctggtggaccaaaaagattttttataatatttagtaatgtgagtcttcaaaggctcatcaccaattatcatttgattcccatctctcaactggaaaattcgagttttctgatgttttccattagcaatcaactgaaaatagatcaactgaaaatatttagtgtttgaatcgccttctaacagctccttcactttcgcccgttgataccactttatgtcttcctcccgtagcatatgtgctacacgattctgaagatattgtttcaaatctatttcatactggttt

SEQ ID NO: 73007 - DNA, 578 bp, Zea Mays
gcctaggggctccttttatagccccaataggtctagcagtcgtttccttctccacaaggaagttggaaaacttccctgtcgtggggtcaccagacaatctagtgcaccaatggatattcggccagcaacaatcgtcgggtgatctgattggccggtttccttttgcgacatggcatcggacagtccggtgcgccaccggacagcggccacgtcagctcgttggcgattagcgctcgcattcgaagagagtcgttggagttgatgtgcgatgcactggacaatacactattcactgtcccatgaattttataattaaaatttccaagagcagcgtcttcggccatacgtgtcaccggacagtccggtgggtcccagacttgaccaagtttgtctcttttgagccaaacttctccaacttattttggctcttcttgagaggcttcctggcacttagacaaacatatttagcaacaaaaacaatttactgtgttgggatcatatctctttcaatccttttctctaggatttcctatatgtccaaaattgagtccaaattcaacttttcttacacaaatgag

SEQ ID NO: 73008 - DNA, 420 bp, Zea Mays
cgcgaaacggcaagggtggcactgctcctcgccgcctccatgacggcgctcctcccacgaccggctgctttggccacccaaccaacattgtgcatgccaagaaaacaatggtgtggttgatgtcataataaacacatattggtttgagctctcacataaaacaatttttgtaacattcactagtgatggacagagaatagacaaaaaaatacaaggaacaacagccaatgatgtataggcctgtggcattgggctggctggttaagcatatggccaacagtcatttgttgtcatgtggccaaatgtgaataggtgagggtagtaaaatgaaccttttcccttcaaagaaatcaaacttttagccttttattttaccgttcccatcgtcttctccagccattctacaagcagaagcgctcc

SEQ ID NO: 73009 - DNA, 469 bp, Zea Mays
gaaatatttgatacgggcctgtccaaaatgcactttaatttcaagttaatgctcaataatcaaaatggaatgtcttgataatgtatttatttaaacatgtcatgtttttttattggtcagaattagataaatttaacttagataaaaccaatgtgaatcattgttagcaaataatgcaaatacggatcaaacaagagacaccaaattttacatggaaaacccccttgtggagaaaaatcatgggcacttaccgataaacttcactatataaggagagttcgtggtaaatataatgagtcgtctctctttccatgtgacttataagatgtatatattagggcagaccaactctagttcaatatagaaacaacttcactataagatctatatattagggcggactcacgttacaatttagatcatattctaacaaagtccacctttagatgaattttgtcttgtagcaaat

SEQ ID NO: 73010 - DNA, 1016 bp, Zea Mays
gtgagggcgacggggaggatccgaagtgtcgtagcataagttgtggagcctggtcgtcgactatggaaatccaaagagctatctaatctgactagcacgcagagtgacatcctctcgctcaaaacggaacctcatccactaatggtcagggtcaatccaaatggtggcatagaacactctgacccactcctcaatatatctaccactcgcggtcagaagtgaaagcaaacctggcagataggaatggtgaccctctgagtcggctccggtgtctaacaggaaagcaggtagatccaaaagccgatgcgctctcaaagcaatctgagctgacagctgcgccctgaataaggactcctgagtcctggtgctaaagagtggcgcagcccctgggtctctctgagatggcaatgaagactccataggtacgtgtctgaaccgatgtacccgggcagcagtagcacgctgaaggtcaagcatacggggatcagcatccagtggtttcacctcagtctcgtcacgctccctaaagcgagatggtggaatgggcgaagcagaaatgggtgcgggaggggaagcagtggaagctagagtggtggacgtggtaggtacaatggaagtagtggatggctctagagcgacaggaggtggagtagagacagtggcggaaggtgtggagggagcagtggagcgaggccaagatgcgaggcgacgaactcgataggctatctgatctgaggaaatctggagctggcctccccgctcagcctgctctgctgccgctgcaagtgctgcacgagcagctctatccatacgccgcgtctttctaccctcctactgcttatggtaaattgtcttccctttgacctacctgaaggggcaaggagggtcctcgtcatctcctccccctgacgatgagacattctttgtctgtaccatcctgacttgactgctgcacgatagattgaaaagctaagtaggagtagagagcagctgataggatctcaaatggagtgata

SEQ ID NO: 73011 - DNA, 882 bp, Zea Mays
gtagtcactggacagcaggagaacaggagtgctaattggctaggttctcctgctggctgctgcatcttgattttgatcttctgtagactgtacccagggcgaaagatggagagaatgccgaatgtatatatatcattcggaaaaaaaaactcaatggcaatcacaatcttatttcttgccgcaagcgtgtatagttttcctgcgttctcaagagctctcttgaaaggtcttgattttccaaaaacctcttggaaagtagcctctatccaccatatccaccaccatcttgcggccaccgtcatgtcatctgccctcttatgcacacacattacacttactacagtattatatcttgattaggcaagcattcctctcctttgctcattgtctcgaacaaatccaaggcattctcgatctatccttcctcaaatgaataccttaaagaacattgtatgtccgaacattaggctcacaaccttccctcttcatcgtatcctagcatggggtgtaggtaaccacatttcgaatgtaaccctttctgatcatatcatcaaacaccgccaccgcttcctccacattgcccttcttacaggttgcctgaattaacgtgttacaagttgcaatcgatggggtttatccttctctagacatttcatcaaacactttgcaggctttatccagatgcccgacaacacccaacccatgcagtacggtatcgaagaagaagaagtcccatacactgatgaacgcatcacgtcgttatgctcttcagttcagctacttttggagcaaggtggtaattttgtggtgtctgcgcccaacatggcccatttatgccaccgtttcactgtgggctgcttcgtagccacggcacaaatggtc

SEQ ID NO: 73012 - DNA, 638 bp, Zea Mays
gcatcatatgggagagtatcaagaaatagagagagaatagtggagagcaccatatgaaagaagagcaccatacaatccatatggatatccatatgggtatggaggagggtatggataagtgaaagatgaatgaggaccatcggtggtaggagtgggagcatcgattgtggtaggatttttattgggggaggagaggataagagtatgcaaacagaggatgtggatttagggaacgaggatgagtagaaacatccttccgatgaggatgtatgggagaaatgacgtcgaagaagatctgcaccacaccgatagggttgacgagacgttgtggagattggtctttgatcatgtgagattcggattgaatgattggacttcactttatatccatattataatagagagtgagaggctataatatgaaggaacatgagtgaattgatggataagaaatgtgaagggatccaaacatcctcccctctatttatagggcggattgtgactttttaactttaaaaagttaaaacagtgtggaccaatcagaaggcgacacgtggctgctagtaccaaccagttctggtggcaactgatcgattctccgatgcaacagtcggtaccgatcgaaccaactagtcaat

SEQ ID NO: 73013 - DNA, 390 bp, Zea Mays
ccggtatggattggttggaagctcacagtcccatggctattgactggcaacataaattactggtgtttcatactgatcagactcgagtggtactgcaaggcatacagactgacctgtctactttggaaccactgtcagtcccacagctgatacatttggatttattagatgaattatggtgtgttcttcagttgcaggcagtagaacattcctcggatagcattttgtcgttggagatcacccagctcattcaagattatgcttcgttatttgacaaacctgctggcttgccactgtcgaggtcgcattatcatacaatacctttgatctcaggggcaattccttttcgtctgcgaccttatcgctataacccagcacaaaaagatgaaa

SEQ ID NO: 73014 - DNA, 294 bp, Zea Mays
attccatgtagaggaaatctcaaccctgctttgaacaaactcttaaaaactacaacttcatcatttttcggcttcgggatagtctcttccccgccaaagcgaaccaaccccttatcggcttccttgaagtagcctagcttcgtcatcatagtcatattagcttcatacacagttgatttcccaaaatccaaatggctgggcttcgatggcataataatattataaccaatccctccttcattagcatcaccctcttcaatatctgcatgctcggtttcagcaacgggtgattct

SEQ ID NO: 73015 - DNA, 539 bp, Zea Mays
tctcgcacgtcgtcgttttgatcctggcgtgtggcgtgggagtttcgccatcactcggggcgacttcttcaccaacacaggagcttcgccgcagtcacacctcgcgcaggctcctccgtcgcctcgggccccggtaaagtgcacctcgcgtaaatttgtttcctcaactacgtttcggaatactcagagatggattttggtcaccgggcgttggcatgtgagtccttgccggtgtgcgccaccgtgaagcgcgtgggcgccgccgctgctgcctgatggtcatcgggggaggaagaatcgtaggagtcgtccgatcgattttgggcgatctggattagatgtggtgtacccattcgataggttaaatccgagccgttgattagatatcagatgaactagatctgatcgcaccgtaataaaatccagatcatagatctttgatccaacggcttgagttgcgtaccggttcacagttatggatatctaatctgatccgtaggtagtcgatccaacggtctagatatcgcgataccccttcg

SEQ ID NO: 73016 - DNA, 635 bp, Zea Mays
ctgttgttaggtcgttatctttcggcaatttccatttccttggtcttgttgtgctcgtgtccttggagtcttgcatattctcatattttttatggatgcttatcttcataccccaatgtccgtttaagacatttcagttaatatgcccttgatcacccttgcttcttgatggtccatgagcgaccatttcatttcgcacatccttggtgatctcgttgtttccatataacttccttcggtaatgaatttttacctaaaccctcctgttggatccttacctatcgtacccttgattgttttctccacttcataacttcatgagtcttatcttaactctatcctttgctatgctctttgttattatcaactttacccttgacacctctatatctttcattgatgtttatcttatacctgtcatttaaaatctcctgtcttccatctcaatctgagcgttgaactttacctattttcccttggttgtatcctcttctttaccgcttgcgagtttttaactccatccttctttgtgcttccgtttgttgttgcctttaccttcctcatctctcgatctgaccttggtgattacactatgtctactatctaaaatctccaatctcttatcccaatttgag

SEQ ID NO: 73017 - DNA, 571 bp, Zea Mays
gtcagaccatagtcataccacacgactcaaatctcaagggttgtgcaacgattacaggtgatgtgctcaatagttgtaataaagaaagagaagggtgccttaattctagggtgtgcgccttaaatgaagagaagagtttttagctgacaggagagagtttgactacatgatgttgatttctgctcacagaattgaaagttgttgtctgaccgtgtctgcttatcgagagacaatgactactctttagttggcgatgaaggctacaacaagcctaactctttcttgttgggctatttgaagatcaacttataattgttggagtgcttgctctaatgatgggataagggtatgttgtgctccctcgaatgttggttggtctgtcgggtgttttctcctttttgaccttcatttcttcctacaatccaggggcttttcatatgcactacgagtgttgcaccgtgatctttctgtttggtgggattctggttttgtgtgtggcatgccatgatgcatcaatgttgaagaaatggacccaacttggcaaaggttagatgcctcaagccgttgctaa

SEQ ID NO: 73018 - DNA, 526 bp, Zea Mays
caaaactaagagaggtcaacaaagagagagccaaaagagatgcctacacaaccagccatccccactatttatagagatgtgttctacttccctaaactacccctagatgcatagagcttatccactcagccatgggtaaaatggaccaactcccgacattttgatctgacgaccacacattattcacaaagttgctttgcctcgatgcaccatttgtgatgacaccacatgcctcccctaattctcgccagaacgtaccatcaggttttgacgcccaaacctactaaaaccagcgaactatagcattaggtggttttaaggctcaaccaccgaaacctccgcgggtagcataccccgtacacatccccccacgtcctagcacgtgtcccgccagtccacaaccacgtcggttacacgatctactcctccatgacctcccgtctgttagtgtccttaggtgtcagccatcacgactagacacacagtttctctagtcctaaggtcaagactcaatgctcgtccttcc

SEQ ID NO: 73019 - DNA, 2227 bp, Zea Mays
gaaatgacgcggccctagctcggacctgggaccgaccaatccccatgaggtccaaggtttctacatagatgatgttcagactgttgcctccatccatgattaccttgctgagtttggtgttattgatgattgggtcgacgatgagcgggtacctcccagggttcgggacgtagtctgagtggtcgtctcggtcaaaggtgatggcgcggctataccagtctagatagactagcgctgctacctcgatggagaagacttctcgccattcctgcttccactgttgtgtggagaggttcaccgtatgcctgccaaagatcatatatcagttgtggacattcgggaactcttcaccctagtcgtctttcttgtcactggaacatttcttcttgccatcctctattgagggtctaggcttattatagaagcgtcggagcatgtcgcactcctcgagggtgtgcttgatgaggcccttgtgataagggcaagaatcctttagcatcttgtcttgtcgaaagcattgggacctccttgaggacctcggggttctgtcgttcccgctatggcaacaagatctatgttgagagccttgcgctggccctacgatgccttcttatttttcttggggttgcgttgggaggtcgccttgggggcatcctccttctgcttcccactatccttgtccttgtgtaagatggcttcgatgccttcctgccccgaagcgaacttggtggtgatgtccatcagttggcgtgcgttggtgggggtcttgcgagtcatcttgctgaccaaatcgtggtaggacttgccagtgaggaatgcactgatgacgttggagttagtgatgttggggagctcggtgtgttgtttgaagaatcggtggatgtactcccatagagtctcgtcctgcttctgtcgatagctccgaaggtcccaagaattctcgaggtcctcccaatcatggatttgggaaggtgggaggtggtcgagcagaatcggatagaaagaagggtaagttgtgaatgatgaggttgtcatcactcgtccctctgagctgatagaccaggcggtagtcagcgagccatagctctggtttggtttgccctgagtacttggtgatagtcgttggggctcagaactaggttaggaacggcgccctgtggatggctcggctgaagacttgtggacctaatggctcgagcgaggggcttcgatcttccccactgtcgtaccaaccaccccgccaagggtggtagccatgtgtggcatgtcgtcggtcgtcgtggtgtagtcgtccgttgaggcggtcgtgaacaccacagttctggcggttatcgaagaggtggtcccgaaccacgaggctttctcctttgttggctcgggatggaccaaggcctccctctcttggtgagagggcccctctcgttgttccgaggcgggttcccgaagtcgagaggcatagctctcagcctgctggaccatagcacactctagaagtcccttgatctcaccgtggattcggcttcccttggtggtggatggctccggcttggttcgaagcaagattgttgctgcaacgaggttctggctagccctatgaaaggccagaggggcttcaacctcggcatctgccatgatgcgccgatggacatcgtgagccttggcgcgtgctcccttgtcaagggctctacctgtgacttcctgctcaagaacttgccaaagctgttgtagtcgctgttgttcttcctcgagcttggtgtgcagctcgctagctactcgaggtggactatgtgactcctcgtgggggtctgagccacaccggtgtgcaggggtggtgccagggtgttgtcctcccaaggcatgtcgagatggttcccttcgccatgctcctcgtgccccacgtgaaagcactctcaagtcgggtcgtaaccctcctcgtcagagttgtagtcgttggagccgtcgaagaggaggccgtcgcatgcgaacaagaactgtagcatggcctcagggtcacgaagtctagagaagtccaggccagggcccagaccatcttcctcctcggagtcaaggcactctgagcggaaggggagatcaacatacatgctggtgaaggcgcttgtgtcaaagcttgcttgaaagggatggggttgaacaccgatggttctcttcttgcaaatgatggagccgacatctcctagcttggtgaagctagcgcctcccgacccgc

SEQ ID NO: 73020 - DNA, 617 bp, Zea Mays
tgagaactatcaattaaacagttcttatcttgtatggtatttgttcttgttgtgtgtggtgctaccaactcctcgcctggtacttggccccccctgggatgtaggctcgacgtgtcgaggctggataccagcatacctaagaaagagttggtgtcccggcccccaggaggtagcctcaactgggacctggacctattcacagcttcagctaggaagtgttagtagcacacccataaggcccatcgtctggtatcagccatcccttgattcacgcaacaggacctgcaaggtttagcccagggagccaagccgtgtgcctggaccccttgaatcacagcttcatatactaggacacccatcatagagtggtggagcgtgcaagcttagggtacagaaccaagctaagcggctacacgactctggaccaccccaggagacgtgtgtccattctttaggaccggaccctaggttcccagacccactgggctatagttccaaatactaggatacatgtcgtagagtggtggagcgtgcaggcttagggtacggaaccaagctaagcggctacacatctccggaccaccctagggaacgagtacccgttttctagaaccgac

SEQ ID NO: 73021 - DNA, 613 bp, Zea Mays
gcgaggtgcttggccggatgtatcctttctctgacagctcatcgatctgcttcttaagctcaaccaactctggtccagatactctgtaagctctcttaaagatgggggcagtgccaggaagaagctctatagcaaactcaacttttcgctctggtggcatacctggtaagtcctttgggaacacatgtggggactcggacacaaccttgataatctcaagtggatctgcttcactgctatcgacagccatctgataacaacttcctttctttggctcagacgggactaactcggtcaccacttcctctcctagtggggacaccaacttgattgtcctcttatcacaattgataactgcctgatacttgtctagctagttcatccttaggatgacatctattccctgagtacccattactatgaggttagcgggaaacactatccgccttatttccacacttacattcaagcaaatgctatcgactcgaattctaccaccgactgagtcaatttgaatgggggttgacatggtagtaattggaagattatgtgtttctacccatgatgaagtaatgaatgatgcgttgctccagtatcaaataacacttctaca

SEQ ID NO: 73022 - DNA, 1168 bp, Zea Mays
ttttgagacaaggacatcaatttcgctgtaatctacttgacttaattttatttcgctgtaatcaacctttgagtagagtaagaaagttcatttgagttcaagtttttatattcgcctattcacccccctctaggggatatccaggtcctagtacatccaaaaagtactttgagtcgagaggagagggccgctacatgccaccatggttgtgcacaagaagaagacccacaaagagagagaaaagagaaggggaaggggaaaattaggggggaaatcttggggtgcggtggaatccgcccctggggttgttgattagatgatcgttcttatgaacccaacgagggagggtgcagaatcaggttaccgaacctatgctaccgcaaagaggcatcttatgatccattcacgtagagatagagaagggaccaaagggggtttctcatcgacaatgagaaaggagtcgtcggtggtggggacactggtgctccgaggatgacggggaagacgatgccctcctcggttgttgttgtagaggcggtgatcgtcgttgtcggggatgccttatcgcctgggaactcctcgcctagggaacttctccatgcgtatggatgggagcgaaggggaaattggcgtagcgctgcatgcaagtggagatgcacgaacaaggaggggaacatgcggagatcgagcaactgatgggacgtgcgagggagggttacataggggctatagatgggaggtttcgtgtgtgagcatgggaggggaggttgcgaaggggttcaattatttcccaacgtgcacacgcacaacggagatttggggaggttagcctgacatggggggcaaagatgaagacaccatgcagacccaacaaaataccaattttaaagattcgttaattacaaaagacattaaaacatttttaatgaatgaaaaatgatttcaaagagtctaaaatataggaaaactcctagacatgacttggagttcaaaattaaattaaagtttttggagcttataaaattattttttaagcaaccataaataaatggattttataatttcaagagaaggcaacatcaaaaccacttaacaaagaaaaattatgctccgacatgagatgcaacattcaaaactcctctacggttttcgtttgctaaacttaaca

SEQ ID NO: 73023 - DNA, 592 bp, Zea Mays
aaagcatcctacaaagttggttgcttgagttaaaacactgataaaatcattgatatcaacatcagatgagttgtcataagaatatatatatatataagttatgtaacacttctatatatcatgattattcaaaaacttataataaacatatacttttttgtgcccctcgatgcttgggcctaggcagtcgctccttctgcctatggctagatctggccctggtcagctctgacgataaaggtagctagttgaagaagaccatttttaatcaacgaccagacacatgcggccgggagcgtcccactgccatgcaccaggtcgaacctcctcacgcgcgtcattcaaaaccccgatcaaacatcgcccccccgcgttggacgcaagccataaattgtggttctaatttttgcgcaaatagcgtaaatagttcatagcgatagcataaaaactctgcccaaccactaggccacgtccacacgcgtatgtgcatacatttggcacgccaggtagggggctaggcattaggtttttgctggttttctcgctcagcatgatggtgcaaatcgttgagcaccgcgccgagacttccacg

SEQ ID NO: 73024 - DNA, 866 bp, Zea Mays
attaggggttttgctaaactttttagtgcctaacctctaataacttttgttatttatttagtgagccataacttttaataatggtccatgtcatgataaggtgatcccatttgttttcttactcattcctttttgatgctccttttgctcttaagtgggtgtgcttggggtttgataaatttttatcctttgattagtgtgagatggttgaggtaagccttctagaatgattaacatctaaccagggccttaatccttaagtgtggtgacttttgctctaacttactcacatgtgataatgggtttatgagtggtgttgggttaaaccctttagcttaacacctgagttgtcacattatcttatcctggcgcgtacacctgactgtcccacgggtcgtggcgtgatcgggcgttggtcagctttcatactgacaacgcacatgtgtaccctctctggagtagttattcaggttgtccggtcgtcagagcatgcgtgcccagtctttaactctcgccctgtcattcgagtgttagtctggtacttccgtaccgtcttcgagatgacctttagtatgactttcgagagcatttggtctttgaggggttgagcgtagttcctgacctccaggttgggcgagtcggtccccactagggtggcctcgtatcccaacctcttaggcggataggggacaaacgagttgaagaccttggtcaggggtcggccgaagcaggactattcacgaaggtcaggaaacaaatttagacatgttcttgaggttttgtgccgtacatgggttattcatccccgacatgtggcgtaacacttaacaagtttaaagacctataaataagttcgtggacctaag

SEQ ID NO: 73025 - DNA, 694 bp, Zea Mays
ccaccgtcgtcataattgttctttagcttctattatttagttattttgttaagacatttttcttatatattaaagtttgtgacacttgtttctataaattgagttatcaaatgtgtgaaatttgattctagcagacatatgagatgtatctagatttattattaaattcgggtgtgataattaccgaaggttcttgctcgttctaagttcggtaacacaaggactcggcctggtcatgtcttgaccgtggaattgctagagcctcggcatgagatgctatcttttgcatggtgtggatctaagtccgaccctaagttgaggtccgggttgaagtttaagtccgaccctaagttgaggtccgggttaaagtttaagttagactcgaagccaactccgagttgatgttaacgtgtgtagaccggatcttcaaatcttaaacatggagcacggaaaacgttgcaggatcggataagtctgaggctttcgcgcgaattagtgaaaaatctcatggtaccaaagatgatgaatgtttctcctagtgtgaaactcatggttgtattcaactctctagtttatctccagcacattaaccatccacgtgcctatattcaaactccacactgcgaacagtgcagtgtaaaacagtggtttaaacgatcatatgggtaagctgttggacacagtttgattagcg

SEQ ID NO: 73026 - DNA, 684 bp, Zea Mays
gttagttcagaggtgcgaagcctaccagtacttgtcaaaacaacaacatctaccaacgcagcaattgtagaccataccagtaacttggccgttcgcatgctggggactggatatgattggacctttcaagaaagctcaaggaggatacactcatatactggtagcaatcgtcaaattcactaaatggatagagttcaaacccattgcttctttaacttcagctaaggccgtggaattcatataagacataatattcagattcgggataccaaatagtatcataactgacctaggatccaacttcacaagttcagagttcttcgatttctgcgagcaaaagagcattcagatcaaatatgcttcggtggcacacccaagagccaacgggcaggttgaacgagctaacaggatgatattggaggcactcaggaaaaaagtcttcgataaaaatgaaaagttcgcaggaaagtggataagggagttgccctacgtcgtttggagcctaagaactcaacctagtcgagctctgcatggaaatactcctttcttcatggtctacgggtcagaggcagtactatctgctgatctcaagtttggggcgccgaggttgatctttgaaagcatagcagaagccgaggctactaggctggaggatgttgatgtactcgaagaagaacggctgaa

SEQ ID NO: 73027 - DNA, 338 bp, Zea Mays
tgcacaattgaattgtttcttgctgccttttactccataactgaattttatcttactgtcttttactgcatatgtgtaggttcatatatgtgcctgctccacacacagctgaagttatttgcgaagagctttatgaagcattggtgggatggaatattgatgagaggatctcaactctaactcttgataattgtacagccaatgacaaggtaattcctgatttaatcaacaagattggtaaatcaaagttgatgttagaggggagcttgttgcatatgctttgtgctgcccacattcttaacttgattgttaaggatggtttagaggttattaagagt

SEQ ID NO: 73028 - DNA, 372 bp, Zea Mays
gtgcatggaggatccatttactatggtggaagaacagtcgcagacatggtcttaatattaatcgccatgctgatcctgctcattacatgtgctgccctgccagctacttgttttaatgcctgactccttccttgataggtagctgttgggatcgtcgaggctttttttcattggacacaccttcaccatcggcctgccttttgattcaattggaaaatgctgctattgaagaactttagccgttggactcaaactctacttggatgtgagttgactgaaaccattcttgctgctggtttggctgattagagcagactaatacaacattagatgatgcattaaaccttctgttcctcctttgctagattacct

SEQ ID NO: 73029 - DNA, 617 bp, Zea Mays
tggccggaccaggccccgagtgcctcccgtccttcgtcgttggcccttctgacagcgcctccctacgacgtgcctctgatgcctccctacggtgtgccaccgacgacttcggcttcaccctagctcccactcccgaggacccccaccttgacaccttggtccttgctaggtggaggatggtactttgcctctcttgtcgtcgccttcagcaccatggcgatgaccccaccccactccgactgggtggtcgactccggtgattcctaccacacgacccctactgcaggcacactctcttggtcccatcccatttattcctcccatccctcctcgatcgtcattgcaaacggttccactctgctggtcacctcggtaggtgcctcgttttccctggaccgttctatctcaacaacattctcatagctccttatatcactcataatcttctttctgttcgtcggttcaccatcggcaactcttgttccattgagtttgacccctctggtttttttgtgaaggatctggccaccagcacccctctcacccgttgtgacacctcaaggcccctctacacgctccgaccctcctccaccggcgtgtctccaccacctcctcca

SEQ ID NO: 73030 - DNA, 805 bp, Zea Mays
cgtgagcccatgtttgctcggctaccgccgatggtcgaaatctcgagtgtgtgcgagcgcatctgctagatgtatcccttaagcaattcatgtgaattgcttagggatttatttggtattggcgcagtttaggggtggaccctccctatgatggtcgtcacgcactaagcgtgagctcacagcgcgatccttgggttgtgatcctctgagtcgattgtcccctgagcacttgatccttgatcgacatggttcacccatcggaagaccttatgaagttcttttcaaggggagggccaccttcctctgacctagtttgcacggggaaggtggtcgtcgagcttcaaacatgttatccaagtgagatccgatcaccttttgcggggtttagtttaggtgagtggtcccactaggggctcgacccgctgggggcatcttatttagtcctttcgtattcgatcatgtcttagccctttggttggtctggacgaccaaagaggggttgtggccacccctccattcgagtttccgcaggagaatctaaggttcgactttggatgtggatgcaaacaaatgacctatgggccagtcacctagcttgcactcactgggagcttgctcgatccacccctcgctttacataaggagttgaggcatattttgggggttttacctggtcggcgtgctgtagttattggggcggggcagtaaatagggggttcatcatgacgtcgcttggtgtgggcagcttgatgggacacaaaacaacacactcgtcatatcgtgctcaagtggtgtgatagggtgg

SEQ ID NO: 73031 - DNA, 474 bp, Zea Mays
gtcgaatccgtccgatcacgatctaagggttcctatcagttctatccgaagcaaaacgcggcaacagatccggcccatcaagaagagatccaacggtaccagagccttcttcctcccccggctggccagacaggggccgcgcgaatctacccgcggcggcaacttcgccggcacaagacgagccagtgccatggtgtccaaccgaataattgaactagcgcaatatcaagaggaggcgatgacgaacacaatggatggatccttaccggtcgacacgcagtatagctggctgcctacgtcacgcatcgaccgcacggcggagagacaaccccagcaagaaattcgtcctccccggtcgctcagccgcccgagaatgtcttctgcaatgcgccccgggtgtcgcggtgaagtccagcgagtcccgcccagctcaattcgacggttagagctcgatttctctcctccctctttcca

SEQ ID NO: 73032 - DNA, 724 bp, Zea Mays
tttactaaaaggacactccgtgcaaaagtcgcctaagggtgcagccggattagcacaacaagtgcgcgatacaaagtcttttactaaaaggacactccatgcaaaagtcacctaagggtgcagccggattagcacaacaagtgtgcgatacgaagtctctcactcaaagaaggccaacaggccacattacaatacaagttgcagttacatacactcagcgaatggtcactagacccaccgcacaaataaacacaactacaccctccattaccgccggacaacgcgagggcaccacatactacatcggctcaacctttgggatgatgcccgcgtccctataattgaacaacattattttcaattcctcaccctcaaaaaattccgcagatccccctcaccaatgctcgtcccaatcggtgaagacagtagctctcgtttaccaaaccgatctacacgaagacggtcccgctccatccccatccgacggtgcctaccacttcgcgaaacctcgccaacgctatgcttcgacaccacccttcgtcgccggcacttggccctcgcactaggaaaatcagacacctcaccaacctccacccgcggcgaggactccatcgcggccacatctaacgcatcaaaataatccaagtcttcatccgaagactcttcggtccaggaaaacagactcccaaactcaccatcagacgaaaaagaaccagatttagac

SEQ ID NO: 73033 - DNA, 767 bp, Zea Mays
tccgacgagctcgtattggccggaaagggcaacaactagggctctagctcggcggacacttaatttaactcctaaccaccatttcccctcaactaatttcaagattcaagacctcaatcgctctgcccacggtgacagtgcgatcaacggataacaagaagtgttcccggcgatcttatgggtcctagcttaattggatgggtcagggagtatcaagagcacctaaggatactgaaacgaggaaccagaggacatgaacggacctgtagcacgttggccacagcgaggtcacttcacgcagtgctctggaccgatttgggggaagtttccaattggcgagctctggtggatgatttaggcacgagttggtgtattggttacttgactaccttgcggaaccgatggcatgctcaatttataggatcccagagcggtggcccgtgaatttgagatgacgcggtggcggtgggagagagaggagagcactgtcgcaagagattggtggctttcaccgtggtgagctcaccggcgatcaccggacatgtgtaatacgagctactgtgacgtggtaagacaccaaggcacgtggcgcatggtcgataggtggctaattccagcgagttcatccgaatcgaccgtgagtcaggaggacacggtggccgtagtgaaatagtggttcaagctcatcgatacgatgatatttactaccccgagcaactatcagtactccctagagcacgaatcgtagcgtctggcgcgaatccgag

SEQ ID NO: 73034 - DNA, 904 bp, Zea Mays
tctgagttgcgggtctttcggactgctgagtcaagaatctttattggcttttctcagtactggagatctttctgaatctggattgtctctgcctcgatgtggttctctggtacttgcaggcacttgcggagctgggacacatgaaacacattgtggatatctgacatggattccagtaattcaaggcggtatgttgtgggtcccactctaccaatgatgggataggggccgacgaatcgcggcgctagctttcctttcacttggaatcttttaacaccacgcatcggggagaccttgaggtatacgaagtctcctttctcaaatctgagttctcttcgcctgttgtctgcataacttttctgccgactctgagcttcaagtaatcttttgcggatcagggcaactttctcttcggcctctttcacaaaggcaggtccttccagtgtcttctcccctatgttggaccacattaggggggtctggcacttttgtccatacaatgcttcaaacggtgacatcttgatactggcctgatggctgttgttatacgagaattcagcatacggcaaactggactcccagtttctgtcgaacgtcaacacacaggctcttaataaatcctcgagaaccttgttgaccctttccgtctgaccatctgactgggggtgataggcggtgctgaagtctaacttagtgcccatagcttgctgaaggctcttccaaaattttgaagtgaactgtgtccccctgtctgacactatcttccgagggataccatggagcctgactatctctttaagatatatccgggcaagggtggctcctccaaaggtagttttcactgggatgaagtgagctaccttggtaagacggtctattatcacctagatagagtcgttccctt

SEQ ID NO: 73035 - DNA, 887 bp, Zea Mays
aattttttgtattttactcttcaaatatttatcatgtttcaattcttagtgtagaaatatataaaaataatcaatatgttttttgtgcagactattttgaatatcgaggagctcgaacaacacagtacaaatccgcagcccttctcaacatcagttcttaaagatttaatagtcccgatccttcctccagatgaagttctaaaccaaattaaactgagccccaatcagtattatttgtaaggagattttaatgttcatttgcttataagttatattttactatatttttatttttccatagccatattattattaattcataaccttatacatatatgttaacagatcatggttcctatgctacgccgtagtcactagaccctttatgcaatcaacttccagcttcgtcgaatagacattttagattcaaatccttatggaccattgcttggtggcactttctgtaaacaaatccacaatgatcaattgttgataaatggaatgaaaataccttggtccagattaataatgagaagacttagcattgccttacatgaagctcgaccagattctagtttaccaatgtttggcaactacaagattgggcttcttcccaactgtccaaccatgttaccaggctccaatgattgtggtttttttgtcgctaacttcttccgatgctacgactttgatgatggcgacatatcagaatttgttgtaccggtacgttactaaattactttttgttaatgcataaaatactttttcatacatcttcttatcattaattcaactattatgactattacaggatgaaccattggaccaatgtgtgtttgttctgcattacatgacctttcatcgcaacaatagggtttaccccttcc

SEQ ID NO: 73036 - DNA, 430 bp, Zea Mays
ccggacctccctcgccgtcggtaaaccgcgccatccttttcctctctgcggttactgttataaggggggaaggagctcggctggaaagaaggagaagccagggggttttgcgaagtcaatgactcagatgaatagttccgcaggggtatggtttaaagtattagttaagggaaaccccaggggcctcggtgcaaactggttttcattaaaccttttaaacataattcttttaaatgcagacagagcttacaaaattcataactccaattttatccagccaaatttggtcaaactaattttgctaggttctaaataatatgaactacttaggaaaaataccaaacacccagggtactgcaagacttttaaaagttttgatttaaatagtaaactgaccaaaagctaaataaataaggcaaaatagttatac

SEQ ID NO: 73037 - DNA, 495 bp, Zea Mays
cgtcgctcgcaaggcattgagggccctgtgtcaaatttatgaagaagaagtggctgacaccccgctcagattctttctgccctttctgagaaaccgtcccgtttggatggctaggatgcgtgcattggaagggcagcagctgcttgaggacgacccctcagtcgtgtacctcactgcatacctgctaaccctggatgcacagtatgatttcttggctcggcaccaccgtcagatgattgcccgagcagaagatgcagagaagcacaaccgtaagctccatgtggatctcaccaaaggtcaagcccgtgtagctgccttggaaagtcgtgaagtcattgctgttgaagccctcaagcaagtcaaggatgagcacgtccagaagttgatggaggcctacttggtaacccataaccaacatagagccctgcggatccaagagcccgcttcatccaacccagttcaatccatgagagctgaagatccccagattcttga

SEQ ID NO: 73038 - DNA, 661 bp, Zea Mays
ccaaatttggctagtgagggactcaatttagagagccggatagcttgtcaagttaaatgactaatctgttggagaacaattttgctactaattagctaaaatttagcttgataagctatttaactagtctcctggagatactcttacatgtccatgaacagcacgaggaaccccctcgttggtcatctgcccgtagggtgaacctctcgaccgcgtactcgctgacggggagcctccagatggtgagcctggtgtcttcatccgcaacgctcatggcagcccgcgagcggcgtcagtggtggtgatgtggacgacaacgacggagagcatgggcatgcctttcacatagggatggcaaccgatcggattcaggttggattttgcaaatatccacccacaaccatatccgcctgtgactatacatgcggtctacggataaaaacttatatccatgtccgtgtctatcaggtttcggatagtttttggatatctgtgggatataatagggacaatcattttcaacaattcaatagcataatcaatcaatttttccccaaatcaccaccatatacaattaaaatcttaataaaataatcatacaagtacacatgtcttttaacaaacaatattctcaacatgacaacgtgtaagggtgcatggg

SEQ ID NO: 73039 - DNA, 499 bp, Zea Mays
ggcggttccgccacagaaaattactaaggagatcacgaagggtttgtccgaagattctgatgacagtgatagttatgatgtggagagtggagatgaagattatgaggatcggccctggcggccaagccataccatcttcaggaaatcgagcatcaaacaaagtcatattgacgccatgagggggagatatgtccgcgatatgtttattgtgagggttggaggagacagcactgcccctactccttaggaaaacgaagctgttatttaccgaagcttcttgaaagcatgtctccggttcccactgagcaaatttgtggttgaggtgttaaagatttttcagatttttcttcatcagattacccccgaagctataattaggatggagatgtttgtctgggctgtaagaagccaggggctggagccgagcgcgaagtgcttctgcagtatgcacgagctattatacgagacaaaggctattggcaaagaacaataccccaac

SEQ ID NO: 73040 - DNA, 944 bp, Zea Mays
ttttttgccggcaccacgccagtgccagtgccagattgccaccgcatttcttctgccgtgccccagccgggacgttaggatgtctctgttggaatgtgaaaaataggagaagcagaactgtagactacactctttgtagagagatgtttgaaataaatgatgtgatagaaaacaagattgacggaacgtgaaaaataggagacacaaaactgtaaatgacactctttgtagagaaatgtttgaaataaatgatgtgatagaaaataggattgacgatatgctcgagatggttggccttagtagtttctatcatcctcatccctacaccctacccagatttaaagcttataaagctatttaagagtgctcttttagcatacaacgtaacatggttggatttaaagcctaaagctatttaagagtgctcttttagcataaaacgtaaaatggttggctgggattaaatgtctctccatattagaccgtctttagctgttcatccatggtcatcatccaaatcattgtttttgccctagatcatactctgtttctccacaacttaacagtaaaaagaatctaatgtgcttcctccacaccatcttcttgacccgtcgtctccatcccttgtgctaacttgacactttcgggctaccattgtgatgtcccgtctttaccctggccatggaggccttgcctttttttccacgctcatgactcaccaccaccaccaccaccaagcctatctgctgccgccaactttccagattatcgtgttcttcacatggacctttaaggatctgttaatggtctgtttgaaagagctttaagtctgaaaatcagattgcgctgaaaaaacatgtttgagagagtttcatggtatatctactaggtcggcccaatatataattgcagcccatgagtcagcgtggacccacgcgtcaatc

SEQ ID NO: 73041 - DNA, 438 bp, Zea Mays
tcatggcggtgaggtcgtgatagggggtgggatgtggtgctctgtgttcgtggtgatgtggtgaagttagtgagctagcttaatttgaccctaggctactgctactggagaggggaggaggagagctcaccagagtgaagggaggcggcagcgctagctcgattgagcctaggggagagggagggagagtggtcgaggccggtgcgaggagaaatggagctcggggaggcctttttataggcacccaggggaggggagcggctaaagcgggctagcaccgatgaggtgcacagcagcggcgataatagcgcacaacatcggggatgggatagttcggggaggtgtcgtgcgagggtgcaagcatagtgggcggggggttacaaaacggtgcctaactacactggcgcaaagtaatggcggggtggggaaagaacggcg

SEQ ID NO: 73042 - DNA, 565 bp, Zea Mays
aaataatagtatacgtaggaggaaggagagcaacgaaaaagttgattccataatcattaggtcatgcatgcatcatgttgaaactatactaaataaatttttcccgcttatggagatatgacgcataccaagaccacccaacaaaaagcaactggacctcgaggtgtgccctagcaccagctggcccctagacatgaagggagaagcagcggaagcaatgacccaataggggatctggaggccagggtggcacggctcatgtcagaactacgccacgggagtagggagcgtgcgcgagatagtcatcacattgttgaactgtcagcggaggttgatcgcctgtagcagaaaattttggaacgagacacgaccattgactgggccgtaaattcgtgatctttcgcctgggattgtgaggtcaaggctctagcccgggtagaggaactaagcgcatccctagaaaatctgcaagtgtattgtaacaccctgcatgaagaggtgcacatgttatatgaccggctgcatccaaatgtgtcaccagaagttgcaggaatggaagccggac

SEQ ID NO: 73043 - DNA, 337 bp, Zea Mays
ctaaaagacaaattatatagaatgtcaattatacctgctatattgtatggtgtagaatattggcctacaaaagatgacatatttagttgataaacgttatgaaaatgcatatgttgtgttagatttatggacatataagaagggatcgagtgaggaatgatgatatatgtgatatgttagtgttggggagtgccttaggtcgaaggtccccaaactgatgagttttattcgtttccacgtttgtattaggattagttatgtaagattcgtaacctaaatagagtaacaacttcatcatcaaggagcaagtaagagcttattcaccaaggcttggaca

SEQ ID NO: 73044 - DNA, 490 bp, Zea Mays
ggcaaattcaactttcctttcaggtggcatgcctggtaaatcttcagggaatacatcggggaattccgacacaattctaatatcctcaattggattggcctccttgtcatctactgataaatggtgacaggctccttcttctagttcagacaagtacaatttagttactacttcctttccggatggggacaccaacttgactgttctcttgtcacaactaacagtggctttgtttctgtgtagccaattcatccctaggatgacatttaacccttgagtacccattactactatgtcagcggggaagtctatcccccttatttcaatccttagattcagacaaatcctatcggactaaacttttcccccaactgaattaactcttaaaggcagaattattggttctatgggaatgttatgtgcttgtacccatgatgtagaatcaaaagaatgcgtggcaccagtgtcaaataatacttttgctggatgg

SEQ ID NO: 73045 - DNA, 353 bp, Zea Mays
agacgcacgccgctcaattcctcatcggggtcaataaatctgtgtgtgccgctgcactccttggaacctcatctacgaagttgattggtgtgcagagtgagaccatggagcatcgaggggacactgacgacctatgcagtgcattgacatgcgtgttgatcgatcataacccatggaattgttccccggacttcgaccaacgccgtcaaaccgcttgttaccgtggcccttcatcgccgcctcatagactcaggtaagacccttaccatcttgttttccataggtccctttatgtgtagcactgttttaccgataggattggcacgcgtgggcggtggtaaccgtacgatggc

SEQ ID NO: 73046 - DNA, 632 bp, Zea Mays
gcaagacaaccttgagcacttgtcgggcttcgtcaatattcattgtgcattcattactcttagaggtgcagcctcctatacgggtaggcatcgcccgatgagcacccgtgcttgtggtgagccgcgggaaggtctgtaattactcgatctcttagtggaaatctcaactaatcaccttggtggttagagaagatgagtgagttgaaagagactccaaagctattttagcttcctaaacaacgtggaggtaggcaagcctttgatgcgagctgaaccacgagataattccatgtgtcttatctcttttacattttcatttgcataacttgctctcctctagatatacttggttgtgcatatttataagtgcaggtacttagtggactttccacaggacatcaccaagtccatatctatgtgttgcttgcatgcaaagttgtttttgagcattttgcatcgagtgacaatgttggggcttagcgcggcagtgtcgggcaggtttctgacagcaggtttgagtttagtataaacacacatattccgttgtggtcccgttgttcagtataccttgcttagtttagttcaaactatctaggatttgatattcatatacatagttcgttattctagat

SEQ ID NO: 73047 - DNA, 430 bp, Zea Mays
gctgtgctcattccaattcttcaaaactagagatatcgcctgatttatatgatgtctaggcgtggtaaatatgctaaaccaaggtaagttttggatccgcctcttattttgtgagtctattatatttgtgattgttatagagtttatggaaatttaggaagggtcctttgaccggaactgccttcgacccgctgcctttgccaagtggtgttccagtgcctatgtgtttttgtggtgatccttgtaaggtcgataagtctgaggatcatgacacctatcgacagaggtattggatgtgtgctaactttgcatttgagccaactattgttcagcgtcggatgaatttaatggtgagaatagtcttgtaatatgtttacaatttgtgaatgtttttgtaaattttttttgcgtactaataattgcatatttt

SEQ ID NO: 73048 - DNA, 671 bp, Zea Mays
taagtaattgttatatgtaggtgtttccagtacttcaagtggttgcaagttaattagtagactctctatgtgacgctagatgtctaggtagaattctgaaaattatggtgcccaaattgtcaagttagaggtgtaattcgatcaatgccgattaagtggctgaaaataactagtaaagacgttgtagatgtaaaactggaaactggtatgcatatgtcctcgtatgatgttgtggtaccttgatgacattaaaatgatcatgtgttgcgagaggtaaagagtttagaattaacttatcgtcacatgctaatttacattattaaagtgtctctttcatggtcaccaacttacataacataagcatgtgatagttgtgttcgataaccaactcattgcaatttggaaatgggaatttgtagtaactgtcgctgattgtgcttgatgattgagttaagtgttcttgcacccgtttgagatgttgtagccaaattacgcaaggttatggtcgtggatgaaaagtagtagtgctcatgtgatgaaaacgcaaattgttgggtgattatcgtggagaatgcgttgttaattgattgtagtaattttagtgcactaaatgatttggataaaatttgtaagtctacttgctagtcctcatttaattaatttaactctaa

SEQ ID NO: 73049 - DNA, 438 bp, Zea Mays
caagaaatgagttgtcttggttagcctatccacaatgacccaaatagaatcatggtgccgggaggtgttgggcaatcccacaataaaatccatgcaaatgtcctcccatttccaagatggtatggggagaggttgtaaggtacctgctacctttaaatgactagctttgattctttggcaagtgtcgcactcagatatgtacttagcaatctctctcttcaacctggtccaccaatataaggatctgaggtcatgatacatcttgttacttccggggtgcatggaaaatttggagagatgagctttgtccaaaattttcttcttgagttttggattcttgggaacaaccagtcggtcttcgaaccataaaatacccttgtcgtcctgacgaaagcatttatacttatccaccttttgattgagcatttcctgaatgac

SEQ ID NO: 73050 - DNA, 484 bp, Zea Mays
aaacatccaagtaggtttggaccaatcgtgattaatcgacaacttaaaacattgatggaggtacggtgtgttggctacttggtttcatgttacacctatgtacccaggcttgtgatactttagcgtttgtttgattagctgcatgtataggtgtggcttggcccagatatattgtttatctagattagcaaggtaggcatggcatagtggttattgtatattgtcttccatccaacaagttgcgagtttaagtcttaccatgcgtattgattttttaccttacttttattttgtcgtccgcgtggagaagcttttcttatccgtgatatatactcatcacctgcagaatatgcaaatgaaaaatgatgctaaactaggaagtaggaacagaacaaggctgttgtatctgtctttgagaatcgctcaagtgaacgtcttagaacgcaggatcacgaaagattatgaaatgcgaaaacactttcgc

SEQ ID NO: 73051 - DNA, 358 bp, Zea Mays
ggaggatgtttctgacgaaggtgcacctgccactaaagctgagcaggttgatgctgaggaaggtgaatctgaagatgattacagtgccctgccatctaaacccagccacctggagtttgggaggtccactgttaccaaagatgatatgcctaagttgatgaagttaggctatttcagtgaagccaaaaagaagctgattcgctttggcggagatgaaattactccgaagccagaaaaggatgaggtggtagtctttaaaagcttctttaaagaaggattaagatttcctttgaataagatgattgctgatgttttggagaagtttgggatttatcttcatcagctcctaactccatcg

SEQ ID NO: 73052 - DNA, 416 bp, Zea Mays
attcaattgggttcggttgccctagatcgtcgggaatacgtttgttcccttgactgtcagcgttgtctccgtagaccgggtgatttagagcctgattagtgaaattgagtgaggggaattgatgaagaggagttcaatctggtgtctgcagcacgggagcgccagtcatcgagtaaacaggccggtacaagctcaccggagctcggatctccgccgcacgacgtcggggactttgggttgtgaagggagagaagtgtaggggtttatttgtaagtgtcagcgactgcctcaaacagtgtcctggactctttcgggttattcaaaaagacaggggcttccttgcaaagtctacatgcgggcgcaggcgcacacgtttccgcccgtagttgggccgacctaggccagattcggtccaa

SEQ ID NO: 73053 - DNA, 336 bp, Zea Mays
cagacacttaaacgcccttacagttaaatccaagtaccctgtacccatcattgatgagctacttgatgagctgtttggtgcctcctagttctccatattagatctcagagcgggattccaccagattttactcaaggtaggagagttacacaagactgctttccaaacacacacgggccactatgagttccgggttatggcatttggtctcaccggggcaccgggaacatttcagaaggctatgaaccacactctaacacctcttcttcgtaagtgtgctcttgtcttcttcgatgacattctagtgtacagtgcatctctggatgatcatacccg

SEQ ID NO: 73054 - DNA, 602 bp, Zea Mays
ctttgatattttgtgcaccttgtggtgcacttgataccacaaatagaggcattgggtcctgtgtacttgcatgaaatgtggacgtatgagcgtttcatgtcaatactgaatggttatgtatcaacccgtgctcgtcccgaggcatccatgatagaggggtactgtaccgaagaggccattcagtcccaaggtccattgtgcaatagtatcctaaaagaccaagttgcaataggtctgcttccatcacgacacgggggtagactgtatggaagcggtaggatgggacggaaatacttcatcccaccgaattacaatataatacttgaggcacatcacaacatcctacatcagctagagataatggaaccttaaatccaacaacacatcaatgagctttgcgagcaaaatcctaggcaaatagatgattaagtaatgaagcaacataagtagcggttcaacacatggctaattgtgaaagacattccacacggagatacaatagaagaacaaaccattaaggggttggcatctagaccatcacgccaggtcatgacatgaaaacctatgacattagtggatttacattttgtaccaagtccaag

SEQ ID NO: 73055 - DNA, 476 bp, Zea Mays
gggcatagcatagcatagctgcatagccggttggttatgtagtggaggctgctgctactggtgcgtggttgtagcctctccctcccccacccccacacgcttgccacttgaggttttgtttggatattgttcgaatccctcgctgaaatcatgtactccttatccagcgataaataaaaagaaacagagagagtattaggtacttctattaaaatttacttggacttttattttaattcataccaatctaatattaattaatgcgaatctgattaaatctcgataagaccttaatgtcttctatgtgtggtatatacagagtttttgctgttcggagttcacggtcgtttttcattttcaatatccgcagtgcagcctttctgacctcggcggtgcgctgtttgctcctcttcctccccatggggggacattttttctcgccttggttgtcttctcttgtttcttttttcgcgaat

SEQ ID NO: 73056 - DNA, 336 bp, Zea Mays
ctggaatagggacgaaggctaggggaggggcgactatgggatgagggctgacgtccatgggaagagctgggtcggccatgggaagagagggaggtggctggagtccagggagacatggggaagatgatgctaggaagagcggcgtaagaataatagagagggtcctgtgcgcgcatagaagaaatggattggatcactagcgtgcgtgttcaggagatttctagcgacgacgaggggataaggctgagcaagagggacacacgtactgtgctcaagaatttgaaagaaatggctagatgtctagagcggtgggagataaagataagaaggaaaagg

SEQ ID NO: 73057 - DNA, 661 bp, Zea Mays
ggtatttagccattactatctctaatggcagctgctgcatcacacgtccggtgtaggaatagacgatggacacggacgcggctggctagtcaatttcgtggactgctcacggcggcctgcaagcggacaagtgtttctttcaacggcggattggcgcttcggtttgaattttatgggaattaaacacctttaggaccgacatctgacttgctcttagatcctttactggcaaaaatgaccgcgatgcctaatgatttttcgggcgtaaactcggctaaatggcaatctggatggttggctgatactgagacagaccaagctgcagctgcaaagctgtgaatgggccaaaagtcttttggcctttctagctgagctgccagcccaactagtccatctgtgactgtgagtcattccaaggacacttttttgtatgcccggagctcccgaaggtcaggctaccaccgctgtcattgcatgttaggggaaacagatctcgaaagtacaagcacacagattcttttttagtttacaatattttcgtttaaagtcatcttaatacccaaataatcaacttaatatttcaatctacaaatacttatctgaacattgtagatctctttgtctctccataattttatataaattttatcttcatccaaat

SEQ ID NO: 73058 - DNA, 545 bp, Zea Mays
gacgaaggccagggcagacggtctgcatgaaaattttggctgctacaattttgcgtatcgcaaggatacgaaggctccagttctcagctaccgcaacaaatggccaaccggctggaaaggtgaatggttttatatcaagtccaatgagaagaagagggggaaactgatgacgatggtcatgtgcccgctgactttgaacttcagaatgaccaggcccctgtgtaacatgcagctagggtcaccatgccagctggccgcagtagaattcaggatggtggctgaacaaatcagcaccagggacttggtgcaagaatacttggccaacaggacatctccaatgtcaagtgattggggcatgccgaagctatagggaacaaagaagaaatatgaacttgttcgattgccttatcattttaagtttgagaaacagtttaaggagccttgccaagaatggctagaaatgattaaaactatgtgtaatgaaattttgggaaattataccaaaaaagaagacatattgatgacagcagccttcagcacccggc

SEQ ID NO: 73059 - DNA, 612 bp, Zea Mays
tgtttccttcaatttgatgttttcttctttgacttctgtttccttttttaggacttactacatctttagaatctgccacgaaggattctggcaaaacctcagtacctatattaaaattggtcggaagttcatcttcttggtaaatttcttcaacttctacctcgaaccattcacccttgttgtgtaaccgttcacgaggattaactttgtacactacccacgtggcttctagctttgtacatggatatggtatgtagtacacctggtcaacttggtgagcaagaacaaatttgctacatgcatttgttttgagctcatgtttgacttctaccatgccaaattggttttctacagtcccttgattaggatcaaaccaatcacatttgaaaaacaccgccttaagatttttgctaccagcaaagtcgtactcgagtatgtcattaataactcgataataattcatctctcttccacgatcatcctgccctgcatacaactccagtatttcttgtcgctgcaaatggacgagtagactcaaatttggccgaatgaaaacaaaaccccttaatgttgtaacgaccgtaacttctgacttttatgattgcgtaagac

SEQ ID NO: 73060 - DNA, 827 bp, Zea Mays
ggataccagaaaccctaattggaaccctggaaaaaccctaaaaccaaaccctagggacttatgtgcaaaattagtccacttttggactaaagtgcaaaaactaagttaaataagtatcttaaatcatttgggtcacaaatatgtgaatttgcaagccaaaccctaagttttggaccaaattgcaaaaatcacctcttaagcactatagagcctaagtctgaaatcagtgtgttttcttcaactttgaacccttgtatctttcatgttctagggattttttccctagggcaccacatcaaagttgtagacctatcaaaggtgaacatttttgcttaagaatgtgagctcagttgttaaaaagaatttagagataattgagcctgaagttggactgtcagactgcctgagtctgaaattcagattaacagtgtgatgggatgaactttgagtatgaatgccaccttgatttagtgatcaaacgagttcagttcctatagtcgaattgtagatggtatatagctctacaactttgctataggtcactggatgtgttgccatttgaaaatcagagaaaaagtggcttaaactcgctctgtcaggcaactgaatgggagatcgccatggtacagtagtccgttaaggatcagaccgggcgcaacaaaagaatcccaccgccggtgacccctccgccgtgattcgtgtcgccggccttaagattcgtgtgcggggtggattgataacgttgcggggtaagaatcctcgccgacggtgagctggaggtcactccggtgacatcaccgtggctttcttatcctctttgcggctga

SEQ ID NO: 73061 - DNA, 369 bp, Zea Mays
ttgtaatattctctaaaacttttattataatgactgtctcagagtcgatttccaaaaccgataaaacaatgcaactcttttgctgtaaaactgacaggatagaaacaatggtcagctaaaattcagaatctacaaactcctgctgtacacaatagaaaattgcaaacgagtacgcgccagaaaggttttgaaattgtccactacttttgtaataaagttgctcccaaattcctcatttataccatcaaatctgcaccaccgatagctaaattcagtctgaaatattgcacttccgaaattcgacccatattcagacatacacttcttccaatctatttagccaaaaattacaagtaagtacccattgga

SEQ ID NO: 73062 - DNA, 467 bp, Zea Mays
cacagtggtgatgacctttggtgtggtcctacgtcacataaggtgggtcttatcgtgttgtggtgatgactcaagcttgacagacctaccgcgccaaggtgggctagcacgataggatatatataggtcgcgagcctgacccactttctcttatctcccccactctctctctcttctttgtgcccctttgctcacttaggtgttgttgcctcctactcaattgccattggcactgctcgtggtcggtggtaggatggctcatgtcggtcaccctcgtctagttgctaggtagaactcactctccccttgatttcttgcttttggtctttcttcatttcatacctaaggtttcgtaattctatatggtgaatgtttcattgaatttgttcttaggattggatgtgtacattaggtttatgatagatggattcgacataaagtatgtgtagcatgaacctaggtagttg

SEQ ID NO: 73063 - DNA, 310 bp, Zea Mays
acagcagaatgcatctcaaggcagtcagcccactacaccctcattggggatgcactgtacagaaggggcgcaacaggagtcctcataaagtgcattccttcggttactgggaagcaactgttagatgagatccacgccggacagtgcgggatacacgcaacatctaggactctggttgggaaggtcttctggtctggtttctactggccgacagcaaagagtgatgcaaccgagttagtacagaggtgtgaagcttgccaattcttatcaaagcagcagcatttacctacacagcaactgcagatcatac

SEQ ID NO: 73064 - DNA, 900 bp, Zea Mays
gcaacatcgtaacaaccgcgcgagaaccacgggctgacgctggctcgacaacccctccaaccagctcgtccgcgaggaggatataagcccccttcctcgttcccatccacaaccctaacaggaccacttggaactggggaccgagagcaggggaaatcaaaggagagagaagcagtgcaccatcacgttcgacttccgtgagcatcgtcgtccaacctcgttttgggtctcggcgtgctaccagtcgggtcgcatacataggtagaagcccccggtaccgttgattgggcgcatgatcgattggtggcagggcaattgctcactggactcactactccgccgctgtgccacaggatcgtgtgtgcagcaccgccatcgtcaccaacctaggtaaggagtgcctaaatcgattcatcgttttctctgcttcgtttagcaccaggtggattcgcgtatgggtgcctgagcgtcagtttggctatctccggtgatccctccgccgtagggtgcggcgtcgccgcctgcgcggggttttttgggggagagcgacctgggcctttgatcagctagcgaacggtgtggattaaattggccatacctgttcggtgggcggttctaggcagttgatcctcggatcgacagtggggagtggatcgcgtcgcattaaatctgggctgttgatctcgctactgatggctgggatttgggggctggcgtggacagatctctgtcgatgacttcggatccaatgggtgggaatgcataccggttcagttttaattagatctaatctcggccacaggtttagatctggcggcttagaaccaccaataccctttcgaatgggtaaaactgcagaaaacccctctgttcctgcggaatcaactcgcagtgcacgac

SEQ ID NO: 73065 - DNA, 1368 bp, Zea Mays
ccccttccactcctcggccaagtgggccgagcaccgcagcccagcttcaccatgtccctatcgcgtcggacccgccggtcgaaccatgtttcccctgcacgctggtgcaccacggacgctgatcactagggcccaggtgtcagctctatcccctccacgcaacaaccatgcgtgcatgtcgcgaccaacctagaaatcggcctgttggcgcaaacagactcctatctggccggccgccatccaccccgcgcctatatagccttcatagatcccatatacacaagccttagcactcaaaatcaagccaccatcaccgagaagggaagaagaggggagctgtgggccaccgtcgtggtcccttgccttcactagcattcgagtgctcagcgtggtcgttggtgttcgccggtgcatgggggagctttcggatgggtcgtcgtgggaaatccctaccccattcctagcaaattgctcaccagagggcaaacatcaccgtggatccgcaagaaactgtggccaagtctgtcgtcgcctagattcacggtaaaaagctccatgattcgattcgccttgacctactctatgttccagtctagttgtgcattgccctacttgcttggggcgctagattttgtgtgtcggtgacatcaccggcgtgggttaggcccggtgccgctcgggcgcagccaagggatgaagatgtgtccctagccatcgaacggctaatggatggcctggattagatccgtgcttacccccttcgcggagtttgatctgtgccgttggatttgtggcgaacgaccatgattagaagataaagtaatgtttcggctagatcttatatccatcattgatttttgtgttgatggtcatgattagacgacttcatacccccttcgcgcattcgatctggaccaatggattgtgatcgggtggttctgatgcggccgcaagcgtacccctttggtcgttgcatccgcacccttggatcttgataagacgatttggatcacgcaccatttcggctggggagtaatctaatctagacccttgatctcagatcgcagccaaaaacagcccataccccttcggccagtcagtcttacatatgagcccctgtgttttatcagaataaacccgcagtccagctcagttcaacataaactataaccaggccctgaaatttacaagttagaccccggatttcaaagaaatagtgtccccgacccatgagtctttgtatattaatgaaactaattcgaaaatttatttgtattgccaaggtaattctaaaaacttagaaaatgtgtaactaattaattttaaatcctttttgatccattccaattgcattagtctcataataat

SEQ ID NO: 73066 - DNA, 388 bp, Zea Mays
gattgatgtaggggatagggggttcaggactctatcagctcatgagtccctaacaccgctatccacctacgctgctttggtcagcgatgctgccaggcagcctttatggtctctcagccccacctaccggcagcagctgcatgacacgaagttcaggcatcttcctctgcgtctgagtggaggtagccagaccagtatcgttccaggtggagctggagaagatcgcctcaacaccctagctggtgtagttgcaggtcttaacacagacctagatagtgccaccctggatctctctagggtgcacttggagctggaggatgcccacgccaggattacagccctggaagctcaacttcaaggacaggatccccctgaatcctaggtcccc

SEQ ID NO: 73067 - DNA, 478 bp, Zea Mays
gacaatttgaagaaaagaattggggtttaagtgtgtaagattcagagcataaaaatcgagaaggccacggaaaaagggagaagctagtagggccagtcctcggatgagaaagggcatgaagatgacagcttcatgggtgtcctctgtcggaaccataactcccccccagattcgccaggaacacaagtcctttggcggaagaacaatagtttcgacgaggtgcaaaaggttagacttggagacaacagacatgtggttgccggcaaatggaagttgggtgttagaatcgattgacgggataattggaacaacaacactctgtctcttcctcttgggagccctcacattctctccagcgaagtgggtggactcaagagctcaggaaacagagaagcggtagaggaaaaaagtgagaattagggttcagaactcaaggcgatacgtcagcagaaatatgggttggctcgataagtcgggc

SEQ ID NO: 73068 - DNA, 482 bp, Zea Mays
cacagcccgcgcagtggaggcagaacccacgccagagggagaggtcgatggtacagaggggatagtggaaggtggagatggaagtgagttgtggcatcggggacgcacgcagagggactgtggctgtgggtgctgcgaggccatggcaacgtgagaggctgagatccactttcttcgactggatctagggtttggagtgcaggaagggtggtcgtttagctcgaggaggggataacagatgactgtggattgagggctggatctagagggacggcatataggtttatttcaaaggatcgtgagggactttcatgtaaaagagatgaccaactggtactttataatatacggatgatattgcaacatatcataagcatggccaaaaatcaaataaatatacgaatgatacttgcaacacataattagtgttgctctatacttgtcagtaacgtataataactgcaacacataataaatgttgc

SEQ ID NO: 73069 - DNA, 438 bp, Zea Mays
tcgaggagcaccgtagttgaggtcggacgcaggtgtcgagaagggggtggcgtcgagaagggggtgggacacatatcactgaggtctagtacaataggccataagtgtgacgtaggccaaggggcgtgtgggtcattaatgtgtcgcagtccgacgtccgtaggtcatgagtgatatgcgacccgagggggctgtaggtcatgagtgggaagcagacatgcgcccagtgcggctcggtaacagtcgtggttaatgcacccaaccatttatggtgggtcagttcgggaccgggtgcgtgatccacgcgagtggttcccttcgacacacccgtcctctcttgtcaggctctgccatgcctggcccgggttcggtgccgcatgattcgatcgggagcggatcatctcagagttggtgcactttctcttccgaccgaatagt

SEQ ID NO: 73070 - DNA, 562 bp, Zea Mays
cccagcttacctgggacgcgctgaccgacgggtcgtgcgcctccaatttctcgtcgtcgacgtgcttccgccgcagtaccgctcgcgccgtggtcacagaattcgaggccaatgcgactggtaagaatcctctctaccatctcgttaccacgttttctagtctcgtcaccggttgtaagtgagtttcgtgcgcactggcgggatttggccgtcggccgaacatggcgccgccgcggtggccgacttctaccgcggtctgagttccagaaagggggagagggggaaatcacgtgcgcggcgtgtgtgggccgttgatgcgttgcacaacggccaagattagaggatcacgcaccttttcgcgcgatcgattagggccgtggatctaaaatccgatgatcacgagtcgatttcggttaagagaatctgagccgtagatataggatccatcggctgtcattgtgtaccggctcagttaatggcagatttaatttgtgacgtccacttctgatccgacggctgattacggcccataccccttcgccgagccaaaactgcaaaatag

SEQ ID NO: 73071 - DNA, 425 bp, Zea Mays
ggggtccaaggtaatggtgttagttgtaatgaggtgtcagtggcagtaggttgctaggacacgataccgagagcaagtcgggggtccatgtgtcaatgttagacagacggcggggttagttgaagagtgaaaaggctagcccattaaggatagttcgaatagacctggtgaagccccaaagcaataacagttcaattatatgtccttcctctaatgaactacatttctcatgtcaggttgctgtagaggtggccaaccctgattgccaacaattcccaagctcactggtggagggtgaggggattcactatgattccaagctaggtataacgagccctccaagcattcatgcctgatatgtgtctcacgtgtcctatccacccgtggtatgtgtggcatgcaataaatagtgcattgctatcttt

SEQ ID NO: 73072 - DNA, 425 bp, Zea Mays
ctacgacaacgcaacaagcctccataacaagcgcaacaggcacagttgtggctcagtaattgggggtacgcgtcaagtccacacaacgtgcgcaataaacgcaattgtggctcggtgataacgacagacgaacagtgcccacagggcatgcgaaaaatacgtgactcggcgatatcggcccaactcaacaggagtggtccgattaagcgagagtacaacatagcaatcatatgacgcaaccaaattcgtatgacacaaataatgcgtcgtgttgccagggcgcagccaatgcttagccaatgacataactcagccgattaataacgcagcctgatcggcatgtctgagtacgctctatacaatttactcgctcgacgtgagcccaaaagctcagtgcaaaatatttagagcggtttgagtctgta

SEQ ID NO: 73073 - DNA, 610 bp, Zea Mays
ctgaattctcctataacaatagttaccaagagagtatcaagatggcaccttttgaggctctttatagtcagcggtgcagaactccattaaactgatcaggacatggtgagcggtttttctttgtccagatttagtaaaggaggcggaagagaaagtgcaacttatccaacagcgtttgaagatagcacaacatcaacaaacggtatgcagataatagaagacaacctttgtatttccaagtgggcgattttgtgtatctgaaagtttcatctatgaagggagtaactcgttttggcatcaagggaaagctggcaccacgatatgttggtccttttgaaatactggcacagtgtggatccgaggcttacaaagtgaagctgcctgaacatttttcggccatacaaaatgtattccacgtatcccaactgaaagaaatgccttcaagtacctaacaaagtggtagaagtttctgatgttaatctggagccagatttaacttattccgagcaccctattaaggtcttagatcaaaaggaaagaattacccatagaaagactatcatattctacaaagtacaatggaataagcattctgaagatgaagctacat

SEQ ID NO: 73074 - DNA, 756 bp, Zea Mays
ctaataaaaatacaagttctgttgtttgatacttttcaaatgacaagttagttataagtgtcattttagattaaaactttagaaagtcacaactaattaaccacaaagtattccctctgtgatttttggcacagagacctattattacacctaggtgccagtaaaaatagcctttagggcaaaggccacttctagataggaggtgtagtgcaaagtaacctctctgccctagcttttaatatttttgttcaaaacagattttaattagttttgaccctaattttctgggacagcctacctaaaccagtagtaagccactataatttttggaaaatttttggaaatttataaaccccagttgtagttcaaacccactttaaaagcataaatagaaaaggaaaaaggagatttagaaatagcacttagtgtcactcttggcaaaaccctttctaagtccatgccagatccttgaagaatagtctaagtcccataaccaccttgcaccccttgttataaccatgatactaaccactaagtgtaaaccactaggaacttcttacgacaaggaaaaccctaagttcaccaactaacttagtaattcttcactatgcatcatggttactaaatttgcatatcatcacatacatgtatcttattcattgcactcgatagattgcaacctcactgaaggggaatacgtgctcatcccggagcaaggtattgcccaagaagaagtccaggagctagctccagaac

SEQ ID NO: 73075 - DNA, 593 bp, Zea Mays
atttggattattttgcggccttggatgtggctgcgacggaggcttctccgcatgtgacggatgctgaagtttgtcctggtccgagtgttgggcataggcggcgaagggcggtggcgaagcgtagagtgagtgaggtggagggtggtcgtatttgtgtggacagggctggcaagtgggaattgctgtcctcgccggttggggcgagtgtaggtgagggggaattgcgaagtctttttgagggtgaggagctgaggataatgctgtttaactatagggagatgggtatcatcccgaagattgaaccaatgtaaggtgtgatgccctcgctgtacgtatgtaactataatttgtatgatgaggctgtgtgccttcgctgatccggccgtgcccgtacgggacttgtgcactaggtctagcgcgtttattatgatggtccggctgtacctgtagtcggtctttgcatggatagtcttttgagggagacttcgattttgcgcagttgttgtgctagtccggctgcacccttaggcgacttttgcacggatagtcttttggggaagactggttttgcgcacttgttgtgctggtccggc

SEQ ID NO: 73076 - DNA, 747 bp, Zea Mays
tgcacccttaggcgacttttgcacggagtgtctttaataaaagacttcgataaacgcacttgttgtgctattccggctgcacccttaggctacttttgcgcggagtgtcgcatgcgagggtagtctacgctacctgtcgcggtgacttcggagtggtcgaatgccgaagaccgttgatgcggtctttttcgacacattgcgtctgagtttttgtttttgcgggggcttttgctggtatattacatggctccgcctcgttaaaaacctcacccctcgggaggaaaagagtgcaggccggaataacattgtttgctggattataagggcgcgtgggccctgatggttggacaaataatttgcggagattgtcgatgttccaggagtgctctaagtcttcgccggagggcgttgctagcctgtacgcgctgggggatgccttcgacttgacgatgaatggaccctctcatttcgactccagcttgccccgtgattctgtccgggtggtccaaacgagtacgaggtctcctttgttgaactctcttgggacgactgcattgtctcgccaggccttggtttgagcctggtatttgttgagggcctgcagggcgaggacgaggtctccgtcgatgaggtctttagacgtttgttcgtcgacgtcggtgaccgcagatgtgcttgttcggggcgacccatgctttatctcctgcggcatcatggcctcggatccatataataggcgaaaaggtg

SEQ ID NO: 73077 - DNA, 443 bp, Zea Mays
ttgttgtgatattgctctgttctggtagccttcgtctcataagacaattcatgcatgttgcagaagcattttgcacttggtttctaatccttggctcctcatggcccaaaataaagatccccgtattgatgatagcttcgggagtaagctgatgaaggtaaattttgaaagttttcatgacttcgaccagcaacttatccagagagaactgaagcccgccttcatgaagcttctataaactaccacctcgtcagctttaggcagagggacattattttcccctccaaccctcacaatagagatatcacggaagtaccttcccctcattgcatcaatttgtccttgtttgatggttgatttcctgaagacaacatggcttggtctttagggtcgatatttgacaccctcattctcgctttctacatcaaagtcttcactatcac

SEQ ID NO: 73078 - DNA, 341 bp, Zea Mays
ccccctctgtaggtgataccaagaagcctgtaacaactgatttgaacatgacaaggtacaccattagcaacccagacatgcacaggaacagaaacgggagacaccccttccagtccttgtgcaacacgttggctaagaaaagagtgtggactatcagaatcaaccagaatcagtagtggcttgttctgaatggtgcccacaaaatgcactgtgcacgaagcttcaatacccaaactagtcgccttagagatagctaagaacaactgctcaacatcctcaggagaattactgttggtcacttcccgatcatattctagaaacaaatcccaaacctccaatat

SEQ ID NO: 73079 - DNA, 458 bp, Zea Mays
gcgggacagacagtcacgacttgcccaacgccaacccccgggtgggatacacagttacagctcgcctgaggccaaccccggtgggtacaaagttacaactcgcccgaggccaaggcaagatagaacaggcaatccgcccgaggcaaccctcaggtgggagaggcagtcacgactcgcccgaggccaagcccaggcaggacaggcagccatgactagcccgaggccatcctctggcgagacaggcagtcacgactcgccagaagccaacccccgacgggagacacagtcacgactcacccgagaccaagccctggctggacagttagccacgactcaccggaggccatcctcaggtgggataggcagtcacgactcgcccgattacaacccggggtgggagaagtagtcacgactcgcccgtggccatcatcaggcgggacaggtagtcaccactcgcc

SEQ ID NO: 73080 - DNA, 747 bp, Zea Mays
gaaagcagtaggctcataagctacaaggctaggaacgttatgatccgatagagtagaaactctcattgttactcctcaaaatcaacaatgaagacgatccttgtaatgcctccatcaatcagtccatgtgataaaactaagtctggtccgcatcacgttagattggctccaatggagcatcagatttctccctccatttgggagagtttgccttcagccattcccactaggagaaaactccccttatatatggggacattttttccataatacttgaattacgttgtttatttatgatattaacttttttaagcttaataacctgataataagagttaatcctttatttgcccctgtttttggactctatccttcatatgtcctcgactaaacatgttttccccacattctagagtttcaaattctttcccctttttactttttttgttattgtggttactttttaccatttggacaagcatgcccttagcaacatgtcccttatttgtccatgtttactctttaaatacgagttctttcttctttttttatgatcgaacatgatagatttaacaatattttttgacaacataatattatgctaacaaattattggaatatggatcaagcaaatttgacatctatcaagttcaaatttcgattacattccatccaacaagtagtgttggaacaaaatagagtttagaacattattcctttcatgaagcagttttggaacaaaataaa

SEQ ID NO: 73081 - DNA, 308 bp, Zea Mays
attgatgatgtgtgcacaacaacggacatgaaagtattttgcaatgaaagcattcccgtgtctagctgcaaatctagccctcaaaccccgtatagcactatcattgtttgcagcattatctagagtgaaggaaacaatcttatcttcaattttccatgcagtaacacattcataagcagactgtcctatcacatatcctttgtgtggagggtctaaaaaatattcagcacacgatattgcattttccaatctttatcaatgtaatgtgcaaccaaacacatataggacaatgtttgattagatgtcca

SEQ ID NO: 73082 - DNA, 907 bp, Zea Mays
ttcatacattgtcgatacatggatgtttgaccttagtggtattagcaaacgaggttgttgaattcgttgattgtggtgcttagtgttctaacctattttggtagagttttatttaaagactttgtggagttgcatcccaggttggtaatggaaaatcctagtgttgattgcacctgccaatgccttaggtttcattttatattgttcttttattgttgttaatgtgttatttggttttgggaggcattttaaattagttggaggttgaatcaggcttcacttatctagaatgttttgtagtatgtttcttcatctttccataggatgcttaatcacccggtttggtctaaacatttgagagttatgggtttcctaaaacatccttgttggtgtctctggtagaatgagtctttaattttgtacggaagagtagacattgaagacggtataatttggtctttgttggattatgaaagttttagtaatttcatgatctttccaaagagtattggtttgtaattttcattgcatataattggagttaggctgctctgaagttgtcgcaccgttgtgtctgaactttaggtgtcgttataaccaccaataaatcgactacgttttgatagtttcagagcccaaatttgggaattctctttaagcaaaactgttagttcttctcagtaccttttaaatgggtatttacttgtaattgtcggttaaatagattgggagaggtggttgtccggatataagtcgaatctctaatgtgcagtatctcaggctgagtttagctgtaggtcatgcagagttgagggctataaagataaatttgggtgcaactttattgcaaaagtcgtggacaattttcaacttttccaacgtgtgttcgttgtagttttaagttgag

SEQ ID NO: 73083 - DNA, 561 bp, Zea Mays
caccgtggatgagctctttagaagctcaaatccactaagattgaccaccacacttgggccaagattaagaaccctcgtgcacccaccatggcccttgtctctagaggtgggtcttcctctaacccttcacctgctctatttgttttgtcctctttgctatccattatagaggagcaggttgagagccttagggatgaggagctggcgcttattaccaatcggttcatgtagtttcacaacaacctcttgaattggtggcgtggcgggggccaaggatggttgcttcaactatagagaccctgaccacttcatcaccaattgccccaagatgaagggcaagccgtaggcctacaagcgcaaccaccactctagtcgacacaaggacaagcgtgactatacctccagcgcacaagtccagtggaaggtttgacaagaggcgctcaagaagaagtacctctagaaggccaatatcaaggagcgtgctttccttgcctccatcggcgacctcaatatgactccaatgacacttcttcctcgagtgatgaggagctcaagaggcgg

SEQ ID NO: 73084 - DNA, 478 bp, Zea Mays
agtgaaaggatcgaaaactatgtgcatgaattttattcagtacaaaagtttagaaaagcatattgtagagtcatctatcctataagggatcgttcacagtggcctcaagttgatatggaccttgttgtaaaaggacctttagcaaaacgaggtgttggtaggcaaaggaaattacgaatgaaaggttgtctgtaaggtgggagtaaacctaagacaaccaataaagaaggtggtaggcaaatgaaaagaggccctatacgatgcaaaaaatgtggagagcttggtcacagacaaacaagttataagtgcccactaaacggtaccaaaaaaagaaataggaaacagaggagtcacaaatatgctggtgcaaatgaaccttcacagaccgacattcagtctccgaagtctacatatgatagctacatttcacttataactctcttgcttcaaatgtcgtcatataatgactaattaaaat

SEQ ID NO: 73085 - DNA, 309 bp, Zea Mays
tagggtcgatgaagcacatactataatagctacacagggggtttaacttaaaattgtatgtcatgatgcacgctcgtcctattcgtcctcacaattcttgccaacatatagtggctttcacgttctatggcggtggcaatcctactcactccgtcattgatcactagtcgcactttcctagggtttaattagtgtacctacagaaaatttcattatagttgtgggttagtggttagcatcttaaactaagccaccttatagttcttatcataactatatactatttgcacttcgactatcaggaattgc

SEQ ID NO: 73086 - DNA, 428 bp, Zea Mays
cccatttagaagtataaacattggaattcagaataattctaccacaaagtagcagtggtgcatcacattggtttagttgtgtctttgaagtactagcaatttgttttttacatttactccaaggaaaacattcctagccatctagtagttatgattatgaaaaacatagacaaagcctgagtcatccagaggtgtgcaagaaaactgccagtttaattggtgtgcaaggaaactgccagtttattagggtttaatggctttgttggtcatgtgaataagtttaatgtgatcattttaatgcagcattaggtttagcttacttccattgaatcaacactcctgccactacttgttaactggcttgtgtgattagagcaatcctagccaacactgtcaagtggcttgtgtggtttagttttataaactat

SEQ ID NO: 73087 - DNA, 1690 bp, Zea Mays
ggctcgaaccccatcatagagggctctggacccctagagggcattttctacacctgatggttccattttctcccaaggctccaccgagacctcggatctccctaggatgcctttggacccataaggtggactcctttgtccaatcgcgccaccaaccaccaagtagggcccaagggtcgccacacccaggctccgacatgcattggcctattgggcttctagcacgccatgtgttctaggaccccacgacgaccctgtttaagaggaaggctctgtactcgctatgtggatagccgacaccatcatggtcggtcaagtagttggagtcagaagatgtactatgcctgttcgacatgacatgtgcagctgtgttagcatcatgcccactccctggttgttaggcctatgtaagctagggcgtggctccatcatggtattgtgataacttgtgtgctctaaggcgcgcccaaccgcgaccactgtggcgatatgggtggtgcacaccgtagactgtcatgtctaaggtctcccacttcgtacgcaatgatgtctaaccaccctgatcattagtgacgtctgatacaacttcctagatctcttgtggaggcatggagagccagcctctctcttcctgctatgttctaggcttttaaaaaaacttgcacacgccttgcatgacatttgaaatatctggtatgagcggtgtgggcatctacaccgccactgacatttctataggatgacaaaccgacatcaacataacttccataaaataggatggggcttccataaaaggaggacaatatatgcatcaggactgaccacacgtaccatatgtaaccctctccatcttggtctataaaagggagagggaggcctccctaggaggcaggcaacctgagggacaacacatgccaactcaaacaactccacacatttctacttaggctctagctagccaactataatatgacttaactaatctcttgcaatccaatccatctgaggaggacatagggtattacgcctcagcggtctgaacctctaaaaaaccctagttccctaaccgtgtccaaagtgttgtcgtagctatcctttgcaacctgtgccatggtagatagtaaaatagcacaccaagagccccttgccaaatttttacgatggtattgactttgtacccccgattgtcaaacactgacaagatttaaccacctaaaaataaataagtttatcatgtctacttttttatggaaggagtatgtaaaatgacaactggccacaaaaacaatggttactatgtttatatatagaaaccaaaattcccgagttggccctatttcaactggtgacgttgatggattatggggtggctacactagcgcaaaataaaatttttgacaccataaaatcaggaactactgtagttatagatcatgttattaccactagacgcgtagggcaatgaaagatgtctcgatgtagacgaacacatagagcagtgctatgtagttgccggcgaccttcatgtcctcgtgcggtttgtcctagtgcctcagatgcaacacctctgaggtatccacacgtacagggaggaagcaccatgttccgaactactaggtttgtgacgacggctaggtgagggcaaggggcaggcagatgcttgtttattggtggtgaattagggttctct

SEQ ID NO: 73088 - DNA, 788 bp, Zea Mays
tgcccttagactaagattgaaattagaggcctaagctttctagtagagctaataattttggaatcaagtggaatcgatgggatacttggaatagattacttgaccaagtatgatggagtaataccctgtgccaaacggatggttacattaaccagtccacaaggagaaagaatggaagtcaatgtcagtatgccaacaacagcagaggcaatggtaaatcagttggaagagaaatatttggaacacatcagaatagtgtgtgaatacccagaagtatttccggaagaattaccaggtatgccatctgatcgtgatatagagttttctattgaattattatccggaaccgcaccaatttcaaaaagagtttatcgaatggatgtcaaagatttaattgagctgaagaaaaaatagaagaattactagaaaaaggttttattcgccccagtttgtctccatggggagccccagttctatttgtgaacaagaaagatggttcaaggagaatgtgtttgtactatagaagcttgaacgaagtaacgattaagaataagtacctgttacctcggattgaagatctgtttgatcagatttgaggagctaaagtattctcaaaaatagatctaagatcgggctatcatcagttgaagattcgaaccgaagatatacctaaaacaaccttcaccacaagatatgaactgtatgagtttttagtcatgtcttttggattgactaatgcactggcttactttatgaacttgatgaataaagtattcatggaatacctc

SEQ ID NO: 73089 - DNA, 822 bp, Zea Mays
aagcaaaaggtgaactaaagaaagtttggattcagttcatcggaatttcttcggagatgatgaattttttgcttatatgggcagtgggttctacactcggagttacgaaggctgtagatatgaaattcaccaataagttcgaggttggtcgcctgcaagtatcggttcttgatccgaatcttatcccgcagttcatggatgttgtaattggtcgtttcatttatgagcttcaattttgggtggaggaaaatattgatgaaattaacccagagccaatggatatggattatactggctttggggaagatgataaaaagtcataggataatggttccagtaaacaaaaatttgggtcactaactttggaacaaaacaaacagcatgttgtttcaaccggaaatagggctacaaggagtaacatggggaagaaagttactgaccagggggtgcagacactactgggttcacaaccaagtgttgttgatacacagattgacagtggaaaggacacaagctgggcgctggttccaggatctcctaatgtctctacgctgagtgctgatctgaacatggctgatgttgggattctatctcctgaagttctggctcttgctgctgtgtcggaagctaacaactcagctaaattacttaggagcaaaagaagggtagctacaagtatgaaggactctgttgctcgggccaccaaactgaaagctgcacgcaacttagactcggcgttcgctgaaggtacaaactgtgactctccattgttttttcctcacatgctagtattgttgagaatttggcttcccttggttttgg

SEQ ID NO: 73090 - DNA, 321 bp, Zea Mays
gatattacatgttcgcaacctatcttctccaaaatggccgcaattcctctgtcacctgagaaggcgcagacatccccacgactgctcaaaatttcctcgaaggcatcggcttcgttgctgatccattcaattgggcccttaggatcgcctcttacgaagttgtcctcgctggagtatgcgccaacgttggcgaagctagtctttatttttcctacgcattctatggatttttcataacatctttcttttgaagaccgaagttctacagctgttttctcccaataatttttccagtaatcactggcgtctcggtcaactttg

SEQ ID NO: 73091 - DNA, 1033 bp, Zea Mays
gcggagcaggtcggcatccaccaacacctccaaatccccgttggtgatagaggagatgggccatggatcgcagggaggaaggatgttgatcttctcggccatcgaaatgaaggaaggagatggaaagaaggcgaatagctcttttgcacagaaggcgaggatggcgtgtaaagaaggaaggctgaagaagcaaggcaacaatctgaagcatccgtctcgggcgaatttatagggaagggtggagtcaccgaagtgcgagtcgtaacggccaaacgacgatcgtttcaaatctacgccgcaaacggtcagctgatcggtaggacgacccatcgcattaaatgaccatgccccctccaagaaaaaatgtgccgagcgccgttccacattctgcctcaaaaggtatgacttcttccctctgcctctctctcctttatcccctcaacagttaaaccggaagaaggcgtcttctaccttgggcaactcacctcgggaaggaaaaaaggcaaggtaaaatattgttcagaggttcgaaggttaagccctcgggagggttcggcaaactgcctcaggacgcccgggctctgagcccgttactgatcaggggtctgaaggttggcccctcaaaaaggctccataaccgccccagaacacagagtcagggataactgtgggtgcgcccgtacatggccatagctcgagttgcgacctgaggtatcccaagacatatctgaggtccctgggagcgattcgtgatggtatcccatcatagggaggcatcgagccctcgagacctaacaaacgggttcgggaccaggcgaatcacccgcaggtactttttggggcgtgcctccggactgctagccgacccctaccgaaaggagctcggacccctgctcagattactcgataacaactcgatggaaacgtcatgttcgtcgcccatcaagggtagcatgactcgttcccacccctttctcctcgcgtagaggcgacgaaggggtgtacaaatcaaaagtcaaggcacccctcgacc

SEQ ID NO: 73092 - DNA, 520 bp, Zea Mays
gtcggatagctaacgaccttgatctgaagtactaccctcgccgttcgaccggcagtgctggaggtgtgattgtctcgccatttggtgagggcaatcctaggttgaacaacatggtcaacttgattgtcgtgctcaacatagagctggaccacgcccttgatgagttggacaaggttggggcgaaggttgtggaattgcgtgctgagtgcacagcacgccactatttggatggtggttctcccgcccttgtcgggattcagcacccttaccgttcgccgcccgtggtggctttgactatggtacccagactgcaggacccggatagatttggattcatagatcgacggagtcggagtctgtaataatacttaattcagtgtcttagtttagtcagttttagttagagttagtttgcttatcatttgttggaatgcttgtcatgatgaacatgtaatgaagttggatctttgtaatgattgtcatcaaggtgtgggtatcccctgcaacttggtgtagttat

SEQ ID NO: 73093 - DNA, 450 bp, Zea Mays
ggtgagagctattgtgacagattgaggtaggaatgtaggttgtgcaataatactcgatttgattgttgtgtgggagcagtggaacacaatgtgggatgaacttagggcttccttcagtagtgttgaaaaggcttagaagtggttgcgcaacaacaaacaaaaaggaaacactaggaagaagaaactgaaatgctacatgagttcgaatttggagctcgacaaagagaagaaatatgaagttttttatttaaaaataaatgtggaggttccaaaattgcatacatcctttttgctgtggcatctagattcattgagtctttgctattcctttgtttttagattttgtggagactaaaaattctttatatcagtaactcgtcctctttcacccggtcatagatgcaacactctacaacatggtggaagggctttgaaaggatgacgatgccc

SEQ ID NO: 73094 - DNA, 337 bp, Zea Mays
actcctaagcatagaattttcagttttaagttgagcaacacaagataaagtatcatcattatttctttgctcaattaaaattgaatcataccgttggaccaaatcattatgagagcactttagctcctcatgttctttggtcatcttctccatgctgttgtttgttttgatgagtgtctcctctagcctgagaagcgtctcgccttgttccttgttccttctcaacagcttaaccaagagcgctttgtcctctttgttgtgatggatgtagaaacggcgaatctcctcttcttctacatcgtcgatctcattttccctgtcactattgtcagtgaaa

SEQ ID NO: 73095 - DNA, 489 bp, Zea Mays
gtttgcccatctatttgcagatgataagctgaactaaagtttagcttggtatccatatactcatgtagtcttttccaaaagcgtgaggtaaattgaattcctcggtccgatacaatcttctttggtactccatgtagacaaacaatcctcgacatgtataattctgctaactgggctcctgagtaagttgtcttcacaggtataaagtgtgtcactttagtcaacctgtctactatgacccatattgaatcatagccatctcgagtacggggtagtccaactatgaaatccatactgatttcttcccaattccattctggtaccttgagaggttgtaacaatcttgttggtctttggtgttcggctttaactcattgacacacgtcacatagtgcaacatgagtagccacatctcttttcaaaccgtaccaccaatacttttccttcaaatcctggtacatctttgtacttccagggtgaatatagtaa

SEQ ID NO: 73096 - DNA, 328 bp, Zea Mays
ccggagtatgtattagcatgacatcaggtatgaggtcatctcgttggatctccagttcgctagcaaattggtcgttgaattctcttgcatgcatccgtttgctatcggcacgtacagggccatgcatgtcgggcggaaggacgctcgcgggcaccggctcgtggacatgtggggctctgctgtagcatctctatcctcgtaacaaccttgcgaccaaatcgctgcatgccgcacaagatgctagccaggtaccaccagccgatctccccctctggtgcataaatacttgaggcatacagccatcaccatctaccgctcgtacccttgc

SEQ ID NO: 73097 - DNA, 876 bp, Zea Mays
gttcttcatagcggatcctattgtggggaggggataatgccatggcagggacttgaacttcagggggattccttccatcaagccgagcttccagggctgcgatccttgagtgtgcatcctccagctccaagtgtacccttgagaggtccagggtagcactatccaggtcggtgttcagacctgccaccacaccagctagggtgttgaggtgatcttcatcagctccacctggaagaatgctggtctggctttctccacgaatacacaaaggaagatgcctatacttcgtgttgtgcttctgctgcaggtaggtgtggctgagggaccacagagttctcctagcagcatcgctgaccaaagcaacataggtggatagaggcgtcagagactcatgagctgacagagtcctgaaccctctatcacctgcatccatcaccctgacatgaatgtgagtgatgtaatagcaagcctgaggtggctcgtacactcaccttgtctcatacaggggtcggacgtatgttcccaacgcatgcagaacatcctgcagcaggttagggaagtgccctgtctcgaacattgatgtataatgttcagtgacaggccataaccccatgtagtggtcctgctgttcatcgttggcttcttcgtttacattctcctcctcctcttcttcttcttcttcgtcttcatcatcgtcaccagagtcatctgggtcatcacctccgggagcaggggcttggactgctagtgtaggcggtgctaaagctgacgatccagctgcgaaggctagtgattctgctaacggggtgggtgtaggcagaaactcctccgagctgtcttccagaatgactctattctccacacgaatgcgaggga

SEQ ID NO: 73098 - DNA, 486 bp, Zea Mays
ggctgacagctaatcagcgattgattattcgcaaacgaacaattacaaatgtcagcagaaatggactgacattgttatgaaatttaccaatccccactgatgggctcataaactctacatatgctttcactgggaatcctttcgcactaaaaaaaatgttagttggtcttaacgtctactaatggtccaactgcaaaagcagcataaggtgtactaatcaatgcctacatcggatccttgaaaattcttcactaccccttctatttcgtttccttccaagattgtctagatctgaagaagtcgaagcaagcatcctaaatgtcactctctgtgattactccatctgattcattcagtgattcaacatcttggtctgatctggcaagactacacattgcttatgcagataaaaaagattgagagcaggaaaaaagaaactgcgagttccacgtgttttatcgttttatcaatgctatgctattgttc

SEQ ID NO: 73099 - DNA, 778 bp, Zea Mays
cggccggccatttggagcctagagagttcgtcaagaatgcacaaggtccctacctggcatgtcaactgttggtgtttcaaacctagatccgacaagtaaatttgtttgtgcgcattctatgttccggatggtgtgcttagagagcgtggagcttatactagtttgggcagaacatccctacatccagtcttcggtggctcgcgctactcgcaccgtttttgctcaatgctcatagtaggggttacaagcgggcaagagagggaagaatatcccccatgtctcttatgcgtagctatacctaagaactaccggaatagagatttcaactaaaccttgggcatcgcagtggttcactctggcctccgtggtcctccgggtgttgtggttcgtctgtgtttcatgtgtgtcttgcgtgtatgtgtgcttctcttccttgtgtccatatccgacccttcccttttatagaccaaggtggggtcggttatcggctccttctcttagaaggagctataaagtcgtggtaaaatgagtcattccaccttggtaaatcatgcttgtcatcttgcgccctggtcgtctaggcttccctagctgtgtccttaatggcgggtggtacgggcggtgtggagccctagtaccatcattacctcctttgtgtcgtgctgacccttggcctccgtagcctgggtcttggcgtggctcatcgtgttgcgggtcctgtagatggcctgtgctaagcctaggcttaataggtcatgagtgcgccataggccgaggg

SEQ ID NO: 73100 - DNA, 317 bp, Zea Mays
agggaaggaagactcatcgaaagtgacatgtcgagagattatgatgcggttggtggcaaggtcgaggcaacgataacctttatggtcattggagtatccaagaaacacacagtgagaagaccggggagcaagtttatgaggtgtggtggaggagaggttgggataacatcgacagctaaagacacagaggtgggtgtagtcgggaggagtaccgtgcaaggcctggtaaggggtggaaaaggagatggttttaatgggtgacggttgaaaagataggtggcgatgtgaagagcctcaacccagaaattaggggggag

SEQ ID NO: 73101 - DNA, 522 bp, Zea Mays
cattaacctagttactgaaggatcggtgagacgaccagaggggagggtgaatgggagcaactacaaaattcttgaactacgagaaaaacacttgtgacttgattccttggcctaatccaacctccagggacagtaaaatctctccgcaaaagaacaaatcaaccacgaatcaattgacttctcatatcaagttctagagaagaacgagagctcaaccgggacaaaaagaattgatctaaacccaaactttcaaaaaagtctccaaggaagacaccaaaggtccaataaaaaatatgggtcaaagtccgagaaaaacgtcaagcgatagtgtcgcttgtaggtgcggcaatgccggattgcaaaacttttccagaatgctctcaaatttttctagaacgccaagttgctgaccccccgaccgaacaaatacccgccgagcaactcagcgaggcaggactaccaagcaacctgccgccgagcaacccagtgagacggaactgccgagcaacctgcccgctgagc

SEQ ID NO: 73102 - DNA, 303 bp, Zea Mays
cttggggaaaatggtgcttttgttaaaggcgagtgtggcgatgccttcatcgtcgtcaaaggagtcctcgtccgagtcccattccatgccgatctggtcttcacctcccttctttttgttgacgaagaatttctttttctcaaccttctttcctctcttgtccacttccttgtcatcatcatcctttgcatatggacaattagtgatgaaatgatcggtcttaccacatttgtagcacgctctcttgacacatggcttgtagtccttgtccttctggttccataggatttgtcgaaagctttt

SEQ ID NO: 73103 - DNA, 648 bp, Zea Mays
tgcaggttcaatgatgttcttggcacggcaagagcagcaataacaggagccggtgtaactatcgctaagactcaggacccttgtggttgttatagtcggatagcacaacgttgacctccaccccaaatcgtagttatcaggagacggtgtacttgtcactcaaggcgccacaccatcttggttgtggtagttgggcagccaacgtcgttctccaacaagatttccacctccatcatctctcatcgaaagatcgggcacccttctacccgttgggtttatcaccttcggctaaaaaaccagtaagatttggtttcatgcgcaacaaagcatttaaaataaaaagaaaagtcaagtgttatattacaacaaacagtagttcgactccataaatgttcattaaaaaacaaaaatacattcggccttatagttcaactaagcttctgtcccttcttacttcttcattttcctcgttttcttcttggcctctttgctctacaaaaagagagaaaaagtaactattaaggaaagttaatgaataaagcttcatcagtacaagcttaaagacaaactttcttcgtatatgcttcggccttcgaagcagttagttgtcgattgcccttgtcccataactcgaagaagaatattttt

SEQ ID NO: 73104 - DNA, 552 bp, Zea Mays
tcagctttgcctccatcgtcatcacttgtggactcccaggcctgagggtttgtcgcaggacgagaacgactagaagggtttcgagtcgtttgttcgtgagtaccctgagacccagaggcctcaccacccatcataacattgtccgatcctcgcccacgcttggatcgggaccgagggggagtctcctcatgaatttctggcgaactgtcatcggaattggattcaacgacggatggatttcgacgatgaaccatccttaagatcaaacaaaatacatatggtgagagtgatattgacgttcaaggagtttaatgaacacgtttgaggaaagacaagtacaatattgggcatgcacttcaaccgttcatatgagcggtctagctacaatgaacaatatcaacctacttaactcaaaaccattgtttgagacaatgagaatagattaagtgtgtcatacacctaaactacacaatctccttgaagagacacttaagacattcaagaactgtatggatcgagtcaaaggataggaaaaagtagcaatacctcgat

SEQ ID NO: 73105 - DNA, 896 bp, Zea Mays
aatcttcacctctcttcgactctatatcgtctagaggtgtcttggttggcctcttgatctaagatagccccaagatcctgcctccctgatggggtccctcccgggaggtaggagttgggttgtttccttggctctctattctggaggaactcactgctatcttctacacaagcgcacatggtctggtaacctactatggatcgtccagtgaccaaccgcggatagtctggtgacctatcgtagacagtccgccaccctacagagtttctctaaggtctcgttccctacgaacgagatctatggatcattggtgttggacccaaaaaggcgtcaacacacacacaactgatgacatagtgctccaaagcttaacttctgcatcgtgggggaccggcaccacctctcctcgtgggcatggtcatcttagccacaatagtaagaactcatcgtcaccactcactaacattgatatggtcaactgaggacctaaagtaggtagagcatagaagcatttgccaaacatttgctaggcctcacactcctcaccatggtcactgccatcattgaggatttggccactagtgccctcaccctagtcctcactcatcaacacatgatggtggtgcgctcatgcttctagaggtcgaagatggcagcgtgagtgaagacctcgtgtctgtagatgcgcatgttgaaatggaggttaagggaatcaccatagaggagcttgtaggagctcgagaggtcgcacgggtgtgacgccaatcgtggtcgacaggagagggtgacatcagagggctcgtgcggggaaggctaggcaagggcaggcagagggtgcgctcgttagggggagggaacatgatttgaagcggtgtgagcaaggactctgagttaat

SEQ ID NO: 73106 - DNA, 612 bp, Zea Mays
tcacaagatgtgcatgcatttttaaatctaatgatcgagtatatataaaaggaagcttatattaatttttgtaaatgaaacaacaatcgaagatcatagcatctagtagctagatcccgagtacacatcattcaagtcaagatgcaagcaaaagccaaaaggaacagggaattaaaagagcagctaaattaagctagctagctactagcatgtgattcctgcgcacatatcacgaggcacgcaagcttcgaaatcgctgccatcgccgggcaccagcgtgcagacgttgttatcaggatcacagcagcgtcctacaggaccatgaaaagggaaaagaccgcatccggtgcagcaactgccaataatcatgggtggcaagcagtcgtcctcctcctgctgcagaagctttctgatcaccgccgtgggcgtgggcggagccagatggacggcggccgccgatgacaggatcgtcacgaccataaccacagccgccacagccttattacctacagccatcgtatctctctatatatctcgtttctttgcctgcttttgctggctagctggttcctctccatgcactgctctaataagctactttatatataacca

SEQ ID NO: 73107 - DNA, 909 bp, Zea Mays
taagaagacactgtcgcgagtagaattaaaatataccaactccgcataaaaattctataaaataaacaaaaataagcttaccacatcgtctacttctttgacaaggggcggtgtcaaggctggcggtgacaggttctgtgctgcaacgagcaatcgctcgcataccaatggagcgaggagctggacagagacgaggcacagggccaggagccatgcactccaacagtgcctcatcttttctgcttcctacactactgcgaccatgccaatgcacctgcccgggaaatgcaacagcaattcttctcccccttcagaaattcatggggatggccaatggacaacaatctcttagcaccgtggaaccgattgctcgacggaatccattggttttgaccagagaactttgcaacagccccagaatggcaccaccttcggggaatacatgcatgcagaacgcgtgaaattggagcaacaagcgagagcttgtgcaacagacacctggagatgttcggagaaatgcacgagcccgggtgaggaagctcagacagaatcgcgaacgtgggcgaccaaggcaaagatcgttatgcaatgcaaagctgcaatgcgcccacgaaatcgagcaaatccggcaatgcagagccccctagccgcgattcccaaatccgttaagaaattgagtcgaaaaaatcgggggaaacgaaaatgcagataatataagcccaggactaagataccgtgccaataatgccccctacaaaacgaaaaaattctagaaaatttgcagcaccaaatccgcggcaaagaaatttgacgcgcgatccggcgtcaccgtggacgtggaggcgatttctttccctgctccctcttttctcgtggcgtctccccgaaacgggggaggaagaatgcgag

SEQ ID NO: 73108 - DNA, 919 bp, Zea Mays
aaaacatgttagtcgtgtttttgaggacctccagaagacaaaggccccaacaagttcctccccacttatcagcgaatatcgaataatcgaagataaaggagaaggggcctatttttctgactatgttgtcatattacgattccttgtagggactttagtgggtgaccaaaatttggtacccacttcttttgttcacacgaatcactactaccactatgcctcaaaaagggttgacgatggcattgccagctctactcttagtccagaaggataggagcatgttgaagccgctcagcggctcgaaatcatgggccaaagacaggagaaaagaaaggctccacgacaacgacctcaagaggatgatgtcgatgaagagattgagagtcaaaataatctagagagtaatggaaatacaaaggcaacatatgcttcgtgtcacccaccttaggtgacagattgatgaggcctcacaagagttgcatcgcatgagaagagaagaataacaaacagaacatcaaggatgtcacgatgcaagaaaactttaccccgaacaacaaaactatgatttcttcatctacgacaacacattcccactatcagatgatctgcaagcaactccatggttagatatgtataagtcacgtagcttcctacacaagatggtcaatttgaccccaaacaattttttattagtaatgaagcatctaaaatatcactattcactattctttttgaactctatttttataatttggtaaatataagaattatgttatttactatttgttcactaaattggcaaaagacaaattactgaattacatattattttttatggcataccctatactaaaatcctaaatccgtcactcgaactaacatgaagaaaacagtgcaaaccgtaaaatatttaaataat

SEQ ID NO: 73109 - DNA, 558 bp, Zea Mays
ggtcccatccaatctaatgaaaactaatgtgatctaatatgttctaataagacctagttaaatctaatctaatctggatctgttatctaatgcattctcttgctcctatctaaaggtttgaattgataaatctagatcattaatactagtaagatagactggttagctaatttgaactctacacctaaaaaacctttttcacctaattcactaaatcctaaattagtgccatagaccaactcggccattcactcctaataggttacataatccatctattctaacctattgataaacaagattttgacctacccatgtaccctaactatcttaactacatgttcctaactcggatggagacaccaagacccaagaaggaaagagattaacctcatcagcaaaggatataagagtcaattggatcgcgaaagtagtcatgatccatccaccaggatgtagtctttccttacccagtacttcttaccgtcatctatccttgctctaaccaaatctcatattgcctaaaaagtggctaggcatagaagatacccatgcttt

SEQ ID NO: 73110 - DNA, 741 bp, Zea Mays
gtggctttcaagctgcagaaagacatgtaagccatagttactatttttgttattgttcattgaatgtctgaaactctctaaatgttgctataatcgcaggtttcattacatggcattggctgacgacaggcagagaattatgccaatgcccaatgaccggttgcctcctcgaggacaaccattagcgtaccctgaggctgtgctccttgtggacccaatcaaccctgaacttagaggggaggtaagcttccctgacagagataaatataatacatgtatgttatccattgtaagtgtctgagtgcattctgaatctgaatgttgcttataatgtttgtcaaggttgacgacaagtaccagtactcttgcgaagaccagtacaacaatgtccatggttgaatgtcattcgatcctccaattggcttctggctgatcactccaagtgatgagttcaggacaggaggacctctgaagcaaaacttgacttctcatgttggccctactatactggttgtaagttcaatcgttatcatgttctggaatgcagaatctggaatctgaaccagcgctcagagatgattcaatgatatgacatttatatattcttctgaatgtggcctcttcatatggttgcagatgtctcttagtgcacattatgcaggggatgacctctcaccaaagttcacgaatggagagtactggaaaaaggtccatggaccgatattcatgtatcttaattcc

SEQ ID NO: 73111 - DNA, 548 bp, Zea Mays
gtcgttccagtttcttgtttggttagaggggttgagtgggatagagcaatgtcatcgtataacaacaccatggtaccttagatatccaaggagattgataggtaagggatagagcgagggatatagcctcgagacatgttgatctcgggtagtgctacggccaccgacacatgaaaaaattatagagtttcgagccgttgaatgtgtaacactctatatcgtcttttgtgtatgatggattgatgaatgcagaggagaagaacattacatgctcatatattcccttagcctcatagacgactagccctcccttttttttgttctgtgagagttatatgatttctggtatctagttcaccttggtcttatggaacactatgttcttctagatcatgtttctttctacgccatctcttttatagctcgtgggaggagagagttacatgcatgttagacagtggatcctgtataacaaaggctcaacctctcctatcttatctctaacatggagtcgtacatgatttgtgtcttgaatgtgctatagtgtt

SEQ ID NO: 73112 - DNA, 605 bp, Zea Mays
catgactcctcttcttgtgttgacctcgagtcatgatacctcactgaagcatcatgcaattatagaaaagcattcgggtcatagggaagttgtcttaacacttcctcaagtccctcaaattatgttccacccattgtcgtctcgtggcatgcggcaatggaggaggaggattaaccaaaggaggaggagtagacggaccagaagcaaaagcagctagaactgttgttgcacccgctagcgggacttattcacacataacacagttcactaacaatctcgattaagcccggaggccacaacgaacaaagttcagcaagaaactcgatctaggccaaaggccacacatattacatgcatcaatgcattattacaacaacaacaacacatgtaatccaaactgaactgcaatacttaaaacaagctacttgaaaaaatgtttcgcgctttttatttgttagcccagttgaacctaatccaatggaggtgtccctatttagtttgcattgaaaggaaagccctccttactcagttgttgacagaattagtgccatgcagtacaaatcagtttcttctccaattgcatcttcctttaacagtcgcacaac

SEQ ID NO: 73113 - DNA, 499 bp, Zea Mays
ttgttttttacacaaggcgacaaacatacacaagcattacattatcaagcatacaaaaatttaatcttcctttagcactttttcagcagcttcgtgtaatagtctgtcgacgacttcatcaacgacttcgttagcaaccttcattatatccaaagcttccttcatagacgagtcagtttcaggtttgtacgactccggtggtggtgaaaggccgactgcaataaagaatatgttggtgaatttcaaagctagaaagaacaacgaagcaaaactttaaaagtacctataatcatggcacactcatcagcttcttcagcttgtttagcctcttctcgggtgtcgtgagattctttctcattctttttaatggcttcatcagccatctcacgaccgcccttcatccaaacatcagagtagaacctcccacctagcaaagaggcttcgaccgaggggtccttagtgtcatttgctgagaaaatagattttggctgggctgcga

SEQ ID NO: 73114 - DNA, 435 bp, Zea Mays
cacctcacggtccgactccggtagggtgctccaccgctcctcctcaccgtccccctggcttcccctcacggcctcacctggtagctgcttggctggtgcctggtggtttggtcacggctttggttacggtaagctttctgtgttcgtcttcttcagcctctagccgacatctccgacgaggttgagacttcctaatctagtgcttgttcttgtgatctgtgcttgtgatctgtgttcgtaccccgaaccctaatctactctactgccttcttgctctgtgattgtacccgtgagggaccgatctggtgctccggctttggtaagtgcttaatcttgtgttagttcttgtgatctgttcttgtgatctatgtttgtgatctgtgttcgaaccctaaaccctaatctactctactaccttgtgttctgtgattttag

SEQ ID NO: 73115 - DNA, 556 bp, Zea Mays
aaaaaaaaaaacctaggtccgccattggatcttactcggttgtcatctctgaccctagcggggaatagatttgaaggtgatgtgaagccgagtaatgtcctcctcgatgatatgacatgaacgctcgtctaggggacttcggcattgcgagcttctatcgtaccacaacgacgactggacgagacgcagcatacagcacaacctcacttggatgtgtacagttttggagttttacttttacagatgttgaccgggaagagaccaacggaccctatgattgaaaacgtactcagcattactagcttggtcgagaggagcttcccagacgagatactactgcaagtgattgacgcttcgctacaggatgactgcaagccggcctcaacaacagttcacccgtgcttgttatccctagtagaagtagttctgtcttgtaaacgtcagttcccaagtgagcggacgaccatgagagaagcagccggccgaattagcgcaatcactagtagcaacctacattaattaagcaagtacattgtaatcgacttagcatggcggt

SEQ ID NO: 73116 - DNA, 328 bp, Zea Mays
atttcctttgcgccacaaatccgacaccttctccactatacaaaatttctactcctacgtccagactcaatttcacattcagatacaatccctgcgataacggtactaaatttgacaacaatgcgctacgctccttcctcacacgtcatggcaccacctatcgtctctcatgtccatacacatctcctcaaaacggcaaagttgaacgatccgttcgttccatcaatgatgtcctttgtacccttccttttcaagccaagcttcctcctacattttgggtagaagctctcaacaccgccacatacctcataaaccgtagaccatccac

SEQ ID NO: 73117 - DNA, 570 bp, Zea Mays
aacaggtatcacaggtgaaggatggacattgactaagtgggactcattgtgcatggcttggagatagttcattcaacaaaggacgaaggcaagaaggacttcgagtactagagcaagggagaaggtcaagaggactgatgtacctgaagccaaggtgaagaagatggtcttgctagaggtcaaggttgatcaagctgataacagacatggtgcattaaggaccatgacataaggacatgacttacaaccgttgaggtaattcatattagtttatggtttaagtaataaggctcaagatcctagctcgagtaaagcctttgtcacaagaacaagcagaggtatcaaagtcagaacctagaaaggacaaaagagctaagaacactttgattcaaagtttgggtcactcctgagtttggaaaggttcttagtgaccataggaagattagaactcataaatggtgaagttagaacctagaaagggcaaaagagctaagaacactttgattcaaagtttgggtcactcctgagtttggaaaggttcttagtgaccataggaagattagaactcat

SEQ ID NO: 73118 - DNA, 416 bp, Zea Mays
taagtccgctgtttagataaaaggtcatgcagatggaggataagaatttctttgaagttccattcctgtatggttaagtctctactctcctcaatgaagtccaatagctgaataaccaatttaaccttatcaatcaattttgctaaattagggagagacttacaccaaacttggattgctttgcgtgcccttttaaacttggctgcgagccttttagttgggtctggttgaaataagggctgactccaagaatcttggaaaattgaatggaagtcttcaagctggagccaataattttcaaatctgaagatgggcggtttgggaacattaatttggacattgaccatctaaggaatgtgatccgaggttcctctagggagtgagagtgcagaagtggccggaaagttgacagacca

SEQ ID NO: 73119 - DNA, 303 bp, Zea Mays
gttctattcccgcccctagcgctagcccactcatgacttgctcgctccatcgatcatcaaatgatccgttcgatgacataacccgtccgctgccagtgccaccttacctcctcgtcacttgaactatcgtcttgtagggatcctgtccgtagtgccactacttttcctcctaatccgcaccgacagatgggcaagcaccacaacgctatctgccctcgctatatcactgggttccaccgcaccatcggaacgcggcaatggctgccaattgctgacatcgctgcatcgtcacctgccctccct

SEQ ID NO: 73120 - DNA, 704 bp, Zea Mays
aagttgttattgaagagaagttagagccgaagtcatttttaaagaagtcggagctgtgccaaacggggcctaaatccatacttcctccggtataaaaaaacatgtcgacatgataccatataccaaagctgcgacgcagtggcaaaggcaccggaaaagacatgataccatataccaaagcggtggcacagtgtcaaaggcgccggaagcgctcccggccagggttcaagccctaggggacacctttttcctaggattttttcaggaatagggtacacacgtgtgtgccttcagtgatattgcgtgtgttcacatactagaggtttagacctttcaatcattatagtgtgtggtgtgtagtggtgtgagtgtgtgtgacgtccttgtaccctataaaaaacgatgacaattgcaggtcttattttccattgtgcccacattaaatagatgaatgtattgatcttaggtacgaacactttgtagcttagtaggtggtttgagccatattattgatactttggttttgttttcgagtccccactgtcaccggattttttttattgacaccagcccagaggagaaaatcaccggtgaccagtaaacgatgcaagtaaatattgataatggcaaccatcaatgatgccagcaacccaccacacattcaccggagccgaggtatggagatgaatcaatgcatgcggcgc

SEQ ID NO: 73121 - DNA, 474 bp, Zea Mays
tgaagatgagtaccggagatagcctaaggtatcgtaccaaatgaaacgcgcattttggcacataagacaacaaatggggccttctagttgtagctacaagcctagagctagtaatttgaatctgatacttgaactttgtggaagatttctagacaccgcaattactgttcgatgctcatggaataatgggaatcaggttcgaaaaagaactaagggaaacaatgttgctttgccttctgtacgctcaccttcagcattgaaaccactgtccactcataatcaaatccctactccattcctaatcgaacgttacacctaaagcaaaatcacactaaggaaacctctcctctctgagctcagctttaactttaagcaccgattcaattcaagaggaacaaccgcccctccccctccctctcctcctccgccgctgccgttcatctcctccaggagccttggcctctccgaatccac

SEQ ID NO: 73122 - DNA, 450 bp, Zea Mays
tcccttgtgccagaaacaagtggggcaactggtgggacttttggttttatgtttcttgtggggaagtcgatgatctgcctgggctccctccggccattctgtgctctcactgccatgtggcgttccctcgattcgaggtggcggaggatgacgaggacgaagggcccttcggtacgctgcccgcatgagtagcgggtgcgatttggttgaggaatttatcggctatggagtgtggcccttgtcacacggctaggtacttggtgaggtgtgccctcgtcggatgccgaccctgggcgatcggttggtgcgaagtccttccttcgctgtggatttacggggccagaacccgaccgcgtttgtgcgcgaagtggaggccgaggccgcaaagattgtagggcgatatgtgccaaagaccgagaccctgcagagttgggatatccgcggttcgaa

SEQ ID NO: 73123 - DNA, 552 bp, Zea Mays
ctctgtcttctagttggacgttttgcggaggcgatgctccttggggcacatggaggggttaatgtgtagcctgtgctcgataatactctcgctgactccgactaggtcgaacgatgataaggcgaagaaacatctttattttggcgtagatagtcaagcaagctggtctcctgctgtggggcgaggccttcaccgattaacacaacatgattgggtaggtctatgtcgaggggtaatttcttagccccttcgtcactttggatcagattttgctgtctgttggcctttgtcgcgtatctgggttatgcgtcagtgtgtttgcgtccaagcaatggacgttccactactcggggacaaagtctctctttatgttgagggccacctgctgatcgccaaagtcagtaatcactccgccaggtcctaggatcttcatgcataagtacaacccgtgaattactgcttcgaaggtgtttatagcccccttgactaggattgcattgtatgggtataccatgtcgatgacattgaaggtgatgtgctctgttggtgcat

SEQ ID NO: 73124 - DNA, 400 bp, Zea Mays
ttaagacataaatccccgaaggaaagcagccgagatacctcctaacccgaggcatctccccgatggtctccaacctcaggcaaatctccgcctcgcccgaagtcaccaccgctccgtccgtctcgcccgagccaatcccagacagataggacaaaggcgcccgaagactggcggggaacacttgcatttaatgcgcacacctaccccacgcagcggcacaggagcataatggctaacaagacaaaagtcatattcgggcggcgcaacatgattacaaccccgctgctgtatgcgcacgccgcctgccatcccccgatgggacatctaatacgacaggagaagcagaaccggccctcgggcgcaaatctccacctcgccagacgctgagtttggcctcggg

SEQ ID NO: 73125 - DNA, 393 bp, Zea Mays
gcttttgtgctctgtgctttctgtacatctatagttgggagcaaacgatcccgtttggcgcgttcgttcgatacccacacacaatcccccctccggactggttaaaatggttgaaaacgatctaaaaacatctaaaggctagtttagcaacctcattttatacagagtgtggttgctgcacttgggagccttggacaccagaatataagcgcttagggggtccttttatagccccaaatgagcacctagtcgttgccccttctttgtagaaaagtatgaacaactgcactgttcatatgggcagtggactagtccggtgcaccactggattgggtccacgtgtgtaacatcacaattttgaccccaaggttagaaaccctaaaactcctaaac

SEQ ID NO: 73126 - DNA, 428 bp, Zea Mays
atagaagcctgcatcgtgagtatttttcgtgctattttggctgcttgtattttgtttgcaatttaaaccttccttacttcaccgagtttaattgaattttgggctttggcattctagcatccattgtctaaatggccaaggagaagaagatcattgaccccacgctggctggattttacgaagctatggaaaaaaccaacatggagaaaatcaccaatgagatgttggctggaatatctgaaaattccagcgatagtgagagtttcgacgtggaaagtgggaatgaagatgtcgaagatcgtccatggagacaaagccatgttgtctttggaaagtctactattaaacaagggcagatcgaagcaatgagagacagatactttcatgacatttcaatcatgagagccagaggagagaataatgttcct

SEQ ID NO: 73127 - DNA, 507 bp, Zea Mays
ggaggattagccatagggaacaacaatcatttcgttaaaatccacaagtacgcatagcatacactggcagaggtccaagaagaaatatgatcgaagacaggtatacctagaagaccagctaagattcgaagattgcatgaaaaagctccccaagagaatcaaacgtgaagtttcccataaaaaccataagaacataccacataaatcccacacattataaatatccatgccgacaacccaagagccataagctcgaacagaggttgttgtggcagacaaaaagggcgccacaagcgcatcaccagaaagagttgttttgttgttatacataagtttgcaccaaaggttttccaccatcactggcacggttaaaactgccaggcccaagagaaaaggcaaaagccttacttcctagccggggcacgtgaccccgcatcatcttcagcgttagaatcatccctctgaacttcaggcttcctttgcatatcagtcctgctgctagaggaa

SEQ ID NO: 73128 - DNA, 584 bp, Zea Mays
gtctttttcgacatgttgcatcttagtttttgcgggggatttttgcagatatattacatggctccgcctcgttaaaaacctcaccacccaggaggaaaagagtgcggggctaaataatactgtttggtgaattacaagggcgcgtaggccctgaggatttaaacaaaaaaattgcggagattgtcaatattccaggaatggtctaggtcttcgccggatggcgttgttagcttgtatgcgctgggggacgcctttgacttgacgatgaatggaccctcccactttggctccagcttgccccgtgactctgtccgagtggttcggacgagtatgaggtctccttcggtgaattctcttgggacgactatgtgtcgcaccaggccttcgtttgagcttggtatgtgttgagggcctgcagggcgaagacgcggtctccgtcgatgaggtctttggacgttggttcgtctacgtcaaggacagttgatgcacttgttcgaggtgacccgtgctttatttcctgcttggtcatggcctccgatccatatagtagacgaaaaggagtgaatccagtctcctggcattcg

SEQ ID NO: 73129 - DNA, 499 bp, Zea Mays
ctcccccttttttaactaaatgatttcttcttgtttcatgtgaagcactccctctggaacatagtgttcacggaatgctagcttgaattcttccctggtgatttgatgttcggctggttgaattgctacaaaattcgcccaccatgtactggcaggccctctcagttgttgggcagcaaataatggcttctgtgtctccgtgcaacggaccaatccaaacttctgctccattactcttatccactcatcagcttcaagagggttttctgctttaacaaagagcaggggacgtgtctccagagaatttctggtatgtagtttcacgaggtgcttgcggaggaattctcctgccatgctgctggaactgattacccgccatctcatgcaagaagcgggtattatatgtagtagcattgaccaaggcaccgatagcctcggccagtgtcggtggtaccggcggcggattaggattatcttcccgaccatgggaagtccccgc

SEQ ID NO: 73130 - DNA, 441 bp, Zea Mays
caaatttttcagaggtgtgccttgggtaatttggctcccttttgtcaattggaccatatggatttggcgctagcaactaagtgaacatctgtgatctttggaagagggctggtttttaacttagagaaaatttggttgctcttgagttctcttcacttgggggctgaatttgagaattttgtgggacccttttggaataccttacttactacttcttgtagatatataattgtacttcaactttggtaaagggtttaagtcatgaaatggtcatttgcatagctttcccactaatcccatgcttggaggtccaatggctcaagagggggtctagggtgtgagcatctttttccaaggtgaagatgcttgaaaatcttgggtattttcttttgtcatgatcattccttaattaatccatggtttctaaagttttggtgtccc

SEQ ID NO: 73131 - DNA, 522 bp, Zea Mays
tggaactgttggcccgggatcaatggcaactgaaactgtccaagtgttcttttgctaactcatagatgtcgtacttgggtcatctcatttcagcatctggggtggcaactgacccagccaagatacagacggtggcagcctggacttcacccacaacagtgaaggagcttcgtagtttcttggggttgttagggtactaccgtcgatttatgaagcattttagcctcattgctaaaccgttaacaacactacttaagaaaggggtcttgtatgtatgaaccactgctcatgaggaagcatttaaggctttgaagcaggctcttgtcaccgttccaatgctcgcattgcccaatttcacattaaccttttgtctccagacagatgcaagtgccttgggagtgggtgctgttttaatgcagtccggacacccaatagcttatttgagcaaggctttgggaactaaatctcaagggttgtccacatatgagaaagaatatctgacaattctggttgctatagatc

SEQ ID NO: 73132 - DNA, 505 bp, Zea Mays
cagtgagccagaaaatcagatgtacatatgtgtgttgtgcgtaccttggagaacgtaggcgagtcggagtagccagagagcgccaggccaccgacggcgagcaaatccaccaccgctatcgcttgagaggtctcggtatgactttttgtagccaggttggtgggcggattaggatgagtaaaacggctccaccccgtagctactgaaactgctttctccgtcccttacggagcggcgtgcatgggttgttgggctccagtcgcggtgcatttggcacgggctcacttgccatgtcggttgttgctatgaacggaagacatggtgtgcgtgagtttgtcattatgtgggtgactgaggcgctcgtgcggggcgtggattcgctgaggatggggagtggacggacgaattggattagatgtgattgatgtgaagagaatagtctgaggggccatttcaaacaatagaaggggttatttataaaaatatgacgtgggacgaatcgtca

SEQ ID NO: 73133 - DNA, 606 bp, Zea Mays
caaaagcattgttaatagcatctgattcttgtgccattacttttcatctcaggttctttgtgcttgttagattttttggtgtaggcaatctgcctattagtgtgcttcaaagtccattctgttttatttcctttagagcacatactgaaaatggatgctgaagatatgtgtgctctgttatgtgtttcatttccttcagagactatacaatcatgacagtttgagatgattgacttcagagaccagaatctcctagttttaataacgattatcagttgcaacagagaaattcaaggcctcgcaataatgcccatttctcattttatcatttgattgttcctctttttcccttgagaggttgctaataattctctctgaaagtaacccctcgtccattgctatccttatgaaataaattcaccctggtagttacaaacacttactttcttgttctttgcagcttgtcatgttcacattccacatcgtgatttcaaatgattttctttcttagtttgaaaatgggctatttgctgaacattcgttgtatgctgatgccttacgtcaggcattgtcatttggcttctatcaccagtatgtgcataaaat

SEQ ID NO: 73134 - DNA, 435 bp, Zea Mays
gtgattgcgatttggagatttgtggtttacgattcatatgagttggtcgatgcgcgaatatacttgtgaatctgtgggtttataaaatgttgtagtatatgttatgtctcggattgcggcaataaaaggcaagttgacgtgtatgttatttagcggcgatgtcattgctctagttaaccaaattgttagatggcgtggttaagctcgtaatcacggtgaattgcttgttgtagtttacatatgtatggttacggtcgcgggtaaaaagtagtagtgttcatatgctgtctacgttaaaatgcaaattattgtgtgaacaacatttcgatatcgactatcggggagaatgtgttgttaattaaatatggtacttctagtgctcataatgacacagataaaaattagtaagtccacttgttagttctcacttggtta

SEQ ID NO: 73135 - DNA, 454 bp, Zea Mays
ggcggggctccagcctcctcgtcctcatcggtgctcctctttctgttcgtccttatgggctcgtctccgtttgttgattcgtctgtcgatccttctcgccttgaggccaacttctcccttttataggctaggaccggggtcgacgagcggtggcttcgctgggaaggagttgtaaggcaagggtaaaaccagcgttttaccttgtatgagtccacgcgtacttgtggggcccaaggctgtttgggtcgggatgtagcatcaggtttgttgcagcctcgtagtctaagtcacaatgtaccttccttttccttttcctttttaccatgcaagatgaatgaaacaagtttttaagacctaattatctccatattagcttatctggcatatctatgagttgcatgtgtatggttaatttagtaacttatattatatcaataaatagattaaacaaagt

SEQ ID NO: 73136 - DNA, 1992 bp, Zea Mays
gagtggatatttattcttgatagtcacttgattcaaagcgtgataatccacacatagccgctttcttttatccttcttctcaacaaacaatactggggaagcccatggagacctgctaggcctaattaaacccttagccagcaaatcatccaattgtcgcttcaattcaacctgctcctttggggccattcgatacggagccttatgaatgggctgtgtacccggaatcagcttaatctcaaaagctgcatcgcgttccagaggaatgcttggaagctctgtcggaaacacgttagcaaagtcacacaccactcggatgtcctgcacccgcaaggcagcctcaccctccaccaccatggagaaaaagattcccgacttcctggaccggtgatccggaagcaattgcgccaacaaggacaacgtaaacttaggggaacttcccaagaataccacctccctacctgacggcgcctgcaataacactgtcttccaaaaacaggatataactgtgcgatactgggataaccaatccatacccaagataacatcgaatgcccccaaggaaatcacaaccagattggccgaaaagacctcatcagcaagaatgacggaacacccctgacaaactgaacagctactaatggagccattagcaaaactaaccaaaattttgtgacccaacctctgcaccaaaagaccagcctgcgacacaaaatcctctgaaacaaacgaatagctagcgccagagtcaaaaagagcatgggccacaaacgaatcaattgaaatcgtacctgtcaccacgtctccttgctctctgccatccgcagcgggtagcacataagccccggaaataccagcagaagaggaagctcccggagtgaaattaacagaagaaccccactgagccgccgggtgaggcagacgcggagctccaaactgagacggcataggagtagtcagtgcaggagtaggtgcagccagatactgaggaaaaccctgcatcggcatgaactgagaagtcccaggcacataaaactgctgtggaggaagtggaactgaaaactgctgctcaacacttgacatcatgttgatagtgccctgagaagaggaggaagtcaccggctcccatctgagcttcccattaggattcctcctacacaccacatccttgtggtcctgactgcagatagaacacctgccactccactagcactctgcacggtgatgcgcatcaccacaacggaaacacaccagccctagcccgggcttaggaacagcccgaaacctctgagtacttcctcccgaagtacccaagtcagaagatttgccacggtaaggatggtggcgctgatgctgagacttgcccctcttgtgggctagacctccagtgttgcccctcctcgcatcctggccacgaagctgatcaacacccgaagacttctgcgactccatggtatactgatgctgcatctccacacccagtgcctgctccactgtagtacggaagtccaccaatggaaaggctcccaaggcatgcctgatagaatgtttcaggccctgatggaactggctcgccttctccatctcattaaaagccacatgagggacaaagcggaccatcttgttgaagcccacttcatactatgtgacagacttcttctcttgcttgaaagactgcaaaccaatcttcattttctctaggaaggtgaccgggtagaacctcctttcaaactgcctgatgaagacatcccaagtcatgactcctgctgaggaggagtgcgctgcctgcacgcctctccaccaaatttgagcctctcccttcagcagctgtgtgccaaagcgaacacgatcaccatacacaatctcaaagacattcatcttatcctccatgtaagttagccaatctgccgccttgaccggagtaccactgccatcaaaagcatccagcttcatgcccatccactgcatcagagaaagaccactgactggaag

SEQ ID NO: 73137 - DNA, 473 bp, Zea Mays
cctacttatcatatggataaatctcattagttctctaattcgatggacgttaacattaaaaccatcattagggtttgattgcactcacaaatttagattagatggatgttgtttatcgtctaggaataaaaaatcagacacatgcaaggacaatcctgtgcctccaacaaaactgtaaattaaacggtgccaacttagaatgcaggatacaaccaacccatccctatgttctgaaaccacaaaaaaacctgctactagagtttaagttttgagctaaacttagattaaagcacgtactcatagggacttttatcactaaacagatactcgggctcggagatattaaagttaggttgtgaatgtactgtacatgcattttgttgaaagaaggacacgtgtgctggctgaaattgcttgaagaacagcaccaccgacctctgttcacgttcagtcaatcggcttcagaccgcggg

SEQ ID NO: 73138 - DNA, 439 bp, Zea Mays
agacagtctccaattccatctaagcatgagtattttgtaacatcgaccaatacaagaaaaatatataaccaatttctaaacaaccacccagatagcaacaaatgatcactatgtcaactatgtcagaaattgttgaatggttttggggaggcttcaggactggtaactaatgttaacaaatgtagtttgacgcctattcactgtaatgatcaacatattgggattacacaggagatgtttccctgccgtctggtggatttcccttgcaagtatctgggactccctctatatgttaaaaaacttcctaagaatgtttttctagagcttatagataaggtggctgataaattgcctaggtgttaatctgcatgcttactcctgcagggagattgactttggtcaaatccgttctcactgccattccaatatatcatctcat
